(19) United States
(12) Patent Application Publication
(10) Pub. No.: US 2026/0152767 A1
(43) Pub. Date: Jun. 4, 2026

(54) COMPOSITIONS, METHODS, AND SYSTEMS FOR DNA MODIFICATION

(71) Applicant: The Trustees of Columbia University in the City of New York, New York, NY (US)

(72) Inventors: Samuel Henry Sternberg, New York, NY (US); Tanner Wiegand, New York, NY (US); Florian T. Hoffmann, New York, NY (US); Matthew Walker, New York, NY (US)

(21) Appl. No.: 19/462,506

(22) Filed: Jan. 28, 2026

Related U.S. Application Data
(63) Continuation of application No. PCT/US2024/040027, filed on Jul. 29, 2024.
(60) Provisional application No. 63/516,382, filed on Jul. 28, 2023.
(60) Provisional application No. 63/604,616, filed on Nov. 30, 2023.

(51) Int. Cl. C12N 15/90; C12N 9/22; C12N 15/11

(52) U.S. Cl. CPC C12N 15/907; C12N 9/224; C12N 15/11; C12N 2310/20; C12N 2800/90

(57) ABSTRACT

Provided herein are compositions, methods, and systems for DNA modification. In particular, provided herein are compositions, and systems comprising TnpB-like nuclease-dead repressors (dTnpB/TldRs), dCas12f or dCas12f-like proteins, and/or a TnpB-transposase fusion proteins and methods using thereof.

### CROSS-REFERENCE TO RELATED APPLICATIONS

[0001] This application is a continuation of PCT International Application No. PCT/US2024/040027, filed Jul. 29, 2024, which claims the benefit of U.S. Provisional Application Nos. 63/516,382, filed Jul. 28, 2023, and 63/604,616, filed Nov. 30, 2023, the contents of which are herein incorporated by reference in their entirety.

### STATEMENT REGARDING FEDERALLY SPONSORED RESEARCH OR DEVELOPMENT

[0002] This invention was made with government support under 2239685 awarded by the National Science Foundation. The government has certain rights in the invention.

### FIELD

[0003] The present disclosure relates to compositions, methods, and systems for DNA modification. In particular the present disclosure provides compositions, and systems comprising TnpB-like nuclease-dead repressors (dTnpB/TldRs), dCas12f or dCas12f-like proteins, and/or TnpB-transposase fusion proteins and methods using thereof.

### SEQUENCE LISTING STATEMENT

[0004] The content of the electronic sequence listing titled COLUM_42528_601_SequenceListing.xml (Size: 8,375,143 bytes; and Date of Creation: Jul. 29, 2024) is herein incorporated by reference in its entirety.

### BACKGROUND

[0005] DNA transposition is a ubiquitous phenomenon occurring in all kingdoms of life during which discrete segments of DNA called transposons move from one genomic location to another. Insertion sequences (IS) are the simplest autonomous transposable elements. While they tend to be short (<2.5 kb) and carry only those genes needed for transposition, if placed flanking a DNA segment, many are able to mobilize the intervening genes. ISs can be classified into groups or families based on the general features of their DNA sequences and associated transposases. Insertion sequences of IS200/IS605 family contain the genes for their transposition and its regulation: a TnpA transposase, which is essential for mobilization, and an accessory gene, e.g., TnpB or IscB, which are evolutionary ancestors to CRISPR-Cas9 and Cas12 enzymes. These transposon components offer an expansion on genome editing options.

### SUMMARY

[0006] Disclosed herein are engineered systems comprising a TldR protein, or one or more nucleic acids encoding thereof; and at least one guide RNA, or one or more nucleic acids encoding thereof, wherein the at least one guide RNA is complementary to at least a portion of a target nucleic acid. In some embodiments, the system is a cell-free system.

[0007] In some embodiments, the TldR protein comprises an amino acid sequence having at least 70% identity to any of SEQ ID NOs: 1-508 and 1768-5926. In some embodiments, the TldR protein comprises an amino acid sequence as shown in the Table below or Table 5. In some embodiments, the TldR protein comprises an amino acid sequence of SEQ ID NOs: 1-508 and 1768-5926. In some embodiments, the TldR protein is linked or fused to one or more effector polypeptides.

[0008] In some embodiments, the at least one guide RNA is provided on an omega RNA.

[0009] Also disclosed herein are engineered systems comprising a dCas12f or dCas12f-like protein, or one or more nucleic acids encoding thereof; and at least one guide RNA, or one or more nucleic acids encoding thereof, wherein the at least one guide RNA is complementary to at least a portion of a target nucleic acid. In some embodiments, the system is a cell-free system.

[0010] In some embodiments, the dCas12f or dCas12f-like protein comprises an amino acid sequence having at least 70% identity to any sequence in Table 7. In some embodiments, the dCas12f or dCas12f-like protein comprises an amino acid sequence having at least 70% identity to any of SEQ ID NOs: 6026-6042. In some embodiments, the dCas12f or dCas12f-like protein comprises an amino acid sequence of SEQ ID NOs: 6026-6042. In some embodiments, the dCas12f or dCas12f-like protein is linked or fused to one or more effector polypeptides.

[0011] In some embodiments, the engineered system further comprises an RpoE protein. In some embodiments, the RpoE protein comprises an amino acid sequence having at least 70% identity to any of SEQ ID NOs: 6043-6059. In some embodiments, the RpoE protein comprises an amino acid sequence of SEQ ID NOs: 6043-6059. In some embodiments, the RpoE protein is linked or fused to one or more effector polypeptides.

[0012] Also disclosed herein are engineered systems comprising a TnpB-transposase fusion protein, or one or more nucleic acids encoding thereof; and at least one guide RNA, or one or more nucleic acids encoding thereof, wherein the at least one guide RNA is complementary to at least a portion of a target nucleic acid. In some embodiments, the system is a cell-free system.

[0013] In some embodiments, the TnpB-transposase fusion protein comprises an amino acid sequence having at least 70% identity to any of SEQ ID NOs: 1453-1539. In some embodiments, the TnpB-transposase fusion protein comprises an amino acid sequence of SEQ ID NOs: 1453-1539. In some embodiments, the dCas12f or dCas12f-like protein is linked or fused to one or more effector polypeptides.

[0014] In some embodiments, the system further comprises a donor nucleic acid, wherein the donor nucleic acid comprises a cargo nucleic acid sequence flanked by at least one transposon end sequence. In some embodiments, the system further comprises a target nucleic acid.

[0015] In some embodiments, the systems further comprise a target nucleic acid.

[0016] Also disclosed herein are protein conjugates comprising a TldR protein and one or more effector polypeptides. In some embodiments, the TldR protein comprises an amino acid sequence having at least 70% identity to any of SEQ ID NOs: 1-508 and 1768-5926. In some embodiments, the TldR protein comprises an amino acid sequence of SEQ ID NOs: 1-508 and 1768-5926. In some embodiments, the TldR protein is linked or fused to one or more effector polypeptides. In some embodiments, the TldR protein is separated from the one or more effector polypeptides by a linker.

[0017] Also disclosed herein are protein conjugates comprising a dCas12f or dCas12f-like protein and one or more effector polypeptides. In some embodiments, the dCas12f or dCas12f-like protein comprises an amino acid sequence having at least 70% identity to any sequence in Table 7. In some embodiments, the dCas12f or dCas12f-like protein comprises an amino acid sequence having at least 70% identity to any of SEQ ID NOs: 6026-6042. In some embodiments, the dCas12f or dCas12f-like protein comprises an amino acid sequence of SEQ ID NOs: 6026-6042. In some embodiments, the dCas12f or dCas12f-like protein is linked or fused to one or more effector polypeptides. In some embodiments, the dCas12f or dCas12f-like protein is separated from the one or more effector polypeptides by a linker.

[0018] Further disclosed are compositions and cells comprising an engineered system or protein conjugate as described herein. In some embodiments, the cell is a prokaryotic cell. In some embodiments, the cell is a eukaryotic cell. In some embodiments, the cell is a mammalian cell. In some embodiments, the cell is a human cell.

[0019] Additionally disclosed are methods for DNA modification comprising contacting a target nucleic acid sequence with a system or protein conjugate as described herein. In some embodiments, the target nucleic acid sequence is flanked on the 5′ end by a transposon-adjacent motif (TAM) sequence.

[0020] Additionally disclosed are methods for nucleic acid modification and integration. In some embodiments, the methods comprise contacting a target nucleic acid with a system, or composition thereof, as disclosed herein.

[0021] In some embodiments, the target nucleic acid sequence is in a cell. In some embodiments, contacting a target nucleic acid sequence comprises introducing the system into the cell. In some embodiments, the cell is a prokaryotic cell. In some embodiments, the cell is a eukaryotic cell (e.g., a mammalian cell, a human cell).

[0022] In some embodiments, introducing the system into the cell comprises administering the system to a subject. In some embodiments, administering comprises in vivo administration. In some embodiments, the administering comprises transplantation of ex vivo treated cells comprising the system.

[0023] Also provided are methods for treating a disease or disorder in a subject comprising administering to the subject in need thereof a system, or composition thereof, as described herein. In some embodiments, the subject is human. In some embodiments, the system or composition comprises a donor nucleic acid encoding a therapeutic gene product or a wild-type or corrected version of a disease-associated gene.

[0024] Further provided are methods for inactivating a microbial gene, the method comprising introducing into one or more cells a system, or a composition thereof, as described herein. In some embodiments, the gRNA is specific for a target site that is proximal to the microbial gene and the system or composition modifies the microbial gene. In some embodiments, the system or composition inserts a donor nucleic acid within the microbial gene. In some embodiments, the microbial gene is a bacterial antibiotic resistance gene, a virulence gene, or a metabolic gene. In some embodiments, the one or more cells are bacterial cells.

[0025] Additionally provided are methods for modifying a target nucleic acid in a plant cell comprising providing to the plant, or a plant cell, seed, fruit, plant part, or propagation material of the plant a system, or a composition thereof, as described herein. In some embodiments, the system or composition inserts a donor nucleic acid within the target nucleic acid. In some embodiments, the donor nucleic acid comprises a gene product.

[0026] Other aspects and embodiments of the disclosure will be apparent in light of the following detailed description and accompanying figures.

### BRIEF DESCRIPTION OF THE DRAWINGS

[0027] FIGS. 1A-1D show bioinformatic identification of naturally occurring, nuclease-deficient TnpB homologs. FIG. 1A, Canonical TnpB proteins are encoded by bacterial transposons known as IS elements, and exhibit RNA-guided nuclease activity that maintains transposons at sites of excision during transposition (left). Domestication of mpB genes led to the evolution of diverse CRISPR-associated cas12 derivatives, with diverse functions and mechanisms (right). LE, transposon left end; RE, right end; ωRNA (SEQ ID NO: 1540), transposon-encoded guide RNA; crRNA, CRISPR RNA. FIG. 1B, Phylogenetic tree of TnpB proteins, with previously studied homologs and newly identified TnpB-like nuclease-dead repressor (TldR) proteins highlighted. The rings indicate RuvC DED active site intactness (inner), TnpA transposase association (middle) and protein size (outer). FIG. 1C, Multiple sequence alignment of representative TnpB and TldR sequences (SEQ ID NOs: 1541-1562), highlighting deterioration of RuvC active site motifs and loss of the C-terminal Zinc-finger (ZnF)/RuvC domain. FIG. 1D, Empirical (DraTnpB) and predicted AlphaFold structures of TnpB and TldR homologs marked with an asterisk in FIG. 1C, showing progressive loss of the active site catalytic triad.

[0028] FIGS. 2A-2C show tldR genes are strongly associated with diverse non-transposon genes and encoded in prophages. FIG. 2A, Genomic architecture of well-studied transposons that encode TnpB (top), and of novel regions that encode TldR proteins (bottom) in association with prophage-encoded fliC_{P} (left), oppF and ABC transporter operons (middle), and a transcriptional regulator (csrA) of an accompanying fliC (right). FIG. 2B, Comparison of a representative fliC_{P}-tldR locus with a closely related Enterobacter kobei strain reveals that the entire locus is encoded within the boundaries of the prophage element, with identifiable recombination sequences (attL/attR/attB). FIG. 2C, Phylogenetic tree of fliC_{P}-associated TldR proteins from FIG. 2A, together with closely related TnpB proteins that contain intact RuvC active sites. The rings indicate RuvC DED active site intactness (inner), prophage association (middle), fliC_{P} association (middle), and TldR/TnpB domain composition (outer). Prophage association was defined as true if the homolog was encoded within 20 kbp of five or more genes with a phage annotation; fliC_{P} association was defined as true if the homolog was encoded within three ORFs of a fliC homolog. Homologs marked with a blue square (TnpB) or green circle (TldR) were tested in heterologous experiments.

[0029] FIGS. 3A-3G show TldR proteins are encoded next to gRNAs that target conserved genomic sites. FIG. 3A, Bioinformatic strategies to investigate tldR/tnpB loci, including comparative genomics, searching within the ISfinder database, gRNA prediction using covariance models, and target prediction using BLAST. FIG. 3B, Representative tnpB locus and an isogenic locus above that lacks the IS element. Comparison of both sequences reveals the putative TAM recognized by TnpB, which flanks the transposon LE, and the guide portion of the ωRNA, which flanks the transposon RE. Isogenic sequence, SEQ ID NO: 1563; tnpB locus SEQ ID NOs: 1564 and 1565. FIG. 3C, Schematic of a representative fliC_{P}-tldR locus from Enterobacter cloacae (top), and bioinformatics approach to predict the gRNA sequence using both CM search and comparison to related tnpB loci (SEQ ID NOs: 1566-1570). This analysis identified the putative scaffold and guide portions of TldR- and TnpB-associated gRNAs (bottom). FIG. 3D, Analysis of the guide sequence (SEQ ID NO: 1571) from the EclTldR-associated gRNA in FIG. 3C revealed a putative genomic target near the predicted promoter of a distinct (host) copy of fliC located ˜1 Mbp away (middle). The magnified schematic at the bottom shows the predicted TAM and gRNA-target DNA base-pairing interactions relative to the fliC start codon (SEQ ID NO: 1572 and 1573). FIG. 3E, Annotated −10 and −35 promoter elements upstream of fliC recognized by FliA/σ²⁸ in E. coli K12; SEQ ID NO: 1574 (top), and WebLogos of predicted guides and genomic targets associated with diverse fliC_{P}-associated TldRs from FIG. 2C (bottom). FIGS. 3F-3G, Published RNA-seq data for Enterobacter cloacae (FIG. 3F) and Enterococcus faecalis (FIG. 3G) reveal evidence of native tldR and gRNA expression for fliC_{P}- and oppF-associated TldRs, respectively. The predicted gRNAs from CM analyses are indicated; unique genome-mapping reads are shown as overlays of three replicates.

[0030] FIGS. 4A-4H show TldRs are RNA-guided DNA-binding proteins capable of programmable transcriptional repression. FIG. 4A, RNA immunoprecipitation sequencing (RIP-seq) data from a fliC_{P}-associated TldR homolog from Enterobacter hormaechei (EhoTldR) reveals the boundaries of a mature gRNA containing a 16-nt guide sequence. Reads were mapped to the TldR-gRNA expression plasmid (SEQ ID NOs: 1575 (left) and 1576 (right)); an input control is shown. FIG. 4B, Schematic of chromatin immunoprecipitation DNA sequencing (ChIP-seq) approach to investigate RNA-guided DNA binding for TldR candidates (top), and representative ChIP-seq data for four homologs revealing strong enrichment at the expected genomic target site and a prominent off-target (bottom). FIG. 4C, Magnified view of ChIP-seq peaks at the labeled off-target site in FIG. 4B, which corresponds to a TAM and partially matching target sequence at the promoter of E. coli K12 fliC (SEQ ID NOs: 1577 and 1578). FIG. 4D, Analysis of conserved motifs bound by the indicated TldR homolog using MEME ChIP, which reveals specificity for the TAM and a ˜6-nt seed sequence (SEQ ID NO: 1579 shown below). The number of peaks and percentage of total called peaks contributing to each motif is indicated; low occupancy positions were manually trimmed from motif 5′ ends. FIG. 4E, Schematic of E. coli-based plasmid interference assay using pEffector and pTarget (left), and bar graph plotting surviving colony-forming units (CFU) for the indicated conditions and proteins (right). TnpB nucleases cause robust cell death, whereas TldR homologs have no effect on cell viability, indicating a lack of DNA cleavage activity. EV, empty vector; M, TnpB mutant; NT, non-targeting guide; T, targeting guide. Bars indicate mean+s.d. (n=3). FIG. 4F, Alternative models of TldR-mediated transcriptional repression by blocking either transcription initiation or elongation by RNAP (blue). FIG. 4G, Schematic of RFP repression assay in which gRNAs were designed to target either the top or bottom strand of a promoter driving rfp expression (left), and bar graph plotting normalized RFP fluorescence for the indicated conditions. EV, empty vector; NT, non-targeting guide; Top/Btm, gRNA targeting the top or bottom strand. Bars indicate mean±s.d. (n=3). FIG. 4H, Experiments and data shown as in FIG. 4G, but with guides targeting the top/bottom strand within the 5′ UTR, downstream of the promoter. Results with nuclease-dead dCas12 and dCas9 are shown for comparison. Bars indicate mean±s.d. (n=3 for TldR; n=6 for dCas12/dCas9).

[0031] FIGS. 5A-5K show flagellin-associated TldRs repress host flagellin gene expression in native clinical Enterobacter strains. FIG. 5A, Schematic of the flagellar assembly spanning the inner membrane (IM), cell wall (CW), and outer membrane (OM). The flagellin (FliC), hook (FlgE), stator-interacting (FliL), and flagellar cap (FliD) proteins are indicated. FliC filaments typically comprise several thousand subunits, are 5-20 μm in length, and are known receptors of flagellotropic phages. FIG. 5B, Surface representation of E. coli FliC (PDB: 7SN4) colored by domains, showing both a single monomer and filament cross section (left). Surface representations of ColabFold-predicted prophage FliC_{P} (middle) and host FliC (right) structures from Enterobacter cloacae, colored with AL2CO conservation scores calculated from the multiple sequence alignment (MSA) shown in FIG. 5C. FIG. 5C, MSA of TldR-associated FliC_{P} and TldR-targeted FliC proteins, showing the strongly conserved DO-1 domains and hypervariable D2-3 domains. FIG. 5D, Schematic of Enterobacter strains selected for RNA-seq analysis (top), and expression data plotted as transcripts per million (TPM) for fliC_{P} (when present) and host fliC and flil). The presence/absence of fliC_{P}-tldR loci is indicated below the graph. Bars indicate mean±s.d. (n=3). FIG. 5E, Schematic of Enterobacter cloacae mutants generated by recombineering (left), and RT-qPCR analysis of host fliC expression levels normalized to the WT strain with cmR marker. Any deletion of tldR or substitution with a non-targeting (NT) gRNA leads to fliC de-repression. Bars indicate mean±s.d. (n=3). FIG. 5F, RNA-seq coverage at the host fliC locus for the indicated strains in e, showing de-depression with the NT-gRNA. FIG. 5G, Volcano plot showing differential gene expression analysis for the WT and NT-gRNA strains in FIG. 5F. Genes with a log 2 (fold change) ≥1 and an adjusted p-value <0.05 are highlighted in red. FIG. 5H, Magnified view of data in FIG. 5F, showing the TAM/target overlap with predicted FliA/σ²⁸ promoter elements inferred from E. coli K12 data. FIG. 5I, Predicted AlphaFold structure of TldR bound to target DNA (left) compared to experimental structure of RNAP (grey) and FliA/σ²⁸ (green) bound to promoter DNA (right). FIG. 5J, Comparison of promoter motifs for host fliC and prophage fliC_{P} alongside the FliA/σ²⁸ motif from Tomtom analysis. This analysis suggests that fliC_{P} is expressed similarly as fliC, while harboring conserved mutations (red) in the TAM and seed sequence that preclude self-targeting by its associated TldR. FIG. 5K, Model for the role of TldR in RNA-guided repression of host fliC upon temperate phage infection, leading to the selective expression and generation of phage-encoded flagellin (FliC_{P}) filaments.

[0032] FIGS. 6A-6C show phylogeny and RuvC nuclease domain analysis of oppf-associated TldRs. FIG. 6A, Phylogenetic tree of oppF-associated TldR proteins from FIG. 2A, together with closely related TnpB proteins that contain intact RuvC active sites. The rings indicate RuvC DED active site intactness (inner) and TldR/TnpB domain composition (outer). Homologs marked with an orange square (TnpB) or purple circle (TldR) were tested in heterologous experiments. FIG. 6B, Multiple sequence alignment of representative TnpB and TldR sequences from FIG. 6A, highlighting deterioration of RuvC active site motifs and loss of the C-terminal Zinc-finger (ZnF)/RuvC domain. SEQ ID NO: 1580-1607. FIG. 6C, Empirical (DraTnpB) and predicted AlphaFold structures of TnpB and TldR homologs marked with an asterisk in FIG. 6B, showing progressive loss of the active site catalytic triad.

[0033] FIGS. 7A-7C show diverse prophages encode fliC_{P}-associated tldR genes. FIG. 7A, Genomic architecture of representative prophage elements whose boundaries could be identified by comparing to closely related isogenic strains. In each example, the prophage-containing strain is shown above the prophage-less strain, with species/strain names and NCBI genomic accession IDs indicated. Sequences flanking the left (5′) and right (3′) ends are highlighted in purple and yellow, respectively, together with their percentage sequence identifies calculated using BLASTn. FIG. 7B, Alignment of distinct prophage elements, constructed using Mauve. Empty boxes represent open reading frames, and windows show sequence conservation for regions compared between prophage genomes with lines. Putative gene functions are shown below sequence conservation windows for the fliC_{P}-tldR-encoding prophage from Enterobacter AR_163 (bottom). FIG. 7C, DNA sequence identities between the prophages in FIG. 7A, calculated with BLASTn. Identities were calculated as total matching nucleotides across the two genomes being compared, divided by the length of the query prophage genome.

[0034] FIGS. 8A-8C show RIP-seq reveals that some oppF-associated TldR proteins use short, 9-11-nt guides. FIG. 8A, RNA immunoprecipitation sequencing (RIP-seq) data for an oppF-associated TldR homolog from Enterococcus faecalis (Efa1TldR) reveals the boundaries of a mature gRNA containing a 9-nt guide sequence. Reads were mapped to the TldR-gRNA expression plasmid (SEQ ID NOs: 1608 (left) and 1609 (right)); an input control is shown. FIG. 8B, Published RNA-seq data for Enterococcus faecalis V583 reveals similar gRNA boundaries, including an ˜11-nt guide. SEQ ID NOs: 1610 (left) and 1611 (right). FIG. 8C, RIP-seq data as in FIG. 8A for a second biological replicate of FfaITldR, further corroborating the observed ˜9-11-nt guide length. SEQ ID NOs: 1612 (left) and 1613 (right).

[0035] FIGS. 9A-9E show oppF-associated TldRs target conserved genomic sequences that overlap with promoter elements driving oppA expression. FIG. 9A, Schematic of original (left) and new (right) search strategy to identify putative targets of gRNAs used by oppF-associated TldRs. Key insights resulted from the use of TAM and a shorter, 9-nt guide. FIG. 9B, Analysis of the guide sequence from the Efa1TldR-associated gRNA in FIG. 8 revealed a putative genomic target near the predicted promoter of oppA encoded within the same ABC transporter operon immediately adjacent to the tldR gene. The magnified schematics at the bottom show the predicted TAM and gRNA-target DNA base-pairing interactions for two representatives (Efa1TldR and EceTldR), in which the gRNAs target opposite strands. Promoter elements predicted with BPROM are shown as brown squares. SEQ ID NOs: 1614-1619, top to bottom in schemes. FIG. 9C, WebLogos of predicted guides and genomic targets associated with diverse oppF-associated TldRs highlighted in FIG. 18A. FIG. 9D, Schematic of the oppF-tldR genomic locus (left) alongside the predicted function of OppA as a solute binding protein that facilitates transport of polypeptide substrates from the periplasm to the cytoplasm, in complex with the remainder of the ABC transporter apparatus. CM, cell membrane. FIG. 9E, Published RNA-seq data for Enterococcus faecium AUS0004 (Michaux, C. et al. Front Cell Infect Microbiol 10, 600325 (2020)), highlighting the oppA transcription start site (TSS). The predicted gRNA guide sequence (grey; SEQ ID NO: 5927) is shown beneath the putative TAM (yellow) and target (purple) sequences (in SEQ ID NO: 1620), with guide-target complementarity represented by grey circles.

[0036] FIG. 10 shows oppF-associated TldR homologs may target additional sites across the genome. Schematic of Enterococcus cecorum genome and inset showing the oppf-tldR locus (top), with additional putative targets of the gRNA, other than the oppA promoter, numbered and highlighted in yellow along the genomic coordinate. A magnified view for each numbered target is shown below, with TAMs in yellow, prospective targets in purple, and TldR gRNA guide sequences in grey. Grey circles (right) represent positions of expected guide-target complementarity. SEQ ID NOs: 1621-1634, top to bottom.

[0037] FIGS. 11A-11B show that genome-wide binding data from ChIP-seq experiments suggests a high mismatch tolerance for some TldR homologs. FIG. 11A, Genome-wide ChIP-seq profiles for the indicated fliC_{P}-associated TldR homologs, normalized to the highest peak within each dataset. The magnified insets at the bottom show the off-target sequences (grey; SEQ ID NOs: 1635 and 1637) compared to the intended (engineered; SEQ ID NOs: 1636 and 1638) on-target sequence (purple), with TAMs in yellow. Off-target #3 has no clear TAM-flanked off-target sequence but is intriguingly located at a tRNA locus, and binding was observed for diverse fliC_{P}- and oppF-associated TldRs that recognized distinct TAMs. The phylogenetic tree at right indicates the relatedness of the tested and labeled homologs. FIG. 11B, Results for the indicated oppf-associated TldR homologs, shown as in FIG. 11A. Off-target sequences (grey; SEQ ID NOs: 1639, 1641, and 1643) and intended (engineered; SEQ ID NOs: 1640, 1642, and 1644)

[0038] FIGS. 12A-12D show plasmid interference assays confirming that TldR homologs lack detectable nuclease activity. FIG. 12A, Schematic of E. coli-based plasmid interference assay using pEffector and pTarget. FIG. 12B, Representative dilution spot assays for GstTnpB3 and synthetically inactivated RuvC mutant (D196A), showing the entire plate (left) and the magnified area of plating. Transformants were serially diluted, plated on selective media, and cultured at 37° C. for 16 h. Colony visibility was enhanced by inverted the colors and increasing contrast/brightness. FIG. 12C, Dilution spot assays for the indicated fliC-associated TldR homologs and closely related TnpB homologs. Non-targeting (NT) gRNA controls are shown at the bottom, and the phylogenetic tree indicates the relatedness of the tested proteins. FIG. 12D, Results for the indicated oppF-associated TldR and TnpB homologs, shown as in FIG. 12C.

[0039] FIGS. 13A-13B show RFP repression assays reveal variable abilities of TldR homologs to block transcription elongation. FIG. 13A, Schematic of RFP repression assay adapted from FIG. 4G (left), in which gRNAs were designed to target either the top or bottom strand within the 5′ UTR of RFP, downstream of the promoter. The phylogenetic trees (right) indicate the relatedness of the tested and labeled homologs. FIG. 13B, Bar graph plotting normalized RFP fluorescence for the indicated conditions and TldR homologs. EV, empty vector; NT, non-targeting guide. Bars indicate mean±s.d. (n=3).

[0040] FIGS. 14A-14C show Enterobacter RNA-seq data confirming the native expression of gRNAs from fliC_{P}-tldR loci. FIG. 14A, RNA-seq read coverage from three Enterobacter strains that natively encode fliC_{P}-tldR loci, revealing clear peaks associated with mature gRNAs containing ˜95-97-nt scaffolds (SEQ ID NOs: 1645-1647 shown top, left to right) and 16-nt guides (SEQ ID NO: 1648-1650 shown bottom, left to right). Data from three biological replicates are overlaid. FIG. 14B, Predicted secondary structure and sequence (SEQ ID NO: 1651) of the gRNA associated with EhoTldR. FIG. 14C, Multiple sequence alignment of the DNA encoding gRNA scaffold sequences for representative fliC_{P}-associated TldRs, with conserved positions colored in darker blue (SEQ ID NOs: 1652-1658).

[0041] FIGS. 15A-15E show Enterobacter RNA-seq data confirming the overlap between TldR-gRNA binding sites and host fliC promoters. FIG. 15A, RNA-seq read coverage in the host fliC promoter/5′-UTR region for four Enterobacter strains, with labeled TAM and target sequences highlighted upstream of the TSS. Strain AR136 (top left) does not encode a fliC_{P}-tldR locus; note the distinct expression levels, measured via relative counts per million (CPM). FIG. 15B, Alignment of host fliC promoter regions for the strains shown in FIG. 15A compared to E. coli K12, with percent sequence identities indicated on the right. Reported FliA/σ²⁸ promoter elements from E. coli K12 are shown below the alignment. SEQ ID NOs: 1660-1664, grey sequence as SEQ ID NO: 1659. FIG. 15C, RNA-seq read coverage in the prophage-encoded fliC_{P} promoter/5′-UTR region for two representative Enterobacter strains, confirming the predicted TSS. SEQ ID NO: 1665. FIG. 15D, Schematic of multiple sequence alignment (MSA) of the promoter region driving fliC_{P} gene expression, across six verified prophages described in FIG. 7. FIG. 15E, Magnified MSA for the indicated region in FIG. 15D, highlighting the region that was queried for MEME motif detection. SEQ ID NOs: 1666-1671.

[0042] FIGS. 16A-16B show fliC_{P}-tldR loci are encoded within prophages and phage genomes. FIG. 16A, Genetic architecture of a 40 kbp window of bacterial genomes that encode fliC_{P}-tldR loci (center). fliC_{P} and tldR genes are colored in light blue and green, respectively, and genes with Eggnog annotations containing the word “phage” or “viridae” are colored in orange; all other annotated genes are shown in grey. Each locus is annotated with NCBI accession IDs and genomic coordinates; “_rc” indicates that annotations for the reverse complement sequence are shown. FIG. 16B, Two metagenome-assembled phage genomes encode fliC_{P}-tldR loci. NCBI accessions are shown on the left.

[0043] FIG. 17 shows TldR-associated gRNA sequences identified using covariance models (SEQ ID NOs: 1672-1694). Phylogenetic tree of fliC- and oppF-associated TldR homologs alongside related TnpB proteins (top), and scaffold/guide junctions for putative TldR-associated gRNAs identified using covariance models (bottom). Matches to the covariance model are shaded, and protein accession IDs are shown at the right.

[0044] FIGS. 18A-18C show RIP-seq data for additional oppF-associated TldR proteins revealing variable gRNA substrates. FIG. 18A, RNA immunoprecipitation sequencing (RIP-seq) data for oppF-associated TldR homologs from Enterococcus cecorum (EceTldR) and Enterococcus casseliflavus (EcaTldR) indicates variable length guide sequences. Reads were mapped to each respective expression plasmid. SEQ ID NOs: 1695-1698. FIG. 18B, RIP-seq data for EmuTldR and Ffa2TldR, shown as in FIG. 18A. FIG. 18C, RIP-seq data for EsaTldR, shown as in a. Enrichment for the gRNA region was not observed, relative to the input control.

[0045] FIG. 19 shows pairwise identity matrices for representative TldR proteins and related TnpB homologs. Pairwise sequence identities at the amino acid level were calculated for each of the representative TldRs and TnpBs highlighted in FIG. 6A, for fliC_{P}-associated (top) and oppF-associated (bottom) clades.

[0046] FIGS. 20A-20F show genome-wide binding data from ChIP-seq experiments for additional TldR homologs. FIG. 20A, Genome-wide ChIP-seq profiles for the indicated fliC_{P}-associated TldR homologs, normalized to the highest peak within each dataset except for the input control (top). The magnified inset at the left shows enrichment at the genomically-integrated, gRNA-matching target site. FIG. 20B, Analysis of conserved motifs bound by the indicated TldR homolog in a using MEME ChIP, which reveals specificity for the TAM and a ˜6-nt seed sequence (SEQ ID NO: 1699). The number of peaks and percentage of total called peaks contributing to each motif is indicated; low occupancy positions were manually trimmed from motif 5′ ends. Motifs are omitted for datasets for which a high-confidence consensus could not be identified. FIG. 20C, Genome-wide ChIP-seq profiles for the indicated oppF-associated TldR homologs, shown as in FIG. 20A. FIG. 20D, Analysis of conserved motifs bound by the indicated TldR homolog in c using MEME ChIP, shown as in FIG. 20B. TAM and a seed sequence (SEQ ID NO: 1700). FIG. 20E, Genome-wide ChIP-seq profile for GstTnpB_{D196A}, shown as in FIG. 20A. FIG. 20F, Analysis of conserved motifs bound by GistTnpB_{D196A} in FIG. 20E using MEME ChIP, shown as in FIG. 20B.

[0047] FIGS. 21A-21B show comparison of TAM specificities for oppF-associated TldRs and related TnpBs, determined via ChIP-seq and comparative genomics. FIG. 21A, Phylogenetic tree showing the relatedness of labeled oppF-associated TldRs and similar TnpB homologs (left), and consensus motifs from TldR homologs using MEME ChIP, replotted from FIG. 20. TAMs and target regions are colored in yellow and purpled, respectively. FIG. 21B, Bioinformatically predicted TAMs and target sequences (SEQ ID NOs: 1701-1704) for related TnpB homologs labeled in the tree from FIG. 21A. Reference genomes used for comparative genomics analyses to predict the TAM (yellow) and target (purple) are indicated, and harbored either isogenic loci lacking the transposon IS element, or multiple copies of the same IS element.

[0048] FIG. 22 show bioinformatic identification of naturally inactive TnpB (e.g., dTnpB) protein sequences. The flow chart represents the different steps, and in some cases, software packages, that are used in order to arrive at a catalog list of nuclease-deactivated dTnpB homologs, which are prioritized for experimental testing.

[0049] FIG. 23 shows prediction and verification of dTnpB ωRNA scaffold boundaries. Analyses of RNAseq data from NCBI short read archive (SRA accessions ERR6044061, ERR6044062, ERR6044063) indicate expression of a transcript consistent with TnpB ωRNAs.

[0050] FIG. 24 shows bioinformatic identification of natural TnpB-transposase fusion proteins. Left: bioinformatic pipeline, Right (top): profile HMMs used to identify TnpB proteins, Right (bottom): transposase profile HMMs selected to filter TnpB sequences for TnpB-transposase fusion proteins.

[0051] FIG. 25 shows a phylogenetic tree of natural TnpB-transposase fusion proteins. Inner ring: taxonomy of host organism; middle ring: domain fused to TnpB/Fanzor; outer ring: relative size of fusion protein; branch tips: covariation model hits for ωRNA or left end sequences. Key shown on right.

[0052] FIG. 26 shows TnpB-transposase fusion loci with ωRNA and LE sequences identified via covariation analysis. Orange and green arrows represent open reading frames >75 amino acids (aa). Red arrows represent genes encoding TnpB-transposase fusions. Grey boxes indicate 3′ boundaries of covariation model hits for ωRNA and LE elements.

[0053] FIG. 27 shows comparison of TnpB-transposase fusion structural prediction to experimentally determined structures. Left: structure of TnpB (light indigo) from D. radiodurans (ISDra2), bound to ωRNA (salmon) and double-stranded DNA target (green and tan). Middle: clear structural homology in predicted folds of TnpB (blue) and transposase (orange) domains of a TnpB-transposase fusion protein (SCI79596.1). Right: structure of dimeric transposase (TnpA) from S. solfataricus (IS200). Protomers are shown in grey and purple.

[0054] FIG. 28 shows multiple alignment of TnpB-transposase (TnpA) fusion sequences SEQ ID NOs: 1705-1767. Top: subset of multiple sequence alignment (MSA) highlighting conservation of TnpB domain catalytic motif (DED; SEQ ID NOs: 1705-1714 (D); SEQ ID NOs: 1714-1729 (E); SEQ ID NOs: 1730-1742 (D)). Bottom: subset of MSA highlighting conservation of transposase (TnpA) domain catalytic motifs (HUH (SEQ ID NOs: 1743-1755)+Y (SEQ ID NOs: 1756-1767); U=hydrophobic residue). An exemplary TnpB-transposase fusion sequence (EEM92921.1) with conserved catalytic residues in both domains is highlighted with green arrows.

[0055] FIG. 29 shows a phylogenetic tree of csrA-associated TldR homologs and closely related TnpB proteins. TldR proteins form a monophyletic clade (green shading), suggesting that they originated from a shared ancestor. Mutations in the nuclease active site (green) that are expected to abolish DNA cleavage activity are shown in the inner ring surrounding the tree, and genetic associations with a carbon storage regulator gene (csrA; orange) and a flagellin gene (blue) are shown in the middle and outer rings, respectively. Seven candidates, which were selected to sample TldR phylogenetic diversity and cloned into expression vectors for experimental analyses, are indicated by branch symbols (red circles).

[0056] FIGS. 30A-30D show that ChIP-seq identifies putative guide sequences and target-adjacent motifs (TAMs) of csrA-associated TldRs. FIG. 30A is an example locus of a TldR protein encoded in an operon with csrA and a flagellin gene. In this locus, there are two distinct csrA genes, but many other examples encode just a single csrA gene. The gRNA region identified by RIP-seq experiments is indicated. FIG. 30B shows the genes encoding TldR proteins cloned into expression vectors with csrA, and a region comprising the putative gRNA (i.e., the 3′-end of the TldR coding sequence, plus the downstream intergenic region flanking the 3′-end of tldR). FIG. 30C shows ChIP-seq peaks from experiments with heterologous expression of OspTldR in E. coli, shown below the corresponding input tracks. Magnified insets for each of the three prominent peaks are indicated above the input track, in read. FIG. 30D shows the motif enriched in the ChIP-seq peaks shown in FIG. 30C, representing the putative TAM (yellow) and guide sequence (purple) of OspTldR. Note that the guide corresponds to the first stretch of nucleotides within the putative seed sequence.

[0057] FIGS. 31A-31C show bioinformatically identified targets of csrA-associated TldRs. FIG. 31A shows csrA-associated TldRs target a conserved, putative genomic site near the 5′-end of the coding sequence for a Flagellin gene (blue, with target site in small purple rectangle). Note that the flagellin gene may be annotated as either hag or fliC. FIG. 31B shows nucleotide-level view of putative TldR-gRNA targets for two distinct homologs on the top and bottom (Osp (SEQ ID NOs: 6114-6115) and Isp (SEQ ID NOs: 6116-6117)), showing that TAMs are consistent with ChIP-seq data in FIG. 30D. FIG. 31C is a schematic of the hypothesized role of csrA-associated TldR in the transcriptional repression of flagellin genes (Flagellin-2, bottom right)), which are distinct from the flagellin genes encoded near tldR (top left). TldR binding is expected to sterically block the progression of actively transcribing RNA polymerase (RNAP) holoenzymes, preventing expression of the flagellin-2 gene.

[0058] FIGS. 32A-32B show RIP-seq reveals csrA-associated TldR gRNA sequences. FIG. 32A shows RIP-seq coverage of reads mapping to the gRNA region of csrA-associated ldR expression vectors. Data are shown for six distinct homologs, labeled on the far right of each coverage track. The schematic at the top depicts a portion of the 3′-end tldR gene, as well as the putative scaffold region (orange) that is upstream of the putative guide sequence (purple). The corresponding regions for each individual homolog are indicated, from the expression vectors tested. FIG. 32B shows the predicted secondary structure of a representative (Fba) csrA-associated TldR gRNA (bottom; SEQ ID NOs: 6118-6119), and model for RNase III-mediated gRNA processing (top right). The region drawn in black is cleaved off by RNAse II, leading to the conspicuous drop in RIP-seq coverage observed in FIG. 32A.

[0059] FIGS. 33A-33C show csrA-associated TldRs target DNA and RNA for transcriptional and translational repression. FIG. 33A shows ChIP-Seq of csrA-associated TldR components from Osp expressed in E. coli. ChIP-Seq of 3×LAG-tagged TldR reveals active DNA targeting (row 1). A panel of mutants lacking distinct components of the system (2-7) reveals that the upstream portion of the gRNA region is required (4) but that the downstream region is dispensable for targeting (5). ChIP-Seq of 3×FLAG-tagged CsrA indicates that CsrA does not target DNA in the presence or absence of TldR (8-9) FIG. 33B shows RIP-Seq of 3×FLAG-tagged Osp CsrA in E. coli heterologously expressing the upstream region of Osp fliC. CsrA is enriched ˜30-nt upstream of the fliC start codon. FIG. 33C shows CsrA enrichment by RIP-Seq corresponds to a CsrA consensus sequence (orange) within the loop of a predicted stem-loop (mfold), which encodes a central “GGA” motif for CsrA binding (blue); SEQ ID NO: 6120.

[0060] FIGS. 34A-34E show bioinformatic analysis of rpoE-associated dCas12f systems. FIG. 34A is a phylogenetic tree of 707 unique rpol-associated dCas12f homologs and closely-related Cas12f proteins. Gene associations are marked with different colors, from inner circle to outer circle: helix-turn-helix (hth, purple); Sigma factor rpoF (orange); transposase (yellow). The association with rpok is widely conserved across the collected dCas12f homologs. The 16 red dots mark diverse dCas12f homolog systems from across the phylogenetic tree that were selected for gene synthesis, cloning, and biochemical testing in E. coli. FIG. 34B is a representative native locus of an rpof-associated dCas12f system. Typically, these systems include genes encoding RpoE (dark blue) and dCas12f (light blue) immediately adjacent to one another, with a hth gene (magenta) encoded upstream, in opposite orientation. As with canonical Cas12f proteins, the gRNA (pink box with dashed lines) is encoded downstream of the dcas12f gene. Portions of the intergenic sequence in between rpok and hth are conserved and hence named ‘conserved non-coding region’ (pale blue box with dashed lines). FIG. 34C is a structural superposition of a nuclease-active (InCas12f homolog (PDB ID 7L49, dark beige) with an AlphaFold2-predicted structure of AtadCas12f (blue) reveals that the key catalytic residues (DED) are mutated and truncated in AtadCas12f, indicating the expected inability of AtadCas12f to cleave DNA (nuclease dead Cas12f, or dCas12f). Here, the first two catalytic residues of AtadCas12f are mutated while the C-terminus containing the Zinc finger in (InCas12f (orange) is fully absent in AtadCas12f. The UnCas12f sgRNA is colored red; target DNA is colored dark grey. FIG. 34D is a multiple sequence alignment (MSA) of three nuclease-active (InCas12f homolog amino acid sequences (SEQ ID NOs: 6121-6123) and three rpoE-associated dCas12f homologs (SEQ ID NOS: 6028, 6032, and 6033, respectively), which highlights the mutated and C-terminally truncated catalytic residues of dCas12f proteins. Key residues involved in UnCas12f dimerization, PAM recognition, and Zinc Finger motif formation are highlighted. Residues are colored at a 30% sequence identity threshold. FIG. 34E is an exemplary schematic of programmable RNA-guided gene activation by an rpoE-associated dCas12f system in complex with bacterial RNA polymerase (RNAP). The −35 and −10 promoter elements are highlighted in yellow; the core RNAP subunits are shown in shades of green. Transcription start site, TSS.

[0061] FIG. 35A is native dCas12f locus maps for 16 homolog systems for ChIP/RIP-seq. FIG. 35B is a representative plasmid layout for heterologous experiments in E. coli. FIG. 35C is a schematic of ChIP-seq and RIP-seq (SEQ ID NO: 6163). FIG. 35D is ChIP-seq genome-wide peaks. FIG. 35E is ChIP-seq MEME-ChIP TAM motifs. FIG. 35F is RIP-seq coverages (plasmid mapping), left, and RIP guide identification in 3′ end of coverage, right (SEQ ID NOs: 6124-6136).

[0062] FIG. 36A is a gRNA scaffold sequence alignment (SEQ ID NOs: 6137-6147, top to bottom). FIG. 36B is a gRNA guide sequence alignment (SEQ ID NOs: 6148-6158, top to bottom). FIG. 36C is a gRNA structure of the Ata homolog (SEQ ID NO: 6159). FIG. 36D is an Ata homolog native target site (guide is SEQ ID NO: 6160 and target is SEQ ID NO: 6161). FIG. 36E is representative dCas12f locus that is close to TonB locus.

[0063] FIG. 37A is a schematic of Ata dCas12f ChIP-seq re-targeting/re-programming (top) and Ata RpoE ChIP-seq re-targeting/re-programming demonstrates targeting along dCas12f (bottom). FIG. 37B shows RNA-seq increased signal for target 4 demonstrating target gene upregulation. FIG. 37C shows re-targeting of other dCas12f homologs (FLAG-dCas12f).

[0064] FIG. 38A shows ChIP-qPCR using plasmids with deletions and FLAG-tag attached to different protein components. All experiments were performed at target site 4. Deletion of the hth gene does not affect recruitment of dCas12f to the target site. HTH-FLAG is not recruited to the target site along dCas12f indicating it does not serve as an essential component in the system. FIG. 38B shows ChIP-seq of HTH mapping to expression plasmid (SEQ ID No: 6162). HTH-FLAG binds to the conserved non-coding region, directly upstream of the hth gene suggesting an autoregulatory function rather than involvement in RNA-guided activation of transcription. FIG. 38C shows plasmid design for gene activation assays in E. coli. Several possibilities to show gene activation in E. coli using the native Ata homolog target site or targets tiled upstream of a weak promoter. Fluorescence as well as native target gene expression (susC) can be used as the readout. Native Ata RNAP encoded on additional plasmids can be added to reconstitute a native transcription system.

### DETAILED DESCRIPTION

[0065] The disclosed systems, kits, and methods provide systems and methods for nucleic acid modification. Described herein are TnpB-like nuclease-dead repressors (TldR), dCas12f or dCas12f-like proteins, and/or a TnpB-transposase fusion proteins identified using phylogenetics, structural predictions, comparative genomics, and functional assays. These proteins employ guide RNAs to specifically target and bind nucleic acid sequences and modify gene expression.

[0066] Section headings as used in this section and the entire disclosure herein are merely for organizational purposes and are not intended to be limiting.

### Definitions

[0067] The terms “comprise(s),” “include(s),” “having,” “has,” “can,” “contain(s),” and variants thereof, as used herein, are intended to be open-ended transitional phrases, terms, or words that do not preclude the possibility of additional acts or structures. As used herein, comprising a certain sequence or a certain SEQ ID NO usually implies that at least one copy of said sequence is present in recited peptide or polynucleotide. However, two or more copies are also contemplated. The singular forms “a,” “and” and “the” include plural references unless the context clearly dictates otherwise. The present disclosure also contemplates other embodiments “comprising,” “consisting of,” and “consisting essentially of,” the embodiments or elements presented herein, whether explicitly set forth or not.

[0068] For the recitation of numeric ranges herein, each intervening number there between with the same degree of precision is explicitly contemplated. For example, for the range of 6-9, the numbers 7 and 8 are contemplated in addition to 6 and 9, and for the range 6.0-7.0, the number 6.0, 6.1, 6.2, 6.3, 6.4, 6.5, 6.6, 6.7, 6.8, 6.9, and 7.0 are explicitly contemplated.

[0069] Unless otherwise defined herein, scientific, and technical terms used in connection with the present disclosure shall have the meanings that are commonly understood by those of ordinary skill in the art. For example, any nomenclature used in connection with, and techniques of cell and tissue culture, molecular biology, genetics and protein and nucleic acid chemistry and hybridization described herein are those that are well known and commonly used in the art. The meaning and scope of the terms should be clear; in the event, however of any latent ambiguity, definitions provided herein take precedent over any dictionary or extrinsic definition. Further, unless otherwise required by context, singular terms shall include pluralities and plural terms shall include the singular.

[0070] A “peptide” or “polypeptide” is a linked sequence of two or more amino acids linked by peptide bonds. The polypeptide can be natural, synthetic, or a modification or combination of natural and synthetic. The peptide or polypeptide may be modified by the addition of sugars, lipids or other moieties not included in the amino acid chain. The terms “polypeptide,” “oligopeptide,” “protein,” and “peptide” are used interchangeably herein. The peptide may be produced by recombinant genetic technology or chemical synthesis. The peptide may be isolated and purified by any number of standard methods including, but not limited to, differential solubility (e.g., precipitation), centrifugation, chromatography (e.g., affinity, ion exchange, and size exclusion), or by any other standard techniques known in the art.

[0071] As used herein, “conjugate” refers to the linking of two or more moieties or molecules to each other by covalent or non-covalent interactions. More specifically, the terms “protein conjugate” refer to a protein that has been modified by the addition of another moiety or molecule (e.g., another peptide, protein, or polypeptide).

[0072] As used herein, “nucleic acid” or “nucleic acid sequence” refers to a polymer or oligomer of pyrimidine and/or purine bases, preferably cytosine, thymine, and uracil, and adenine and guanine, respectively (See Albert L. Lehninger, Principles of Biochemistry, at 793-800 (Worth Pub. 1982)). The present technology contemplates any deoxyribonucleotide, ribonucleotide, or peptide nucleic acid component, and any chemical variants thereof, such as methylated, hydroxymethylated, or glycosylated forms of these bases, and the like. The polymers or oligomers may be heterogenous or homogenous in composition and may be isolated from naturally occurring sources or may be artificially or synthetically produced. In addition, the nucleic acids may be DNA or RNA, or a mixture thereof, and may exist permanently or transitionally in single-stranded or double-stranded form, including homoduplex, heteroduplex, and hybrid states. In some embodiments, a nucleic acid or nucleic acid sequence comprises other kinds of nucleic acid structures such as, for instance, a DNA/RNA helix, peptide nucleic acid (PNA), morpholino nucleic acid (see, e.g., Braasch and Corey, Biochemistry, 41 (14): 4503-4510 (2002)) and U.S. Pat. No. 5,034,506), locked nucleic acid (LNA; see Wahlestedt et al., Proc. Natl. Acad. Sci. U.S.A., 97:5633-5638 (2000)), cyclohexenyl nucleic acids (see Wang, J. Am. Chem. Soc., 122:8595-8602 (2000)), and/or a ribozyme. Hence, the term “nucleic acid” or “nucleic acid sequence” may also encompass a chain comprising non-natural nucleotides, modified nucleotides, and/or non-nucleotide building blocks that can exhibit the same function as natural nucleotides (e.g., “nucleotide analogs”); further, the term “nucleic acid sequence” as used herein refers to an oligonucleotide, nucleotide or polynucleotide, and fragments or portions thereof, and to DNA or RNA of genomic or synthetic origin, which may be single or double-stranded, and represent the sense or antisense strand. The terms “nucleic acid,” “polynucleotide,” “nucleotide sequence,” and “oligonucleotide” are used interchangeably. They refer to a polymeric form of nucleotides of any length, either deoxyribonucleotides or ribonucleotides, or analogs thereof.

[0073] As used herein, the term “percent sequence identity” refers to the percentage of nucleotides or nucleotide analogs in a nucleic acid sequence, or amino acids in an amino acid sequence, that is identical with the corresponding nucleotides or amino acids in a reference sequence of the present disclosure after aligning the two sequences and introducing gaps, if necessary, to achieve the maximum percent identity. A number of mathematical algorithms for obtaining the optimal alignment and calculating identity between two or more sequences are known and incorporated into a number of available software programs. Examples of such programs include CLUSTAL-W, T-Coffee, and ALIGN (for alignment of nucleic acid and amino acid sequences), BLAST programs (e.g., BLAST 2.1, BL2SEQ, and later versions thereof) and FASTA programs (e.g., FASTA3x, FAS™, and SSEARCH) (for sequence alignment and sequence similarity searches). Sequence alignment algorithms also are disclosed in, for example, Altschul et al., J. Molecular Biol., 215 (3): 403-410 (1990), Beigert et al., Proc. Natl. Acad. Sci. USA, 106 (10): 3770-3775 (2009), Durbin et al., eds., Biological Sequence Analysis: Probabilistic Models of Proteins and Nucleic Acids, Cambridge University Press, Cambridge, UK (2009), Soding, Bioinformatics, 21 (7): 951-960 (2005), Altschul et al., Nucleic Acids Res., 25 (17): 3389-3402 (1997), and Gusfield, Algorithms on Strings, Trees and Sequences, Cambridge University Press, Cambridge UK (1997)).

[0074] The term “homology” and “homologous” refers to a degree of identity. There may be partial homology or complete homology. A partially homologous sequence is one that is less than 100% identical to another sequence.

[0075] As used herein, the term “hybridization” is used in reference to the pairing of complementary nucleic acids. Hybridization and the strength of hybridization (e.g., the strength of the association between the nucleic acids) is influenced by such factors as the degree of complementary between the nucleic acids, stringency of the conditions involved, and the Tₘ of the formed hybrid. Hybridization methods involve the annealing of one nucleic acid to another, complementary nucleic acid, e.g., a nucleic acid having a complementary nucleotide sequence. The ability of two polymers of nucleic acid containing complementary sequences to find each other and “anneal” or “hybridize” through base pairing interaction is a well-recognized phenomenon. The initial observations of the “hybridization” process by Marmur and Lane, Proc. Natl. Acad. Sci. USA, 46:453 (1960) and Doty et al., Proc. Natl. Acad. Sci. USA, 46:461 (1960), have been followed by the refinement of this process into an essential tool of modern biology. For example, hybridization and washing conditions are now well known and exemplified in Sambrook et al., supra. The conditions of temperature and ionic strength determine the “stringency” of the hybridization.

[0076] “Complementarity” refers to the ability of a nucleic acid to form hydrogen bond(s) with another nucleic acid sequence by either traditional Watson-Crick or other non-traditional types. A percent complementarity indicates the percentage of residues in a nucleic acid molecule, which can form hydrogen bonds (e.g., Watson-Crick base pairing) with a second nucleic acid sequence. Full complementarity is not necessarily required, provided there is sufficient complementarity to cause hybridization.

[0077] As used herein, a “double-stranded nucleic acid” may be a portion of a nucleic acid, a region of a longer nucleic acid, or an entire nucleic acid. A “double-stranded nucleic acid” may be, e.g., without limitation, a double-stranded DNA, a double-stranded RNA, a double-stranded DNA/RNA hybrid, etc. A single-stranded nucleic acid having secondary structure (e.g., base-paired secondary structure) and/or higher order structure (e.g., a stem-loop structure) may also be considered a “double-stranded nucleic acid.” For example, triplex structures are considered to be “double-stranded.” In some embodiments, any base-paired nucleic acid is a “double-stranded nucleic acid.”

[0078] The term “gene” refers to a DNA sequence that comprises control and coding sequences necessary for the production of an RNA having a non-coding function (e.g., a ribosomal or transfer RNA), a polypeptide, or a precursor of any of the foregoing. The RNA or polypeptide can be encoded by a full length coding sequence or by any portion of the coding sequence so long as the desired activity or function is retained. Thus, a “gene” refers to a DNA or RNA, or portion thereof, that encodes a polypeptide or an RNA chain that has functional role to play in an organism. For the purpose of this disclosure, it may be considered that genes include regions that regulate the production of the gene product, whether or not such regulatory sequences are adjacent to coding and/or transcribed sequences. Accordingly, a gene includes, but is not necessarily limited to, promoter sequences, terminators, translational regulatory sequences such as ribosome binding sites and internal ribosome entry sites, enhancers, silencers, insulators, boundary elements, replication origins, matrix attachment sites, and locus control regions.

[0079] The terms “non-naturally occurring,” “engineered,” and “synthetic” are used interchangeably and indicate the involvement of the hand of man. The terms, when referring to nucleic acid molecules or polypeptides mean that the nucleic acid molecule or the polypeptide is at least substantially free from at least one other component with which they are naturally associated in nature and as found in nature.

[0080] A “vector” or “expression vector” is a replicon, such as plasmid, phage, virus, or cosmid, to which another DNA segment, e.g., an “insert,” may be attached or incorporated so as to bring about the replication of the attached segment in a cell.

[0081] A cell has been “genetically modified,” “transformed,” or “transfected” by exogenous DNA, e.g., a recombinant expression vector, when such DNA has been introduced inside the cell. The presence of the exogenous DNA results in permanent or transient genetic change. The transforming DNA may or may not be integrated (covalently linked) into the genome of the cell. For example, the transforming DNA may be maintained on an episomal element such as a plasmid. With respect to eukaryotic cells, a stably transformed cell is one in which the transforming DNA has become integrated into a chromosome so that it is inherited by daughter cells through chromosome replication. This stability is demonstrated by the ability of the eukaryotic cell to establish cell lines or clones that comprise a population of daughter cells containing the transforming DNA. A “clone” is a population of cells derived from a single cell or common ancestor by mitosis. A “cell line” is a clone of a primary cell that is capable of stable growth in vitro for many generations.

[0082] A “subject” or “patient” may be human or non-human and may include, for example, animal strains or species used as “model systems” for research purposes, such a mouse model as described herein. Likewise, patient may include either adults or juveniles (e.g., children). Moreover, patient may mean any living organism, preferably a mammal (e.g., human or non-human) that may benefit from the administration of compositions contemplated herein. Examples of mammals include, but are not limited to, any member of the Mammalian class: humans, non-human primates such as chimpanzees, and other apes and monkey species; farm animals such as cattle, horses, sheep, goats, swine; domestic animals such as rabbits, dogs, and cats; laboratory animals including rodents, such as rats, mice and guinea pigs, and the like. Examples of non-mammals include, but are not limited to, birds, fish, and the like. In one embodiment of the methods and compositions provided herein, the mammal is a human.

[0083] The term “contacting” as used herein refers to bring or put in contact, to be in or come into contact. The term “contact” as used herein refers to a state or condition of touching or of immediate or local proximity. Contacting a composition to a target destination, such as, but not limited to, an organ, tissue, cell, or tumor, may occur by any means of administration known to the skilled artisan.

[0084] As used herein, the terms “providing,” “administering,” and “introducing,” are used interchangeably herein and refer to the placement of the systems of the disclosure into a cell, organism, or subject by a method or route which results in at least partial localization of the system to a desired site. The systems can be administered by any appropriate route which results in delivery to a desired location in the cell, organism, or subject.

[0085] Preferred methods and materials are described below, although methods and materials similar or equivalent to those described herein can be used in practice or testing of the present disclosure. All publications, patent applications, patents and other references mentioned herein are incorporated by reference in their entirety. The materials, methods, and examples disclosed herein are illustrative only and not intended to be limiting.

### Polypeptides and Compositions

[0086] Transposon-encoded TnpB proteins represent a vast reservoir of RNA-guided nucleases that are found in association with diverse transposons/transposases across all three domains of life. In bacteria, tpB genes are encoded within IS200/IS605- and IS607-family transposons, which are minimal selfish genetic elements that are mobilized by a TnpA-family transposase but often exist in a non-autonomous form. These transposons harbor conserved left end (LE) and right end (RE) sequences that define the boundaries of the mobile DNA, and in addition to protein-coding genes, they also encode non-coding RNAs, referred to as ωRNA (or reRNA), that feature a scaffold region spanning the transposon RE and a ˜16-nt guide derived from the transposon-flanking sequence (FIG. 1A). It was recently demonstrated that TnpA-mediated transposition generates a scarless excision product at the donor site that is rapidly recognized and cleaved by TnpB-ωRNA complexes, in a reaction dependent on RNA-DNA complementarity and the presence of a cognate transposon/target-adjacent motif (TAM), leading to transposon reinstallation via DSB-mediated homologous recombination.

[0087] TnpB nucleases have been independently domesticated numerous times over evolutionary timescales, leading to the emergence of dozens of unique CRISPR-Cas12 subtypes that feature diverse guide RNA requirements and PAM specificities. In nearly all cases, Cas12 homologs rely on the same RuvC nuclease domain as TnpB for target cleavage, highlighting its conserved role in nucleic acid chemistry. However, recent studies uncovered atypical Cas12 homolog, Cas12c and Cas12m, that have lost the ability to cleave target DNA but instead bind and repress gene transcription as an alternative mechanism to preventing MGE proliferation. Type V-K CASTs similarly rely on nuclease-inactivated Cas12k homologs that are still active for RNA-guided DNA binding, leading to programmable transposition (FIG. 1A).

[0088] Disclosed herein is a family of TnpB-like nuclease-dead repressors (hereinafter TldR) that function not for transposition, but for RNA-guided transcriptional control, thus rendering the name “TnpB (transposase B)” inapposite. Using a custom bioinformatics pipeline, multiple independent TldR clades that evolved from transposon-encoded TnpB nucleases via RuvC active site deterioration, coincident with newly acquired, non-transposase gene associations, were identified. TldRs function with adjacently encoded non-coding guide RNAs (gRNAs) to target complementary DNA sequences flanked by a TAM within promoter regions, and target binding down-regulates gene expression through competitive exclusion of RNA polymerase.

[0089] These TldRs, Cas12 homologs, and conjugates thereof represent promising new reagents for genome engineering applications. While TldRs themselves are capable of repressing RNA expression, experiments utilizing TldR fused to effector polypeptides reveal the potential for augmented TldRs function. Thus, by tethering effector polypeptides to either the N- or C-terminus of a TldR or Cas12 homolog, or internally within the polypeptide, a variety of novel genome engineering tools are accessible, including but not limited to transcriptional activation tools (CRISPRa), transcriptional repression tools (CRISPRi), base editing tools (CBE and ABE), chromosomal locus imaging tools, prime editing reagents via fusion to reverse transcriptase domains, and additional epigenome reagents via fusion to domains that perform histone modifications, DNA modifications, or a combination thereof.

[0090] Provided herein are TldR proteins comprising one or more amino acid sequences having at least 70% (e.g., having at least 75%, at least 80%, at least 85%, at least 90%, at least 92%, at least 95%, at least 96%, at least 97%, at least 98%, or at least 99%) identity to any of SEQ ID NOs: 1-508 and 1768-5926. In some embodiments, the TldR proteins comprise an amino acid sequence as shown in the Table below or Table 5. In some embodiments, the TldR proteins comprise an amino acid sequence of any of SEQ ID NOs: 1-508 and 1768-5926.

[0091] Also disclosed herein are catalytically inactive Cas12f (dCas12f) or Cas12f-like (dCas12f-like) proteins. Cas12f is a structurally determined ortholog of TnpB, such that the dCas12f and or dCas12f-like proteins share common ancestors (e.g., TnpB nucleases) with the TldR proteins. Similar to the TldR proteins, these dCas12f or dCas12f-like proteins and conjugates thereof represent promising new reagents for genome engineering applications.

[0092] Provided herein are dCas12f or dCas12f-like proteins comprising one or more amino acid sequences having at least 70% (e.g., having at least 75%, at least 80%, at least 85%, at least 90%, at least 92%, at least 95%, at least 96%, at least 97%, at least 98%, or at least 99%) identity to any of SEQ ID NOs: 6026-6042. In some embodiments, the dCas12f or dCas12f-like proteins comprise an amino acid sequence having at least 70% identity to any sequence in Table 7. In some embodiments, the dCas12f or dCas12f-like proteins comprise an amino acid sequences of any of SEQ ID NOs: 6026-6042.

[0093] Any of the proteins described or referenced herein may be fused or linked to at least one (e.g., 1, 2, 3, 4, 5, 6, 7, or more) effector polypeptides. Accordingly, also provided herein are protein conjugates comprising a TldR protein and at least one effector polypeptide. The TldR protein or dCas12f or dCas12f-like protein can be linked to effector polypeptide using standard chemical or enzymatic conjugation techniques. The protein conjugate can also be produced as a contiguous protein (e.g., a fusion protein) using genetic engineering techniques. The fusion protein can be expressed and purified as a single contiguous protein containing both the TldR protein or dCas12f or dCas12f-like protein and the effector polypeptide.

[0094] In the protein conjugate, the TldR protein or dCas12f or dCas12f-like protein and the effector polypeptide can be linked in any orientation (e.g., N-terminus to C-terminus or either terminus to an internal site) at any location as long as both can separately function and/or interact with their proposed targets. As such, the TldR protein or dCas12f or dCas12f-like protein conjugate described herein is not limited by the method, location, or orientation of the conjugation.

[0095] Effector polypeptides include proteins or protein domains that have additional functionality or activity useful to target certain DNA sequences. The effector polypeptide may comprise a number of functionalities, including but not limited to, nuclease function, recombinase function, epigenetic modifying function, transposase function, integrase function, resolvase function, invertase function, protease function, DNA methyltransferase function, DNA demethylase function, histone acetylase function, histone deacetylase function, transcriptional repressor function, transcriptional activator function, DNA binding protein function, transcription factor recruiting protein function, nuclear-localization signal function, DNA editing function (e.g., deaminase) or any combination thereof. For example, some effector domains function in transcriptional regulation via their ability to interact with the basal transcriptional machinery and general co-activators, interact with other transcription factors to allow cooperative binding, and/or directly or indirectly recruit histone and chromatin modifying enzymes.

[0096] In some embodiments, the TldR proteins or dCas12f or dCas12f-like proteins and conjugates thereof described herein are used to modulate gene regulatory activity, such as transcriptional or translational activity. For example, the at least one effector polypeptide may comprise activator and/or repressor activity that can affect transcription upstream and downstream of coding regions, and can be used to activate or repress gene expression. In some embodiments, the at least one effector polypeptide may include domains from transcription factors (activators, repressors, coactivators, co-repressors), silencers, and/or chromatin associated proteins and their modifiers (e.g., methylases, demethylases, acetylases and deacetylases).

[0097] Accordingly, in some embodiments, a TldR protein or dCas12f or dCas12f-like protein or conjugate thereof having a transcription activator effector polypeptide can be used to directly increase gene expression. In some embodiments, a TldR protein or dCas12f or dCas12f-like protein or conjugate thereof as disclosed herein comprising a transcriptional protein recruiting domain, or active fragment thereof, can be used to recruit transcriptional activators or repressors to a specific nucleic acid sequence to localize activators and repressors to modulate gene expression in a targeted manner.

[0098] In some embodiments, the effector polypeptide comprises transcriptional repressor function. Transcription repressors prevent, partially or completely, the transcription of genes near to their target site. Exemplary transcriptional repressors include, but are not limited to, KRAB-domain containing proteins, SID, and Sp1.

[0099] In some embodiments, the effector polypeptide comprises transcriptional activator function. Transcriptional activators can be generally defined as proteins, or domains thereof, that bind to specific sites on promoter DNA and bring about increased transcription of specific genes through interactions with other proteins. Exemplary transcriptional activators include, but are not limited to, VP64, p65, p53, c-Myb, GATA-1, EKLF, MyoD, E2F, dTCF, Tat, HSF1, RTA and SET7/9.

[0100] In some embodiments, the effector polypeptide comprises DNA methyltransferase or DNA methylase function. DNA methyltransferases (DNMT's) are a family of DNA modifying proteins composed of different isomers (e.g., DNMT1, DNMT3A, and DNMT3B). Other exemplary DNA methyltransferases include SssI methylase, Alul methylase, HaeIII methylase, Hhal methylase, and Hpall methylase. Their main mechanism of action is addition of a methyl group to the fifth carbon of a cytosine residue (5mc) located adjacent to a guanine residue.

[0101] In some embodiments, the effector polypeptide comprises DNA demethylase function. DNA demethylation can be mediated by at least three enzyme families: (i) the ten-eleven translocation (TET) family, mediating the conversion of 5mC into 5hmC; (ii) the AID/APOBEC family, acting as mediators of 5mC or 5hmC deamination; and (iii) the BER (base excision repair) glycosylase family involved in DNA repair.

[0102] Kinases, phosphatases, and other proteins that modify or regulate other polypeptides involved in gene regulation are also useful as effector polypeptides. Such modifiers are often involved in switching on or off transcription mediated by, for example, hormones. Other useful domains for regulating gene expression can also be obtained from the gene products of oncogenes (e.g., myc, jun, fos, myb, max, mad, rel, ets, bcl, myb, mos family members) and their associated factors and modifiers.

[0103] The effector polypeptide can be used to target enzymatic activity to locations containing the target nucleic acid sequence to which the gRNA is directed. For example, in some embodiments, effector polypeptides having integrase or transposase activity can be used to promote integration of exogenous nucleic acid sequence into specific nucleic acid sequence regions and/or eliminate (knock-out) specific endogenous nucleic acid sequence.

[0104] Integrases allow for the insertion of nucleic acids, for example, into a host genome (mammalian, human, mouse, rat, monkey, frog, fish, plant (including crop plants and experimental plants like Arabidopsis), laboratory or biomedical cell lines or primary cell cultures, C. elegans, fly (Drosophila), etc.). Integrases are found in a retrovirus such as HIV (human immunodeficiency virus) and lambda integrase.

[0105] In some embodiments, the effector polypeptide comprises transposase functionality. Transposases are enzymes that bind to the end of a transposon and catalyze its movement by a cut and paste mechanism or a replicative transposition mechanism. Exemplary transpoases include, but are not limited to, Tc1 transposase, Mos1 transposase, Tn5 transposase, and Mu transposase

[0106] In some embodiments, the effector polypeptide modifies epigenetic signals and thereby modifies gene regulation, for example by promoting histone acetylase and histone deacetylase activity. The term “epigenetic modifier,” as used herein, refers to a protein or catalytic domain thereof having enzymatic activity that results in the epigenetic modification of DNA, for example, chromosomal DNA. Epigenetic modifications include, but are not limited to, histone modifications including methylation and demethylation (e.g., mono-, di- and tri-methylation), histone acetylation and deacetylation, as well as histone ubiquitylation, phosphorylation, and sumoylation.

[0107] Histone acetylation and deacetylation are the processes by which the lysine residues within the N-terminal tail protruding from the histone core of the nucleosome are acetylated and deacetylated as part of gene regulation. These reactions are typically catalyzed by enzymes with histone acetyltransferase (HAT) or histone deacetylase (HDAC) activity. Histone acetyltransferases include GNAT family proteins (e.g., Gcn5, Gcn5L, p300/CREB-binding protein associated factor (PCAF), Elp3, HPA2 and HAT1) and MYST family proteins (e.g., Sas3, essential SAS-related acetyltransferase (Esa1), Sas2, Tip60, MOF, MOZ, MORF, and HBO1). Histone deacetylases fall into four classes. Class I includes HDACs 1, 2, 3, and 8. Class II is divided into two subgroups, Class IIA and Class IIB. Class IIA includes HDACs 4, 5, 7, and 9 while Class IIB includes HDACs 6 and 10. Class III contains the Sirtuins and Class IV contains only HDAC11. Classes of HDAC proteins are divided and grouped together based on the comparison to the sequence homologies of Rpd3, Hos1 and Hos2 for Class I HDACs, HDAI and Hos3 for the Class II HDACs and the sirtuins for Class III HDACs.

[0108] The site-specific methylation and demethylation of histone residues are catalyzed by methyltransferases and demethylases, respectively. Histone methylases transfer methyl groups to amino acids (e.g., lysine and arginine) of histone proteins, ultimately effecting transcription of genes. Methylases include SET1, MLL, SMYD3, G9a, GLP, EZH2, and SETDB1. Histone demethylases catalyze the removal of methyl marks from histones, an activity associated with transcriptional regulation and DNA damage repair. Demethylases include, for example, KDMIA, KDMIB, KDM2A, KDM2B, UTX, UTY, Jumonji C (JmJC) domain-containing demethylases, and GSK-J4.

[0109] In some embodiments, the effector polypeptide comprises nuclease activity. A nuclease is an agent that induces a break in a nucleic acid sequence, e.g., a single or a double strand break in a double-stranded DNA sequence. Nucleases include those which cut at or near a preselected or specific sequence and those which are not site specific. For example, nucleases include, but are not limited to, zinc finger nucleases (ZFN), homing endonucleases, meganucleases, restriction enzymes, TAL effector nucleases, Argonaute nucleases, CRISPR nucleases, comprising, for example, Cas9, Cpf1, Csm1, CasX or CasY nucleases, micrococcal nuclease, staphylococcal nuclease, DNase I, T7 endonuclease, or catalytically active fragments thereof.

[0110] In some embodiments, the effector polypeptide comprises invertase activity. Invertase activity can be used to alter genome structure by swapping the orientation of a DNA fragment.

[0111] In some embodiments, the effector polypeptide comprises recombinase activity. A recombinase is a site-specific enzyme that mediates the recombination of DNA between recombinase recognition sequences, which results in the excision, integration, inversion, or exchange (e.g., translocation) of DNA fragments between the recombinase recognition sequences. Recombinases can be classified into two distinct families: serine recombinases (e.g., resolvases and invertases) and tyrosine recombinases (e.g., integrases). Examples of serine recombinases include, without limitation, Hin, Gin, Tn3 (also known as TnpR), β-six, CinH, ParA, γδ, Bxb1, φC31, TP901, TG1, φBT1, R4, φRV1, φFC1, MR11, A118, U153, and gp29. Examples of tyrosine recombinases include, without limitation, Cre, FLP, R, Lambda, HK101, HK022, and pSAM2. The serine and tyrosine recombinase names stem from the conserved nucleophilic amino acid residue that the recombinase uses to attack the DNA and which becomes covalently linked to the DNA during strand exchange.

[0112] In some embodiments, the effector polypeptide comprises resolvase activity. Resolvases are site-specific recombinases that function to excise (as a circle) a segment of DNA contained between two recombination sites (called res) and include, for example, Ruv C resolvase, Holiday junction resolvase Hjc, Tn3 and γδ resolvase.

[0113] In some embodiments, the effector polypeptide comprises a peptide or polypeptide sequence responsive to a ligand, such as a hormone receptor ligand binding domain, including, for example, the ligand binding domains of the estrogen receptor, the glucocorticosteroid receptor, and the like. Such effector domains can be used to act as “gene switches,” and be regulated by inducers, such as small molecule or protein ligands, specific for the ligand binding domain.

[0114] In some embodiments, the effector polypeptide comprises sequences or domains of polypeptides that mediate direct or indirect protein-protein interactions, including, for example, a leucine zipper domain, a STAT protein N terminal domain, and/or an FK506 binding protein.

[0115] In some embodiments, the effector polypeptide comprises DNA editing function (e.g., deaminase, DNA repair activity, DNA damage activity, dismutase activity, alkylation activity, depurination activity, oxidation activity, pyrimidine dimer forming activity, polymerase activity (e.g., reverse transcriptase), ligase activity, helicase activity, photolyase activity or glycosylase activity).

[0116] In some embodiments, the effector polypeptide comprises a deaminase, or functional fragment thereof. The deaminase, or functional fragment thereof may be derived from a naturally occurring deaminase or variant thereof (e.g., a protein, enzyme, or domain with an amino acid sequence having at least 70% identity to a naturally occurring deaminase). Alternatively, the deaminase may be a synthetic or engineered deaminase. In some embodiments, the deaminase, or functional fragment thereof, is an adenosine deaminase, also sometimes referred to as an adenine deaminase. In some embodiments, the adenosine deaminase is derived from a bacterium, such as, E. coli. In some embodiments, the deaminase, or functional fragment thereof, is a cytidine deaminase.

[0117] In some embodiments, the activity mediated by the effector polypeptide is a non-biological activity, such as a fluorescence activity (e.g., fluorescent proteins), luminescence activity (e.g., a luminescent protein or enzyme which results in luminescence when interacting with a substrate (e.g., luciferase)), or binding activity, such as those mediated by maltose binding protein (“MBP”), glutathione S transferase (GST), hexahistidine, c-myc, and the FLAG epitope, for facilitating detection, purification, monitoring expression, and/or monitoring cellular and subcellular localization of the polypeptide to which the effector domain is appended. In such embodiments, the systems can also be used as a diagnostic reagent, for example, to detect mutations in gene sequences, to purify restriction fragments from a solution, or to visualize DNA fragments of a gel.

[0118] The effector polypeptides described herein are illustrative and merely provide the skilled artisan with examples of effectors that can be used in combination with the TldR proteins or dCas12f or dCas12f-like protein or conjugates thereof described herein.

[0119] In some embodiments, the effector polypeptide comprises a transcription activator, a transcription repressor, a base editor, an epigenetic modifier, a chromosomal locus imaging agent (e.g., fluorescent protein or protein tag), or a combination thereof.

[0120] In some embodiments, the effector polypeptide comprises fragments of proteins that have been separated from their natural DNA binding domains and engineered to be part of a fusion protein with the protein described herein. In some embodiments, the effector polypeptides are proteins which normally bind to other proteins or factors which result in their recruitment to a specific or non-specific nucleic acid.

[0121] Also provided herein are TnpB-transposase fusion proteins comprising one or more amino acid sequences disclosed in the Table provided elsewhere herein. In some embodiments, the TnpB-transposase fusion proteins comprise one or more amino acid sequences having at least 70% (e.g., having at least 75%, at least 80%, at least 85%, at least 90%, at least 92%, at least 95%, at least 96%, at least 97%, at least 98%, or at least 99%) identity to any of SEQ ID NOs: 1453-1539. In some embodiments, the TnpB-transposase fusion proteins comprise an amino acid sequences of any of SEQ ID NOs: 1453-1539.

[0122] Any of the proteins described or referenced herein may comprise one or more amino acid substitutions as compared to the recited sequences. An amino acid “replacement” or “substitution” refers to the replacement of one amino acid at a given position or residue by another amino acid at the same position or residue within a polypeptide sequence. Amino acids are broadly grouped as “aromatic” or “aliphatic.” An aromatic amino acid includes an aromatic ring. Examples of “aromatic” amino acids include histidine (H or His), phenylalanine (F or Phe), tyrosine (Y or Tyr), and tryptophan (W or Trp). Non-aromatic amino acids are broadly grouped as “aliphatic.” Examples of “aliphatic” amino acids include glycine (G or Gly), alanine (A or Ala), valine (V or Val), leucine (L or Leu), isoleucine (I or He), methionine (M or Met), serine (S or Ser), threonine (T or Thr), cysteine (C or Cys), proline (P or Pro), glutamic acid (E or Glu), aspartic acid (A or Asp), asparagine (N or Asn), glutamine (Q or Gin), lysine (K or Lys), and arginine (R or Arg).

[0123] The amino acid replacement or substitution can be conservative, semi-conservative, or non-conservative. The phrase “conservative amino acid substitution” or “conservative mutation” refers to the replacement of one amino acid by another amino acid with a common property. A functional way to define common properties between individual amino acids is to analyze the normalized frequencies of amino acid changes between corresponding proteins of homologous organisms (Schulz and Schirmer, Principles of Protein Structure, Springer-Verlag, New York (1979)). According to such analyses, groups of amino acids may be defined where amino acids within a group exchange preferentially with each other, and therefore resemble each other most in their impact on the overall protein structure (Schulz and Schirmer, supra). Examples of conservative amino acid substitutions include substitutions of amino acids within the sub-groups described above, for example, lysine for arginine and vice versa such that a positive charge may be maintained, glutamic acid for aspartic acid and vice versa such that a negative charge may be maintained, serine for threonine such that a free-OH can be maintained, and glutamine for asparagine such that a free —NH₂ can be maintained. “Semi-conservative mutations” include amino acid substitutions of amino acids within the same groups listed above, but not within the same sub-group. For example, the substitution of aspartic acid for asparagine, or asparagine for lysine, involves amino acids within the same group, but different sub-groups. “Non-conservative mutations” involve amino acid substitutions between different groups, for example, lysine for tryptophan, or phenylalanine for serine, etc.

[0124] Any of the proteins disclosed herein may further comprise one or more proteins, polypeptides (e.g., protein domain sequences), or peptides fused or linked to the polypeptide. Accordingly, also provided herein are protein conjugates comprising a TldR protein or a dCas12f or dCas12f-like protein. The one or more proteins, polypeptides (e.g., protein domain sequences), or peptides may be appended at an N-terminus, a C-terminus, internally, or a combination thereof. The one or more proteins, polypeptides (e.g., protein domain sequences), or peptides may be fused or linked in any orientation in relationship to the disclosed protein. For example, the proteins disclosed herein may be fused or linked to another protein or protein domain that provides for tagging or visualization (e.g., GFP).

[0125] Any of the proteins or conjugates described or referenced herein may further have a nuclear localization sequence (NLS). The at least one nuclear localization sequence may be appended to the N-terminus, the C-terminus, or embedded in the protein (e.g., inserted internally within the open reading frame (ORF)). The proteins or conjugates s may comprise one or more nuclear localization sequences. The nuclear localization sequence may comprise any amino acid sequence known in the art to functionally tag or direct a protein for import into a cell's nucleus (e.g., for nuclear transport). Usually, a nuclear localization sequence comprises one or more positively charged amino acids, such as lysine and arginine.

[0126] In some embodiments, the NLS is a monopartite sequence. A monopartite NLS comprises a single cluster of positively charged or basic amino acids. In some embodiments, the monopartite NLS comprises a sequence of K-K/R—X-K/R, wherein X can be any amino acid. Exemplary monopartite NLSs include, without limitation, those from the SV40 large T-antigen (PKKKRKVEDP; SEQ ID NO: 6164), c-Myc (PAAKRVKLD; SEQ ID NO: 6165), and TUS-proteins (Kaczmarczyk S J et al. PLOS ONE 5 (1): e8889.2010). In select embodiments, the NLS comprises a c-Myc NLS.

[0127] In some embodiments, the NLS is a bipartite sequence. Bipartite NLSs comprise two clusters of basic amino acids, separated by a spacer of about 9-12 amino acids. Exemplary bipartite NLSs include the NLS of nucleoplasmin, KR [PAATKKAGQA]KKKK (SEQ ID NO: 6166), the NLS of EGL-13, MSRRRKANPTKLSENAKKLAKEVEN (SEQ ID NO: 6167), the bipartite SV40 NLS, KRTADGSEFESPKKKRKV (SEQ ID NO: 6168).

[0128] Any of the proteins or conjugates described or referenced herein may further have an epitope tag (e.g., 3×FLAG tag, an HA tag, a Myc tag, and the like). The epitope tags may be at the N-terminus, a C-terminus, or a combination thereof of the corresponding protein. In some embodiments, the epitope tag may be adjacent, either upstream or downstream, to a nuclear localization sequence.

[0129] The effector polypeptide, NLS, or epitope tag may be appended to the proteins described herein by a linker. The linker may have any of a variety of amino acid sequences. Suitable linkers include polypeptides of between 1 amino acids and 100 amino acids in length, between 4 amino acids and 40 amino acids in length, or between 4 amino acids and 25 amino acids in length. These linkers can be produced by using synthetic, linker-encoding oligonucleotides to couple the proteins, or can be encoded by a nucleic acid sequence encoding the protein. Peptide linkers with a degree of flexibility can be used. The linking peptides may have virtually any amino acid sequence, bearing in mind that the preferred linkers will have a sequence that results in a generally flexible peptide. Small amino acids, such as glycine and alanine, are generally used in creating a flexible peptide. A variety of different linkers are commercially available and are considered suitable for use, including but not limited to, glycine-serine polymers, glycine-alanine polymers, and alanine-serine polymers.

[0130] Compositions comprising the TldR proteins or conjugates thereof, dCas12f or dCas12f-like protein or conjugates thereof, or TnpB-transposase fusion proteins, as described herein or a nucleic acid molecule comprising a sequence encoding the TldR proteins or conjugates thereof, dCas12f or dCas12f-like protein or conjugates thereof, or TnpB-transposase fusion proteins, are also provided.

### Systems

[0131] Further provided herein are systems for modifying a target nucleic acid sequence.

[0132] In some embodiments, the systems comprise: a TldR protein or a conjugate thereof, a dCas12f or dCas12f-like protein or a conjugate thereof, or a TnpB-transposase fusion protein, as described herein and/or one or more nucleic acids encoding thereof; and optionally, at least one guide RNA, or one or more nucleic acids encoding thereof, complementary to at least a portion of a target nucleic acid.

[0133] The gRNA or portion thereof that hybridizes to the target nucleic acid (a target site) may be any length. In some embodiments, the gRNA sequence that hybridizes to the target nucleic acid is about 5, 6, 7, 8, 9, 10, 11, 12, 13, 14, 15, 16, 17, 18, 19, 20, 21, 22, 23, 24, 25, 26, 27, 28, 29, 30, 31, 32, 33, 34, 35, 36, 37, 38, 39, or 40 nucleotides in length. gRNAs or sgRNA(s) used in the present disclosure can be between about 5 and 100 nucleotides long, or longer (e.g., 5, 6, 7, 8, 9, 10, 11, 12, 13, 14, 15, 16, 17, 18, 19, 20, 21, 22, 23, 24, 25, 26, 27, 28, 29, 30, 31, 32, 33, 34, 35, 36, 37, 38, 39, 40, 41, 42, 43, 44, 45, 46, 47, 48, 49, 50, 51, 52, 53, 54, 55, 56, 57, 58, 59 60, 61, 62, 63, 63, 64, 65, 66, 67, 68, 69, 70, 71, 72, 73, 74, 75, 76, 77, 78, 79, 80, 81, 82, 83, 84, 85, 86, 87, 88, 89, 90, 91 92, 93, 94, 95, 96, 97, 98, 99, or 100 nucleotides in length, or longer). In some embodiments, the gRNA sequence is at least 50%, 55%, 60%, 65%, 70%, 75%, 80%, 85%, 90%, 95%, 96%, 97%, 98%, 99%, or at least 100% complementary to a target nucleic acid.

[0134] To facilitate gRNA design, many computational tools have been developed (See Prykhozhij et al. (PLOS ONE, 10 (3): (2015)); Zhu et al. (PLOS ONE, 9 (9) (2014)); Xiao et al. (Bioinformatics. Jan. 21 (2014)); Heigwer et al. (Nat Methods, 11 (2): 122-123 (2014)). Methods and tools for guide RNA design are discussed by Zhu (Frontiers in Biology, 10 (4) pp 289-296 (2015)), which is incorporated by reference herein. Additionally, there are many publicly available software tools that can be used to facilitate the design of sgRNA(s); including but not limited to, Genscript Interactive CRISPR gRNA Design Tool, WU-CRISPR, and Broad Institute GPP sgRNA Designer. There are also publicly available pre-designed gRNA sequences to target many genes and locations within the genomes of many species (human, mouse, rat, zebrafish, C. elegans), including but not limited to, IDT DNA Predesigned Alt-R CRISPR-Cas9 guide RNAs, Addgene Validated gRNA Target Sequences, and GenScript Genome-wide gRNA databases.

[0135] In some embodiments, the gRNA sequence does not comprise a scaffold sequence and a scaffold sequence is expressed as a separate transcript. In such embodiments, the gRNA sequence further comprises an additional sequence that is complementary to a portion of the scaffold sequence and functions to bind (hybridize) the scaffold sequence. Alternatively, the gRNA and scaffold sequence may be provided as omega RNA (ωRNA). Exemplary ωRNAs are provided in the Tables herein.

[0136] The gRNA may be a non-naturally occurring gRNA.

[0137] The system may further comprise a target nucleic acid. The terms “target sequence,” “target nucleic acid,” and “target site” (e.g., a “target genomic DNA sequence”) are used interchangeably herein to refer to a polynucleotide (nucleic acid, gene, chromosome, genome, etc.) to which a guide sequence (e.g., a synthetic guide RNA) is designed to have complementarity, wherein hybridization between the target sequence and a guide sequence promotes the formation of a complex, e.g., of the guide RNA, target, and TldR protein, or a conjugate thereof, a dCas12f or dCas12f-like protein or conjugate thereof, or a TnpB-transposase fusion protein provided sufficient conditions for binding exist. The target sequence and guide sequence need not exhibit complete complementarity, provided that there is sufficient complementarity to cause hybridization and promote formation of the complex. A target sequence may comprise any polynucleotide, such as DNA or RNA. Suitable DNA/RNA binding conditions include physiological conditions normally present in a cell. Other suitable DNA/RNA binding conditions (e.g., conditions in a cell-free system) are known in the art.

[0138] The target nucleic acid may or may not be flanked by a transposon adjacent motif (TAM). A TAM can be upstream of the target sequence. In one embodiment, the target sequence is immediately flanked on the 5′end by a TAM sequence. A TAM can be 1, 2, 3, 4, 5, 6, 7, 8, 9, 10 or more nucleotides in length. In certain embodiments, a TAM is between 2-6 nucleotides in length. In some embodiments, the TAM comprises a sequence of TT (C/T) A (A/T/C). In select embodiments, the TAM sequence is TTTAT or TTCAT. In some embodiments, the TAM sequence comprises TGG. Exemplary TAM sequences are provided in the Examples herein. There may be mismatches distal from the TAM.

[0139] However, structure-guided mutations and directed evolution experiments have been successfully utilized to modify the targeting constraints of other RNA-guided nucleases (e.g., modification of PAM requirements in Cas9/Cas12 CRISPR-based systems). In other embodiments, TldR proteins, dCas12f or dCas12f-like proteins, or TnpB-transposase fusion proteins with modified TAM-interacting residues are used, in conjunction with any of the above stated embodiments, to extend the range of genomic targets.

[0140] The system may further include a donor nucleic acid. The donor nucleic acid may be a part of a bacterial plasmid, bacteriophage, a virus, autonomously replicating extra chromosomal DNA element, linear plasmid, linear DNA, linear covalently closed DNA, mitochondrial or other organellar DNA, chromosomal DNA, and the like. In some embodiments, the donor nucleic acid comprises a cargo nucleic acid sequence.

[0141] The donor nucleic acid may be flanked by at least one transposon end sequence. In some embodiments, the donor nucleic acid is flanked on the 5′ and the 3′ end with a transposon end sequence. The term “transposon end sequence” refers to any nucleic acid comprising a sequence capable of forming a complex with the transposase enzymes thus designating the nucleic acid between the two ends for rearrangement. Usually, these sequences contain inverted repeats and may be about 10-150 base pairs long, however the exact sequence requirements differ for the specific transposase enzymes. Transposon end sequences are well known in the art. Transposon ends sequences may or may not include additional sequences that promotes or augment transposition.

[0142] The donor nucleic acid, and by extension the cargo nucleic acid, may of any suitable length, including, for example, about 50-100 bp (base pairs), about 100-1000 bp, at least or about 10 bp, at least or about 20 bp, at least or about 25 bp, at least or about 30 bp, at least or about 35 bp, at least or about 40 bp, at least or about 45 bp, at least or about 50 bp, at least or about 55 bp, at least or about 60 bp, at least or about 65 bp, at least or about 70 bp, at least or about 75 bp, at least or about 80 bp, at least or about 85 bp, at least or about 90 bp, at least or about 95 bp, at least or about 100 bp, at least or about 200 bp, at least or about 300 bp, at least or about 400 bp, at least or about 500 bp, at least or about 600 bp, at least or about 700 bp, at least or about 800 bp, at least or about 900 bp, at least or about 1 kb (kilobase pair), at least or about 2 kb, at least or about 3 kb, at least or about 4 kb, at least or about 5 kb, at least or about 6 kb, at least or about 7 kb, at least or about 8 kb, at least or about 9 kb, at least or about 10 kb, or greater.

[0143] The system may be a cell free system. Also disclosed is a cell comprising the system described herein. In some embodiments, the cell is a prokaryotic cell. In some embodiments, the cell is a eukaryotic cell. In some embodiments, the cell is a mammalian cell (e.g., a cell of a non-human primate or a human cell). Thus, in some embodiments, disclosed herein are systems for nucleic acid modification of a target nucleic acid sequence in a eukaryotic cell (e.g., a mammalian cell, a human cell).

### Nucleic Acids

[0144] The one or more nucleic acids encoding a TldR protein, or conjugate thereof, a dCas12f or dCas12f-like protein or a conjugate thereof, or a TnpB-transposase fusion protein, and guide RNA (e.g., ωRNA) may be any nucleic acid including DNA, RNA, or combinations thereof. In some embodiments, nucleic acids comprise one or more messenger RNAs, one or more vectors, or any combination thereof.

[0145] [0.145] In certain embodiments, engineering the system for use in eukaryotic cells may involve codon-optimization. It will be appreciated that changing native codons to those most frequently used in mammals allows for maximum expression of the system proteins in mammalian cells (e.g., human cells). Such modified nucleic acid sequences are commonly described in the art as “codon-optimized,” or as utilizing “mammalian-preferred” or “human-preferred” codons. In some embodiments, the nucleic acid sequence is considered codon-optimized if at least about 60% (e.g., about 65%, about 70%, about 75%, about 80%, about 85%, about 90%, about 95%, or about 98%) of the codons encoded therein are mammalian preferred codons.

[0146] The present disclosure also provides for DNA segments encoding the proteins and nucleic acids disclosed herein, vectors containing these segments and cells containing the vectors. The vectors may be used to propagate the segment in an appropriate cell and/or to allow expression from the segment (e.g., an expression vector). The person of ordinary skill in the art would be aware of the various vectors available for propagation and expression of a nucleic acid sequence.

[0147] The present disclosure further provides engineered, non-naturally occurring vectors and vector systems, which can encode one or more or all of the components of the present system. The vector(s) can be introduced into a cell that is capable of expressing the polypeptide encoded thereby, including any suitable prokaryotic or eukaryotic cell.

[0148] The vectors of the present disclosure may be delivered to a eukaryotic cell in a subject. Modification of the eukaryotic cells via the present system can take place in a cell culture, where the method comprises isolating the eukaryotic cell from a subject prior to the modification. In some embodiments, the method further comprises returning said eukaryotic cell and/or cells derived therefrom to the subject.

[0149] Viral and non-viral based gene transfer methods can be used to introduce nucleic acids encoding components of the present system into cells, tissues, or a subject. Such methods can be used to administer nucleic acids encoding components of the present system to cells in culture, or in a host organism. Non-viral vector delivery systems include DNA plasmids, cosmids, RNA (e.g., a transcript of a vector described herein), a nucleic acid, and a nucleic acid complexed with a delivery vehicle. Viral vector delivery systems include DNA and RNA viruses, which have either episomal or integrated genomes after delivery to the cell. Viral vectors include, for example, retroviral, lentiviral, adenoviral, adeno-associated and herpes simplex viral vectors.

[0150] In certain embodiments, plasmids that are non-replicative, or plasmids that can be cured by high temperature may be used, such that any or all of the necessary components of the system may be removed from the cells under certain conditions. For example. this may allow for DNA integration by transforming bacteria of interest, but then being left with engineered strains that have no memory of the plasmids or vectors used for the integration.

[0151] Drug selection strategies may be adopted for positively selecting for cells that underwent DNA integration. A donor nucleic acid may contain one or more drug-selectable markers within the cargo. Then presuming that the original donor plasmid is removed, drug selection may be used to enrich for integrated clones. Colony screenings may be used to isolate clonal events.

[0152] A variety of viral constructs may be used to deliver the present system or components thereof (such as a TldR protein, or conjugate thereof, a dCas12f or dCas12f-like protein or a conjugate thereof, or a TnpB-transposase fusion protein, and gRNA) to the targeted cells and/or a subject. Nonlimiting examples of such recombinant viruses include recombinant adeno-associated virus (AAV), recombinant adenoviruses, recombinant lentiviruses, recombinant retroviruses, recombinant herpes simplex viruses, recombinant poxviruses, phages, etc. The present disclosure provides vectors capable of integration in the host genome, such as retrovirus or lentivirus. See, e.g., Ausubel et al., Current Protocols in Molecular Biology, John Wiley & Sons, New York, 1989; Kay, M. A., et al., 2001 Nat. Medic. 7 (1): 33-40; and Walther W. and Stein U., 2000 Drugs, 60 (2): 249-71, incorporated herein by reference.

[0153] In one embodiment, a DNA segment encoding a TldR protein, or conjugate thereof, a dCas12f or dCas12f-like protein or a conjugate thereof, or a TnpB-transposase fusion protein, and/or a guide RNA (e.g., ωRNA) is contained in a plasmid vector that allows expression of the protein(s) and subsequent isolation and purification produced by the recombinant vector. Accordingly, the proteins disclosed herein can be purified following expression, obtained by chemical synthesis, or obtained by recombinant methods.

[0154] To construct cells that express the present system or components thereof, expression vectors for stable or transient expression may be constructed via conventional methods as described herein and introduced into cells. For example, nucleic acids encoding the components of the present system may be cloned into a suitable expression vector, such as a plasmid or a viral vector in operable linkage to a suitable promoter. The selection of expression vectors/plasmids/viral vectors should be suitable for integration and replication in eukaryotic cells.

[0155] In certain embodiments, vectors of the present disclosure can drive the expression of one or more sequences in prokaryotic cells. Promoters that may be used include T7 RNA polymerase promoters, constitutive E. coli promoters, and promoters that could be broadly recognized by transcriptional machinery in a wide range of bacterial organisms. The system may be used with various bacterial hosts.

[0156] [01.56] In certain embodiments, vectors of the present disclosure can drive the expression of one or more sequences in mammalian cells using a mammalian expression vector. Examples of mammalian expression vectors include pCDM8 (Seed, Nature (1987) 329:840, incorporated herein by reference) and pMT2PC (Kaufman, et al., EMBO J. (1987) 6:187, incorporated herein by reference). When used in mammalian cells, the expression vector's control functions are typically provided by one or more regulatory elements. For example, commonly used promoters are derived from polyoma, adenovirus 2, cytomegalovirus, simian virus 40, and others disclosed herein and known in the art. For other suitable expression systems for both prokaryotic and eukaryotic cells see, e.g., Chapters 16 and 17 of Sambrook, et al., MOLECULAR CLONING: A LABORATORY MANUAL. 2nd eds., Cold Spring Harbor Laboratory, Cold Spring Harbor Laboratory Press, Cold Spring Harbor, N.Y., 1989, incorporated herein by reference.

[0157] Vectors of the present disclosure can comprise any of a number of promoters known to the art, wherein the promoter is constitutive, regulatable or inducible, cell type specific, tissue-specific, or species specific. In addition to the sequence sufficient to direct transcription, a promoter sequence can also include sequences of other regulatory elements that are involved in modulating transcription (e.g., enhancers, Kozak sequences and introns). Many promoter/regulatory sequences useful for driving constitutive expression of a gene are available in the art and include, but are not limited to, for example, CMV (cytomegalovirus promoter), EFla (human elongation factor 1 alpha promoter), SV40 (simian vacuolating virus 40 promoter), PGK (mammalian phosphoglycerate kinase promoter), Ubc (human ubiquitin C promoter), human beta-actin promoter, rodent beta-actin promoter, CBh (chicken beta-actin promoter), CAG (hybrid promoter contains CMV enhancer, chicken beta actin promoter, and rabbit beta-globin splice acceptor), TRE (Tetracycline response element promoter), H1 (human polymerase III RNA promoter), U6 (human U6 small nuclear promoter), and the like. Additional promoters that can be used for expression of the components of the present system, include, without limitation, cytomegalovirus (CMV) intermediate early promoter, a viral LTR such as the Rous sarcoma virus LTR, HIV-LTR, HTLV-1 LTR, Maloney murine leukemia virus (MMLV) LTR, myeoloproliferative sarcoma virus (MPSV) LTR, spleen focus-forming virus (SFFV) LTR, the simian virus 40 (SV40) early promoter, herpes simplex tk virus promoter, elongation factor 1-alpha (EF1-α) promoter with or without the EF1-α intron. Additional promoters include any constitutively active promoter. Alternatively, any regulatable promoter may be used, such that its expression can be modulated within a cell.

[0158] Moreover, inducible and tissue specific expression of a RNA, transmembrane proteins, or other proteins can be accomplished by placing the nucleic acid encoding such a molecule under the control of an inducible or tissue specific promoter/regulatory sequence. Examples of tissue specific or inducible promoter/regulatory sequences which are useful for this purpose include, but are not limited to, the rhodopsin promoter, the MMTV LTR inducible promoter, the SV40 late enhancer/promoter, synapsin 1 promoter, ET hepatocyte promoter, GS glutamine synthase promoter and many others. Various commercially available ubiquitous as well as tissue-specific promoters and tumor-specific are available, for example from InvivoGen. In addition, promoters which are well known in the art can be induced in response to inducing agents such as metals, glucocorticoids, tetracycline, hormones, and the like, are also contemplated for use. Thus, it will be appreciated that the present disclosure includes the use of any promoter/regulatory sequence known in the art that is capable of driving expression of the desired protein operably linked thereto.

[0159] The vectors of the present disclosure may direct expression of the nucleic acid in a particular cell type (e.g., tissue-specific regulatory elements are used to express the nucleic acid). Such regulatory elements include promoters that may be tissue specific or cell specific. The term “tissue specific” as it applies to a promoter refers to a promoter that is capable of directing selective expression of a nucleotide sequence of interest to a specific type of tissue (e.g., seeds) in the relative absence of expression of the same nucleotide sequence of interest in a different type of tissue. The term “cell type specific” as applied to a promoter refers to a promoter that is capable of directing selective expression of a nucleotide sequence of interest in a specific type of cell in the relative absence of expression of the same nucleotide sequence of interest in a different type of cell within the same tissue. The term “cell type specific” when applied to a promoter also means a promoter capable of promoting selective expression of a nucleotide sequence of interest in a region within a single tissue. Cell type specificity of a promoter may be assessed using methods well known in the art, e.g., immunohistochemical staining.

[0160] Additionally, the vector may contain, for example, some or all of the following: a selectable marker gene, such as the neomycin gene for selection of stable or transient transfectants in host cells; enhancer/promoter sequences from the immediate early gene of human CMV for high levels of transcription; transcription termination and RNA processing signals from SV40 for mRNA stability; 5′- and 3′-untranslated regions for mRNA stability and translation efficiency from highly-expressed genes like α-globin or β-globin; SV40 polyoma origins of replication and ColEl for proper episomal replication; internal ribosome binding sites (IRESes), versatile multiple cloning sites; T7 and SP6 RNA promoters for in vitro transcription of sense and antisense RNA; a “suicide switch” or “suicide gene” which when triggered causes cells carrying the vector to die (e.g., HSV thymidine kinase, an inducible caspase such as iCasp9), and reporter gene for assessing expression of the chimeric receptor. Suitable vectors and methods for producing vectors containing transgenes are well known and available in the art. Selectable markers also include chloramphenicol resistance, tetracycline resistance, spectinomycin resistance, streptomycin resistance, erythromycin resistance, rifampicin resistance, bleomycin resistance, thermally adapted kanamycin resistance, gentamycin resistance, hygromycin resistance, trimethoprim resistance, dihydrofolate reductase (DHFR), GPT; the URA3, HIS4, LEU2, and TRPI genes of S. cerevisiae.

[0161] When introduced into the cell, the vectors may be maintained as an autonomously replicating sequence or extrachromosomal element or may be integrated into host DNA.

[0162] In one embodiment, the present disclosure comprises integration of exogenous DNA into an endogenous gene. Alternatively, an exogenous DNA is not integrated into the endogenous gene. The DNA may be packaged into an extrachromosomal or episomal vector (such as AAV vector), which persists in the nucleus in an extrachromosomal state, and offers donor-template delivery and expression without integration into the host genome. Use of extrachromosomal gene vector technologies has been discussed in detail by Wade-Martins R (Methods Mol Biol. 2011; 738:1-17, incorporated herein by reference).

[0163] The present system (e.g., proteins, polynucleotides encoding these proteins, donor polynucleotides and compositions comprising the proteins and/or polynucleotides described herein) may be delivered by any suitable means. In certain embodiments, the system is delivered in vivo. In other embodiments, the system is delivered to isolated/cultured cells (e.g., autologous iPS cells) in vitro to provide modified cells useful for in vivo delivery to patients afflicted with a disease or condition.

[0164] Vectors according to the present disclosure can be transformed, transfected, or otherwise introduced into a wide variety of cells. Transfection refers to the taking up of a vector by a cell whether or not any coding sequences are in fact expressed. Numerous methods of transfection are known to the ordinarily skilled artisan, for example, lipofectamine, calcium phosphate co-precipitation, electroporation, DEAE-dextran treatment, microinjection, viral infection, and other methods known in the art. Transduction refers to entry of a virus into the cell and expression (e.g., transcription and/or translation) of sequences delivered by the viral vector genome. In the case of a recombinant vector, “transduction” generally refers to entry of the recombinant viral vector into the cell and expression of a nucleic acid of interest delivered by the vector genome.

[0165] Any of the vectors comprising a nucleic acid sequence that encodes the components of the present system is also within the scope of the present disclosure. Such a vector may be delivered into host cells by a suitable method. Methods of delivering vectors to cells are well known in the art and may include DNA or RNA electroporation, transfection reagents such as liposomes or nanoparticles to delivery DNA or RNA; delivery of DNA, RNA, or protein by mechanical deformation (see, e.g., Sharei et al. Proc. Natl. Acad. Sci. USA (2013) 110 (6): 2082-2087, incorporated herein by reference); or viral transduction. In some embodiments, the vectors are delivered to host cells by viral transduction. Nucleic acids can be delivered as part of a larger construct, such as a plasmid or viral vector, or directly, e.g., by electroporation, lipid vesicles, viral transporters, microinjection, and biolistics (high-speed particle bombardment). Similarly, the construct containing the one or more transgenes can be delivered by any method appropriate for introducing nucleic acids into a cell. In some embodiments, the construct or the nucleic acid encoding the components of the present system is a DNA molecule. In some embodiments, the nucleic acid encoding the components of the present system is a DNA vector and may be electroporated to cells. In some embodiments, the nucleic acid encoding the components of the present system is an RNA molecule, which may be electroporated to cells.

[0166] Additionally, delivery vehicles such as nanoparticle- and lipid-based mRNA or protein delivery systems can be used. Further examples of delivery vehicles include lentiviral vectors, ribonucleoprotein (RNP) complexes, lipid-based delivery system, gene gun, hydrodynamic, electroporation or nucleofection microinjection, and biolistics. Various gene delivery methods are discussed in detail by Nayerossadat et al. (Adv Biomed Res. 2012; 1:27) and Ibraheem et al. (Int J Pharm. 2014 Jan. 1; 459 (1-2): 70-83), incorporated herein by reference.

### Methods

[0167] Also disclosed herein are methods for nucleic acid modification or integration utilizing the disclosed polypeptides, nucleic acids encoding thereof, systems, or kits.

[0168] The methods may comprise contacting a target nucleic acid sequence with a system, a polypeptide, a nucleic acid, or a composition disclosed herein. The descriptions and embodiments provided above for the system, the polypeptide, the gRNA (e.g., ωRNA), and the nucleic acids are applicable to the methods described herein.

[0169] The phrase “modifying a nucleic acid sequence” or “nucleic acid modification” as used herein, refers to modifying at least one physical feature of a nucleic acid sequence of interest. Nucleic acid modifications include, for example, single or double strand breaks, deletion, or insertion of one or more nucleotides, and other modifications that affect the structural integrity or nucleotide sequence of the nucleic acid sequence. In some embodiments, the modifications may include cleavage of the target nucleic acid, excision of the target nucleic acid, integration of the donor nucleic acid, or a combination thereof. Modifying a nucleic acid sequence may further encompass any or all of the functions provided by the effector polypeptide as described above.

[0170] The target nucleic acid sequence may be in a cell. In some embodiments, contacting a target nucleic acid sequence comprises introducing the system into the cell. As described above the system may be introduced into eukaryotic or prokaryotic cells by methods known in the art. In some embodiments, the cell is a mammalian cell. In some embodiments, the cell is a human cell.

[0171] In some embodiments, the target nucleic acid is a nucleic acid endogenous to a target cell. In some embodiments, the target nucleic acid is a genomic DNA sequence. The term “genomic,” as used herein, refers to a nucleic acid sequence (e.g., a gene or locus) that is located on a chromosome in a cell.

[0172] In some embodiments, the target nucleic acid encodes a gene or gene product. The term “gene product,” as used herein, refers to any biochemical product resulting from expression of a gene. Gene products may be RNA or protein. RNA gene products include non-coding RNA, such as tRNA, rRNA, micro RNA (miRNA), and small interfering RNA (siRNA), and coding RNA, such as messenger RNA (mRNA). In some embodiments, the target nucleic acid sequence encodes a protein or polypeptide.

[0173] Polynucleotides containing the target nucleic acid sequence may include, but is not limited to, purified chromosomal DNA, total cDNA, cDNA fractionated according to tissue or expression state (e.g., after heat shock or after cytokine treatment other treatment) or expression time (after any such treatment) or developmental stage, plasmid, cosmid, BAC, YAC, phage library, etc. Polynucleotides containing the target site may include DNA from organisms such as Homo sapiens, Mus domesticus, Mus spretus, Canis domesticus, Bos, Caenorhabditis elegans, Plasmodium falciparum, Plasmodium vivax, Onchocerca volvulus, Brugia malayi, Dirofilaria immitis, Leishmania, Zea maize, Arabidopsis thaliana, Glycine max, Drosophila melanogaster, Saccharomyces cerevisiae, Schizosaccharomyces pombe, Neurospora, Escherichia coli, Salmonella typhimurium, Bacillus subtilis, Neisseria gonorrhoeae, Staphylococcus aureus, Streptococcus pneumonia, Mycobacterium tuberculosis, Aquifex, Thermus aquaticus, Pyrococcus furiosus, Thermus littoralis, Methanobacterium thermoautotrophicum, Sulfolobus caldoaceticus, and others.

[0174] The methods may comprise administering to the subject, in vivo, or by transplantation of ex vivo treated cells, an effective amount of the described system. In some embodiments, the vector(s) is delivered to the tissue of interest by, for example, an intramuscular, intravenous, transdermal, intranasal, oral, mucosal, or other delivery methods.

[0175] The components of the present system or ex vivo treated cells may be administered with a pharmaceutically acceptable carrier or excipient as a pharmaceutical composition. In some embodiments, the components of the present system may be mixed, individually or in any combination, with a pharmaceutically acceptable carrier to form pharmaceutical compositions, which are also within the scope of the present disclosure.

[0176] In some embodiments, an effective amount of the components of the present system or compositions as described herein can be administered. As used herein the term “effective amount” may be used interchangeably with the term “therapeutically effective amount” and refers to that quantity that is sufficient to result in a desired activity upon administration to a subject in need thereof. Within the context of the present disclosure, the term “effective amount” refers to that quantity of the components of the system such that successful DNA modification or integration is achieved.

[0177] When utilized as a method of treatment, the effective amount may depend on the particular condition being treated, the severity of the condition, the individual patient parameters including age, physical condition, size, gender and weight, the duration of the treatment, the nature of concurrent therapy (if any), the specific route of administration and like factors within the knowledge and expertise of the health practitioner. In some embodiments, the effective amount alleviates, relieves, ameliorates, improves, reduces the symptoms, or delays the progression of any disease or disorder in the subject. In some embodiments, the subject is a human.

[0178] In the context of the present disclosure insofar as it relates to any of the disease conditions recited herein, the terms “treat,” “treatment,” and the like mean to relieve or alleviate at least one symptom associated with such condition, or to slow or reverse the progression of such condition. Within the meaning of the present disclosure, the term “treat” also denotes to arrest, delay the onset (e.g., the period prior to clinical manifestation of a disease) and/or reduce the risk of developing or worsening a disease. For example, in connection with cancer the term “treat” may mean eliminate or reduce a patient's tumor burden, or prevent, delay, or inhibit metastasis, etc.

[0179] The phrase “pharmaceutically acceptable,” as used in connection with compositions and/or cells of the present disclosure, refers to molecular entities and other ingredients of such compositions that are physiologically tolerable and do not typically produce untoward reactions when administered to a subject (e.g., a mammal, a human). Preferably, as used herein, the term “pharmaceutically acceptable” means approved by a regulatory agency of the Federal or a state government or listed in the U.S. Pharmacopeia or other generally recognized pharmacopeia for use in mammals, and more particularly in humans. “Acceptable” means that the carrier is compatible with the active ingredient of the composition (e.g., the nucleic acids, vectors, cells, or therapeutic antibodies) and does not negatively affect the subject to which the composition(s) are administered. Any of the pharmaceutical compositions and/or cells to be used in the present methods can comprise pharmaceutically acceptable carriers, excipients, or stabilizers in the form of lyophilized formations or aqueous solutions.

[0180] Pharmaceutically acceptable carriers, including buffers, are well known in the art, and may comprise phosphate, citrate, and other organic acids; antioxidants including ascorbic acid and methionine; preservatives; low molecular weight polypeptides; proteins, such as serum albumin, gelatin, or immunoglobulins; amino acids; hydrophobic polymers; monosaccharides; disaccharides; and other carbohydrates; metal complexes; and/or non-ionic surfactants. See, e.g., Remington: The Science and Practice of Pharmacy 20th Ed. (2000) Lippincott Williams and Wilkins, Ed. K. E. Hoover.

[0181] The disclosed methods may modify a target DNA sequence in a cell so as to modulate expression of the target DNA sequence, e.g., expression of the target DNA sequence is increased, decreased, or completely eliminated (e.g., via deletion of a gene). The modifications of the target sequence may lead to, for example, gene correction, gene replacement, gene tagging, transgene insertion, nucleotide deletion/addition/correction, gene disruption, gene mutation, gene knock-down, etc.

[0182] In some embodiments, the methods described herein may be used to correct one or more defects or mutations in a gene (referred to as “gene correction”). In such cases, the target sequence encodes a defective version of a gene, and the disclosed compositions and systems further comprise a donor nucleic acid molecule which encodes a wild-type or corrected version of the gene. Accordingly, in some embodiments, the methods described herein may be used to insert a gene or fragment thereof into a cell.

[0183] In another embodiment, the method of modifying a target sequence can be used to delete nucleic acids from a target sequence in a host cell by cleaving the target sequence and allowing the host cell to repair the cleaved sequence in the absence of an exogenously provided donor nucleic acid molecule. Deletion of a nucleic acid sequence in this manner can be used in a variety of applications, such as, for example, to remove disease-causing trinucleotide repeat sequences in neurons, to create gene knock-outs or knock-downs, and to generate mutations for disease models in research.

[0184] In some embodiments, the methods described herein may be used to genetically modify a plant or plant cell. The present methods may be used with various microbial species, including human pathogens that are medically important, and bacterial pests that are key targets within the agricultural industry, as well as antibiotic resistant versions thereof. The present systems and methods may be used to inactivate microbial genes. In some embodiments, the gene is an antibiotic resistance gene. The methods described here also provide for treating a disease or condition in a subject. The methods may comprise administering to the subject, in vivo, or by transplantation of ex vivo treated cells (e.g., disclosed T cells), a therapeutically effective amount of the present system, polypeptides, or components thereof.

[0185] In some embodiments, the methods are used to treat a pathogen or parasite on or in a subject by altering the pathogen or parasite. In some embodiments, the methods target a “disease-associated” gene. The term “disease-associated gene,” refers to any gene or polynucleotide whose gene products are expressed at an abnormal level or in an abnormal form in cells obtained from a disease-affected individual as compared with tissues or cells obtained from an individual not affected by the disease. A disease-associated gene may be expressed at an abnormally high level or at an abnormally low level, where the altered expression correlates with the occurrence and/or progression of the disease. A disease-associated gene also refers to a gene, the mutation or genetic variation of which is directly responsible or is in linkage disequilibrium with a gene(s) that is responsible for the etiology of a disease. Examples of genes responsible for such “single gene” or “monogenic” diseases include, but are not limited to, adenosine deaminase, α-1 antitrypsin, cystic fibrosis transmembrane conductance regulator (CFTR), β-hemoglobin (HBB), oculocutaneous albinism II (OCA2), Huntingtin (HTT), dystrophia myotonica-protein kinase (DMPK), low-density lipoprotein receptor (LDLR), apolipoprotein B (APOB), neurofibromin 1 (NF1), polycystic kidney disease 1 (PKD1), polycystic kidney disease 2 (PKD2), coagulation factor VIII (F8), dystrophin (DMD), phosphate-regulating endopeptidase homologue, X-linked (PHEX), methyl-CpG-binding protein 2 (MECP2), and ubiquitin-specific peptidase 9Y, Y-linked (USP9Y). Other single gene or monogenic diseases are known in the art and described in, e.g., Chial, H. Rare Genetic Disorders: Learning About Genetic Disease Through Gene Mapping, SNPs, and Microarray Data, Nature Education 1 (1): 192 (2008); Online Mendelian Inheritance in Man (OMIM); and the Human Gene Mutation Database (HGMD). In another embodiment, the target genomic DNA sequence can comprise a gene, the mutation of which contributes to a particular disease in combination with mutations in other genes. Diseases caused by the contribution of multiple genes which lack simple (e.g., Mendelian) inheritance patterns are referred to in the art as a “multifactorial” or “polygenic” disease. Examples of multifactorial or polygenic diseases include, but are not limited to, asthma, diabetes, epilepsy, hypertension, bipolar disorder, and schizophrenia. Certain developmental abnormalities also can be inherited in a multifactorial or polygenic pattern and include, for example, cleft lip/palate, congenital heart defects, and neural tube defects. In another embodiment, the target DNA sequence can comprise a cancer oncogene. The present disclosure provides for gene editing methods that can ablate a disease-associated gene (e.g., a cancer oncogene), which in turn can be used for in vivo gene therapy for patients. In some embodiments, the gene editing methods include donor nucleic acids comprising therapeutic genes.

### Kits

[0186] Also within the scope of the present disclosure are kits that include the components of the present system, such as a TldR protein, or a conjugate thereof, a dCas12f or dCas12f-like protein or a conjugate thereof, or a TnpB-transposase fusion protein, a guide RNA (e.g., ωRNA), and/or a nucleic acid encoding thereof.

[0187] The kit may include instructions for use in any of the methods described herein. The instructions can comprise a description of administration of the present system or composition to a subject to achieve the intended effect. The instructions generally include information as to dosage, dosing schedule, and route of administration for the intended treatment. The kit may further comprise a description of selecting a subject suitable for treatment based on identifying whether the subject is in need of the treatment.

[0188] The kits provided herein are in suitable packaging. Suitable packaging includes, but is not limited to, vials, bottles, jars, flexible packaging, and the like.

[0189] The packaging may be unit doses, bulk packages (e.g., multi-dose packages) or sub-unit doses. Instructions supplied in the kits of the disclosure are typically written instructions on a label or package insert. The label or package insert indicates that the pharmaceutical compositions are used for treating, delaying the onset, and/or alleviating a disease or disorder in a subject.

[0190] Kits optionally may provide additional components such as buffers and interpretive information. Normally, the kit comprises a container and a label or package insert(s) on or associated with the container. In some embodiment, the disclosure provides articles of manufacture comprising contents of the kits described above.

[0191] The kit may further comprise a device for holding or administering the present system. The device may include an infusion device, an intravenous solution bag, a hypodermic needle, a vial, and/or a syringe.

### EXAMPLES

[0192] The following are examples and are not to be construed as limiting.

### Example 1

Methods for Targeted DNA Modification Using Nuclease-Inactivated TnpB Homologs (dTnpB/TldR)

[0193] RNA-guided nucleases (e.g., Cas9, Cas12, IscB, and TnpB) are components of bacterial/archaeal immune systems or mobile genetic elements, that have been repurposed for genome modification. In particular, TnpB proteins are RNA-guided nucleases encoded in diverse insertion (e.g., IS200/IS605 superfamily) elements, and are ancestral to Cas12 CRISPR-RNA-guided nucleases (Meers, C. et al. bioRxiv 2023.03.14.532601 (2023) and references therein). Evolutionary offshoots of TnpB include naturally-occurring, nuclease dead Cas12 homologs that are capable of programmable DNA-cargo transposition (Cas12k from CRISPR-associated transposons, or CAST systems) and programmable repression of RNA transcription (Cas12m from type V-M CRISPR systems). While Cas12 proteins are large polypeptides, raising potential challenges in delivering these nucleases for therapeutic applications, TnpB proteins are compact effectors that may alleviate delivery size constraints. Here, naturally-occurring nuclease-inactivated TnpB proteins that direct RNA-guided DNA binding are identified and described, and serve as a new platform technology for the development of tools that include programmable transcriptional repression and activation, base editing, prime editing, epigenome editing, and other applications relying on RNA-guided DNA target binding and specification. These applications may occur in diverse cell types, including bacterial cells, plant cells, animal cells, human cells, and in in vivo contexts.

[0194] Bioinformatic identification of naturally deactivated nuclease-dead TnpB homologs A bioinformatic pipeline was developed to identify TnpB homologs with point mutations or C-terminal truncations that inactivate the RuvC nuclease domain (e.g., dTnpB) (FIG. 22). An initial search of the NCBI non-redundant (NR) protein database-queried with TnpB sequences from H. pylori and G. sterothermophilus (WP_078217163.1 and WP_047817673.1, respectively) in Jackhmmer-resulted in the identification of 95,731 unique TnpB-like proteins, that were further clustered at 50% amino acid identity (across 50% sequence coverage) to produce a set of 2,646 representative TnpB sequences. Multiple sequences alignments were then constructed to assess the conservation of RuvC catalytic residues in each TnpB protein sequence, using structurally determined orthologs (e.g., ISDra2 TnpB and Cas12f; PDB: 8HIJ and 5L48, respectively) as references.

[0195] For sequences with less than two active site residues identified (e.g., dTnpB sequences), related homologs were retrieved from initial sequence clusters, and additional related homologs were identified via BLASTP searches of the NR protein database. This approach resulted in the identification of 8,889 dTnpB proteins (FIG. 22). Genomes encoding each dTnpB were retrieved from NCBI using the batch-entrez tool. dTnpB-encoding loci (e.g., dtnpB+/−20kpb) were extracted using the Biostrings package in R and were annotated with Eggnog. The initial alignment of TnpB/dTnpB representatives was used to construct a phylogenetic tree in IQTree, that guided manual investigation of dTnpB clades (FIG. 1B). Several stable genetic associations between dinpB and other genes (e.g., fliC or ABC transporter components) in different genetic contexts support the natural emergence of dTnpBs proteins for functions that do not require RuvC nuclease activity (e.g., transcriptional repression) (FIG. 2A). Structural predictions and multiple sequence alignments lend additional support to the gradual evolutionary loss of RuvC active site residues in dTnpBs (FIGS. 1C-1D), suggesting that selective pressures have led to their repurposing in natural contexts.

[0196] TnpB proteins utilize ωRNAs (OMEGA-RNAs) comprised of a scaffold and guide sequence to direct RuvC-mediated DNA cleavage. Analyses of publicly available RNAseq data indicates that transcription occurs beyond the 3′ end of dTnpB coding sequences, consistent with previous reports of TnpB ωRNA expression (FIGS. 3C and 23). To define the boundaries of ωRNA scaffolds in dTnpB-coding loci, sequence covariation models were utilized, described previously (Meers, C. et al. bioRxiv 2023.03.14.532601 (2023) doi: 10.1101/2023.03.14.532601). The CMsearch function of Infernal (Inference of RNA alignments) was used to scan nucleotide sequences of a subset of dTnpB loci and 500 basepair flanks, resulting in the identification of putative dTnpB ωRNA scaffold sequences (FIGS. 3C and 23 and sequences below). dTnpB ωRNA scaffold boundaries were confirmed by comparing dTnpB loci to ωRNAs from confidently predicted, catalytically active TnpB loci (FIGS. 3C and 23). Putative dTnpB guide sequences could then be retrieved from the 3′-boundary of putative ωRNA scaffolds, enabling prediction of native dTnpB targets (putative guides shown below). Homology between putative dTnpB guides and 5′-untranslated regions of protein coding genes indicates that dTnpBs have likely evolved to function as natural transcriptional repressors (FIG. 3D).

[0197] Utilization of dTnpB for genome targeting and modification applications dTnpB proteins represent a new and adaptable structural platform for programmable gene repression/activation, and genomic/epigenetic modification. While dTnpBs proteins themselves are capable of repressing RNA expression, experiments utilizing synthetically inactivated RNA-guided nucleases fused to transcriptional regulators reveal the potential for augmented dTnpB function. Thus, by tethering effector domains to either the N- or C-terminus of dTnpB, or internally within the dTnpB polypeptide, a variety of novel genome engineering tools are accessible.

[0198] In the paragraphs that follow, a series of embodiments are presented that describe new tools for transcriptional activation tools (CRISPRa), transcriptional repression tools (CRISPRi), base editing tools (CBE and ABE), and chromosomal locus imaging tools. Additional embodiments include the development of prime editing reagents via fusion to reverse transcriptase domains, and additional epigenome reagents via fusion to domains that perform histone modifications, DNA modifications, or a combination thereof.

[0199] In one embodiment, dTnpB proteins, together with appropriate nuclear localization signals (NLS), selectively bind to genomic target sites, resulting in transcriptional repression. Targeting is guided by the ωRNA.

[0200] dTnpB-based transcriptional activators are constructed by fusing activation domains, such as VP64, to the N-terminus or C-terminus of dTnpB, or internally within the dTnpB polypeptide, together with appropriate nuclear localization signals (NLS). In addition to the VP64-dTnpB fusions described, a range of other activation domains are used in other embodiments. The multi-valent recruitment of transcriptional activators to the target site, achieved by tethering multiple VP64 units via a polypeptide linker, leads to potent transcriptional activation in response to target with just a single ωRNA.

[0201] In other embodiments, dTnpB may be fused to a wide range of alternative activation or epigenome modification domains. An NLS is included, and may be encoded at the N-terminus, C-terminus, or internally. dTnpB selectively binds to genomic target sites, resulting in activity of the fused effector domains.

[0202] In other embodiments, dTnpB is fused to transcriptional repression domains, such as KRAB domains or other repressive domains. An NLS is included, and may be encoded at the N-terminus, C-terminus, or internally. dTnpB selectively binds to genomic target sites, resulting in activity of the fused effector domains.

[0203] In other embodiments, dTnpB is fused to fluorescent proteins (FPs), such as GFP, for chromosomal labeling. An NLS is included, and may be encoded at the N-terminus, C-terminus or internally. dTnpB selectively binds to genomic target sites, along with one or multiple copies of a FP tethered by a polypeptide linker, such that the high valency leads to high signal-to-noise localization of one or multiple chromophores at the same target site, in response to targeting by just one ωRNA.

[0204] In other embodiments, dTnpB is fused to base editing reagents, as described (Anzalone et al., Nat Biotechnol 38, 824-844 (2020) and references therein). Various fusions enable variable windows of base editing across guide-target duplex and untargeted strand. In the case of cytosine base editors (CBEs), the target dTnpB component is fused to both the deaminase domain as well as uracil glycosylase inhibitor domains. In the case of adenine base editors (ABEs), the target dTnpB component is fused to two tandem TadA domains, one of which is evolved to deaminate deoxyadenosine. dTnpB base editors may also be combined with Cas9 nickase enzymes, in order to nick one strand of DNA and thereby improve purity of the final product.

[0205] Typical TnpB guide sequences are 12-16 basepairs in length, and utilize a target-adjacent motif (TAM) for target binding. However, structure-guided mutations and directed evolution experiments have been successfully utilized to modify the targeting constraints of other RNA-guided nucleases (e.g., modification of PAM requirements in Cas9/Cas12 CRISPR-based systems). In other embodiments, dTnpB proteins with modified TAM-interacting residues are used, in conjunction with any of the above stated embodiments, to extend the range of genomic targets.

### Example 2

### Bioinformatic Identification of Nuclease-Dead TnpB Proteins

[0206] A bioinformatics pipeline was developed to identify TnpB proteins with inactivating mutations in the RuvC domain. A multiple sequence alignment of 95,731 unique TnpB-like sequences was clustered at 50% sequence identity and then an automatic assessment of the conservation of RuvC active site residues was performed. TnpB, like Cas12 nucleases, harbors a catalytic motif consisting of three acidic residues (DED), and mutating any residue in this motif abolishes nuclease activity. However, recent analyses of TnpBs and eukaryotic TnpB-like proteins (e.g., Fanzors) indicate that one of the catalytic residues can occur at an alternate position in the RuvC domain. Indeed, it was observed that this flexibility often resulted in the spurious identification of catalytically inactivated TnpB-like proteins, since structural predictions and manual inspections suggested an intact catalytic triad. Thus, the initial analysis was restricted to TnpB-like proteins with two or more mutations in the RuvC DED motif.

[0207] This search, supplemented with additional homologs identified in more focused analyses described below, identified over 500 TnpB-like proteins with conserved mutations that are predicted to inactivate the RuvC nuclease domain (FIG. 1B, sequences provided below). The polyphyletic distribution of these inactivated nucleases suggest that they emerged on multiple occasions independently (FIG. 1B), and based on their predicted role in transcriptional repression (see below); hereinafter referred to as TnpB-like nuclease-dead repressors (TldRs). Interestingly, TldRs exhibit a range of deteriorated active sites, with one, two or all three acidic residues mutated, and many homologs also feature truncated C-terminal domains that ablate RuvC and zinc-finger (ZnF) domains (FIGS. 1C and 6). AlphaFold predictions provided further structural support for the sequential deterioration of the RuvC active site, without any apparent degradation in the remainder of the overall TnpB/TldR fold or the RNA binding interface (FIG. 1C), suggesting that RNA-guided DNA targeting functions could be preserved for these inactivated nucleases.

### Example 3

tldRs Associate with Novel Genes and are Mobilized by Temperate Phages

[0208] Canonical tnpB genes in bacteria, alongside their ωRNA guides, are encoded within IS200/IS605- or IS607-family transposons that can be straightforwardly identified using both comparative genomics and by defining the transposon left end (LE) and right end (RE); in addition, a hallmark feature is their frequent association with tnpA transposase genes (FIGS. 2A, left). Remarkably, the genomic context surrounding tldR genes consistently lacked tnpA and identifiable LE/RE sequences, and instead, strong genetic associations were observed with non-transposon genes that were clade specific (FIGS. 1B and 2A). One TldR group is consistently associated with five to six genes encoding components of ABC transporter systems, the last of which is oppl, and is mainly present in Enterococci genomes. A second TldR group is tightly associated with fliC, a gene encoding the flagellin subunit of flagellar assemblies that propel bacteria in aqueous environments, and is found in diverse Enterobacteriaceae. A third TldR group from Clostridial genomes is similarly associated with flagellin genes, in addition to a carbon storage regulator (csrA) that is involved in flagellar subunit regulation. In all three cases, loci encoding TldRs and their associated genes were observed in varied genetic contexts, suggesting that they have maintained their associations over long time scales and/or that they have been mobilized in tandem. Strong genetic associations are also often indicative of functional coupling, indicating that TldR proteins may be involved in flagellar and ABC transporter expression and/or assembly pathways.

[0209] A closer inspection of genomic loci encoding fliC-tldR revealed the striking presence of numerous upstream genes with bacteriophage (phage) annotations, suggesting a potential presence of an integrated prophage (FIGS. 2A and 16A). When BLAST was used to search the NCBI non-redundant and whole genome shotgun databases, genomes were identified that were highly similar to those encoding fliC-tldR but lacked phage genes, enabling annotation of the prophage boundaries and conserved attLlattR recombination sequences (FIGS. 2B and 7A). These analyses indicate that both tldR and its associated phage-encoded fliC (hereafter fliC_{P}) are components of temperate phage genomes, suggesting a role in promoting viral infection or lysogenization. Consistent with this, the genetic association between tldR and fliC_{P} emerged coincident with the acquisition of nuclease-inactivating mutations in the RuvC domain (FIG. 2C).

[0210] To further establish the robustness of these conclusions, additional prophage elements were analyzed and it was found that fliC_{P}-tldR loci are encoded within temperate phages that, in some cases, share less than ten percent genomic sequence conservation (FIGS. 7B-7C). Additional BLAST searches revealed two metagenome-assembled phage genomes in the taxa Caudovirales that encode fliC_{P}-tldR (FIG. 16B). Collectively, these data demonstrate that at least one TnpB domestication event involved the loss of nuclease activity, the loss of flanking transposon end sequences, and the gain of an accessory gene possibly linked to a novel function in phage biology. No similar bacteriophage associations were detected for oppF- or csrA-associated TldRs.

### Example 4

Identification of TldR-Associated Guide RNAs that Target Conserved Promoters

[0211] Transposon-encoded TnpB proteins function together with gRNAs (also referred to as reRNAs) that are transcribed from within or near the 3′-end of the tnpB coding sequence, to perform RNA-guided DNA cleavage. Like CRISPR RNAs, gRNAs harbor both an invariant ‘scaffold’ sequence that is a binding site for TnpB, as well as the ‘guide’ sequence that specifies target sites through complementary RNA-DNA base-pairing. Importantly, the gRNA sequence extending beyond the transposon right end (RE) invariably comprises the guide for TnpB, and numerous in silico strategies can therefore be applied for gRNA identification, including comparative genomics, the ISfinder database, covariance models of the gRNA structure, and sequence alignments (FIG. 3A). Using these strategies, the LE/RE boundaries and gRNAs associated with nuclease-active TnpB homologs that are closely related to fliC_{P} and oppF-associated TldRs were identified (FIG. 3B). Similar analyses also revealed the predicted 3-5-bp transposon/target-adjacent motif (TAM) sequences recognized by these TnpB homologs during DNA binding and cleavage (FIG. 3B), akin to the role of PAM in DNA binding and cleavage by CRISPR-Cas9 and Cas12.

[0212] The absence of identifiable transposon ends flanking tldR rendered similar annotations of its guide RNA unfeasible, so covariance models (CM) built from gRNA sequences of related TnpBs were used. After scanning a 500-bp window flanking each tldR gene with the gRNA CM, high-confidence gRNA-like sequences were identified for both fliC_{P}- and oppF-associated tldR loci (FIG. 17). In both cases, these RNAs were encoded downstream of tldR, similar to other tpB-gRNA loci, suggesting that functional interactions with a guide RNA may have been preserved in the face of nuclease-inactivating mutations. The strong conservation at the 3′ end of the gRNA scaffold allowed further prediction of the junction between the scaffold and putative guide sequence (FIGS. 3C and 17).

[0213] Using these putative guide sequences as queries, BLAST searches were performed to identify potential genomic targets of fliC_{P}-associated TldR. The strongest match was in a genomic region that encodes other flagellar components, and strikingly, was specifically located in the intergenic region between flil) and a second (host) fliC gene distinct from the prophage-encoded fliC′p ortholog (FIG. 3D). In E. coli, fliC expression is regulated by an alternative sigma factor (σ²⁸) also known as FliA, and the putative target of the TldR-associated gRNA directly overlapped the FliA-10 promoter element, and was flanked by a conserved GTTAT motif that is highly similar to the TAM recognized by TnpB nucleases similar to TldR (FIG. 3E). Remarkably, these sequence features, similarity between the putative gRNA guide and fliC promoter, abutted by a cognate TAM, were strongly conserved across all fliC_{P}-associated loci analyzed.

[0214] When RNA sequencing datasets from organisms with fliC_{P}-tldR or oppf-tldR that are available on the NCBI short read archive (SRA) and gene expression omnibus (GEO) were analyzed, read coverage was observed over the regions identified by our CM search (FIGS. 3F-3G), additional evidence of functional gRNA expression from regions flanking tldR loci.

[0215] Collectively, these observations indicated that nuclease-inactivated tpB genes remain associated with noncoding RNA loci, and suggested a model for fliC_{P}-tldR function, wherein phage-encoded TldR-gRNA complexes could repress expression of the host FliC protein while producing their own FliC_{P} homolog. Notably, the substantial sequence differences between host and prophage-encoded FliC and FliC_{P} homologs, specifically within the hypervariable central domains, revealed the potential biological implications of this organellar transformation (see below).

### Example 5

RIP-Seq Reveals Mature gRNA Substrates and Putative OppF-TldR Targets

[0216] To determine if TldR proteins bind their associated guide RNAs, a representative FLAG-tagged fliC_{P}-associated TldR (EhoTldR) and oppF-associated TldR (Efa1TldR) were cloned into expression plasmids, alongside 240 bp encompassing the putative gRNA scaffold and a 20-bp guide sequence (FIG. 4A). After performing RNA immunoprecipitation sequencing (RIP-seq) and mapping reads to the E. coli genome and expression plasmid, a mature, ˜113-nt gRNA for EhoTldR that encompassed a 97-nt scaffold upstream of a 16-nt guide was identified, indicating processing from the initial transcript down to a final mature form (FIG. 4A). The absence of an intact catalytic triad in TldR proteins suggests that the mature gRNA may represent the sequence protected from cleavage by cellular ribonucleases.

[0217] Unexpectedly, RIP-seq revealed that the oppF-associated Ffa/TldR bound an even shorter gRNA, comprising a 100-nt scaffold and ˜9-nt guide (FIG. 8A); a similarly truncated guide (11 nt) was also observed for another homolog from this clade using publicly available RNA-seq data (FIG. 8B). RIP-seq data from replicates and five additional homologs corroborated the short guide for EfaITldR while revealing more heterogeneous processing for diverse homologs, including some with guides closer in length to 16-nt, others with more diffuse peaks that rendered unambiguous determination of the gRNA boundaries challenging, and one homolog (EsaTldR) that did not appear to specifically associate with its gRNA sequence (FIG. 18).

[0218] A new search for putative genomic targets was performed by screening for sites with ˜9-bp of DNA complementary to the guide flanked by a TAM similar to that recognized by related TnpB nucleases (TTTAA or TTTAT) (FIG. 9A). This analysis led to the identification of a conserved target upstream of the start codon of one of the ABC transporter genes (oppA) encoded proximally to tldR (FIGS. 9B-9C OppA is a substrate binding protein (SBP) in ABC transport systems, and tldR-associated OppA homologs are most similar to SBPs that bind short polypeptides (FIG. 9D). It was found that the putative gRNA-matching targets varied in their orientation relative to the start codon of oppA, suggesting that TldRs from this clade might be able to target either DNA strand to transcriptionally repress oppA. Bioinformatic predictions with BPROM revealed that putative TldR targets indeed overlapped with the predicted −10 and −35 promoter elements of oppA, a conclusion corroborated by analysis of RNA-seq data (FIG. 9E). Interestingly, additional putative gRNA targets were also identified in genomes encoding oppA-tldR loci, including targets upstream of other ABC transporter components, raising the possibility that TldR proteins contribute towards a more complex transcriptional regulatory network than fliC_{P}-associated TldR proteins (FIG. 10).

### Example 6

TldRs Function as RNA-Guided DNA Binding Proteins that Repress Transcription

[0219] Seven fliC_{P}-associated (FIG. 2C) and eight oppF-associated (FIG. 6A) TldR homologs were selected for functional assays, which were chosen to sample the diversity within each clade (FIG. 19), each were cloned into expression vectors alongside their putative gRNAs and expressed in an E. coli K12 strain containing a genomically integrated target site. Genome-wide binding specificity was profiled using chromatin immunoprecipitation sequencing (ChIP-seq), and the resulting data revealed strongly enriched peaks corresponding to the expected target site for nearly all homologs tested (FIGS. 4B and 20). These data demonstrate that TldR proteins retain the ability to perform highly specific, RNA-guided DNA target binding in cells, despite harboring RuvC mutations and C-terminal truncations.

[0220] Prominent off-target peaks in the ChIP-seq dataset were also analyzed. One of these off-target peaks for fliC_{P}-associated TldRs corresponded to the intergenic region between E. coli fliC and flil) (FIGS. 4B-4C). The guide sequence used in these experiments is complementary to the native fli C target from Enterobacter cloacae sp. AR_154 but mutated relative to the E. coli K12 sequence at five positions (FIG. 4C), suggesting a high tolerance for TldR binding to mismatched targets (FIG. 20). Strongly enriched peaks corresponding to off-target binding for oppF-associated TldRs similarly exhibited sequence similarity across only the TAM-proximal region of the target site (FIG. 11). These data support the definition of a ˜6-nt TldR seed sequence, consistent with that seen for some Cas12a homologs.

[0221] ChIP-seq also captures transient interactions due to the crosslinking step, and systematic analysis of all peaks could report on the underlying TAM specificity of select TldR homologs. Using MEME to detect enriched motifs, it was found that fliC_{P}-associated TldRs were enriched at 5′-GTTAT-3′ motifs, the same pentanucleotide TAM that flanks putative TldR-gRNA targets within fli C promoters (FIGS. 4D and 20). Similarly, oppF-associated TldR homologs bound DNA sequences enriched in 5′-TTTAA-3′ motifs, consistent with the bioinformatically predicted TAM specificities for their closely related TnpB relatives (TTTAA and TTTAT) (FIG. 21).

[0222] To verify that the RuvC mutations in TldR proteins abolish nuclease activity, TldR homologs or their related TnpB counterparts were tested in plasmid interference assays. Expression vectors containing TldR or TnpB and their associated gRNA (pEffector) were used to transform E. coli cells, along with a target plasmid (pTarget) bearing a kanamycin resistance cassette (kanR) and a TAM-flanked target sequence (FIG. 4E). Nuclease activity is expected to eliminate pTarget, resulting in fewer surviving colonies when cells are plated on selective media. When cells were transformed with plasmids bearing a previously studied TnpB homolog (e.g., GstTnpB3) or nuclease-active TnpB homologs similar to TldRs (e.g., EkoTnpB2 and EceTnpB), no surviving colonies were able to be isolated. This effect could be reversed using non-targeting guides or empty vector controls (FIG. 4E). In contrast, cells transformed with plasmids encoding TldR homolog exhibited similar colony counts as empty vector controls, with or without a pTarget-matching gRNA (FIG. 4E). Thirteen additional TldR homologs yielded consistent results (FIG. 12), confirming that TldR proteins function as RNA-guided DNA binding proteins that lost the ability to cleave DNA.

[0223] To test if DNA binding by TldR could modulate gene expression, an RFP/GFP reporter assay was developed in which target DNA binding represses rfp gene expression relative to a control gfp locus, and gRNAs were designed to either occlude transcription initiation by targeting promoter sequences, or to block transcription elongation by targeting the 5′-untranslated regions (UTR) (FIGS. 4F-4G). Representative fliC_{P}-(Eho) and oppF-associated (Efa1) TldR homologs robustly repressed RFP fluorescence when targeting the top (sense) strand, whereas only Efa1TldR repressed RFP when targeting the bottom (antisense) strand (FIG. 4G). When the 5′-UTR was targeted, select TldRs from both clades only efficiently repressed RFP when targeting the bottom strand, whereby the TAM-proximal end was oriented towards the promoter and elongating RNAP, at efficiencies that were comparable to dCas9 and dCas12 (FIGS. 4H and 13).

[0224] TldRs lack any detectable cellular nuclease activity, and instead function as RNA-guided DNA binding proteins with the potential to potently repress gene expression.

### Example 7

Prophage-Encoded tldR Genes Selectively Repress Host fliC Expression In Vivo

[0225] FliC, or flagellin, is the major extracellular subunit that polymerizes in tens of thousands of copies to form mature flagellar filaments, enabling bacterial locomotion (FIG. 5A). Previous structural studies defined four domains of FliC proteins, with D0 and D1 forming the majority of inter-promoter contacts during FliC polymerization, and D2 and D3 forming the central region that is predominantly exposed to the external environment (FIG. 5B). Remarkably, when comparing host FliC and prophage FliC_{P} sequences, it was found that D2-3 were highly variable whereas DO-1 were highly conserved (FIGS. 5B-5C), suggesting that prophage flagellin would likely retain the ability to form flagella together with host components, while nevertheless diversifying the chemical composition of exposed filament surfaces. Flagellin D2-3 variation has long been recognized as a potential mechanism to evade mammalian host immune systems, since FliC is a primary antigen (e.g., antigen H) decorating pathogenic bacteria. Moreover, some bacteriophages, eponymously referred to as flagellotropic phages, specifically recognize FliC within the flagellum as a primary receptor during adsorption, likely through interactions with D2-3.

[0226] Three Enterobacter strains that each harbored a prophage-encoded fliC_{P}-tldR locus were obtained and cultured alongside a closely related control strain that lacked it and total RNA-seq was performed. Each strain with tldR exhibited robust gRNA expression, with 5′ and 3′ boundaries that were in excellent agreement with the heterologous RIP-seq data (FIG. 14). Remarkably, when flagellin gene expression was analyzed relative to the flagellar hook (flil)), it was found that host fli C was nearly undetectable in all three strains that encoded tldR whereas fliC_{P} was strongly expressed (FIG. 5D). In contrast, fliC was highly expressed in the control strain that lacked TldR and the prophage (FIG. 5D).

[0227] Precise genetic perturbations to the fliC_{P}-tldR locus were generated in Enterobacter cloacae strain BIDMC93 and the corresponding effects on host fliC expression were measured by RT-qPCR. Deletion of tldR, tldR-gRNA, the entire fliC_{P}-tldR-gRNA locus, or the entire prophage, all led to a ˜100-fold increase in host fliC expression, and the same increase was observed after substituting the guide portion of the gRNA with a non-targeting (NT) control sequence (FIG. 5E). In contrast, deletion of fliC_{P} alone had no effect, and the fliC expression increase could be reversed by complementing the tldR-gRNA deletion with a plasmid-encoded tldR-gRNA cassette (FIG. 5E). When RNA-seq was performed on isogenic strains that differed only in the guide sequence, across three biological replicates, evidence of host fliC de-repression with the NT-guide was obtained (FIG. 5F). Differential gene expression analyses further revealed that fliC was the most strongly up-regulated (e.g., de-repressed) gene transcriptome-wide (FIG. 5G), with the only other significant changes arising in genes whose expression has been linked to flagellar gene transcription.

[0228] Closer inspection of the RNA-seq data lent further support that TldR represses gene expression through competitive binding to promoter elements, since the fliC transcription start site (TSS) agreed with the −35 and −10 promoter annotations informed from FliA/o data in E. coli K12 (FIGS. 5H and 15). This interpretation was also corroborated by comparisons of predicted TldR-gRNA-DNA structures with an experimentally determined RNAP-FliA-DNA holoenzyme structure, which demonstrate that TldR target binding would sterically block FliA access to DNA (FIG. 5I). To determine how prophage-encoded fliC_{P} genes would escape TldR-mediated repression, MEME was applied to detect conserved motifs in the region upstream of the experimentally-determined fliC_{P} TSS, and then Tomtom was used to compare these motifs to a database of known transcription factor binding sites. These analyses revealed that prophages likely recruit the very same host FliA/o transcriptional program to produce FliC_{P}, but with highly conserved mutations in both the TAM and seed sequence that preclude TldR-gRNA recognition (FIG. 5J). fliC_{P}-tldR locus is elegantly adapted to remodel composition of the flagellar apparatus upon establishment of a lysogen, by selectively repressing host flagellin through RNA-guided DNA targeting while hijacking cellular machinery to express its own homolog substitute (FIG. 5K).

### Example 8

csrA-Associated TldRs

[0229] To assess the requirements for RNA-guided DNA binding of csrA-associated TldRs, seven candidates (SEQ ID NOs: 497, 500, 473, 55, 487, 496, and 39) were chosen that spanned the phylogenetic diversity of these proteins (FIG. 29; Table 5). In the native loci encoding these TldR homologs, a putative intergenic region flanking the 3′-end of tldR was speculated to encode a gRNA sequence (FIG. 30A). To determine whether or not a non-coding gRNA is present downstream of tldR, these downstream intergenic sequences (and roughly 100 bp of DNA from the 3′-end of the TldR coding sequence) were cloned into expression vectors that also encode FLAG-tagged TldR and associated csrA genes (FIG. 30B; Tables 2 and 6). These plasmids were then used to transform E. coli, and ChIP-seq was performed using an identical protocol to the methods described above for rpok-associated dCas12f proteins. When sequencing reads were mapped to the E. coli genome, coverage peaks consistent with TldR-DNA interactions that were enriched in immunoprecipitated samples, but not in input control samples were observed (FIG. 30C). Sequence motifs extracted from these peaks of ChIP-seq read coverage revealed the putative TAM sequences recognized by several TldR representatives, in addition to the 5′-end of the gRNA guide sequence utilized by csrA-associated TldRs (FIG. 30D).

[0230] csrA-associated TldR gRNA sequence, structure and target When BLASTn was used to search genomes encoding csrA-TldRs for possible targets comprising partial the gRNA sequences identified via ChIP-seq, a conserved putative target was identified at the 5′ end of a flagellin gene (e.g., flagellin-2) that is distinct from the flagellin encoded in the csrA-tldR loci (FIG. 31A). The TAMs flanking this conserved target were additionally consistent with the putative TldR TAM preferences identified via ChIP-seq (FIGS. 30D and 31B). Collectively, these data suggest that csrA-associated TldRs specifically target flagellin-2 genes encoded elsewhere in the genome, to down regulate their expression via steric hindrance of actively transcribing RNA polymerase holoenzymes (FIG. 31C). This model of flagellar subunit regulation bears striking convergence to fliC_{P}-associated TldRs described previously.

[0231] To better understand which sequences constitute the gRNAs of csrA-associated TldRs, we repeated RIP-seq using the same expression vectors used for ChIP-seq (FIG. 30B) and identical methods to those described above for rpol-associated dCas12f proteins. When sequencing reads were mapped to the tldR expression vectors, two distinct peaks were observed in the region that is expected to encode gRNA sequences for the majority of TldR homologs tested (FIG. 32A). The drop in sequencing coverage between the two RIP-seq coverage peaks suggest that part of the gRNA is processed by cellular ribonucleases (FIG. 32B), such as RNase III, which cleaves long RNA hairpins and for maturation of Cas9 gRNAs in type II CRISPR-Cas systems. Unexpectedly, RIP-seq coverage also extended beyond the 3′-end of TldR guide sequences for some homologs (FIG. 32A), suggesting that processing at the 3′-end of the gRNA is variably efficient in E. coli for this clade of TldRs.

[0232] To determine whether or not this sequence downstream of the expected gRNA facilitates TldR-DNA interactions, a number of gRNA expression mutants were assayed for DNA binding using an identical ChIP-seq protocol to the experiments described above. When the region downstream of the expected gRNA was deleted, and a hepatitis delta virus ribozyme sequence was added to the 3′-end of the guide sequence to ensure RNA processing at this junction, ChIP-seq profiles remained consistent with profiles obtained from our original expression vector that included this downstream sequence (FIG. 33A). These data suggest that no sequences beyond the 3′-end of the guide sequence are required for TldR-mediated DNA binding. However, when the sequence corresponding to the first peak in RIP-seq coverage of the gRNA expression region was deleted from tldR-gRNA expression vectors, ChIP-seq reads corresponding to TldR-DNA interactions were abolished (FIG. 33B). Instead the ChIP-seq profiles of these mutants was consistent with the read profile of samples where the gRNA was deleted from the tldR expression vector altogether (FIG. 33B). These findings are consistent with the hypothesis that this upstream region is part of the gRNA scaffold, which is likely processed into a split gRNA via RNase III-mediated cleavage of a long stem loop (FIG. 32B).

### Example 9

Sigma Factor E (rpoE)-Associated, Nuclease-Dead Cas12f Systems

[0233] Using phylogenetic analyses, over 600 unique protein-coding genes related to the RNA-guided endonuclease Cas12f were identified, primarily in the bacterial phylum Bacteroidetes/Bacteroidota (FIG. 34A). These cas12f-like genes are encoded directly downstream of a Sigma factor E (rpok:) gene (FIG. 34B). Sigma factors are proteins that constitute an essential part of the transcription machinery by forming a complex with RNA polymerase (RNAP) and directing it to the promoter region of genes to facilitate transcription initiation. Sigma factors recognize and bind the −35 and −10 elements, upstream of the transcription start site (TSS). Sigma factor E (RpoE or extracytoplasmic function (ECF) Sigma Factor) is used by bacteria to respond and (up-) regulate gene expression under stress conditions. In addition to a gene encoding for RpoE, the cas12f-like genes also have a conserved association with a small helix-turn-helix (HTH) protein-coding gene, upstream of the rpoE gene, separated by an intergenic region approximately 75-3,000 bp in length. This sequence space is named the ‘conserved non-coding region’ and may encode for a non-coding RNA or regulatory sequence. The hth gene is encoded on the opposite strand compared to cas12f and rpoE. Notably, the annotated cas12f genes code for miniature proteins, compared to canonical (InCas12f proteins, with a typical length around 330-400 amino acids. Furthermore, structural predictions using AlphaFold2 indicate that Cas12f is catalytically dead (nuclease-dead Cas12f or dCas12f) due to mutation of more than one of the three catalytic residues (aspartate, glutamate, aspartate; DED) and/or by C-terminal truncation of the last catalytic residue glutamate (FIGS. 34C and 34D).

[0234] The close genetic association of deas12f with rpok and hth suggested the proteins may act together as a functional unit, wherein the nuclease dead Cas12f protein binds to a cognate gRNA to target a specific DNA locus, without DNA cleavage, in a programmable fashion. RpoE, in complex with dCas12f bound to gRNA, may be recruited to the same DNA target site along dCas12f. For example, at this target site, RpoE acts as a transcription initiator to upregulate transcription of the target-adjacent gene (FIG. 34E).

[0235] Determining nucleic acid requirements for RNA-guided DNA targeting of RpoE-associated dCas12f To assess whether a gRNA is expressed downstream of dCas12f, 16 diverse RpoE-associated dCas12f systems were selected from across the phylogenetic tree (FIG. 34A) for gene synthesis, cloning and heterologous expression in E. coli (FIG. 35A). Protein sequences for dCas12f, RpoE and HTH can be found in Table 7. For simplicity, each homolog system was provided with a three-letter code, representing the species of origin (e.g., Ata for Allomuricauda taeanensis). For systems with two hth genes, protein sequences are listed as HTH1 and HTH2. The two non-coding regions, including (a) the putative ‘gRNA region’ directly downstream of the dcas12f stop codon until the start codon of the next gene, and (b) the ‘conserved non-coding region’ in between the start codons of hth and rpok, were cloned downstream of a constitutive J23119 promoter. Further downstream, on the same plasmid, all protein-coding genes, das12f with an N-terminal 3×FLAG-tag, rpok, and hth, were cloned under the control of a separate constitutive J23105 promoter (FIG. 35B). All plasmid sequences used for E. coli experiments can be found in Table 2.

[0236] Chromatin immunoprecipitation followed by sequencing (ChIP-seq) was performed to determine DNA sites targeted by dCas12f in the E. coli genome. In parallel, RNA immunoprecipitation followed by sequencing (RIP-seq) was used to determine the mature gRNA bound to dCas12f (FIG. 35C). For both methods, the 3×FLAG tag on dCas12f was used as an epitope for immunoprecipitation.

[0237] For ChIP-seq, E. coli K-12 substrain MG1655 cells were transformed with the homolog system plasmids described above. Cells were grown for 16-24 h at 37° C. on solid or in liquid media, resuspended in 40 ml LB media and crosslinked with 1 ml of 37% formaldehyde (Thermo Fisher Scientific), at a final concentration of ˜1% formaldehyde. The crosslinking agent was quenched with 2.5 M glycine (˜0.25 M final concentration). Cell pellets were washed twice with 40 ml TBS buffer (20 mM Tris-HCl pH 7.5, 0.15 M NaCl) and cells equivalent to 40 ml of OD600 nm=0.6 were aliquoted. For each sample, 25 ul of Dynabeads Protein G (Thermo Fisher Scientific) were crosslinked in 1×PBS buffer (Gibco) supplemented with 5 mg/ml BSA (GoldBio) to 4 ul of anti-Flag M2 antibodies produced in mouse (Sigma-Aldrich) for at least 3 h at 4° C. In the meantime, crosslinked cell pellets were sonicated using a Covaris LE220 ultrasonicator with the following SonoLab settings: min. temp. 4° C.; set point 6° C.; max. temp. 8° C.; peak power: 420; duty factor: 30; cycles/burst: 200; 17.5 min sonication time. After conjugating, the antibody-magnetic beads were added to the sonication supernatant and incubated at 4° C. for 12-16 h. Then, the magnetic beads were washed and immunoprecipitated protein bound to crosslinked DNA was eluted. Reverse-crosslinking was performed at 65° C. overnight. Samples were treated with RNase A (Thermo Fisher Scientific) and proteinase K (Thermo Fisher Scientific) and purified using QIAquick spin columns (QIAGEN). ChIP-sequencing libraries were generated using the NEBNext Ultra II DNA Library Prep Kit for Illumina (NEB). Size selection (˜450 bp fragment size) was performed using AMPure XP Beads (Beckman Coulter) and samples were sequenced using the Illumina NextSeq 500 platform in paired-end mode with 75 cycles per end. Sequencing reads were mapped to the E. coli K-12 genome (GenBank NC_000913.3) using bowtie2 and normalized using deepTools bamCoverage and visualized in IGV using counts per million (CPM). MACS3 was used to call peaks, from which the 200 bp surrounding the peak summit were extracted and used as input for MEME-ChIP to determine DNA sequence motifs bound by dCas12f.

[0238] RIP-seq was performed similarly to ChIP-seq, but without cross-linking. Cells equivalent to 20 ml of OD600 nm=0.5 were aliquoted and washed using TBS buffer and lysed by sonication. RNA was extracted using TRIzol (Invitrogen) and purified using the RNA Clean and Concentrator Kit (Zymo). RNA was fragmented by heat, followed by RppH (NEB) and DNase (Thermo Fisher Scientific) treatment. 5′ ends were phosphorylated and 3′ ends were repaired. 3′ and 5′ adapters were ligated and reverse-transcription primers hybridized. RIP-sequencing libraries were prepared using the NEBNext Small RNA Library Prep Set for Illumina. Samples were sequenced as described above for ChIP-seq. Sequencing reads were mapped to the E. coli K-12 genome and expression plasmids using bwa-mem2 and normalized and visualized as described for ChIP-seq.

[0239] Visualization of ChIP-seq reads in IGV revealed distinct enrichment sites (peaks) across the E. coli genome for the majority of the samples, indicative of stable and specific dCas12f binding events (FIG. 35D). Bioinformatic analysis of the DNA sequences within the called peaks using MEME-ChIP revealed sequence motifs selectively bound by dCas12f, that are shared across genome-wide peaks (FIG. 35E). Those motifs likely comprise a combination of (a) DNA base pair(s) recognized via protein-DNA recognition by the protein dCas12f, called target-adjacent motifs (TAMs), akin to the recognition of protospacer-adjacent motifs, or PAMs, by canonical CRISPR-Cas systems; and (b) DNA sequences recognized by the complementary gRNA via RNA-DNA base-pairing, and in particular the seed portion of the guide, which is known to base-pair with the target DNA strongest in related CRISPR-Cas systems.

[0240] To distinguish between the TAM and guide portion, RIP-seq reads were visualized. To assess whether a gRNA was expressed from the ‘gRNA region’ or ‘conserved non-coding region’, RIP-seq reads were mapped back to the expression plasmid. Indeed, for most of the 16 homolog plasmids, strong enrichments were observed within the ‘gRNA region’, strongly supporting the existence of functional gRNAs that associate with the various dCas12f proteins (FIG. 35F). Furthermore, motifs identified by MEME-ChIP could be clearly located within the 3′ end of RIP-seq coverage, the region traditionally harboring guide sequences for canonical and well-studied type V CRISPR-Cas systems. By comparing the MEME-ChIP motifs and RIP-seq coverage as well as the underlying plasmid sequence of the ‘gRNA region’, the TAM and gRNA sequences of 9 out of 16 dCas12f homologs were determined (Table 8). The TAM and gRNA of a 10th system was identified in absence of a clear MEME-ChIP motif, by manual inspection (Pba homolog). Strikingly, no RIP-seq coverage was observed for the ‘conserved non-coding region’ suggesting that RpoE-associated dCas12f systems operate using a single gRNA. However, the Pum homolog had three distinct RIP-seq coverages within the ‘gRNA region’ potentially suggesting the presence of three functional gRNA that can be bound to dCas12f. Similarly, the Lpa homolog showed two even more well-defined RIP-seq enrichments within the ‘gRNA region’, indicative of a gRNA cluster composed of two gRNAs encoded downstream of the das12f gene (FIG. 35F).

[0241] dCas12f gRNA sequence, structure, and target Notably, gRNAs of most systems are similar in length, ranging between around 75-120 nt. A sequence alignment of gRNAs of similar length revealed general sequence conservation of the scaffold region (FIG. 36A). This also applies to the guide portion which shares striking sequence conservation (FIG. 36B). By searching the reference genomes of organisms natively encoding the chosen dCas12f homolog systems, a clear DNA target site for the gRNA was identified for the Ata homolog. The structure for this 88-nt gRNA, including its 14-nt guide portion, was predicted (FIG. 36C). AtadCas12f targets around 250 bp upstream of a susC gene (FIG. 36D). susC encodes for a TonB-dependent receptor protein SusC that is involved in transport across the outer membrane (OM) in bacteria. Furthermore, genes linked to TonB can be found in proximity to a number of the chosen dCas12f loci (FIG. 36E) and are commonly also regulated by their own set of sigma factors, including RpoE. In summary, by targeting upstream of susC, dCas12f may be involved in regulating its gene expression.

[0242] Re-programmability of gRNAs for RNA-guided DNA-targeting of dCas12f and RpoE To test whether the gRNA and TAM were correctly determined by RIP-seq and ChIP-seq, new guide sequences were cloned for one representative system (here, Ata), targeting 4 different DNA sites tiled across the E. coli K-12 genome. The native (e.g., wild-type, or WT) 14-nt guide sequence portion was replaced with a 20-nt guide sequence complementary to the genomic E. coli target, adjacent to a ‘G’ TAM. Ata dCas12f successfully targeted and bound all 4 genomic target sites, as revealed by robust ChIP-seq enrichment (FIG. 37A). Next, to test whether the sigma factor RpoE is targeted to the same loci by forming a co-complex with dCas12f, the 3×FLAG tag was moved from dCas12f to the N-terminus of RpoE. Then, ChIP-seq was performed using the same protocol, except for now focusing on DNA sites in the E. coli genome bound by RpoE. Strikingly, RpoE showed distinct enrichment at all four target sites (FIG. 37B) providing evidence for co-complex formation of RpoE and dCas12f. The four gRNAs were designed to target intergenic regions, upstream of protein-coding genes, to simultaneously test whether targeting RpoE to those sites would impact gene transcription. By applying total RNA-seq to the same four samples, the target site 4 sample showed detectable additional RNA-seq coverage not present in any of the other samples (FIG. 37C). Interestingly, target site 4 also showed the strongest dCas12f and RpoE ChIP-seq signals. In conclusion, these data provide evidence for programmable RNA-guided transcriptional activation mediated by a complex of gRNA-bound dCas12f and RpoE.

[0243] In other embodiments and experiments, three other dCas12f homologs (Smi, Lby, and Zpr) could be reprogrammed by user-defined gRNAs to target site 4 in E. coli cells (FIG. 37D), confirming that that TAM and guide sequence were correctly determined, and that these proteins are easily reprogrammable in a cellular context.

[0244] Importantly, these experiments failed to reveal any evidence of cellular toxicity, which would be expected in the case of a catalytically-active Cas12 enzyme being expressed with a genome-matching gRNA in E. coli cells. Thus, the experiments also provide evidence for these cas12f genes to indeed encode naturally catalytically deactivated Cas12f proteins that nevertheless retain the ability to target and tightly bind genomic DNA target sites matching the gRNA guide sequence.

[0245] Determining protein requirements for RNA-guided DNA targeting of RpoE-associated dCas12f While ChIP-seq provided evidence for RpoE and dCas12f interacting, the role of the HTH protein remained unclear. To address this question, the Ata homolog system was chosen and components were deleted systematically from the expression plasmid. The extent of DNA binding at target site 4 as measured by ChIP-qPCR enrichment served as the readout for the various perturbations. Results are shown in FIG. 38A. The HTH protein was not recruited to the site targeted by dCas12f and RpoE (target site 4). Furthermore, deletion of the HTH protein-coding gene does not affect recruitment of dCas12f to the target site.

[0246] Heterologous approaches to demonstrate RNA-guided gene activation are described in FIG. 38C and include a native target site from the Ata organism, as well as tiled targets upstream of the promoter, and addition of the native RNAP from Ata, if required (FIG. 38C). Plasmids for gene activation experiments are listed in Table 2.

[0247] Genome engineering applications of dCas12f The above experimental data indicate that naturally deactivated Cas12f homologs (dCas12f), which are encoded in an operon with RpoE, function as RNA-guided DNA binding proteins capable of physical recruitment of RpoE to DNA target sites specified through RNA-DNA base-pairing interactions and recognition of a cognate TAM. The minimal size of dCas12f offers distinct promise for genome engineering applications that benefit from a compact CRISPR-associated protein, as compared to other Cas12 and Cas9 homologs, and the herein disclosed dCas12f proteins are also advantageous in their minimal requirement of a TAM sequence comprising only a single guanine nucleotide adjacent to the RNA-guided DNA target site. Thus, these proteins offer unique versatility and flexibility in targetable space within a genome of interest, because of the ubiquity of “G” TAMs with an average spacing every 2 base-pairs, when considering both strands of DNA.

[0248] A large set of CRISPR-associated technologies make use of non-cleaving variants of Cas9 or Cas12, often referred to as dCas9 or dCas12, respectively. These proteins can be fused to various functional effector domains for a wide range of applications, including but not limited to: deaminases (for base editing); reverse transcriptases (for prime editing); transcriptional activator domains (for CRISPR activation, also known as CRISPRa); transcriptional repressor domains (for CRISPR interference, also known as CRISPRi); histone and/or DNA modification domains (for epigenome editing); fluorescent proteins (for genomic locus imaging); and many more. In other embodiments, editing tools are generated by fusing similar domains to the dCas12f proteins described in this work, to achieve user-defined engineering end-goals but with a far more compact RNA-guided DNA targeting proteins. These applications with dCas12f benefit from the compact coding size of the fusion construct, such that desired tools can be encoded within a single viral vector, or delivered at higher dosage using non-viral lipid nanoparticle (LNP) formulations, given the smaller size of the protein and/or RNA components.

[0249] In other embodiments, effector domains are fused directly to the RpoE protein, allowing for natural complex formation between the dCas12f protein and the RpoE protein fused to the editing reagent of interest. With this approach, additional control can be achieved by regulating the binding and assembly of the complex of dCas12f and RpoE, thereby restricting the editing output to only those cellular or physiological contexts where the binding interactions takes place.

[0250] In certain bacterial embodiments, dCas12f is used with its cognate RpoE protein, to achieve targeted gene activation using RNA-guided DNA targeting and guide RNAs targeted to specific regions upstream of target genes of interest. In this approach, a gene that is normally lowly expressed can be amplified in expression level, through dCas12f-mediated targeting of activation domains directly to a locus of interest, thus leading to local RNA polymerase (RNAP) recruitment to initiate transcription initiation of the gene(s) of interest.

### Example 10

### TnpB-Transposase Fusion Sequences, Genomic Accessions, and Genetic Coordinates

[0251] TnpB proteins are RNA-guided nucleases encoded in diverse insertion sequences (e.g., IS200/IS605 and IS607 superfamily), and are ancestral to Cas12 CRISPR RNA-guided nucleases. Evolutionary offshoots of TnpB include naturally-occurring, nuclease dead Cas12 homologs that are capable of programmable DNA-cargo transposition, in concert with other transposition proteins (e.g., TnsB, TnsC, and TniQ) (Cas12k from CRISPR-associated transposon or CAST systems). While Cas12k proteins are large polypeptides, raising potential challenges in delivering these ribonucleoprotein complexes for therapeutic applications, TnpB proteins are compact effectors that may alleviate delivery size constraints. Additionally, Cas12k-mediated recruitment of multiple transposition proteins is one potential barrier to efficient genomic modification in eukaryotic organisms. Here, fusions of TnpB and transposase proteins were identified that serve as platforms for programmable, RNA-guided genome modification.

[0252] Bioinformatic identification of TnpB-transposase fusion proteins A bioinformatic pipeline was developed to identify TnpB proteins that are genetically fused to transposase domains (FIG. 24). Profile hidden Markov models (HMMs) [using PFAM: PF01385.22, PF07282.14, PF12323.11 and TIGRFAM: TIGR01766.2] were used to search the NCBI non-redundant (NR) protein database with the trusted cutoff threshold (--cut_tc) in HMMER, resulting in the identification of 213, 164 unique proteins with TnpB-like domains. These TnpB-like proteins were then scanned with the PFAM database (vA_2021-11-15) in HMMER (--cut_tc) to annotate any additional domains identifiable in their primary sequences. 1,605 TnpB-like fusion proteins were identified, representing fusions of TnpB domains to 560 unique domains. Fifteen profile HMMs were manually selected as transposase-related domains (shown in FIG. 24), and 177 sequences containing both TnpB and the selected transposase domains were retrieved from the NR database. Since TnpB proteins are ˜300-400 amino acids in length, proteins less than 400 amino acids long were removed from the set of 177 fusions, resulting in a dataset of 71 TnpB-transposase fusion proteins.

[0253] MAFFT (with the LINSI option) was used to align the TnpB-transposase fusion proteins, and a phylogenetic tree was built in FastTree (-wag-gamma options). Genomic sequences and taxonomic information for each TnpB-transposase fusion were retrieved from NCBI using the batch-entrez tool. Taxonomy, protein size, and transposase domains detected by HMMER were used to annotate the phylogenetic tree (FIG. 25), revealing fusions of transposase domains to bacterial and archaeal TnpB proteins, in addition to eukaryotic TnpB homologs (e.g., Fanzors).

[0254] TnpB proteins utilize ωRNAs (OMEGA-RNAs) comprised of a scaffold and guide sequence to direct RuvC-mediated DNA cleavage. Genetic loci encoding TnpB/Fanzor-transposase (hereinafter, TnpB-transposase) fusion proteins, including 500 base pairs upstream and downstream of the protein coding gene, were extracted with the Biostrings package in R. Sequence covariation models described in previous work (Meers, C. et al. bioRxiv 2023.03.14.532601 (2023) doi: 10.1101/2023.03.14.532601) were used to define the boundaries of ωRNA scaffolds via the CMsearch function of INFERNAL (cutoff: e-value <1e-7). This approach resulted in the identification of ωRNA scaffolds for 10 loci encoding TnpB-transposase fusions (FIGS. 25 and 26), indicating that these proteins utilize a similar ωRNA-guided targeting mechanism to standard, unfused, TnpB proteins.

[0255] TnpB proteins are encoded in diverse insertion sequence elements (e.g., IS200/IS605 and IS607 superfamily), many of which have conserved sequences or secondary structures in the left end (LE) of the element that are recognized during the excision phase of transposition. Excision at the right end (RE) of the element occurs at the scaffold-guide boundary of the ωRNA sequence. An additional covariation model built from the LE sequences of G. stearothermophilus IS200/IS605 superfamily elements (described in Meers, C. et al. bioRxiv 2023.03.14.532601 (2023)) was used to search TnpB-transposase fusion loci via the CMsearch function of INFERNAL (cutoff: e-value <1e-8), resulting in the identification of LE sequences for one TnpB-transposase (FIGS. 25 and 26). The boundaries of the LE and RE (e.g., ωRNA scaffold-guide boundary) sequences of this fusion locus indicate that the TnpB-transposase protein-coding gene is the sole open reading frame in this element, indicating that transposition of this element is not catalyzed by another gene product contained within the element.

[0256] Structural predictions built with AlphaFold (v2.3), indicate that these fusion proteins have the signature folds of transposase and TnpB domains (example shown in FIG. 27). Additional analyses of multiple sequence alignments of TnpB-transposase sequences, guided by these structural predictions, indicated that these fusions containing TnpB and transposase residues are expected to facilitate the respective catalytic activities of each domain (e.g., nuclease and transposition activities) (example shown in FIG. 28).

[0257] Utilization of dTnpB for genome targeting and modification applications Natural TnpB-transposase fusion proteins represent a new and adaptable structural platform for programmable RNA-guided transposition. By changing the sequence of ωRNA guides, transposition of large DNA cargoes can be targeted to specific genetic addresses. In one embodiment, TnpB-transposase fusion proteins mobilize DNA constructs flanked by insertion element right end and left end sequences, and direct transposition of the intervening sequence to a specific sequence in the genome of a bacterium, archaeaon, or eukaryote, or to a non-genomic element (e.g., plasmid, bacterial artificial chromosome). A nuclear localization signal (NLS) may be included, and may be encoded at the N-terminus, C-terminus, or internally. In this embodiment, the naturally occurring genetic fusion of an RNA-guided DNA binding protein to a DNA transposase results in co-localization of the targeting and transposition proteins, resulting in robust DNA cargo insertion efficiencies.

### Materials and Methods

[0258] Bioinformatic identification of natural, nuclease-dead TnpB homologs (TldRs). An initial search of the NCBI non-redundant (NR) protein database, queried with TnpB sequences from H. pylori and G. stearothermophilus (WP_078217163.1 and WP_047817673.1, respectively) in Jackhmmer, resulted in the identification of 95,731 unique TnpB-like proteins, which were further clustered at 50% amino acid identity (across 50% sequence coverage) via CD-HIT to produce a set of 2,646 representative TnpB sequences. A multiple sequence alignment (MSA) was then constructed with MAFFT (EINSI; four rounds), which was trimmed manually with trimAl (90% gap threshold; v1.4.rev15). The resulting alignment of TnpB/TldR homologs was used to construct a phylogenetic tree in IQTree (WAG model, 1000 replicates for SH-aLRT, aBayes, and ultrafast bootstrap), which was annotated and visualized in ITOL.

[0259] To assess the conservation of RuvC catalytic residues in each TnpB protein sequence, each sequence in the MSA was compared to structurally characterized orthologs (e.g., DraTnpB from ISDra2 and Cas12f; PDB ID 8H1J and 7L48, respectively). This comparison was performed by aligning each candidate, as well as the homologs represented in the closest five tree branches on either side of it, to DraTnpB and UnCas12f using the AlignSeqs function of the DECIPHER package in R. TnpB-like protein sequences with less than two conserved residues of the RuvC DED catalytic motif were extracted using the Biostrings package in R. For each sequence with less than two active site residues identified (defined as a TnpB-like nuclease-dead Repressor, or TldR), related homologs were retrieved from initial sequence clusters, and additional related homologs were identified via BLASTP searches of the NR protein database (e-value <1e-50, query coverage >80%, max target sequences=50). Each representative sequence and all of their cluster members were used as queries in these BLASTP searches, and the active sites from BLAST hits were checked by aligning proteins to structurally determined representatives, as described above. This approach resulted in the identification of 494 TldR homologs. Genomes encoding each TldR were retrieved from NCBI using the batch-entrez tool. TldR-encoding loci (e.g., tldR+/−20 kbp) were extracted using the Biostrings package in R, and each tldR locus was annotated with Eggnog (-m diamond--evalue 0.001--score 60--pident 40--query_cover 20--subject_cover 20--genepred prodigal--go_evidence non-electronic-- pfam_realign none). Annotated tldR loci were manually inspected in Geneious.

[0260] Bioinformatic analyses of fliC_{P}-, oppf-, and csrA-associated TldR homologs. To further investigate fliC-associated TldR homologs, cluster members were extracted for three representative branches in the tree shown in FIG. 1 (WP_193971683.1, WP_064735610.1, and WP_048785942.1). The protein file representing these combined clusters was supplemented with additional homologs identified via BLASTP searches of the NR database. The resulting concatenated protein file included both TldR and related TnpB sequences. To increase the diversity of TnpB proteins represented in this dataset, three additional TnpB homologs (WP_269608765.1, WP_024186316.1, WP_059759460.1) were identified and manually added to this protein file via web-based BLASTP searches queried with the TnpB protein sequences already present in the dataset (e-value <0.05). An MSA was constructed from these sequences and DraTnpB using the AlignSeqs function of the DECIPHER package in R to verify the active site composition of each ortholog. To determine which tldR tnpB genes were associated with fliC, Eggnog annotation information was analyzed for each locus (described above) and TldR/TnpB sequences that were encoded within three open reading frames of fliC were extracted.

[0261] A locus was defined as phage-associated if it contained four or more gene annotations that contained the word “Phage”, “phage”, “Viridae”, or “viridae”. TldR/TnpB protein sequences were then de-duplicated via CD-HIT (-c 1.0), and an MSA was built in MAFFT (LINSI) from the resulting set of 160 unique proteins. Protein domain coordinates displayed around the tree in FIG. 2C were inferred by cross-referencing the MSA and predicted structures. The phylogenetic tree shown in FIG. 2C was built from the TldR/TnpB MSA in FastTree (-wag-gamma) and was annotated and visualized in ITOL. Structural models of each candidate shown in FIG. 1D were predicted with AlphaFold (v2.3) and displayed with ChimeraX (v1.6); MSAs were visualized in Jalview.

[0262] To interrogate oppF-associated TldR sequences, cluster members and additional homologs identified via BLASTP searches of the NR database (e-value <1e-50, query coverage >80%, max target sequences=50) for six branches representing TldR proteins in the FIG. 1C tree (RBR34854.1, WP_016173224.1, WP_156233666.1, NTQ19983.1, OTP13636.1, OSH30650.1) were extracted. These sequences were concatenated with cluster members and additional homologs identified through an identical BLASTP search of one representative TnpB branch (EOH94253.1) that corresponded to the closest branch to the six TldR branches in the tree. To increase the diversity of related TnpB proteins represented in this dataset, three additional TnpB homologs (WP_242450195.1, WP_028983493.1, WP_277281207.1) were identified and manually added to this protein file via web-based BLASTP searches queried with the TnpB protein sequences already present in the dataset (e-value <0.05). Genomes encoding TldR/TnpB proteins were downloaded from NCBI using the Batch-entrez tool, relevant loci (tldR tnpB+/−20 kbp) were extracted using the Biostrings package in R, and each locus was annotated with Eggnog (see above). Each TldR/TnpB protein was individually aligned to DraTnpB using the AlignSeqs function of the DECIPHER package in R to verify its RuvC active site composition. TldR/TnpB sequences were then deduplicated via CD-HIT (−c 1.0), and an MSA was built in MAFFT (LINSI) from the resulting set of 204 unique proteins. An initial phylogenetic tree was constructed in FastTree (-wag-gamma), and this tree was used to guide the selection of eight representative TldRs and four representative TnpBs (shown in FIG. 19) that were structurally predicted with ColabFold (v1.5). These twelve predicted structures were used to guide an alignment of TldR/TnpB protein sequences in Promals3D, and the resulting MSA was used to build the tree in FIG. 6 in FastTree (-wag-gamma). Protein domain coordinates displayed around the tree in FIG. 6 were inferred by cross referencing the MSA and predicted structures. The phylogenetic tree was annotated and visualized in ITOL.

[0263] To probe oppF-associated TldR loci, cluster members and additional homologs identified via BLASTP searches of the NR database (e-value <1e-50, query coverage >80%, max target sequences=500) for one TldR protein in the FIG. 1C tree (WP_204886977.1) were extracted. Genomes encoding TldR/TnpB proteins were downloaded from NCBI using the Batch-entrez tool, relevant loci (tldR tnpB+/−20 kbp) were extracted using the Biostrings package in R, and each locus was annotated with Eggnog (see above). Each TldR/TnpB protein was individually aligned to DraTnpB using the AlignSeqs function of the DECIPHER package in R to verify its RuvC active site composition. TldR/TnpB sequences were then deduplicated via CD-HIT (-c 1.0), resulting in 41 unique TldR proteins.

[0264] Bioinformatic identification of TldR-associated gRNA sequences. To define the boundaries of gRNA scaffolds in fliC_{P}-tldR loci, a general gRNA covariance model (CM) described in Meers, C. et al. (Nature 622, 863-871 (2023)) was used. The CMsearch function of Infernal (Inference of RNA alignments; v1.1.2) was used to scan nucleotide sequences of tldR and 500-bp flanking windows, resulting in the identification of putative gRNA scaffold sequences. These TldR-associated gRNA scaffold boundaries were confirmed by comparing fliC_{P}-tldR loci to ωRNAs from confidently predicted annotations of catalytically active TnpB loci. Putative TldR guide sequences could then be retrieved from the 3′ boundary of putative gRNA scaffolds, enabling prediction of native fliC_{P}-associated TldR targets. Putative guides are listed in the sequence tables below).

[0265] An analogous search of oppF-associated tldR loci with a general gRNA CM failed to identify putative gRNA sequences. For this group of tldR loci, a new CM was built from ωRNA sequences associated more closely related TnpB loci. Using the comparative genomics strategy outlined in FIG. 3A, the putative transposon right end (RE) was manually identified for one TnpB-encoding IS element (WP_113785139.1 in KZ845747). The nucleotide sequences for all the related tnpB genes and 500 bp of sequence downstream of tldR were aligned with MAFFT (LINSI). The resulting alignment was trimmed at the 3′ end to the position of the ωRNA scaffold-guide boundary identified for the WP_113785139.1 locus. This putative set of TnpB ωRNA sequences was used realigned with LocaRNA (--max-diff-at-am=25--max-diff=60--min-prob=0.01--indel=−50--indel-opening=−750--plfold-span=100--alifold-consensus-dp; v2.0.0), and a CM (ABC_gRNA_v1) was built and calibrated with Infernal. The CMsearch function of Infernal was then used to search sequences composed of tldR tnpB and 500 bp of downstream sequence with the ABC_gRNA_v1 CM. This search resulted in gRNA identification for some, but not all, tldR loci. Thus, a second gRNA CM was built by extracting the newly identified TldR/TnpB gRNA sequences from their respective genomes, merging them with the sequences used to construct ABC_gRNA_v1, aligning the prospective gRNA dataset in LocaRNA, and building and calibrating a new CM with Infernal (ABC_gRNA_v2). When sequences comprising tldR tnpB and 500 bp downstream were scanned with the ABC_gRNA_v2 CM, via CMsearch, putative gRNA sequences were identified for the remaining tldR loci (listed in the sequence tables below).

[0266] Visualization of RNA-seq data from the NCBI short read archive (SRA) and gene expression omnibus (GEO)). To assess gRNA expression from a representative fliC_{P}-tldR locus, an RNA-seq dataset was downloaded from the NCBI SRA (accession: ERR6044061). Reads were aligned to the Enterobacter cloacae AR_154 genome (CP029716.1) with using bwa-mem2 (v2.2.1) in paired-end mode with default parameters, and alignments were converted to BAM files with SAMtools. Bigwig files were generated with the bamCoverage utility in deepTools, and unique reads mapping to the forward strand were visualized with the Integrated Genome Viewer (IGV). Expression of gRNA and oppA from an oppf-tldR locus was assessed by downloading an RNA-seq analysis from the NCBI GEO (accession: GSE115009). Normalized coverage files (ID-005241, ID-005244, ID-005245, ID-005246) for the forward strand were visualized in IGV.

[0267] Plasmid and E. coli strain construction. All strains and plasmids used in this study are described in Tables 1 and 2, respectively, and a subset is available from Addgene. In brief, genes encoding candidate TldR and TnpB homologs (Table 3), alongside their putative gRNAs, were synthesized by GenScript and subcloned into the Pfol and Bsu36i restriction sites of pCDFDuet-1, to generate pEffector, similar to Meers, C. et al. (2023). Expression vectors contained constitutive J23105 and J23119 promoters driving expression of tldR/tnpB and the gRNA, respectively, and tldR/tnpB genes encoded an appended 3×FLAG-tag at the N-terminus. gRNAs for fliC_{P}-associated TldRs were designed to target the host fliC 5′ UTR site, whereas gRNAs of oppF-associated TldRs were engineered to target the genomic site natively targeted by a Gs/TnpB3 homolog. Derivatives of these pEffector plasmids, or their associated pTarget plasmids (for plasmid interference assays), were cloned using a combination of methods, including Gibson assembly, restriction digestion-ligation, ligation of hybridized oligonucleotides, and around-the-horn PCR. Plasmids were cloned, propagated in NEB Turbo cells (NEB), purified using Miniprep Kits (Qiagen), and verified by Sanger sequencing (GENEWIZ).

[0268] A custom E. coli K12 MG1655 strain that contained genomically-encoded sfGFP and mRIP genes was constructed by adding three target sites adjacent to bioinformatically predicted TAM sequences upstream of the mRFP ORF, in between the constitutive promoter driving RFP expression and the corresponding ribosome binding site (sSL3580; derivative of GenBank: NC_000913.3) (Table 1). The original strain (with genomic sfGFP and mRFP) was a gift from L. S. Qi. The inserted target sites represent 25-bp sequences derived from the 5′ UTR of host fliC (Enterobacter cloacae complex sp. strain AR_0154; GenBank: CP029716.1), an ABC transporter gene (Enterococcus faecium strain BP657; GenBank: CP059816.1), and a GstTnpB3 native target used in Meers, C. et al. (2023).

[0269] Chromatin immunoprecipitation sequencing (ChIP-seq) and motif analyses of genomic sites bound by TldR. ChIP-seq experiments and data analyses were generally performed as described previously (Meers, C. et al. (2023) and Hoffmann, F. T. et al. Nature 609, 384-393 (2022)), except for the use of sSL3580. In brief, E. coli MG1655 cells were transformed with pEffector and incubated for 16 h at 37° C. on LB-agar plates with antibiotic (200 μg ml⁻¹ spectinomycin). Cells were scraped and resuspended in LB broth. The OD₆₀₀ was measured, and approximately 4.0×10⁸ cells (equivalent to 1 ml with an OD₆₀₀ of 0.25) were spread onto two LB-agar plates containing antibiotic (200 μg ml⁻¹ spectinomycin). Plates were incubated at 37° C. for 24 h. All cell material from both plates was then scraped and transferred to a 50-ml conical tube. Cross-linking was performed in LB medium using formaldehyde (37% solution; Thermo Fisher Scientific) and was quenched using glycine, followed by two washes in TBS buffer (20 mM Tris-HCl pH 7.5, 0.15 M NaCl). Cells were pelleted and flash-frozen using liquid nitrogen and stored at −80° C.

[0270] Chromatin immunoprecipitation of FLAG-tagged TnpB and TldR proteins was performed using Dynabeads Protein G (Thermo Fisher Scientific) slurry (hereafter, beads or magnetic beads) conjugated to ANTI-FLAG M2 antibodies produced in mouse (Sigma-Aldrich). Samples were sonicated on a M220 Focused-ultrasonicator (Covaris) with the following SonoLab 7.2 settings: minimum temperature, 4° C.; set point, 6° C.; maximum temperature, 8° C.; peak power, 75.0; duty factor, 10; cycles/bursts, 200; 17.5 min sonication time. After sonication, a non-immunoprecipitated input control sample was frozen. The remainder of the cleared sonication lysate was incubated overnight with anti-FLAG-conjugated magnetic beads. The next day, beads were washed, and protein-DNA complexes were eluted. The non-immunoprecipitated input samples were thawed, and both immunoprecipitated and non-immunoprecipitated controls were incubated at 65° C. overnight to reverse-crosslink proteins and DNA. The next day, samples were treated with RNase A (Thermo Fisher Scientific) followed by Proteinase K (Thermo Fisher Scientific) and purified using QIAquick spin columns (QIAGEN).

[0271] ChIP-seq Illumina libraries were prepared for immunoprecipitated and input samples using the NEBNext Ultra II DNA Library Prep Kit for Illumina (NEB). Following adapter ligation, Illumina barcodes were added by PCR amplification (12 cycles). ˜450-bp DNA fragments were selected using two-sided AMPure XP bead (Beckman Coulter) size selection. DNA concentrations were determined using the DeNovix dsDNA Ultra High Sensitivity Kit and dsDNA High Sensitivity Kit. Illumina libraries were sequenced in paired-end mode on the Illumina NextSeq platform, with automated demultiplexing and adapter trimming (Illumina). >2,000,000 raw reads, including genomic- and plasmid-mapping reads, were obtained for each ChIP-seq sample.

[0272] Following sequencing, paired-end reads were trimmed and mapped to a custom E. coli K12 MG1655 reference genome (derivative of GenBank: NC_000913.3). Genomic lacZ and lacl regions partially identical to plasmid-encoded genes were masked in all alignments (genomic coordinates: 366,386-367,588). Mapped reads were sorted and indexed, and multi-mapping reads were excluded. Alignments were normalized by counts per million (CPM) and converted to 1-bp-bin bigwig files using the deepTools2 command bamCoverage, with the following parameters:--normalizeUsing CPM-bs 1. CPM-normalized reads were visualized in IGV. Genome-wide views were generated using plots of maximum read coverage values in 1-kb bins. Peak calling was performed using MACS3 (version 3.0.0a7) using the non-immunoprecipitated control sample of EcoTldR as reference. 200-bp sequences for each peak were extracted from the E. coli reference genome using BEDTools (v2.30.0), and sequence motifs were identified using MEME-ChIP (5.4.1).

[0273] RNA immunoprecipitation sequencing (RIP-seq) of RNA bound by TldR. Cells harvested for RIP-seq were cultured as described for ChIP-seq using an E. coli K12 MG1655 strain expressing sfGFP and mRFP (sSL3580). Colonies from a single plate were scraped and resuspended in 1 ml of TBS buffer (20 mM Tris-HCl pH 7.5, 0.15 M NaCl). Next, the OD₆₀₀ was measured for a 1:20 mixture of the cell suspension and TBS buffer, and a standardized amount of cell material equivalent to 20 ml of OD₆₀₀=0.5 was aliquoted. Cells were pelleted by centrifugation at 4,000 g and 4° C. for 5 min. The supernatant was discarded, and pellets were stored at −80° C.

[0274] Antibodies for immunoprecipitation were conjugated to magnetic beads as follows: for each sample, 60 μl Dynabeads Protein G (Thermo Fisher Scientific) were washed 3× in 1 ml RIP lysis buffer (20 mM Tris-HCl pH 7.5, 150 mM KCl, 1 mM MgCl₂, 0.2% Triton X-100), resuspended in 1 ml RIP lysis buffer, and combined with 20 μl anti-FLAG M2 antibody (Sigma-Aldrich), and rotated for >3 h at 4° C. Antibody-bead complexes were washed 3× to remove unconjugated antibodies, and resuspended in 60 μl RIP lysis buffer per sample.

[0275] Flash-frozen cell pellets were resuspended in 1.2 ml RIP lysis buffer supplemented with complete Protease Inhibitor Cocktail (Roche) and SUPERase⋅In RNase Inhibitor (Thermo Fisher Scientific). Cells were then sonicated for 1.5 min total (2 sec ON, 5 sec OFF) at 20% amplitude. Lysates were centrifuged for 15 min at 4° C. at 21,000 g to pellet cell debris and insoluble material, and the supernatant was transferred to a new tube. At this point, a small volume of each sample (24 μl, or 2%) was set aside as the “input” starting material and stored at −80° C.

[0276] For immunoprecipitation, each sample was combined with 60 μl antibody-bead complex and rotated overnight at 4° C. Next, each sample was washed 3× with ice-cold RIP wash buffer (20 mM Tris-HCl, 150 mM KCl, 1 mM MgCl₂). After the last wash, beads were resuspended in 1 ml TRIzol (Thermo Fisher Scientific) and RNA was eluted from the beads by incubating at RT for 5 min. A magnetic rack was used to separate beads from the supernatant, which was transferred to a new tube and combined with 200 μl chloroform. Each sample was mixed vigorously by inversion, incubated at RT for 3 min, and centrifuged for 15 min at 4° C. at 12,000 g. RNA was isolated from the upper aqueous phase using the RNA Clean & Concentrator-5 kit (Zymo Research). RNA from input samples was isolated in the same manner using TRIzol and column purification. High-throughput sequencing library preparation was performed as described below for total RNA-seq of Enterobacter strains. Libraries were sequenced on an Illumina NextSeq 550 in paired-end mode with 75 cycles per end.

[0277] Adapter trimming, quality trimming, and read length filtering of RIP-seq reads was performed as described below for total RNA-seq experiments. Trimmed and filtered reads were mapped to a reference containing both the MG1655 genome (NC_000913.3) and plasmid sequences using bwa-mem2 v2.2.1, with default parameters. Mapped reads were sorted, indexed, and converted into coverage tracks as described below for total RNA-seq experiments.

[0278] Plasmid cleavage assays. Plasmid interference assays were generally performed as previously described in Meers, C. et al. (2023). E. coli K12 MG1655 (sSL0810) cells were transformed with pTarget plasmids (vector sequences are listed in Table 2), and single colony isolates were selected to prepare chemically competent cells. Next, cells were transformed with 400 ng of pEffector plasmid or empty vector. After 3 h recovery at 37° C., cells were pelleted by centrifugation at 4,000 g for 5 min and resuspended in 100 μl of H²O. Cells were then serially diluted (10×), plated as 8 μl spots onto LB agar supplemented with spectinomycin (200 μg ml⁻¹) and kanamycin (50 μg ml⁻¹), and grown for 16 h at 37° C. Plate images were taken using a BioRad Gel Doc XR+ imager.

[0279] Plasmid interference assays were quantified by determining the number of colony-forming units (CFU) following transformation. Experiments were performed as described above, however for each experiment, 30 μl of a 10-fold dilution were plated onto a full LB agar plate containing spectinomycin (200 μg ml⁻¹) and kanamycin (50 μg ml⁻¹). CFUs were counted following 16 h of growth at 37° C. and reported as CFUs per μg of transformed pEffector plasmid.

[0280] RFP repression assays. The RFP repression assay protocol was adapted from previous studies (Meers, C. et al. (2023) and Hoffmann, F. T. et al. (2022)). An E. coli strain expressing a genomically-integrated sfGFP (sSL3761), derived from a strain kindly provided by L. S. Qi (Cell 152, 1173-1183 (2013)), was co-transformed with 200 ng of pEffector and pTarget (vector sequences listed in Table 2). Protein components and guide RNAs (gRNA, sgRNA or crRNA) were constitutively expressed from pEffector. pTargets were cloned to encode an mRFP gene under the control of a constitutive promoter. For RFP repression assays shown in FIG. 4G, gRNAs were designed to target the constitutive RFP promoter on either strand, and 5-bp TAM sequences were inserted 5′ of each target site. For RFP repression assays shown in FIG. 4H, 25-bp sequences containing the TAM/PAM and target site in either orientation were inserted in between the mRFP promoter and ribosome binding site.

[0281] Transformed cells were plated on LB-agar with antibiotic selection, and at least three of the resulting colonies on each plate were used to inoculate overnight liquid cultures. For each sample, 1 μl of the overnight culture was used to inoculate 200 μl of LB medium on a 96-well optical-bottom plate. The fluorescence signals for sfGFP and mRFP were measured alongside the OD₆₀₀ using a Synergy Neo2 microplate reader (Biotek), while shaking at 37° C. for 16 h. For all samples, the fluorescence intensities at OD₆₀₀=1.0 were used to determine the fold repression for each TldR or Cas targeting complex, and the data were normalized to the non-repressed signal for sSL3761. Background GFP and RFP fluorescence intensities at OD₆₀₀=1.0 were determined using an E. coli K12 MG1655 strain (sSL0810) lacking sfGFP and mRFP genes, and were subtracted from all RFP and GFP fluorescence measurements.

[0282] Total RNA sequencing of Enterobacter strains. Enterobacter cloacae strains (sSL3710, sSL3711, and sSL3712) were obtained from a CDC isolate panel (Enterobacterales Carbapenemase Diversity; CRE in ARIsolateBank), and an Enterobacter sp. BIDMC93 strain (sSL3690) was kindly provided by Ashlee M. Earl at the Broad Institute; strain information is listed in Table 1. Biological replicates were obtained by isolating 3 individual clones of each Enterobacter strain on LB-agar plates and using these to inoculate overnight cultures in liquid LB media. All strains were grown at 37° C. without antibiotics and with agitation when in liquid medium (240 rpm), in a BSL-2 environment. For total RNA-seq library preparation, RNA was purified from 2 mL of exponentially growing cultures of sSL3690, sSL3710, sSL3711, and sSL3712 since RT-qPCR analyses of fliC expression showed that the TldR-mediated was more robust in exponential than in stationary phase. RNA was extracted using TRIzol and column purification (NEB Monarch RNA cleanup kit), and samples were then individually diluted in NEBuffer 2 (NEB) and fragmented by incubating at 92° C. for 1.5 min. The fragmented RNA was simultaneously treated with RppH (NEB) and TURBO DNase (Thermo Fisher Scientific) in the presence of SUPERase. In RNase Inhibitor (Thermo Fisher Scientific), in order to remove DNA and 5′ pyrophosphate. For further end repair to enable downstream adapter ligation, the RNA was treated with T4 PNK (NEB) in 1×T4 DNA ligase buffer (NEB). Samples were column-purified using RNA Clean & Concentrator-5 (Zymo Research), and the concentration was determined using the DeNovix RNA Assay (DeNovix). Illumina adapter ligation and cDNA synthesis were performed using the NEBNext Small RNA Library Prep kit, using 100 ng of RNA per sample. High-throughput sequencing was performed on an Illumina NextSeq 550 in paired-end mode with 75 cycles per end.

[0283] RNA-seq reads were processed using cutadapt (v4.2) to remove adapter sequences, trim low-quality ends from reads, and exclude reads shorter than 15 bp. Trimmed and filtered reads were aligned to reference genomes (accessions listed in Table 1) using bwa-mem2 (v2.2.1) in paired-end mode with default parameters. SAMtools (v1.17) was used to filter for uniquely mapping reads using a MAPQ score threshold of 1, and to sort and index the unique reads. Coverage tracks were generated using bamCoverage (v3.5.1) with a bin size of 1, read extension to fragment size, and normalization by counts per million mapped reads (CPM) with exact scaling. Coverage tracks were visualized using IGV. For transcript-level quantification, the number of read pairs mapping to annotated transcripts was determined using featureCounts (v2.0.2). The resulting counts values were converted to transcripts-per-million-mapped-reads (TPM) by normalizing for transcript length and sequencing depth. For differential expression analysis between genetically engineered Enterobacter strains, the counts matrix was first filtered to remove rows with fewer than 10 reads for at least 3 samples. The filtered matrix was then processed by DESeq2 (v1.40.2) in order to determine the log 2 (fold change) for each transcript between the experimental conditions, as well as the Wald test P value adjusted for multiple comparisons using the Benjamini-Hochberg approach. Significantly differentially expressed genes were determined by applying thresholds of |log 2 (fold change) |>1 and adjusted P value <0.05.

[0284] Construction of Enterobacter BIDMC93 mutants. Enterobacter cloacae strains AR_154 and AR_163 (sSL3711 and sSL3712; respectively) are both resistant to the antibiotics commonly used for colony selection following plasmid transformation, so we proceeded with recombineering in Enterobacter sp. BIDMC93. Genomic mutants (listed in Table 1) were generated using Lambda Red recombineering. Mutants were designed to introduce a chloramphenicol resistance cassette at each disrupted locus. The chloramphenicol resistance cassette was amplified by PCR with Q5 High Fidelity DNA Polymerase (NEB), using primers that contained at least 50-bp of homology to the disrupted locus. Amplified products were resolved on a 1% agarose gel and purified by gel extraction (QIAGEN). Electrocompetent Enterobacter sp. BIDMC93 cells were prepared containing a temperature-sensitive plasmid encoding Lambda Red components under a temperature-sensitive promoter (pSIM6). Immediately prior to preparing electrocompetent cells, Lambda Red protein expression was induced by incubating cells at 42° C. for 25 min. 200-500 ng of each insert was used to transform cells via electroporation (2 kV, 200 Ω, 25 μF). Cells were recovered by shaking in 1 mL of LB media at 37° C. overnight. After recovery, cells were spread on 100 mm plates with 25 μg/mL chloramphenicol and grown at 37° C. Chloramphenicol-resistant colonies were genotyped by Sanger sequencing (GENEWIZ) to confirm the desired genomic mutation.

[0285] RT-qPCR to assess host fliC′ transcription in Enterobacter sp. BIDMC 93. 200 ng of the purified total RNA was used as an input for the reverse transcription reaction. First, total RNA was treated with 1 μl dsDNase (Thermo Fisher Scientific) in 1×dsDNase reaction buffer in a final volume of 10 μl and incubated at 37° C. for 20 min. Then, 1 μl of 10 mM dNTP, μl of 2 μM oSL14254, and 1 μl of 2 μM oSL 14280 were added for gene-specific priming (rrsA and fliC, respectively), and reactions were heated at 65° C. for 5 min. Reactions were then placed directly on ice, followed by addition of 4 μl of SSIV buffer, 1 μl 100 mM DTT, 1 μl SUPERase⋅In™ (Thermo Fisher Scientific), and 1 μl of SuperScript IV Reverse Transcriptase (200 U/μl, Thermo Fisher Scientific), followed by incubation at 53° C. for 10 min, and then incubation at 80° C. for 10 min. Quantitative PCR was performed in 10 μl reaction containing 5 μl SsoAdvanced™ Universal SYBR Green Supermix (BioRad), 1 μl H₂0, 2 μl of primer pair at 2.5 μM concentration, and 2 μl of 100-fold diluted RT product. Two primer pairs were used: oSL14254/oSL14255 was used to amplify rrsA cDNA, and oSL14279/oSL14280 was used to amplify host fliC cDNA. Reactions were prepared in 384-well clear/white PCR plates (BioRad), and measurements were performed on a CFX384 RealTime PCR Detection System (BioRad) using the following thermal cycling parameters: polymerase activation and DNA denaturation (98° C. for 2.5 min), 35 cycles of amplification (98° C. for 10 s, 62° C. for 20 s). For each sample, Cq values were normalized to that of rrsA (reference housekeeping gene). Then, the normalized Cq values were compared to the normalized Cq value of fliC in the control strain (sSL3868, knock-in of cmR downstream of tldR in BIDMC93), to obtain relative expression levels, such that a value of one is equal to that of the control and higher values indicate higher expression levels.

[0286] Data availability. Next-generation sequencing data are available in the National Center for Biotechnology Information (NCBI) Sequence Read Archive: XX (BioProject Accession: XX) and the Gene Expression Omnibus (GSE245749). The published genome used for ChIP-seq analyses was obtained from NCBI (GenBank: NC_000913.3). The published genomes used for bioinformatics analyses were obtained from NCBI.

Sequences
TldR Sequences

| SEQ ID | |
|---|---|
| NO | Amino Acid Sequence |
| 1 | MIKKQAFKFLLEPNKGQLSDFLAFAGSCRFVYNKGLALLNENYRSGKKFIGYIQLASELVEWKNEESLS |
| | WLKEAPSQCLQQSLRDLDRAFRNFFTGKSQYPKFKKKGRHDSFRIPCQRVRVDQEKKLVSLPKVGWVK |
| | YRKSREIIGDLKNATISLNQGKWYISFNTEQTVPDPIHPSDIKSTIVLNNVDSVHLSSGGGGDNTYQAEEK |
| | KKLIRLNKTLTRRKKHSQNWLKTKGKIDRVKSKAARIRLDNIHKATTAICKNHAVVEVVNLMDSVSDK |
| | NDNTLSMRYEFVRQLIYKQEWLGGEVIRRESKPL |
| 2 | KDKHGWYVKFPKAVLQAGCVRDRYDLGKMDLHEQKLKEVRLIPNGDTIKLEIVCEIEIKEPTITIHEATR |
| | VTGIDIGVDNLMAIAFTSGHHPVLIKGNEIKAVNQYYNKQIAHYRSLLRTGKKDSKGIHQTKRMKRISEK |
| | RNRRVKDILHKASRKIINLCVEEGIEVIVVGNNAGWKKRIHMGKKNNQTFVQIPFRTLIEMIKYKGEAAG |
| | IRVVVCEEAIQSKASSIDEDQIPVYGNDVAHTFTGKRIKRGLYRSKWHSNECRYQWSKQYHTKSISMYA |
| | RARAME |
| 3 | MLLFAGACRFVYNKGLALLKESYESGQKHMHYNQLAPLLVEWKSDPALSWLKQAPSQSLQQSLRDLD |
| | KAFSNFFYGKAEHPRFKKKGQHDAFRFPSQRVKVDQEKQLVLLPKLGWVKYRKSRNITGAIKNVSISGK |
| | LGNWYISFNTQTDIAEPIHPAISKIGVYVDTKKNITLSDGTQYIPPQSLITLPKQIQRLTNCLRKKNRYSNN |
| | WLKSKHRINRLSSRLNQVKVDYLHKASTAISKNHAMIVIADFEKKSFSADKQQKNLTTCEKSTSIHYELI |
| | RQLTYKQEWHGGLVIKLSAEKNVDAESAWTKACNLLAAGLAVTACGGEVSKDSPMKQEP |
| 4 | MVLKHKAYKFRIYPTKEQEILIAKTIRCSRFVFNHFLSKWDETYKTTGKGLSYGSCSKEIPLLKQEFDWL |
| | KEVDSTSVQMSVKHLADAFDRFFNKQNKRPRFKSKRHPVQSYKTNVQGKNQLPEVSIFGNKLKLPKLK |
| | WVRFAHSKQITGRILNATIRRNASGKYFVSLLVEHAILSDGTVYKNDRYFRLLEKKLVREQRKLSRRQRI |
| | ALNKKVKLSEARNYQKQKQRVARIHEKIANGYRPRSSKTTTSSGLRPCR |
| 5 | MRTVEFKLSLNRYQQAKVDSWLAIQRWIWNQGLHLLEEFNSFSTWDKVSQTWVPCCPIPWTYYRDSVG |
| | QLIAFTRIAKKKPYRMSCPIPQVYPKPVLESPTFFGLLYYFAQKNHSDKPWFCDVPCRFVAGTLKSLADA |
| | WTAYKSGKRQRPRYKQYKDKFRTLINNNAKPIKISGKRITLPKLGKVTVKTLDRRWLKSVPIVTLKIVKE |
| | PSGYYLQLSGCFPVNKEKPTNKAVGVSLGYSHLTTDGEKVVEPPNFYRKMEKQLVQLQRQLCRQQKTC |
| | PISTYNPSLGEHFLSCPIDPGKGANRAKTQRKISRLYEKIRRSRLATNHKISTYLVREYDAIAIVKPEIKRIT |
| | RKPIAIVNKLGEFEHNGANHKAEFSKGLLDNSLGQLAGLIKQKASVQGRELISVSPKDLPDELKQCTEKR |
| | REQLQWSRAVYSTNFSRRYRAWEWELTPGESTETLNQEPPQGGLSCDAGTTSNFILESIGLCGVGDIPETI |
| | PLLQNQSEANSSY |
| 6 | MLLFAGACRFVYNKGLALLKESYESGQKHMHYNQLAPLLVEWKSDPALSWLKQAPSQSLQQSLRDLD |
| | KAFSNFFYGNAEHPRFKKKGQHDAFRFPSQRVKVDQEKQLVLLPKLGWVKYRKSRDITGDIKNVSISGK |
| | LGKWYISFNTQTDIEEPVHPAISKIGVYVDAKKNITLSDGTQYIPPQSLITLPKQIQRLTNCLRKKNRYSNN |
| | WLKSKHRINRLSSRLNQVKVDYLHKASTAISKNHAGDAANLLI |
| 7 | MAIKATRTYVGSIKNHQQVCDGLDSLGDSASKIWNVARWTADRIWDATGEIPDSGALKSYMKNQPCW |
| | KDLNAQSSQKVIEELSDAFQSWFDLRHKFDEANPPGYRKHGNTRPRSTVTFKEDGFKHDPENDRVRLSK |
| | GSNLKKHFSDFLLCEYQTRPDVDLSEVNSVQNVRAVWNGDEWELHFVCDVELESADTAGDGIAGIDLG |
| | ITNIATVAFPDEYVLYPGNSLKEDKHYFTRAEYDTEGESGPSEQSMWARRKLSKRETHYYHTLTDAIIAE |
| | CVERGVGTLAVSWPEDVRASDXVRLGQDREQEAPLVGVRPHLPVPRIQRRDAGCRGTERERVEHLENV |
| | FTMWRRHEIEPCRTWPVRLFVVRVGSQRRL |
| 8 | MIKKQAFKFLLEPNKGQLSDFLAFAGSCRFVYNKGLALLNENYRAGKKFIGYNKLASELVEWKNEESLS |
| | WLKEAPSQCLQQSLRDLDRAFRNFFTGKSQYPKFKKKGRHDSFRIPCQRVRVDQEKKLVSLPKVGWVK |
| | YRKSREIIGDLKNATISLNQGKWYISFNTEQTVPEPIHPSDIKTTIILNNVNSVHLSSGVGGDNTYQAEEKK |
| | KLVRLNKTLTRRKRYSKNWLKTKGKIDRVKSKAARIRLDNIHKATTAICKNHAVVEVVNLMDSVFDKN |
| | DNTLSMRYEFVRQLIYKQEWLGGEIIRRESKLL |
| 9 | MQHLDGFFKLRDQIDYRALPAQANQNVLHMLYRDWKSFFAALADYKAHPDKYEAIPHIPRYADKDGC |
| | KPLIFTNQICKLRKDKHGWYVKFPKAVLQAGCVRDRYDLGKMDLHEQKLKEVRLIPNGDTIKLEIVCEIE |
| | IKEPTITIHEATRVAGIDIGVDNLTAIAFTSGHHPVLIKGNEIKAVNQFYNKQIAHYRSLLRTGKKDSKGIH |
| | QTKRMKRISEKRNRRVKDILHKASRKIIDLCVEEGIEVIVVGNNAGWKKRIHMGKKNNQTFVQIPFHT |
| 10 | MAIQVTRTYVGHITNQQRVRDDLDLLGDAASKLWNVARWTVDRVWDAIGEIPDEGSLKAYMKTRECW |
| | KNLNAFSSQKVIEELSDAFQSWFDVRHKDETANPPGYRKEYDTRPRSTVTFKANGFKHDPDHDQVRLSK |
| | GANLKDGRSDFVLCEYDTRNDVDLGTVDTVQNVRAVWNGDEWEIHFVVKETIETPEPPGDGVAGVDL |
| | GVSNIAAVAFPDKYVLYPGNTIKQDNHYFQQEEYDTEGENGPSKQAQRLRQKRKRRETHFYHTLTKTII |
| | EKCVDRGIGTLVVGWPEDVRSDDLGKTANKWLHTRAFDRLYQYLNYKGKEHDVEVLKENEWNTSKT |
| | CCECGDIADSNRVERGLYVCDSCGLVA |
| 11 | MIKKQAFKFLLEPNKTHMNDFLVFAGSCRFVYNKGLALINENYDSGKKFLNYNQLASELVNWKNEECL |
| | AWLKMAPSQCLQQSLRDLDRAFKNFFSGKSQYPRFKKKGRNDSFRVPCQRVRLDQEKHLVSLPKLGW |
| | VKYRKSREITGVLKNVTISRKLDKWYISFNTEEVVPEPLHPSFSKTKILLNNEWLMQLTACESLVEQFAN |
| | MEGNKKLRNLNNILGRKVKYSSNWLKTKKKIDGVKARSSRRRLDALHKITTAICKKHAIVELVNLTDSL |
| | PDKNNGSVSMTYEFVRQLMYKQEWLGGKVIRLGD |
| 12 | MHRAYKFRLYPNKKQVMLINKTIGCTRFVFNHFLAKRKNVYEQEKKTLNYHECPAMLTQLKKEIEWLK |
| | EVDSTALQSTLKDLDSSYKKFFKEKKGYPKFKSKKNPKQSYTCKMNIKVEGNRIKLPKLGWVEFAKSRE |
| | VEGRIRSATIRRNPSGKYFVSVLCETDIQPHPQIEQTVGVDLGIKDFAILSTGEKVANPKYYRKYEKQLAK |
| | WQRIQSRRQKGGKNRNKARIKVARLHEKIANTRNDFLHKLSTESVKYFV |
| 13 | MIKKQAFKFLLEPNKGQLSDFLAFAGSCRFVYNKGLALLNENYRSGKKFIGYNQLASELVEWKNEESLS |
| | WLKEAPSQCLQQSLRDLDRAFRNFFTGKSQYPKFKKKGRHDSFRIPCQRVRVDQEKKLVSLPKVGWVK |
| | YRKSREIIGDLKNATISLNQGKWYISFNTEQTVPDPIHPSDIKTTIVLNNVNSVHLSSGVGGDNTYQAEEK |
| | KKLIRLNKTLARRKKYSKNWLKTKGKIDRVRSKAARIRLDNIHKATTAICKNHAVVEVVNLMDSVSAK |
| | NDKTLSMRYEFVRQLIYKQEWLGGEIIRRESKLL |
| 14 | MADYEAVKVPLDPTPAQERMFRMYAGAARFAYNAALAHMKEQLDERKAQIEAGVAKKDLVKIDNNV |
| | VKFGYWWRANRDTLAPWWPEVASQVFNCAFDNLGHASANFLKSLSGKRQGGPVGFPKFKPRAAAKAF |
| | AFSTITIPDAHGVKLPRIGRVHTLRNVERLVAGRATKTTTIRCEAGRWYASILCETPTPTPPVNTKPEVWV |
| | VFGLDEYIALSDGTRLTNPRPYRHALADLRKASRDLSRKTHGSARYMDQQRKVARIHKRVKALRDNAL |
| | HAASKQLAEHYGVIHVQRIHLARGMRHHVLAQSLADAAFAEFTRQLTYKTARTGASMHMHEPMTVEQ |
| | HVDAMALAQRLATGPLPDA |
| 15 | MIKKQAFKFLLEPNKGQLSDFLAFAGSCRFVYNKGLALLNENYRSGKKFIGYNQLASELVEWKNEESLS |
| | WLKEAPSQCLQQSLRDLDRAFRNFFTGKSQYPKFKKKGRHDSFRIPCQRVRVDQEKKLVSLPKVGWVK |
| | YRKSREIIGDLKNATISLNQGKWYISFNTEQTVPDPIHPSDIKSTIVLNNVDSVHLSSVVGGDNTYQAEEK |
| | KKLILLNKTLTRRKKHSKNWLKTKGKIDRLKSKAARVRLDNIHKATTAICKNHAVVEVVNLMDSVSDK |
| | NNNTLSMRYEFVRQLIYKQEWLGGEVICRESKPL |
| 16 | MIKKQAFKFLLEPNKGQLSDFLAFAGSCRFVYNKGLALLNENYRAGKKFIGYNKLASELVEWKNEESLS |
| | WLKEAPSQCLQQSLRDLDRAFRNFFTGKSQYPKFKKKGRHDSFRIPCQRVRVDQEKKLVSLPKVGWVK |
| | YRKSREIIGDLKNATISLNQGKWYISFNTEQTVPEPIHPSDIKTTIVLNNVNSVHLSSGVGGDNTYQAEEK |
| | KKLVRLNKTLARRKRYSKNWLKTKGKIDRVKSKAARIRLDNIHKATTAICKNHAVVEVVNLMDSVFDK |
| | NDNTLSMRYEFVRQLIYKQEWLGGEIIRRESKLL |
| 17 | MIKKQAFKFLLEPNKGQLSDFLAFAGSCRFVYNKGLALLNESYRSGKKFIGYNQLASELVQWKNEESLS |
| | WLKEAPSQCLQQSLRDLDRAFRNFFTGKSQYPKFKKKGRHDSFRIPCQRVRVDQEKKLVSLPKVGWVK |
| | YRKSREIIGDLKNATISLNQGKWYISFNTDQTVPDPIHPSDIKTTIVLNNVNSVHLSSGVGGDNTYQAEER |
| | KKLIRLNKTLARRKKYSKNWLKTKGKIDRVRSKAARIRLDNIHKATTAICKNHAVVEVVNLMDSVSAK |
| | NDKTLSMRYEFVRQLIYKQEWLGGEIIRRESKLL |
| 18 | MSDYEAVRIPLDPTPAQERMFRMYAGAARFAYNAALQHMKEQLEQRKAQVDAGVDRKDLVKVDNTV |
| | ITLGYWWRANRDMLAPWWPEIASQVYNCAFDNLGKAAGNFLKSLSGKRQGGLVGFPRFKPRGAAKTF |
| | AYSTVTIPDAHGVKLPRIGRVHTLRNVERLVAGRTVKTTTVRCEAGRWYASILCETPRPSPAVNTSPEV |
| | WCVFGLDDYIALSDGTRIDNPRPYRQALDRLRKVSRDLSRKTHGSGRYMEQQRKVARIHARVKALRNT |
| | MLHEASKRLAEQYGTIHIQQVNLARGMKHHVLAQSLADAAFAEFTRQLEYKTVKTGASVHVHEPMIVE |
| | RHVDGMVLARQLASGPSSDA |
| 19 | MPNEKKNDEEHGVRLSYKFRIYPTPSQCEAIKANIDASRFVYNHYLRARMDAYERTQQEVRRPKPACDE |
| | QGNVQYDQDGKEIWERTEGGKVVFHTVPNPTYDPAAKAMSMEDTSKDLTRLKKELVDEDGKPWLKEA |
| | DATALIYALRNLDTAYQNFFRGIKKGQDVGFPKFKSRKNPVQTYKSGNVKLAGCDLDDGKAEAAVAEI |
| | PSPIPADWDLAGISWNGIVLPKIGKVRARIHRIPEGKFVSCTVERKASGAYYASINVKERELPAYPAATGE |
| | VGITFGASHWAVTSDGQVMDLPERIGRLQRRLAIAQRDLARKEPGSQNYLKQKRKVARVNERIADVRK |
| | AATHNATRELVNGYGTIAARQMNSKDMQQHGSAATKDLPRKVKKMLNRKMIDGNFAEFNRQLAYKS |
| | AWANRSFVEVPGDTPTAQVCSRCGHEELVLARDLRPAWTCSECGAKHDRKANGAQNVLEAGKDILAK |
| | QERSFVTKAKKSREKKRATKPISTAREGASR |
| 20 | MIKKQAFKFRLEPNKSQSSDFFMFAGSCRFVYNKALALLNDNYHSGKKFMGYNQLATELVEWKSEESL |
| | SWLKASPSQCLQQSLRDLDRAFRNFFSGKAQYPKFKKKGRHDSFRIPCQRVRVDQDKKMVSLPKVGWV |
| | KYRKSREIIGELKNVTISMKQDKWYISFNTESMVPDPMHPSDIKTKIVLSDQCEFPIRLDSSMDSSHQLDE |
| | VKKLARLNRILIRRIKYSSNWLKTKGKIDRIKARLARCRLDNIHKVTTAICKKHAVVEVLSLMDSVSDKN |
| | DITLSMRYEFVRQLIYKQEWLGGEVIRRELA |
| 21 | MIKKQAFKFLLEPNKGQLSDFLAFAGSCRFVYNKGLALLNENYRSGKKFIGYNQLASELVEWKNEESLS |
| | WLKEAPSQCLQQSLRDLDKAFRNFFTGKSQYPKFKKKGRHDSFRTPSQRVRVDQEKKLVSLPKVGWVK |
| | YRKSREIIGELKNVTISMKQGKWYISFNTEHTVPDPIHPSDIKTKIVLNNVNSVHLSSGIGGDNTSQAEEK |
| | KKLIRLNKRLARRKKHSKNWLKTKGKIDRVKSKAARLRLDNIHKATTAICKNHAVIEVVNLMGSVSDK |
| | NDNTLSMRYEFVRQLIYKQEWLGGEVIRRESKPL |
| 22 | MIKKQAFKFLLEPNKSQSSDFLAFAGSCRFVYNKGLALLNENYRSGKKFIGYNQLASELVEWKNEESLS |
| | WLKEAPSQCLQQSLRDLDKAFRNFFTGKAQYPNFKKKGRHDSFRIPCQRVRVDQEKKLVSLPKVGWVK |
| | YRKSREIIGDLKNVTISMKHGKWYISFNTEHTVPDPIHPSDIKTTIVLNNENSVHLSTRVGGANTYQAEEK |
| | KKLVRLNKILARRKKHSNNWLKTKGKIDSVISKSARIRLDNIHKATTAICKNHAVVEVVNLMDSVSDKN |
| | DNTLSMRYEFIRQLIYKQEWLGGEIIRR |
| 23 | MIKKKAFKFLLEPSKSQISDVLVFAGACRFVYNKGLALLSENYNNGKPFLNYNKLAPLLVEWKNDNKLE |
| | WLKLCPSQCLQQSLRDLDRAFQNFFSGRSQYPRFKKKGRSDSFRVPCQRVRLDQEKGLVSLPKLGWVK |
| | YRKSRAITGDLKNVTVSRKFDKWYISFNTEEVVSNPVHPSVDKTRILLNDGYVTLCTGGDLSVKKFTSLV |
| | DEKKIKRLNKELSRKVKNSNNWLKNKKKIDKIRLKSGIFRLDAIHKITTTICKKHAVVEVVNVKNFVSDK |
| | NNIATSMRNELVRQLLYKQEWLGGKIIHLDA |
| 24 | MIKQQAFKFALKLNEQQKANMLLFAGACRFVYNKGLALLKESYESGQKHMHYNQLAPLLVEWKSDPA |
| | LSWLKQAPSQSLQQSLRDLDKAFSNFFYGNAEHPRFKKKGQHDAFRFPSQRVKVDQEKQLVLLPKLGW |
| | VKYRKSRDITGDIKNVSISGKLGKWYISFNTQTDIEEPVHPAISKIGVYVDAKKNITLSDGTQYIPPQSLITL |
| | PKQIQRLTNCLRKKNRYSNNWLKSKHRINRLSSRLNQVKVDYLHKASTAISKNHAMIVIADIEKKSFSAD |
| | KQQKNITTCEKSTSIHYELIRQLTYKQEWLGGLVIKLPAEEQKLQRKTRHHEQNVR |
| 25 | MAAKSNPAGPGHGPAAVTMPKTEVLRAYRFALDPSGAERAALSRYAGACRWAYNYALARKTRAHQA |
| | WADRRSAYLEAGLSEAEAKERIRADGAELTDRIKVWDHHRKTLTLTVADKPPLPAMQSPAGQEALVRR |
| | LAAARADAAGTSSERELLAEGRAMVNALKAQAFTAGFRTPTAIDTSALWRMDRDLPQQEGGSPWWRE |
| | VNVYCFTSGFDRAQAAWKNWQDSLAGRRAGQRHGYPRFKKKGHTESFTLFHDVKRPIIRLESYRRLVM |
| | PGLGSIRIHDSGKRLARLVERGQAVIQSVTVTRGGHRWYASVLAKVQQDVPVLWEHVHDDGTRTSYLS |
| | RTQAEKAADNGGHVEQIGRPTARQRAGGLVGVGLGSHYLAALSSPLDPADPATALVQHPRLLADSLAK |
| | LSKAQRAMSRCQQGSGRWSKATAGVCRIHQQITVRRASFLHGLSKKLATGFTHVAIEDLDITALTTSAK |
| | GTRDKPGKNVKAQARFNRHLLDAGLGSLRKKLAYKTAWYGSQLVVLDQGEPVTATCAKCKERNPSSD |
| | PSCSTFHCPSCGAAVHRHENSTANIVDAAHRKLTTVASDRGETQNARRATASPAARKAPGKGQ |
| 26 | MAAKSHPAGRGHGPAAVTMPRAEVLRAYRFALDPSGAERAALSRYAGACRWAYNYALARKMRAHQ |
| | AWADRRSAYLAGGLSEAEAKERIRADGAELTDRIKVWDHHRKTLTLTVAGKPPLPAMQCPAGQEALV |
| | RRLAAARADAAGTGSERELLAEGRAMVNALKAQAFTAGFRTPTAIDTSALWRMDRDLPQQEGGSPWW |
| | REVNVYCFTSGFDRAQAAWKNWQESLAGRRAGRHHGYPRFKKKGHTESFTLFHDVKRPIIRLESYRRL |
| | VMPGLGSIRIHDSGKRLARLVERGQAVIQSVTVTRGGHRWYASVLAKVQQDVPVLWEHVHDDGTRTS |
| | YLSRTQAEEAAGSGGHVEQIGRPTARQRAGGLVGVGLGSHYLAALSSPLDPADPATALVQHPRLLADSL |
| | AKLSKAQRAMSRCQQGSRRWSKATAGVSRIHQQITVRRASFLHGLSKKLATGFTHVAIEDLDITALTTS |
| | AKGTRDEPGKNVKAQARFNRHLLDAGLGSLRKKLAYKTAWYGSQLVVLDQGEPVTATCAKCKERNPS |
| | SDPSCSTFHCPSCGAAVHRHENSTANIVDAAHRKLTTVASDRGETQNARRATASPGARKAPGKGH |
| 27 | MSIYKNFEYRVYPTDEQKKWFEEHFEVNRFLYNHLLSMSIKKYNTEVDERFLRLIKDIDFYSEKIQQWTQ |
| | IDYEKLYKKAKKGVKIYSKNEFSKLITKAVNNPDFPWVNKSYDGRAMREVATSVDTAYKNFFKGKDFP |
| | RFKKKYSVRTLRFPVSKQGEWYSIRFESDKILVLPKKIKLRIVQHRPFEGEVIAATIKKAQSGKWFVTILSR |
| | VDPPTQLIKTGDIIALNRGVREYMIGYDSNHKLINYAPFVKDPTLISKINKLHKKLSQKYKSAKQESRSLR |
| | DSKNYQKNKESLARLYEKLKFQKEYYLQQLSRKIIEDYDLIILESLSIKELASSNIGEKVKSGERIVQRRFS |
| | KKIMGMSHYRLETLLKEKAELYGKRVVMLPKGFNSNGVCSECGTIFEESIPLNNKEFICPNCNIKITRGEN |
| | SVKNILREGMKYL |
| 28 | MQLRYSFRLYPRPGQRAALARAFGCARVVFNDAVRAREDARRQGVPFPKAADLSRTLITQAKQTAERS |
| | WLGEVSAVVLQQSLRDAESAYRNFFASLKGERKGPKLGAPRMKSRKDARQSIRFTTNARWSLTPAGRL |
| | NLPKIGEVRVRWSRTLPAVPSSVTVIKDAAGRYFASFVIDTDPAADAARVPKADQSIGIDLGLTHFAVLS |
| | DGTKIDSPRFLRRAEKKLKKAQRELSRKQKGSKNREKARWKVARAHAKVTDARRDFHHQL |
| 29 | MQLRYSFRLYPQPGQRTALAKAFGCARVVFNDAVRAREDARRQGLPFPKAADLSRTLITQAKQTAERS |
| | WLGDVSAVVLQQSLRDAESAYRNFFASLKGERKGPKLGAPRMKSRKDARQSIRFTTNARWSITPGGRL |
| | NLPKIGEVRVKWSRTLPAVPSSVTVIKDAAGRYFASFVIDTDPAADLEQMPDAETSIGIDLGLTHFAVLSD |
| | GTKIDSPRFLRRAEKKLKKAQRDLSRKQKGSKNREKARWKVARAHAKVT |
| 30 | MQLRYSFRLYPQPGQRTALARAFGCARVVFNDAVRAREDARRQGLPFPKAADLSRTLITQAKHTAERS |
| | WLGEVSAVVLQQSLRDAESAYRNFFASLKGERKGPKLGAPRMKSRKDARQSIRFTTNARWSLTPAGRL |
| | NLPKIGEVRVKWSRTLPAVPSSVTVIKDAAGRYFASFVIDTDPAADAARMPKADQSIGIDLGLTHFAVLS |
| | DGTKIDSPRFLRRAEKKLKKAQRDLSRKQKGSKNREKARLKVARAHAKVT |
| 31 | MEIKRAYKFRFYPTFEQATMLAQTFGCAGFVYNRMLLVRSDAGYTEKKRIGCHATSSLLTKLKKEPEFE |
| | WLNKAPSVPVQQSLRHLQTAFGNFFAKRAKYPSFKRKYGRHSAEYTSSAFKWDGKSLKLEKMKDPLNI |
| | RWSCTLPKAAKLTTAMISKDLTGRYRVSMLCDDSVALKPKVSGKVGIGLGLTHFAILSTGEIVGIERWYP |
| | SSKRCLGCGHTVNKMPLNAREWTCPECGSIHDRDINAARNVLAAGLAVPVLGESISPVCI |
| 32 | MLLFAGACRFVYNKGLALLKESYESGQKHMHYNQLAPLLVEWKSDPALSWLKQAPSQSLQQSLRDLD |
| | KAFSNFFYGNAEHPRFKKKGQHDAFRFPSQRVKVDQEKQLVLLPKLGWVKYRKSRDITGDIKNVSISGK |
| | LGKWYISFNTQTDIEEPVHPAISKIGVYVDAKKNITLSDGTQYIPPQSLITLPKQIQRLTNCLRKKNRYSNN |
| | WLKSKHRINRLSSRLNQVKVDYLHKASTAISKNHAMIVIADIEKKSFSADKQQKNITTCEKSTSIHYELIR |
| | QLTYKQEWLGGLVIKLPAEEQKLQRKTRHHEQNVR |
| 33 | MNQSVSNPTHLRTLRLRVKDKHAAELARQARAVNYVWNYINELSERSIRERGVFLSAFDLHRYTTGAS |
| | KALGLHSHTVQKTSASYVQARIQFRKRKLAWRKSGGVRRSLGWVPFNTGHARWRNGQVHFNGTAYG |
| | VWDSYGLAGFTLRSGSFSEDSRGRWYFNVAVETETKLSAGKSVIGIDLGCKEAATASNAEKLRGRWYR |
| | DDEKALATAQRAGKKRQVKKIHARIKNRRKEDTHQFTTGLVEKSGAIFVGNVSSKAMVKTNMAKSAL |
| | DAGWYSLKKTLEYKCASAGVLYQEVNEAYSTRTCSECGALSGPKGLKELGISGPRRGNGAVLSVEART |
| | TAM |
| 34 | MIKKQAFKFLLEPNKGQLSDFLAFAGSCRFVYNKGLALLNENYRSGKKFIGYNQLASELVEWKNEESLS |
| | WLKEAPSQCLQQSLRDLDRAFRNFFTGKSQYPKFKKKGRHDSFRIPCQRVRVDQEKKLVSLPKVGWVK |
| | YRKSREIIGDLKNATISFNQGKWYISFNTEQTVPDPIHPSEIKTTIALNNVYSVHLSSGVGGDNTYQAEEK |
| | KKLIRLNKTLTRRKKYSKNWLKTKGKIDRVRSKAARIRLDNIHKATTAICKNHAVVEVVNLMDSVSAK |
| | NDNTLSMRYEFVRQLIYKQEWLGGEIIRRESKLL |
| 35 | MIKKQAFKFLLELNKSQSSDFLAFAGSCRFVYNKGLALLNENYRSGKKFIGYNQLASELVEWKNEESLS |
| | WLKEAPSQCLQQSLRDLDKAFRNFFTGKAQYPKFKKKGRHDSFRIPCQRVRVDQEKKLVSLPKVGWVK |
| | YRKSREIIGDLKNITISMKHGKWYISFNTEHTVPDPIHPSDIKTTIVLNNENSVHLSTRVGGANTYQAEEK |
| | KKLVRLNKILARRKKHSNNWLKTKGKIDSVISKSARIRLDNIHKATTAICKNHAVVEVVNLMDSVSDKN |
| | NNTLSMRYEFVRQLIYKQEWLGGEVIRRESKPL |
| 36 | MIKKQAFKFLLEPNKGQLSDFLAFAGSCRFVYNKGLALLNENYRAGKKFIGYNKLASELVEWKNEESLS |
| | WLKEAPSQCLQQSLRDLDRAFRNFFTGKSQYPKFKKKGRHDSFRIPCQRVRVDQEKKLVSLPKVGWVK |
| | YRKSREIIGDLKNATISLNQGKWYISFNTEQTVPEPIHPSDIKTTIVLNNVNSVHLSSGVGGDNTYQAEEK |
| | KKLVRLNKTLTRRKRYSKNWLKTKGKIDRVKSKAARIRLDNIHKATTAICKNHAVVEVVNLMDSVEDK |
| | NDNTLSMRYEFVRQLIYKQEWLGGEIIRQESKLL |
| 37 | GFVVLIGFIVIKKKAFKFLLEPSKSQISDVLVFAGACRFVYNKGLALLSENYNNGKPFLNYNKLAPLLVE |
| | WKSDHKFEWLKLCPSQCLQQSLRDLDRAFQNFFSGRALYPRFKKKGRSDSFRVPCQRVRLNQEKGLVS |
| | LPKLGWVKYRKSREVTGNLKNVTISKKLDKWYISFNTEEFVSEPVHPSINKTKVLLNDGYVTLCAGNEV |
| | SVESFTGIVDEKKIKRLNKELSRKVKHSNNWLKSKKKIDRIRTRSGNFRLDALHKITTAICKKHAVVEVV |
| | DVKNFVSDKNNIAKNMRYEFVRQLLYKQEWLGGKIVQLDA |
| 38 | MNDNRRPSAPKRTTQYNTIKIRLYPNQEQEELFQRTFGCCRYIWNRMLADHERFYYETDAHFIPTPAKY |
| | KTEAPFLKEVDHQALTQEYNKLSQAFRNFFRNPASFGYPKFKRKKDDRDSFSACNQVMGNSATIYITQD |
| | AVRMTKAGLVRAKFPRRPRSGWKLTRITVERTKTGKYYGYLLFACPVHAPEPVKPTADTTIGLKYSLTH |
| | FYVRDDGITADPPRWLRQSQDKVSSIQEKLNRMQPGSRNYREMVQKYRLLHEHIANQRRDFLHKESRRI |
| | ANDWDAVCIRDDSLKAISEELGGSDIHDTGFGMFREMLRYKLDRQGKQLLEVGRFDPTTKVCSVCGAIN |
| | ETLSPKARHWVCPVCGAEHKRGKNAAVNIKAHGLACYQNKQVAEAVS |
| 39 | MAQTKTWNTTIKVRLDPTPAQAAFFDENFNCCRYLWNQMLSDQIRFYTETDAHFIPTPAKYKKDAPFLK |
| | EADSNALVSVHQNLHKAFQRFFSNPSRYRHPTFKSKKRCKNSYTTYCQYYRSGKGTSIYLTKDGIRLPK |
| | AGLVKARLHRRPLHWWTLKTATISKTSSGKYYCSLVFAYTTKPSRQIPPTPETTLGLNYSLSHFYIDSNG |
| | HAADPPHWLARSQDKLRYMQQQLARMQPGSRNYEQQLYKIQRLHEHISNQRKDFLHKESRRIANAWD |
| | AVCVKDTNLVKMSQAIKLGHVMDAGYGRFRSYLQYKLERLGKPYIVVEKYFPSTKTCHHCGSVNEALP |
| | AGAKRWTCPICGTTLDRAKNAAQNLRDQGLVQYSASQRQRASA |
| 40 | MADYEAVKVPLDPTPAQERMFRMYAGAARFAYNAALAHMKEQLDERKAQIEAGVAKKDLVKIDNNV |
| | VKFGYWWRANRDTLAPWWPEVASQVFNCAFDNLGHASANFLKSLSGKRQGGPVGFPKFKPRAAAKAF |
| | AFSTITIPDAHGVKLPRIGRVHTLRNVERLVAGRATKTTTIRCEAGRWYASILCETPTPTPPVNTKPEVWV |
| | VFGLDEYIALSDGTRLTNPRPYRHALADLRKASRDLSRKTPGSARYMDQQRKVARIHKRVKALRDNAL |
| | HAASKRLAEHYGVIHVQRIHLARGMRHHVLAQPLADAAFAEFTRQLAYKTARTGASVHMHEPMTVEQ |
| | HVDAMALAQRLANGPSPDA |
| 41 | MAKREKKDDVVLRGTKMRIYPTDRQVTLMDMWRRRCISLWNLLLNLETAAYGAKNTRSKLGWRSIW |
| | ARVVEENHAKALIVYQHGKCKKDGSFVLKRDGTVKHPPRERFPGDRKILLGLFDALRHTLDKGAKCKC |
| | NVNQPYALTRAWLDETGHGARTADIIAWLKDFKGECDCTAISTAAKYCPAPPTAELLTKIKRAAPADDL |
| | PVDQAILLDLFGALRGGLKQKECDHTHARTVAYFEKHELAGRAEDILAWLIAHGGTCDCKIVEEAANHC |
| | PGPRLFIWEHELAMIMARLKAEPRTEWIGDLPSHAAQTVVKDLVKALQTMLKERAKAAAGDESARKTG |
| | FPKFKKQAYAAGSVYFPNTTMFFDVAAGRVQLPNGCGSMRCEIPRQLVAELLERNLKPGLVIGAQLGLL |
| | GGRIWRQGDRWYLSCQWERPQPTLLPKTGRTAGVKIAASIVFTTYDNRGQTKEYPMPPADKKLTAVHL |
| | VAGKQNSRALEAQKEKEKKLKARKERLRLGKLEKGHDPNALKPLKRPRVRRSKLFYKSAARLAACEAI |
| | ERDRRDGFLHRVTNEIVHKFDAVSVQKMSVAPMMRRQKQKEKQIESKKNEAKKEDNGAAKKPRNLKP |
| | VRKLLRHVAMARGRQFLEYKYNDLRGPGSVLIADRLEPEVQECSRCGTKNPQMKDGRRLLRCIGVLPD |
| | GTDCDAVLPRNRNAARNAEKRLRKHREAHNA |
| 42 | MNRGYKYRIYPNKEQEILIQKTFGCARFIYNKMLENRITTYEKYKENKTELKKQKYRTPASYKGEFPWL |
| | KEVDSLALANVQMDLDKAYKNFFRDSKVGYPKYKSKHKDRKSYTTNNQKGSIRIIDENHIRIPILKDLKI |
| | KMHRPLKENSSIKAATISQTPTGKYFISILVEYPEDKITPIKAMQERVLGLDYSSTSLYIDDKGLESEYPKY |
| | YRQAEMKLKKEQRKLSKKKEDSKNREKQRQKVAKLHEKVANQRKDFLHKKSRQIANVYDAV |
| 43 | MLRAAKFRIYPTAAQEAFLWAQWGAVRKCWNMALFLKKHYYRTRGVSLDLIHEIKPLIARAKKSKKYT |
| | WLKEYDSMALQESVRNLNKGYRAFFEGRAGYPHYKSRRGPQSSYHCTNVSVGPNYVRVPKMEPIKARI |
| | HREVVGKVKSITLEADAAGDYYAAVLWEDGLAEKDPLKEIYEDQVIGIDVGIKDLLTESNGRKEPNPKH |
| | LKRARKVLRRRCRQFSRTQKGSRRREKARRRLARAHKRVANARTDNLHKVSSRLVNDLWTTHVCQAP |
| | STVTRELRSEAAGSELVERLIAAAGGIAGLVPSGTEPIPVKRSWNSEHGLQAERSICRVSRFTGPPPIQCRY |
| | VRMRQAKRSPHSDLATLHRLIRVMSFWLLPAVFQSQ |
| 44 | MKQKKQDGHAEPGRVVQYNTIKVRLYPTPEQEELFQKTFGCCRYIWNQMLSDHERFYLETDAHFLPTP |
| | AKYKKGAPFLKEVDNQALTQEYNKLSQAFRNFFRNPAAFGYPKFKRKKDDRDTFSACNHVMGNSATIY |
| | TTRDAVRMTKAGLIRAKFPRRPRSGWRLVRVTVERTKTGKYYGYLLYACPARQPEPVAPVEERTVGLK |
| | YSLSHFYVADDGTAADPPRWLRQSQDKLVAVQRKLSRSQPGSQNYQELVQKYRLLHEHITNQRRDFLH |
| | KESRRIANAWDAVCIREDSLKAISETLGGSAVRDTGFGMFRELLRYKLERQGKQLLEVDRLFPTTKVCS |
| | ACGAVNETLAPRARRWVCPVCGAEHRRGVNAAVNIKARGLVRHQHQQTAAAAS |
| 45 | MIKQQAFKFALKPNKQQKNDMLLFAGACRFVYNKSLSLLKDNYQSGGKHMHYNQLAPKLVEWKSESD |
| | LSWLKEAPSQSLQQSLRDLDKAFSNFFGGKAEHPRFKKKGQHDAFRFPSQRVKVDQEKQLVLLPKLGW |
| | VKYRKSRDITGDIKNVTISGKLGKWYISFNTQTDIVEPEHPTTSNVGLYIDNNRQITLSDGTQYFPPEDLRT |
| | LPKKIQKFKLRLRKKTHHSNNWLKSKRKINLLRSRLSQIKNDYLHKTSTAISKNHAMIVIADVEKKSFSG |
| | DKQQKNVESYETLTSVQYELIRQLTYKQEWCGGIVIKLPDNTSISSIDNHASKNEYIAEKLNLNADSLRTK |
| | ACNLLAAGLAVTACGGDVVKRSPVKQEP |
| 46 | MLDPNQEQLSMMTVISGACRYVENKALEIAVQNHIAGEKYVPYNKTAPLLVQWKSQESLSWLKLAPSQ |
| | SLQQSLKDLDRAFHGYISRKSGFPKFRKKGTDESFRFPQQRVKVDEVNKKVYLPKIGWVRYRKSRDVIG |
| | EIKNITISQTANKWYVSFQTQIEIPDPVHTSSLTAKVTLSDEGTILLSDGKKYALPETYSRHFNQLNKLIRQ |
| | KNRKIKSSQSWLAMHHSIILKKAKLRNILMDFLHKTSTLICNNHAKISVDTEKGNSARKTSPLPVNFKPYE |
| | FLRQLKYKQSWNGGSVCVEQT |
| 47 | MITTYHYRIKDSGKSGRALKKMSSSVNFVWNYCKNTQKEALKNRTVKKIIDPLSGKTIFVPYFFTKFEM |
| | NSLVSGSSKELGIHSQTIQAISEEYTTRRKQFKNILRWRGKNSLGWIPFKATAIKINQDKVSYHKNTFRFW |
| | NTREIPDDAIIKSGSFAQDSRGRWYLNITFETKTSQYSNENLIENGVFIDSNHLAKCSNGIKFDRPKISIKYV |
| | RKIKISNKIKKNILMKKSKLKLIKRKAPKIKQEKNLRAKLENIKLDHFHKQSTKIINFSSAIITNQITAKRKK |
| | SYKNNHFISFGAISKPFQNMLCYKAIRAGRTFKVIPEKDLIWAFSKCCSSQPRTNLRIRVWKCRECGKINH |
| | FSTKADKNLLSVYKNPLRIGHDTPRSI |
| 48 | MKQKKQDGHAEPSRVVQYNTIKVRLYPTPEQEELFQKTFGCCRYIWNQMLSDHERFYLETDAHFIPTPA |
| | KYKKGAPFLKEVDNQALTQEYNKLSQAFRNFFRNPSAFGYPKFKRKKDDRDTFSACNHVMRNSVTIYT |
| | TRDAVRMTKAGLIRAKFPRRPRSGWRLVRVTVERTKTGKYYGYLLYACPMRQPEPVAPVEERTVGLKY |
| | SIAHFYVTDDGTSADPPRWLRQSQDKLSAVQRKLSRSQPGSQNYQELVQKYRLLHEHIANQRRDFLHKE |
| | SRRIANAWDAVCIREDSLKAISEKLGGSAVRDTGFGMFRELLRYKLERQGKQLLEVDRLVPTTKVCSAC |
| | GAVNETLAPRARRWVCPVCGAEHRRGVNAAVNIKARGLIQHQQTAEAVS |
| 49 | MIKKKAFKFLLEPSKSQISDVLVFAGACRFVYNKGLALLSENYNNGKPFLNYNKLAPLLVEWKSDHKFE |
| | WLKLCPSQCLQQSLRDLDRAFQNFFSGRALYPRFKKKGRSDSFRVPCQRVRLNQEKGLVSLPKLGWVK |
| | YRKSREVTGNLKNVTISKKLDKWYISFNTEEFVSEPVHPSINKTKVLLNDGYVTLCAGNEVSVESFTGIV |
| | DEKKIKRLNKELSRKVKHSNNWLKSKKKIDRIRTRSGNFRLDALHKITTAICKKHAVVEVVDVKNFVSD |
| | KNNIAKNMRYEFVRQLLYKQEWLGGKIVQLDA |
| 50 | MITTYRYRIKDSGSTKKKLLKMANGVNFIWNFCKETQSNALKNKPVKVITDPKTKKIYYTPYFFTQYEM |
| | NELVAGSSKELGLHSQTVQAVAEEYITRRKQFKKLLRWRGRNSLGWIPFKSSGIKIVKDVVQYNKLKFR |
| | FWNSRNLPSDAHIKSGSFAQDNCGRWYINITIETKNNLYNKNSTSESAIFLSNYKGIIYQNESDSVKPNFSS |
| | KLIAKIKKLNIAKKKRVIQRKKDKLKEKPKPIGRKEKKILNKVANIKQDLFHKESTKIINNNRLVITNEIIA |
| | AKKRIQSRNSFISTRLNVKHFQNMLCYKALRAGKVVSIVSNKNLSLVPFQCCSLQSQFILRKRTFVCKICH |
| | KRTSFMTSARNNLLLAAKHLLRIGHDTP |
| 51 | MQLRYNFRLYPTPGRRQALARAFGCARAVFNDALRMRRDAHAGGLPYLSDGELSKRVITVAKKTPERA |
| | WLAEVSAVVLQQALADLSTAYRNFFNSVSGKRKGPKVAPPRFRSRKDSRQSIRFTRNARFQITAGGGLH |
| | LPKIGAMRVRWSRDLPSEPSSVTVIKDASGRYFASFVVETGEEPLPETGGEVGIDLGLTHFAVLSNGRKID |
| | NPRFLRRYERRLKKAQRALSRKEKGSANRSKAVARAARAHARVADARRDHHHRLSTAIIRDN |
| 52 | MPNEKKGDEEHGVRLSYKFCIYPTPSQCEAIKANIDASRFVYNHYLRARMDAYERTQQEVRRPKPACDE |
| | QGNVQYDQDGKEIWERTEGGKVVFHTIPNPTYDPAAKVMSMFDTSKDLTRLKKELVDEDGKPWLKEA |
| | DATALIYALRNLDTAYQNFFRGIKKGQDVGFPKFKSRKNPVQTYKSGNVKLAGCDLDDGKAEAAVAEI |
| | PSPIPADWDLAGISWNGIVLPKIGKVRARIHRIPEGKFVSCTVERKASGAYYASTNVKERELPAYPAATGE |
| | VGITFGASHWAVTSDGQVMDLPERIERLQRRLAIAQRDLARKEPGSQNYLKQKRKVARINERIADVRKA |
| | ATHNATRELINGYGTIAARQMGSKEMQQHDGAATKDLPRKVKKMLNRKMIDGNFAEFNRQLAYKSA |
| | WANRTFVEVPGDTPTAQVCSRCGHEELVLARDLRPAWTCPECGAKHDRKANGAQNVLEAGKDILAKQ |
| | EQSFVTKAKRSREKKRAAKPKNSEKQNDWQL |
| 53 | MADYEAVKVPLDPTPAQERMFRMYAGAARFAYNAALAHMKEQLDERKAQIEAGVAKKDLVKIDNNV |
| | VKFGYWWRANRDTLAPWWPEVSSQVYNCAFDNLGKASSNFLKSLSGKRKGGPVGFPKFKPRGATKAF |
| | AFSTITIPDAHGVKFPRIGRVHTLRNVERLVAGRATKTTTIRCEAGRWYASILCENPSATPPVNTKPEVWV |
| | VFGLDEYIALSDGTRIDKTAPYRQALDRLRKASRDLSRKTHGSGRYMEQQRKVARIHARVKALRNTML |
| | HEASKRLAERYGIIHIQQINIARGMKHHVLAQSLMDAAFAEFTRQLEYKAAGTGASVHVHEPMTVERHV |
| | DGMVLARHLADDSSSDA |
| 54 | MLEPSKSQISDVLVFAGACRFVYNKGLALLSENYNNGKPFLNYNKLAPLLVEWKSDHKFEWLKLCPSQ |
| | CLQQSLRDLDRAFQNFFSGRALYPRFKKKGRSDSFRVPCQRVRLNQEKGLVSLPKLGWVKYRKSREVT |
| | GNLKNVTISKKLDKWYISFNTEEFVSEPVHPSINKTKVLLNDGYVTLCAGNEVSVESFTGIVDEKKIKRL |
| | NKELSRKVKHSNNWLKSKKKIDRIRTRSGNFRLDALHKITTAICKKHAVVEVVDVKNFVSDKNNIAKN |
| | MRYEFVRQLLYKQEWLGGKIVQLDA |
| 55 | MKQEKQDGHAEGNRVIQYNTIKVRLCPTPEQEELFQKTFGCCRYIWNQMLSDHERFYEETDAHFIPTPA |
| | KYKKGAPFLKEVDNQALTQEYNRLSQAFRNFFRDPKTFGYPKFKRKKDDRDSFTACNQFFGSSATIYAT |
| | RDAVRMTKAGLVKAKFSRRPRSGWKLTRLTVERTKTGKYYGYLLYTCPTYQPEPVEATAERTIGLKYS |
| | VSHFYVADNGNSADPPRWLRQSQEKLAVVQRKLSRSQPGSQNYQELVQKYRLLHEHIANQRRDFLHKE |
| | SRRIANAWDAVCIREDSLRAISGKLGGSAVHDTGFGMFRELLRYKLERQGKQLLEVDRLVPTTKVCSAC |
| | GAVNETLSIRARRWVCPVCGAEHRRGMNAAINIKASGLVKGQSQQAAAALPLL |
| 56 | VIKKKAFKFLLEPSKSQISDVLVFAGACRFVYNKGLALLSENYNNGKPFLNYNKLAPLLVEWKSDHKFE |
| | WLKLCPSQCLQQSLRDLDRAFQNFFSGRALYPRFKKKGRSDSFRVPCQRVRLNQEKGLVSLPKLGWVK |
| | YRKSREVTGNLKNVTISKKLDKWYISFNTEEFVSEPVHPSINKTKVLLNDGYVTLCAGNEVSVESFTGIV |
| | DEKKIKRLNKELSRKVKHSNNWLKSKKKIDRIRTRSGNFRLDALHKITTAICKKHAVVEVVDVKNFVSD |
| | KNNIAKNMRYEFVRQLLYKQEWLGGKIVQLDA |
| 57 | VIKKQAFKFLLEPNKGQLSDFLAFAGSCRFVYNKGLALLNENYRAGKKFIGYNKLASELVEWKNEESLS |
| | WLKEAPSQCLQQSLRDLDRAFRNFFTGKSQYPKFKKKGRHDSFRIPCQRVRVDQEKKLVSLPKVGWVK |
| | YRKSREIIGDLKNATISLNQGKWYISFNTEQTVPEPIHPSDIKTTIILNNVNSVHLSSGVGGDNTYQAEEKK |
| | KLVRLNKTLTRRKRYSKNWLKTKGKIDRVKSKAARIRLDNIHKATTAICKNHAVVEVVNLMDSVFDKN |
| | DNTLSMRYEFVRQLIYKQEWLGGEIIRRESKLL |
| 58 | MGSLVIKKQAFKFLLEPNKNHINEFLVFAGSCRFVYNKGLALINENYDSGKKFLNYNQLASELVNWKNE |
| | ECLAWLKMAPSQCLQQSLRDLDKAFKNFFSGKSQYPRFKKKGRNDSFRVPCQRVRLDQEKNLVSLPKL |
| | GWVKYRKSREITGVLKNVTISRKLDKWYISFNTEAVVPEPVHPSFSKTKILLNNECIMQLTSNESLVEQFT |
| | SMEGNKKLRNLNNILGRKVKYSSNWLKTKKKIDSVKARSSRRRLDALHKITTAICKKHAIVELVNLTDS |
| | LPDKSNGFVSMGYEFVRQLMYKQEWLGGQVIRLGD |
| 59 | MIKQQAFKFALKLNEQQKANMLLFAGACRFVYNKGLALLKESYESGQKHMHYNQLAPLLVEWKSDPA |
| | LSWLKQAPSQSLQQSLRDLDKAFSNFFYGNAEHPRFKKKGQHDAFRFPSQRVKVDQEKQLVLLPKLGW |
| | VKYRKSRDITGDIKNVSISGKLGKWYISFNTQTDIEEPVHPAISKIGVYVDAKKNITLSDGTQYIPPQSLITL |
| | PKQIRRLTNCLRKKNRYSNNWLKSKHRINRLSSRLNQVKVDYLHKASTAISKNHAMIVIADIEKKSFSAD |
| | KQQKNITTCEKSTSIHYELIRQLTYKQEWLGGLVIKLPAEEQKLQRKTRHHEQNVR |
| 60 | MLEPSKSQISDFVVFAGACRFVYNKGLALLSENYNNGKPFLNYNKLAPLLVEWKSDNKLEWLKLCPSQ |
| | CLQQSLRDLDRAFQNFFSGRSQYPRFKKKGRSDSFRVPYQRIRLNQDKGLVSLPKLGWVKYRKSREVTG |
| | DLKNVTVSKKFDKWYISFNTEEIVSDPVHPSVNKTKILLNDGYVTMCTGSELSVKKFTSQIDEKKIKRLN |
| | KELSRKVKHSNNWLKSKKKIDRLRSKSGNFRLDALHKITTTICKKHAVVEVINVKNFVSDKNNIATSMR |
| | YEFVRQLLYKQEWLGGEIIQLNA |
| 61 | MLEPNKGQLSDFLAFAGSCRFVYNKGLALLNESYRSGKKFIGYNQLASELVQWKNEESLSWLKEAPSQ |
| | CLQQSLRDLDRAFRNFFTGKSQYPKFKKKGRHDSFRIPCQRVRVDQEKKLVSLPKVGWVKYRKSREIIG |
| | DLKNATISLNQGKWYISFNTDQTVPDPIHPSDIKTTIVLNNVNSVHLSSGVGGDNTYQAEERKKLIRLNK |
| | TLARRKKYSKNWLKTKGKIDRVRSKAARIRLDNIHKATTAICKNHAVVEVVNLMDSVSAKNDKTLSIR |
| | YEFVRQLIYKQEWLGGEIIRRESKLL |
| 62 | MIKQQAFKFALKLNDQQKANMLLFAGACRFVYNKGLALLKESYESGQKHMHYNQLAPLLVEWKSDPA |
| | LSWLKQAPSQSLQQSLRDLDKAFSNFFYGKAEHPRFKKKGQHDAFRFPSQRVKVDQEKQLVLLPKLGW |
| | VKYRKSRNITGAIKNVSISGKLGNWYISFNTQTDIAEPIHPAISKIGVYVGTKKNITLSDGTQYIPPQSLITL |
| | PKQIQRLTNCLRKKNRYSNNWLKSKHRINRLSSRLNQVKVDYLHKASTAISKNHAMIVIADFEKKSFSA |
| | DKQQKNLTTCEKSTSIHYELIRQLTYKQEWHGGLVIKLSAEKNVDAESAWTKACNLLAAGLAVTACGG |
| | EVSKDSPMKQEP |
| 63 | MLRATKVRIYPTSEQAEFLDRQFDAVRFVWNKALAIKVHYYKVRGQSLSPKKHLKPLLAKAKKSRKYS |
| | WLKNADSIALQQVTINLDTAFQNFFNPKLQARFPRFKKKHGKQSSYHCTSVSVGDNWIKIPKCKPIRAKV |
| | HREIVGKVKSITLRRTLTGKYFASILADDTQEQPKQIDNLEANQVVGVDMGITDLAITSTGHKTGNPRFL |
| | KKAQRNLKRKQQALSRCKKGSKGRHKARLLVAKAHERVAFARNDFQHKGRSIQCLTGLLAVGY |
| 64 | MSIYKNFEYRVYPTDEHKKWFEEHFEVNRFLYNHLLSMSIKKYNTEVDERFLRLIKDIDFYSEKIQQWTQ |
| | IDYEKLYKKAKKGVKIYSKNEFSKLITKAVNNPDFPWVNKSYDGRAMREVATSVDTAYKNFFKGKGFP |
| | RFKKKYSVRTLRFPVSKQGEWYSIRFESDKILVLPKKIKLRIVQHRPFEGEVIAATIKKAQSGKWFVTILSR |
| | VDPPTQLIKTGDIIALNRGVREYMIGYDSNHKLINYAPFVKDPTLISKINKLHKKLSQKYKSAKQESRSLR |
| | DSKNYQKNKESLARLYEKLKFQKEYYLQQLSRKIIEDYDLIILESLSIKELASSNIGEKVKSGERIVQRRFS |
| | KKIMGMSHYRLETLLKEKAELYGKRVVMLPKGFNSNGVCSECGTIFEESIPLNNKEFICPNCNIKITRGEN |
| | SVKNILREGMKYL |
| 65 | MSIYKNFEYRVYPTDEQKKWFEEHFEVNRFLYNHLLSMSIKKYNTEVDERFLRLIKDIDFYSEKIQQWTQ |
| | IDYEKLYKKAKKGVKIYSKNEFSKLITKAVNNPDFPWVNKSYDGRAMREVATSVDTAYKNFFKGKDFP |
| | RFKKKYSVRTLRFPVSKQGEWYSIRFESDKILVLPKKIKLRIVQHRPFEGEVIAATIKKAQSGKWFVTILSR |
| | VDPPTQLIKTGDIIVLNRGVREYMIGYDSNHKLINYAPFVKDPTLISKINKLHKKLSQKYKSAKQESRSLR |
| | DSKNYQKNKESLARLYEKLKFQKEYYLQQLSRKIIEDYDLIILESLSIKELASSNIGEKVKSGERIVQRRFS |
| | KKIMGMSHYRLETLLKEKAELYGKRVVMLPKGFNSNGVCSECGTIFEESIPLNNKEFICPNCNIKITRGEN |
| | SVKNILREGMKYL |
| 66 | MAIEVTRTYVGSIQNNRQVCDGLDSLGDSASKIWNVARWTVDRIWNQTGEIPDEGSIKSYMKNQSCWK |
| | DLNAQSSQKVIEELSDAFQSWFDLRHKDDKANPPSYRKHGDERPRSTVTFKEDGFKHDPENNRVRLSKG |
| | SNLKEHFSDFLLCEYRIRPDVDLSEVNKVQNVRAVWSGDEWELHLVCKVSLETNDSAGDEVAGIDLGIK |
| | NIATVAFPDEYVLYPGNSLKQDKHYFKRSEYDTEGENGPSEKSI |
| 67 | KAYKFRMYPNKKQQELINKTFGCCRFVYNKYLAKRIEVYKNDKETFTYKQCSSDLTNLKKELKWLKEP |
| | DKFSLQNALKDLDNAYKKFFKEKAGFPKFKSKKINRFSYKTNFTNGNIMYCGQHIKLPKLGMVKIRDKQ |
| | VPKGRILNATISKEPSGRYYVSLCCTDVDIEVFENTNNQIGLDLGIKEFCISSCGEFIENPKYLKKSLNKLA |
| | KLQRELSRKTIGSLNRNKARLKVARLQEHIANQRNDFLQKLSTK |
| 68 | MKQKRAFKYRVYPTPEQQQILAQTFGCCRFVYNWALRKKTDAYYNDHQRLYYKELSLLLTDLKKQEE |
| | THWLNEVSSVPLQQALRHLDKAFLNFFEGRAKYPTFHKKRNTQSATYTANAFTWRNGSLTLAKMSEPL |
| | QIVWSRPLPNEAIPSSVTITKDCADRYFISLLVEEEIAHLPCNEKAIGADLGLKSFVVLSTGEVVGNPRFFH |
| | KDEKKLAKAQRRHAKKKKGSKNRDKARLKVARIHARIADRRRDAPAQALYPPDS |
| 69 | MEPTREQGEALERMAGARRWVWNWGLARRKEAYAATGKGLTYNQQAALLTALKQQPETAWLKEAD |
| | SQLLQQALKDLDRAFKAFFEKRAGFPQFKSKKRDTPRFRIPQRVKVEGSKVYIPKVGRVKIRQSQPIDCAI |
| | KGATFKRDTQGHWYVTLTAEFEMPEVPLPPANPERVVGIDLGLKDFAVLSDGTRIAPPKFYRKGLSKLR |
| | RAQRELSRKQKGGKNRDKARHRLSKVHARVRNQRQDWLHKLTTGLVQKYDGAVHRRPEPEGDGENQ |
| | AVHIGAGRGVGRVPQATGVQNGLAPQTSRRD |
| 70 | MEPTQAQSDALLRMAGARRFVWNWGLARRKEAYAATGKGLTYNQQAAELTTLKQQPETVWLKEADS |
| | QLLQQALKDLDRAFKAFFERRAGFPQFKSRKRDEPRFRIPQRVKVENSKVYVPKVGWVRIRQSQPIDCPI |
| | KGATFKREADGHWYVTLTAEFEMPDVPLPPANPERVVGVDLGLKDFAVLSDGTRIAPPRFYRKGLAKL |
| | RRAQRELSRKRRGSKNREKARHRLSKVHARVRNQRQDWLHKLTTGLVQKYD |
| 71 | MQLNKTAKRILSIRISGKQRKEKISNLLYSLAQFRNLLIIFNKIYQQNYGRWILNESYLYALVNNKGYKPR |
| | ESKENFIEKLKEFKTITDNIEKVNQLKDFQDKLIKQKQKIKNNYTVQTLIRQLIKDYKSFFKSIQKYKENSN |
| | SFNAIPRPPKAKKLKDIPSFTAELNVNTFKVLEEEKGKHLLITLTNNKEEKQYLKVKLPKDFNYEIKSARI |
| | KFIASDIYVDIVYTIPETQINSNQEKTHIAGIDLGLDNLITLFSTNKELQTIIVSGKEIKSINQWYNKEKAKL |
| | QSKIDNIQNQINKLQKDNLDTTALEKEKKLLIKKQKELSAYRNRWITDTFHKITRKITDFLNETGHKEVYI |
| | GKGATESKNGINLSTKTNQNFVNIPFRKLINQLKYKLEEYGVKLTEVAEEFTSKTSPFADLHKVLETGKE |
| | YLKAKTEGNEGILKQLKEKLNQLYNGIRIKRGLYKDNITNKVFNANAVGSYNILRKEAKPLIDEETLIDK |
| | LSRPIRLTLNLISKVTCESLLEIAGRRPLRVHCKRTLVNNFL |
| 72 | MIKKKAFKFLLEPSKSQISDVLVFAGACRFVYNKGLALLSENYNNGKPFLNYNKLAPLLVEWKNDNKLE |
| | WLKFCPSQCLQQSLRDLDRAFQNFFSGRSQYPRFKKKGRSDSFRVPCQRVRLDQEKGLVSLPKLGWVK |
| | YRKSRAITGDLKNVTVSRKFDKWYISFNTEEVVSNPVHPSVDKTRILLNDGYVTLCTGGDLSVKKFTSLV |
| | DEKKIKRLNKELSRKVKNSNNWLKNKKKIDKIRLKSGSFRLDAIHKITTTICKKHAVVEVVNVKNFVSD |
| | KNNIATSMRYELVRQLLYKQEWLGGKIIHLDA |
| 73 | MIKKQAFKFLLEPNKGQLSDFLAFAGSCRFVYNKGLALLNENYRSGKKFIGYNQLASELVEWKNEESLS |
| | WLKEAPSQCLQQSLRDLDRAFRNFFTGKSQYPKFKKKGRHDSFRIPCQRVRVDQEKKLVSLPKVGWVK |
| | YRKSREIIGDLKNATISFNQGKWYISFNTEQTVPDPIHPSEIKTTIVLNNVNSVHLSSGVGGDNTYQAEEK |
| | KKLIRLNKTLTRRKKYSKNWLKTKGKIDRVRSKAARIRLDNIHKATTAICKNHAVVEVVNLMDSVSAK |
| | NDNTLSMRYEFVRQLIYKQEWLGGEIIRRESKLL |
| 74 | MIKKQAFKFLLEPNKGQLSDFLAFAGSCRFVYNKGLALLNENYRSGKKFIGYNQLASELVEWKNEESLS |
| | WLKEAPSQCLQQSLRDLDRAFRNFFTGKSQYPKFKKKGRHDSFRIPCQRVRVDQEKKLVSLPKVGWVK |
| | YRKSREIIGDLKNATISLNQGKWYISFNTEQTVPDPIHPSDIKTTIVLNNVNSVHLSSGVGGDNTYQAEEK |
| | KKLIRLNKTLTRRKKYSKNWLKTKGKIDRVRSKAARIRLDNIHKATTAICKNHAVVEVVNLMDSVSAK |
| | NDNTLSMRYEFVRQLIYKQEWLGGEIIRRESKLL |
| 75 | MIKKQAFKFLLEPNKGQLSDFLAFAGSCRFVYNKGLALLNENYRSGKKFIGYNQLASELVEWKNEESLS |
| | WLKEAPSQCLQQSLRDLDRAFRNFFTGKSQYPKFKKKGRHDSFRIPCQRVRVDQEKKLVSLPKVGWVK |
| | YRKSREIIGDLKNATISLNQGKWYISFNTEQTVPDPIHPSDIKTTIVLNNVNSVHLSSGVGGDNTYQAEEK |
| | KKLIRLNKTLARRKKYSKNWLKTKGKIDRVRSKASRIRLDNIHKATTAICKNHAVVEVVNLMDSVSAK |
| | NDNTPSTRYEFVRQLIYKQEWLGGEIIRRESKLL |
| 76 | MEVKKAYKFRIYPNQTQTQLFEQTFGCSRFLYNRALYETKTAGTKFRKTPAIKEIGKLKKAFTWLKAVD |
| | SIALQAAIENLDDAFIRFYRKQTKFPRFKSKKNLVKSYTTKAVNGNIQLEDNKIKLPKVGWIRYAKSREV |
| | KGTIKRVTVRKNAAGKYFVSILAVVEHNYNRNNTNETVGLDLGLTDFLITNEGSKIKNPRHLKKYEQKL |
| | QHAQRTMSRRTIGSSNWHKQKIKWFASTKRSLMPAGIFSINYLAN |
| 77 | MEKAYKFRMYPNKKQQELINKTFGCCRFVYNKYLAKRIDVYKNNKETFTYKQCSSDLTNLKKELKWL |
| | KEPDKFSLQNALKDLDNAYKKFFKEKTGFPKFKSKKINRFSYKTNFTNGNIMYCGQHIKLPKLGMVKIR |
| | DKQVPQGRILNATISKEPSGRYYVSLCCTDVDIEAFENTNNHIGLDLGIKEFCISSCGEFIENPKYLKKSLN |
| | KLAKLQRELSRKTIGSLNRNKARLKVARLQEHIANQRKDFLQKLSTKLIKENDXKLSILQEMTTFY |
| 78 | MEKAYKFRMYPNKKQQELINKTFGCCRFVYNKYLAKRIEVYKNNKETFTYKQCSSDLTNLKKELKWL |
| | KEPDKFSLQNALKDLDNAYKKFFKEKVGFPKFKSKKINRFSYKTNFTNGNIMYCGQHIKLPKLGMIKIRD |
| | KQVPQGRILNATISKEPSGRYYVSLCCTDVDIEAFENTNNQIGLDLGIKEFCISSYGEFIENPKYLKKSLNK |
| | LAKLQRELSRKTIGSLNRNKARLKVARLQEHIANQRNDFLQKLSTKLIKETILFAYKIYK |
| 79 | MIKKQAFKFLLEPNKGQLSDFLAFAGSCRFVYNKGLALLNENYRSGKKFIGYIQLASELVEWKNEESLS |
| | WLKEAPSQCLQQSLRDLDRAFRNFFTGKSQYPKFKKKGRHDSFRIPCQRVRVDQEKKLVSLPKVGWVK |
| | YRKSREIIGDLKNATISLNQGKWYVSFNTEQTVPDPIHPSDIKSTIVLNNVDSVHLSSGGGGDNTYQAEEK |
| | KKLIRLNKTLTRRKKHSQNWLKTKGKIDRVKSKAARIRLDNIHKATTAICKNHAVVEVVNLMDSVSDK |
| | NDNTLSMRYEFVRQLIYKQEWLGGEVIRRESKPL |
| 80 | MLKATKIRIYPTTEQAAFLNYQFGAVRFVYNTGLRIISHRYQHHGQSLSAKHDIKKLLPVAKKSRKYSW |
| | LKDADSMALQQACLNLDHAFQCFFDPQQKAGYPSFKSKRGKQSSYHCVGVKAGDDWIKVPKLGPIRAR |
| | VHRKVEGTLKSITLTRTVTGKHYASLLFETEQAAPAPLKDVDAAKIVGLDMGLSHLAIDSNGRKIENPRF |
| | LKRAQQNLKRKQKALSRCQKGSANRAKARLLVAKA |
| 81 | MSLSNGFCTRTSLNVIKNMLKNHKLAKAISEVSWSQFRTMLEYKAKWYGKQIIVVSKTFASSQLCSCCG |
| | YQNKDVKNLKLRKWDCPSCRTHHDRDINASINLKNEANTSTDIVPMGQVHGWYSLRWQIEILFKTWKS |
| | FFQIHHCKKIKPERLECHLYGQLIAILLCSSIMFQMRQLLLMKKKRELSEYKAIYMIKDYFLLLFQSIQKNT |
| | QELSKVLLRLFNLLQQNGRKSHRYEKKTVFDILGVVYNCTLSDNQAA |
| 82 | MNVIRQKHHSTPIHIIDHEHRFVSMQHLDGFFKLRDQIDYRALPAQANQNVLHMLYRDWKSFFAALAD |
| | YKAHPDKYEAIPHIPRYADKDGCKPLIFTNQICKLRKDKHGWYVKFPKAVLQAGCVRDRYDLGKMDLH |
| | EQKLKEVRLIPNGDTIKLEIVCEIEIKEPTITIHEATRVAGIDIGVDNLTAIAFTSGHHPVLIKGNEIKAVNQF |
| | YNKQIAHYRSLLRTGKKDSKGIHQTKRMKRISEKRNRRVKDILHKASRKIIDLCVEEGIEVIVVGNNAGW |
| | KKRIHMGKKNNQTFVQIPFHT |
| 83 | MKTVEFKLNLNQTQQAKVDGWLSVLRWVWNRGLHLLEEFDNNTRWDKSSKSWVPCCPLPWQYYKD |
| | DDGRLIPFTRLAQTKPYRMSCPIPQTYRQPEIESPNHFGILYYFAQKNHLDKPWFCAVPSKSVSGTLKALT |
| | DAWWEYKSGKRSSPRYKRYKDKIKSLVNNNSKSIKISGRQITLPKLGKVTVKTLDKRWDASVAIATLKII |
| | KQPSGYYLQLIGELPTKKFKPSNKAVGISLGYKDLFTTDGGKVVKSPLYYQKMEKKLQRLQRKLCRQQ |
| | NLCPIDTYNPSLREHFLSCPINPYKGANKAKTTQKISGLHEKIRRARRAFNHKLSTLLVQEYGGIATAKSD |
| | MRRITRRPKPIVNKEGTGYDRNGAERKSQFNKLILANGLGQLATLIEQKAVANGREYIEVVPKDIPDEPR |
| | QRTEHESKRLRLPRAVHLSSFQSGRYRAWSWKSKPGESQWTQNQEAAQVATLRDTETTILTSSNLALER |
| | EGMDVPPTSSPKNNANQHSCRLVTTSGEKSTRATSTGQSVTEPAKTRLDEKEMPDQPEKAQRQSEVLLT |
| | AKTQVRRRKRRTAGENDSS |
| 84 | MRTVEFKLSLNRYQQAKVDSWLTIQRWVWNQGLHLLEESNSFSTWDKVSQSWVPCCSIPWTYYRDSV |
| | GQLIPFTRIAKKKPYRMSCPIPQAYRKPLLETPTFFGLLYYFAQKNHSDKPWFCDVPCRFVAGTLKSLAD |
| | AWTAYKSGKRKRPRYKQYKDKFRTLTNNNAKPVKISGKRITLPKLGKVTVKTLDRRWLKSVPIVTLKIV |
| | KEPSGYYLQLTGCFPVNKVKPTNKAVGVSLGYSHLTTDGEKVVEPPNFYHKMEKQLAQLQRQLCRQQ |
| | KTCPIFSYNPSLGEHFLSCSINPSKGANRAKTQRKISRLHEKIRRSRRATNHKISTYLVREYDAIAMVKPEI |
| | RKIARKPIAIVNKLGEFEHNGANHKAEFNKGLLDNSLGQLTSLINQKASVQGRELISVSPKDLPDELKQRT |
| | EKCCEQLQWSRAVYLTSFSRRYRAWAWELTPGESTGTLNQEPPQGGLSCDAGTTSNFISESIGLYGVGDI |
| | PEIIPLLQNQSEANSSY |
| 85 | MRTVEFKLDLNQTQQAKVDDWLNVLRWVWNRGLHLLTEFDSFTSWDKVSKTWTPSCPIQWEYYRDD |
| | DGHLVPFTRLAQTKPYRMSCPISQAYRQPELESPNHFGLLYYFAQKNHEDKPWFCEVPAKVVAGTLKSL |
| | SDAWSEYKAGKHKRPRYKRYKDKLKTLVNNNSKSVKISGKQITLPKLGKVTVKTLDKRWDAKVPIATL |
| | KIVKEPSGYYLQLTGELPLKRFKPSNKAVGISLGYKDLFTTDSGKVVKPPAYYQKMEKNLQRLQRKLSR |
| | QQNICPISTYNPELAEHFLSCPINPHKGANKAKTQQKISQQHEKIRRARRAFNHKLSTKLVQEYGGIATAK |
| | SEVRKITRRPKPIVNKEGTGYDPNSAERKSQFNKQILANGLGQLTTLIEQKAVVNGREFIEIAPKEIPDEPR |
| | QRAERYSKRLRLPRAVHLSSFFGRYRAWSWESKPGESQRTLNQEASQEAALRDAGTTSKSSSANTNLTE |
| | SSNFNGDRASRATSQSSLETRSELANPCKSESFKQLPKAKKHSSAPPTSEKQLGRKKRRSTRENDSS |
| 86 | MIKKKAFKFLLEPSKSQISDVLVFAGACRFVYNKGLALLSENYNNGKPFLNYNKLAPLLVEWKNDNKLE |
| | WLKLCPSQCLQQSLRDLDRAFQNFFSGRSQYPRFKKKGRSDSFRVPCQRVRLDQEKGLVSLPKLGWVK |
| | YRKSRAITGDLKNVTVSRKFDKWYISFNTEEVVSNPVHPSVDKTRILLNDGYVTLCTGGDLSVKKFTSLV |
| | DEKKIKRLNKELSRKVKNSNNWLKNKKKIDKIRLKSGSFRLDAIHKITTTICKKHAVVEVVNVKNFVSD |
| | KNNIATSMRYELVRQLLYKQEWLGGKIIHLDA |
| 87 | MIKKQAFKFLLEPNKNHINEFLVFAGSCRFVYNKGLALINENYDSGKKFLNYNQLASELVNWKNEECLA |
| | WLKMAPSQCLQQSLRDLDKAFKNFFSGKSQYPRFKKKGRNDSFRVPCQRVRLDQEKHLVSLPKLGWV |
| | KYRKSREITGVLKNVTISRKLDKWYISFNTEVVVPEPVHPSFSKAKVLLNNECIVQLTSNESLVEQFTSME |
| | GNKKLRNLNNILGRKVKYSSNWLKTKKKIDSVKARSSRRRLDALHKITTAICKKHAIVELVNLTDSLPD |
| | KNNGFVSMGYEFVRQLMYKQEWLGGQVIRLGD |
| 88 | MIKQQAFKFALKLNEQQKANMLLFAGACRFVYNKGLALLKESYESGQKHMHYNQLAPLLVEWKSDPA |
| | LSWLKQAPSQSLQQSLRDLDKAFSNFFYGNAEHPRFKKKGQHDAFRFPSQRVKVDQEKQLVLLPKLGW |
| | VKYRKSRDITGDIKNVSISGKLGKWYISFNTQTDIEEPVHPAISKIGVYVDAKKNITLSDGTQYIPPQSLITL |
| | PKQIQRLTNCLRKKNRYSNNWLKSKHRINRLSSRLNQVKVDYLHKASTAISKNHAGDAANLLI |
| 89 | MKKAYKFRMYPNKKQQELINKTFGCCRFVYNKYLAKRIEVYKNNKETFTYKQCSSDLTNLKKELNWL |
| | KEPDKFSLQNALKDLENAYEKFFKEKTGFPKFKSKKTNRFSYKTNFTNGNIMYCGQHIKLPKLGMVKIS |
| | DKQVPKGRILNATISKEPSGRYYVSLCCTDVDIEAFENTNNQIGLDLGIKEFCISSYGDFIENPKYLKKSLN |
| | KLAKLQRELSRKTIGSLNRNKARLKVARLQEHIANQRKDFLQKLSTKLIKENELIKETILFAYKIYK |
| 90 | MEKAYKFRMYPNKKQQELINKTFGCCRFVYNKYLAKRIDVYKNDKETFTYKQCSSDLTNLKKELKWL |
| | KEPDKFSLQNALKDLDNAYKKFFKEKAVFPKFKSKKINRFSYKTNFTNGNIMYCGQHIKLPKLGMVKIR |
| | DKQVPKDRILNATISKEPSGRYYVSLCCTDVDIEAFENTNNQIGLDLGIKEFCISSYGDFIENPKYLKKSLN |
| | KLAKLQRELSRKTIGSLNRNKARLKVARLQEHIANQRKDFLQKLSTKLIKENELIKETILFAYKIYK |
| 91 | MKKAYKFRMYPNKKQQELINKTFGCCRFVYNKYLAKRIEVYKNNKETFTYKQCSSDLTNLKKELNWL |
| | KEPDKFSLQNALKDLENAYEKFFKEKAGFPKFKSKKTNRFSYKTNFTNGNIMYCGQHIKLPKLGMVKIS |
| | DKQVPKGRILNATISKEPSGRYYVSLCCTDVDIEAFENTNNQIGLDLGIKEFCISSYGDFIENPKYLKKSLN |
| | KLAKLQRELSRKTIGSLNRNKARLKVARLQEHIANQRKDFLQKLSTKLIKENELIKETILFAYKIYK |
| 92 | MEKAYKFRMYPNKKQQELINKTFGCCRFVYNKYLAKRIEVYKNNKETFTYKQCSSDLTNLKKELKWL |
| | KEPDKFSLQNALKDLDNAYKKFFKEKVGFPKFKSKKINRFSYKTNFTNGNIMYCGQHIKLPKLGMIKIRD |
| | KQVPQGRILNATISKEPSGRYYVSLCCTDVDIEAFENTNNQIGLDLGIKEFCISSCGEFIENPKYLKKSLSK |
| | LAKLQRELSRKTIGSLNRNKARLKVARLQEHIANQRKDFLQKLSTKLIKETILFAYKIYK |
| 93 | MEPTREQGEALERMAGARRWVWNWGLARRKEAYAATGKGLTYNQQAALLTALKQQPETAWLKEAD |
| | SQLLQQALKDLDRAFKAFFEKRAGFPQFKSKKRDTPRFRIPQRVKVEGSKVYIPKVGRVKIRQSQPIDCP |
| | VKGATFKRDTQGHWYVTLTAEFEMPEVPLPPANPERVVGIDLGLKDFAVLSDGTRIAPPEFYRKAERRL |
| | RKAHKELSRKQKGGKNRDKARERLNRVHAKVRNQRQDWLHKLTTGLVQKYSTTGCASRT |
| 94 | MKSLADAWTAYKSGKRQRPCYKQYKDKFRTLINNNAKPIKISGKRITLPKLGKVTVKTLDRRWLKSVPI |
| | VTLKIVKEPSGYYLQLSGCFPVNKVKPTNKAVGVSLGYSHLTTDGEKVVEPPNFYHKMEKQLAQLQRQ |
| | LSRQQKTCPISTYNPSSGEHFLSCPINPGKGANRAKTQRKISRLHEKIRRSRRATNHKISTYLVREYDAIAI |
| | VKPEIKRIARKPIAIVNKLGEFEHNGANHKAEFNKGLLNNSLGQLSGLIEQKASVQGRKLISVSPKDIPDE |
| | LKQCAEKRREQIQWSRAVYSTNFSRRYRAWAWELTPGESTETLNQEPPQGGLFCDAGTTSNFISESIGFC |
| | GVGDIPEIIPLLQNQSEANSSY |
| 95 | MIKKQAFKFLLEPNKGQLSDFLAFAGSCRFVYNKGLALLNENYRSGKKFIGYNQLASELVEWKNEESLS |
| | WLKEAPSQCLQQSLRDLDRAFRNFFTGKSQYPKFKKKGRHDSFRIPCQRVRVDQEKKLVSLPKVGWVK |
| | YRKSREIIGDLKNATISFNQGKWYISFNTEQTVPDPIHPSDIKTTIVLNNVNSVHLSSGVGGDNTYQAEEK |
| | KKLIRLNKTLTRRKKYSKNWLKTKGKIDRVRSKAARIRLDNIHKATTAICKNHAVVEVVNLMDSVSAK |
| | NDNTLSMRYEFVRQLIYKQEWLGGEIIRRESKLL |
| 96 | MEKAYKFRMYPNKKQQELINKTFGCCRFVYNKYLAKRIEVYKNAKETFTYKQCSSDLTNLKKELNWL |
| | KEPDKFSLQNALKDLDNAYKKFFKEKAGFPKFKSKKINRFSYKTNFTNGNIMYCGQHIKLPKLDMVKIR |
| | DKQVPKGRILNATISKEPSGRYYVSLCCTDVDIEAFENTNNQIGLDLGIKEFCISSCGEFIENPKYLKKSLN |
| | KLAKLQRELSRKTIGSLNRNKARLKVARLQEHIANQRNDFLQKLSTKLIKEXHESVRSS |
| 97 | MEKAYKFRMYPNKKQQELINKTFGCCRFVYNKYLAKRIDVYKNNKETFTYKQCSSDLNNLKKELKWL |
| | KEPDKFSLQNALKDLDNAYKKFFKEKVGFPKFKSKKINRFSYKTNFTNGNIMYCGQHIKLPKLGMVKVR |
| | DKQVPKGRILNATISKEPSGRYYVSLCCTDVDIXVVEKAYKFRMYPNKKQQELINKTFGCCRFVYNKYL |
| | AKRIEVYKNDKETFTYKQCSSDLTNLKKELKWLKEPDKFSLQNALKDLENAYEKFFKKRHDFLNLNQR |
| | KLIDFHIKLTLQMETLCIVVNI |
| 98 | MEKAYKFRMYPNKKQQELINKTFGCCRFVYNKYLAKRIDVYKNNKETFTYKQCSSDLNNLKKELKWL |
| | KEPDKFSLQNALKDLDNAYKKFFKEKAGFPKFKSKKINRFSYKTNFTNGNIVYCGQHIKLPKLGMVKVR |
| | DKQVPKGRILNATISKEPSGRYYVSLCCTDVDIEAFENTNNQIGLDLGIKEFCISSCGEFIENPKYLKKSLN |
| | KLAKLQRELSRKTIGSLNRNKARLKVARLQEHIANQRNDFLQKLSTKLIKEXSSGKSL |
| 99 | MIAVKKAYKFRMYPNKKQQELINKTFGCCRFVYNKYLAKRIEVYKNDKETFTYKQCSSDLTNLKKELK |
| | WLKEPDKFSLQNALKDLDNAYKKFFKEKAGFPKFKSKKINRFSYKTNFTNGNIMYCGQHIKLPKLGMV |
| | KIRDKQVPQGRILNATISKEPSGRYYVSLCCTDVDIEAFENTNNQIGLDLGIKEFCISSCGEFIENPKYLKKS |
| | LNKLAKLQRELSRKTIGSLNRNKARLKVARFQEHIANQRKDFLQKLSTKLIKEND |
| 100 | MIKKKAFKFLLEPSKSQISDVLVFAGACRFVYNKGLALLSENYNNGKPFLNYNKLAPLLVEWKNDNKLE |
| | WLKLCPSQCLQQSLRDLDRAFQNFFSGRSQYPRFKKKGRSDSFRVPCQRVRLDQEKGLVSLPKLGWVK |
| | YRKSRAITGDLKNVTVSRKFDKWYISFNTEEVVSNPVHPSVDKTRILLNDGYVTLCTGDDLSVKKFTSLV |
| | DEKKIKRLNKELSRKVKNSNNWLKNKKKIDKIRLKSGSFRLDAIHKITTTICKKHAVVEVVNVKNFVSD |
| | KNNIATSMRYELVRQLLYKQEWLGGEIIHLDA |
| 101 | MNVIRQKHHSTPIHIIDHEHRFVSMQHLDGFFKLRDQIDYRALPAQANQNVLHMLYRDWKSFFAALAD |
| | YKAHPDKYEAIPHIPRYADKDGYKPLIFTNQICKLRKDKHGWYVKFPKAVLQAGCVRDRYDLGKMDLH |
| | EQKLKEVRLIPNGDTIKLEIVCEIEIMEPTITIHEATRVAGIDIGVDNLTAIAFTSGHRPVLIKGNEIKAVNQF |
| | YNKQIAHYRSLLRTGKKDSKGIHQTKRMKRISEKRNRRVKDILHKASRKIIDLCVXWTPPCTDKRK |
| 102 | MNVIRQKHHSTPIHIIDHEHRFVSMQHLDGFFKLRDQIDYRALPAQANQNVLHMLYRDWKSFFAALAD |
| | YKAHPDKYEAIPHIPRYADKDGYKPLIFTNQICKLRKDKHGWYVKFPKAVLQAGCVRDRYDLGKMDLH |
| | EQKLKEVRLIPNGDTIKLEIVCEIEIMEPTITIHEATRVAGIDIGVDNLTAIAFTSGHRPVLIKGNEIKAVNQF |
| | YNKQIAHYRSLLRTGKKDSKGIHQTKRMKRISEKRNRRVKDILHKAS |
| 103 | MNVIRQKHHSTPIHIIDHDHRFVSMQHLDGFFKLRDQIDYRALPAQANQNVLHMLYRDWKSFFAALAD |
| | YKAHPDKYEAIPHIPRYADKDGYKPLIFTNQICKLRKDKHGWYVKFPKAVLQAGCVRDRYDLGKMDLH |
| | EQKLKEVRLIPNGDTIKLEIVCEIEIKEPTITIHEATRVTGIDIGVDNLMAIAFTSGHHPVLIKGNEIKAVNQ |
| | YYNKQIAHYRSLLRTGKKDSKGIHQTKRMKRISEKRNRRVKDILHKASRKIINLCVEEGIEVIVVGNNAG |
| | WKKRIHMGKKNNQTFVQIPFRTLIEMIKYKGEAAGIRVVVCEEAIQSKASSIDEDQIPVYGNDVAHTFTG |
| | KRIKRGLYRSKWHSNECRYQWSKQYHTKSISMYARARAME |
| 104 | MIKKQAFKFLLEPNKTHMNDFLVFAGSCRFVYNKGLALINENYDSGKKFLNYNQLASELVNWKNEECL |
| | AWLKMAPSQCLQQSLRDLDRAFKNFFSGKSQYPRFKKKGRNDSFRVPCQRVRLDQEKHLVSLPKLGW |
| | VKYRKSREITGVLKNVTISRKLDKWYISFNTEEVVPEPLHPSFSKTKILLNNEWLMQLTACESLVEQFAN |
| | MEGNKKLRNLNNILGRKVKYSSNWLKTKKKIDGVKARSSRRRLDALHKITTAICKKHAIVELVNLKDSL |
| | PDKNNGSVSMTYEFVRQLMYKQEWLGGKVIRLGD |
| 105 | MCPLLGREAQYIMRTVEFKLSLNRYQQAKVDSWLTIQRWVWNQGLHLLEEFNSFSTWDKVSQSWVPC |
| | CSIPWTYYRDSVGQLIPFTRIAKKKPYRMSCPIPQAYRKPLLETPTFFGLLYYFAQKNHSDKPWFCDVPC |
| | RFVAGTLKSLADAWTAYKSGKRKRPRYKQYKDKFRTLTNNNAKPVKISGKRITLPKLGKVTVKTLDRR |
| | WLKSVPIVTLKIVKEPSGYYLQLTGCFPVNKVKPTNKAVGVSLGYSHLTTDGEKIVEPPNFYHKMEKQL |
| | AQLQRQLCRQQKTCPIFSYSPSLGEHFLSCPINPSKGANRAKTQRKISRLHEKIRRSRRATNHKISTYLVRE |
| | YDAIAMVKPEIRKIARKPIAIVNKLGEFEHNGANHKAEFNKGLLDNSLGQLTSLINQKASVQGRELISVSP |
| | KDLPDELKQRTEKCCEQLQWSRAVYLTSFSRRYRAWAWELTPGESTGTLNQEPPQGGLSCDAGTTSNFI |
| | SESIGLYGVGDIPEIIPLLQNQSEANSSY |
| 106 | MLEPNKGQLSDFLAFAGSCRFVYNKGLALLNENYRSGKKFIGYNQLASELVEWKNEESLSWLKEAPSQ |
| | CLQQSLRDLDRAFRNFFTGKSQYPKFKKKGRHDSFRIPCQRVRVDQEKKLVSLPKVGWVKYRKSREIIG |
| | DLKNATISFNQGKWYISFNTEQTVPDPIHPSEIKTTIVLNNVNSVHLSSGVGGDNTYQAEEKKKLIRLNKT |
| | LTRRKKYSKNWLKTKGKIDRVRSKAARIRLDNIHKATTAICKNHAVVEVVNLMDSVSAKNDNTLSMRY |
| | EFVRQLIYKQEWLGGEIIRRESKLL |
| 107 | MLEEVAWPDALSVALPSAGRRAGMRTLEFKLYLKAEQQKLVDSWLTDLRGVWNAALDLLLEHAAFRA |
| | WDRLEKSWVPCCPLPWKFRYRPNPEGEGYIAVAYSQAARVRPWAQFCPLPQDYRVPRLESPGEFTLAA |
| | EFAHKRRPWLAHIPANLIRGVIASLVAAWERHKKDPKNCGEPKFKRPGRGDLDTLIHGDPKGAKIQPGV |
| | LPKRHPEIADARLRKRKIAFPGLGVLHARGLEHWPAEVPVCMVKITRRPSGYYLQLTGELPDSWQPKDA |
| | RPKERATAIAFDPPKQHHADDTGRVVSAPAFLQPKLDRLAKLQRKADRQQPGSNRQKRTYHRIGKLHE |
| | QIRLARRNYNQKLSTFAVRKAGALAVAQIQPALKVKTRRPKPVPSKKGLGTFDPNGAQQKSAFNLRLIDI |
| | ALGQFVALLEAKAKSRGREFQRAVNAPAASIREKGLVSWSRVYPGWAGSTDAEGGESSPAKRQGEQSP |
| | PGGVPATVTSTSSTKQNSSSSGPSGTTGANKGQKPDSKRTLQSRKAKQVLENAESQVQNASSAVDPPQE |
| | QYQIDPQSPRARRSTKKSAEDGSGSDFRAPP |
| 108 | MRDQIDYRALPAQANQNVLHMLYRDWKSFFAALADYKAHPDKYEAIPHIPRYADKDGCKPLIFTNQIC |
| | KLRKDKHGWYVKFPKAVLQAGCVRDRYDLGKMDLHEQKLKEVRLIPNGDTIKLEIVCEIEIKEPTITIHE |
| | ATRVAGIDIGVDNLTAIAFTSGHHPVLIKGNEIKAVNQFYNKQIAHYRSLLRTGKKDSKGIHQTKRMKRI |
| | SEKRNRRVKDILHKASRKIIDLCVEEGIEVIVVGNNAGWKKRIHMGKKNNQTFVQIPFHT |
| 109 | FKLRDQIDYRALPAQANQNVLHMLYRDWKSFFAALADYKAHPDKYEAIPHIPRYADKDGCKPLIFTNQI |
| | CKLRKDKHGWYVKFPKAVLQAGCVRDRYDLGKMDLHEQKLKEVRLIPNGDTIKLEIVCEIEIKEPTITIH |
| | EATRVAGIDIGVDNLTAIAFTSGHHPVLIKGNEIKAVNQFYNKQIAHYRSLLRTGKKDSKGIHQTKRMKR |
| | ISEKRNRRVKDILHKASRKIIDLCVEEGIEVIVVGNNAGWKKRIHMGKKNNQTFVQIPFHT |
| 110 | MNVIRQKHHSTPIHIIDHEHRFVSMQHLDGFFKLRDQIDYRALPAQANQNVLHMLYRDWKSFFAALAD |
| | YKAHPDKYEAIPHIPRYADKDGYKPLIFTNQICKLRKDKHGWYVKFPKAVLQAGWVRDRYDLGKMDL |
| | HEQKLKEVRLIPNGDTIKLEIVCEIEIMEPTITIHEATRVAGIDIGVDNLTAIAFTSGHRPVLIKGNEIKAVN |
| | QFYNKQIAHYRSLLRTGKKDSKGIHQTKRMKRISEKRNRRVKDILHKASRK |
| 111 | MLEPSKSQISDVLVFAGACRFVYNKGLALLSENYNNGKPFLNYNKLAPLLVEWKNDNKLEWLKLCPSQ |
| | CLQQSLRDLDRAFQNFFSGRSQYPRFKKKGRSDSFRVPCQRVRLDQEKGLVSLPKLGWVKYRKSRAITG |
| | DLKNVTVSRKFDKWYISFNTEEVVSNPVHPSVDKTRILLNDGYVTLCTGDDLSVKKFTSLVDEKKIKRL |
| | NKELSRKVKNSNNWLKNKKKIDKIRLKSGSFRLDAIHKITTTICKKHAVVEVVNVKNFVSDKNNIATSM |
| | RYELVRQLLYKQEWLGGEIIHLDA |
| 112 | MRTVEFKLSLNRYQQAKVDSWLAIQRWIWNQGLHLLEEFNSFSTWDKVSQTWVPCCPIPWTYYRDSVG |
| | QLIAFTRIAKKKPYRMSCPIPQVYRKPVLESPTFFGLLYYFAQKNHSDKPWFCDVPCRFVAGTLKSLADA |
| | WTAYKSGKRQRPRYKQYKDKFRTLINNNAKPIKISGKRITLPKLGKVTVKTLDRRWLKSVPIVTLKIVKE |
| | PSGYYLQLSGCFPVNKEKPTNKAVGVSLGYSHLTTDGEKVVESPNFYHKMEKQLAQLQRQLCRQQKTC |
| | PISTYNPSLGEHFLSCPIDPGKGANRAKTQRKISRLYEKIRRSRLATNHKISTYLVREYDAIAIVKPEIKRIT |
| | RKPIAIVNKLGEFEHNGANHKAEFSKGLLDNSLGQLAGLIKQKASVQGRELISVSPKDLPDELKQCTEKR |
| | REQLQWSRAVYSTNFSRRYRAWEWELTPGESTETLNQEPPQGGLSCDAGTTSNFILESIGLCGVGDIPEII |
| | PLLQNQSEANSSY |
| 113 | MIKKKAFKFLLEPSKSQISDVLVFAGACRFVYNKGLALLSENYNNGKPFLNYNKLAPLLVEWKNDNKLE |
| | WLKLCPSQSLQQSLRDLDRAFQNFFSGRSQYPRFKKKGRSDSFRVPCQRVRLDQEKGLVSLPKLGWVK |
| | YRKSRAITGDLKNVTVSRKFDKWYISFNTEEVVSNPVHSSVDKTRILLNDGYVTLCTGGDLSVKKFTSLV |
| | DEKKIKRLNKELSRKVKNSNNWLKNKKKIDKIRLKSGSFRLDAIHKITTTICKKHAVVEVVNVKNFVSD |
| | KNNIATSMRYELVRQLLYKQEWLGGKIIHLDA |
| 114 | MKLGVLKAYKFRIYPNGQQKQFFIETFGCVRFTYNQLLEAKMEELANNEAKQGLTPAKLKKEYPFLKET |
| | DSLALANAQRNLDRAFRNYFQKRAGFPKMKTKKSIWQSYTTNNQQHTIYFEDDQIKLPKLKTLVPVKK |
| | HRAIKGKIKSATISAKNNEEFYISILCLEEIPPLPKQQASVAVVYDPQQLVKANQPIPITCEHAIQTKQKLTR |
| | AERKLQVKATAVKRKKILLTQARNYQKLKGKVARLYRFHCCQKREFIDQVSYHLVKQYDTIYLEQIAE |
| | DTVLKAGHYSISDWHQFVRKIQYKAQWYGKELRFVTLDMQDQQKLERLSNEMSS |
| 115 | MDDQAHAARTMWNCLHDWWTMLPKEKRSLAAADAATRQARKEIDWLGVLPAQAAQAVLNTYFQV |
| | WRNCWDGRADEPNFKARSRTVMSVDIPQGRDLNISRVHRRWGMVQIPRIGRIRFRWTKDLPVGKRANT |
| | ENLITGARLVKDALGWHIAFRYDQIKQLRARATRRAVDWQHKTTTDIARQYGTVVVEALTITNMVNSA |
| | KGTIEEPGKNVAQKSGLNRSISQEAWGRTVTMLTYKTARQGGTLVKVPAPGTSQRCSACGFTTPGSRQA |
| | SPWRQARRRKVGRNLPRLRGRALQGGEPDAAEAVGEETGRRAQSSTGDVPVHHGGEVRSVRGGAGRL |
| | RRGRRAPGDGAGARRRARAAARGGLGGGSRGRRAA |
| 116 | MKVLKGYRFRIYPDEEQLTFFRQTFGCVRFTYNQLLMARKNTANSEESMKLTPAVLKKDYPFLKKTDSL |
| | ALANAQRNLERAYANFFQGRASYPKLKNKKSTWQSYTTNNQKHTIYFVDEKLKLPKLKSLIQVHQHREI |
| | KGLIRSATISAKNNEEFYVSLLCLEEVTALPKTKKAIGISYCPKHLIHVSKPLDHLETIEEQMQEDRLIKAK |
| | RKLLLRAKIAKKHKVKLKDAKNYQKQKQKVHKLIQEKAFRKKDFIDQLTFSLVKEFDYIFVEKQPSTVD |
| | SEETSLFNSSDWYLFMQKLTYKTQWYGKKYLAIEKPANTENSGQMIEELGKQRLGL |
| 117 | MAEQIEEVPAELIQTRVYELHPNKTMRRVLDEACDYRRYCWNQGLALWNEMYKARQTLKSSLSTDSK |
| | KLTEEQKVLLKDKPSPSERRVRNMLVADKKDWQYAQSARILQLAISDLGKAWNNFFDKAQPGWGKPK |
| | FRSKREARQGFKSDQSKIKDGILYLERAKESSVPKDQWRGFKLSEKPLSDEFGVVSYFKEKGRYYVAIPY |
| | KIKAKDIKLPDKTGKATAVDVNVGHFDYTGGRINVLPKKLDKIYGKIKHYQRQLAKKQVKNGEAACES |
| | ENYLKTKAKLQACYRKASNIQNDLMQKFTTELVNN |
| 118 | MLKAYRYRIYPNKEQEIQLAKTFGCCRFVYNQTLAYRKDAYEKEKKSVSKTDCNNYCNRELKKAYEW |
| | LKEVDKFALTNAIYNMDSAYQKFFKEHTGYPKFKSKHDNHKSYTTNFTNGNITVDFDRGRIKLPKLKRV |
| | KIKLHRKFLGQIKAATISKVPSGKYYVSVLVETEHSPLVKTNGQIGLDLGIKDLCITSDGKKYENPKTIKK |
| | YEKKLVKLQRQLANKIKGSGTIRKKGNKSTMHEKITNTRKDYLHKISSEIINENQV |
| 119 | MLKAFKFRMYPTEEQKQQLIRTFGCVRFTYNHLLKERQKSWQQTGVADFSLTPATLKKEYPFLKEVDSL |
| | ALANAQLNLDRAFRNYFKGRASFPKLKTKKSMWQSYTTNNQTHTVYLKNGHLKLPKQKELIKINQHRP |
| | VEGTIRSATISARYNEEFYVALLCDVSSIKKESSAKWIGIAYHPKTLIETSQPIEVTLPKFDQTEEKLQHAQ |
| | RKLSVKVRSAHHRKTRLDQASNYQKQKRKVMDLYLKQKNQREDYLEQLSGKLVKQYDYLFVESFPKE |
| | EAHADFSIHDWHKLITKLRYKSQWYNKKFLFINTDGAEESNSVRKSQVLEQLGRHSVIKE |
| 120 | MLKAFKFRMYPTEEQKQQLIRTFGCARFTYNHLLKKRQKSWQQTGIANFSLTPATLKKEYPFLKEVDSL |
| | ALANAQLNLDRAFRNYFKGRASFPKLKTKKSMWQSYTTNNQTRTIYLENGYLKLPKQKELIKINQHRPV |
| | EGSIRSATISARYNEEFYVALLCDVSPVKKESLAKWIGIAYHPKTLIQTSRPLEVTLPKFHQTEEKLQHAQ |
| | RKLNVKVRSAHHRKIRLDQASNYQKQKRKVMDLYLKQKNQREDYLEQLSGKLVKQYDYLFVESFPKE |
| | EAHADFSIHDWHKLITKLRYKSQWYNKKFLLINTDGAEESNSVRKSQVVEKMGRHSVIKG |
| 121 | MKNLKGYRFRIYPNEAQKRFFIETFGCVRFIYNYFLKLDTAERTSEEIITPASLKRDYPFLKKTDSLALAN |
| | AKRNLDRAFQNYYQQRSGYPKLKNKSSVWQSYTTNNQNGTVRIEDGYLKLPKLKEKIQICEHRKITGKI |
| | KSVTISAKNNEEFYASILCVETIDKFEKTGKKIRLSFDAHQLVQQAKYRAEVIEPIQHTKGRLAFLQRRLK |
| | VKARVARKQNRILADCKNYQKQKKQYDKLLTHLNNQIKDYLNHLSVFYIKEYDVIEIVEPEDRSCAEDA |
| | LFTSNEWHQLVRLLKYKAQWYGKEIQIINCQNI |
| 122 | MLKAFKFRIYPTESQKQWLIQTFGCVRFTYNHLLKARQAYYLETKEIDYTLTPASLKKQYPFLKEVDSLA |
| | LANAQLNLDRAFRNYFKGRASFPKLKNKKSIWQSYTTNNQKGTIYLEETSIKLPKLKEKIRIHAHRPIEGT |
| | IRSATISSRYNEIFYVSLLCEVPQKTMEASNKWIGIAYDPDRLVEMSTPLDIAIPKFKQVDQQLQRAKRKL |
| | VIKGRAAQHRRTHVERVKNYQKQKRKIKDLYLKQKFQREDYLEQISGTVIRHYDYLFVESISADCPEGD |
| | FSIQDWHKLLAKLQYKSQWYSKKLVLIDMKEQTDPSTNKKSLELVEIGKQVLFE |
| 123 | MFLRKAATTEGIISEGRQVPIKTLKAYRFALYPDEAQKHFFIQTFGCVRFTYNMLLTLRQQESGKTVEER |
| | TSARLQKQKMTPAKLKKDYPFLKATDSLALANAQRNLEKAFQNYYRGRASYPKLKSKKSAWQSYTTN |
| | NQGHTIYLAEDGLKLPKLKSKVLVHQHRSVAGKIRSATISAKNRQEFYVSLLCEEDIPALPKTGSEIEIAY |
| | DPTGLVVTNKPIVGIPTFCQTQVLEKLKKAQRRLSCRAKSAQRRNAKLEQAKNYQKQKSQVQQLYIHKL |
| | KQKEDFTEQLSIALLRQFDCIIITKPPELRENKESKAAKTVKKSKHTTVFPSFEDNFTLSDWNRLLLKLKY |
| | KAEWYEKELVFICPTNGK |
| 124 | MSVLKGYKFRIYPDEKQKKFFIETFGCVRFTYNHLLMARHTGTARNTTLTPASLKKEYPFLKKTDSLAL |
| | ANAQRNLERAFRNYFSGRAGYPKLKTKKSTWQSYTTNNQQHTVYLEGEYLKVPKLKSLVPIHLHREVR |
| | GTIKSVTISAKRNREFYASILCVEEVEELPKTNDLVGISYCPENLIQISAKKELPQIDQSHLVKQLGKEQKK |
| | LQLRAKVAKKRKVRLIHAKNYQKQKERVLKLRATKLDQKRNFIDQLTINLVRDFDYLFIESKPKFKNET |
| | GEFSEADWQQFIQRIQYKGRWYGKEIRYIEVKELKNEKCKEIERLGRAQLT |
| 125 | MKILKGYRFKIYPNEEQKRFFIQTFGCVRFTYNYLLKAAKKPDNRSEGKVITPAMLKRDYPFLKATDSLA |
| | LANAARNLNRAFKNYFSGRSGYPKLKNKKSAWQSYTTNNQNGTVAIEGNQLKLPKLKERVMICCHRPV |
| | LGTIKSVTISAKNNQEFYVSLLCVEEVDPLPKTNREIQIYFHPEKLIADDLGQLSIQHLEQTQQKINKLTQR |
| | LELKARCARKRKVRLSQAKNYQKLKMRLAKHQSLQHNQLQDYLNQLSTLLIRKYDVINFVEPSVRDQQ |
| | SAANVQEAHLFSLNEWHQLMRMLKYKASWYGKEFKVVFSTQA |
| 126 | MNVLKGYRFRIYPNKEQQEFFTQTFGCVRFVYNHLLMARKEEHYSAESLKLTPASLKATYPFLKKTDSL |
| | ALANAQRNLDRAFLNFFKGRAGYPNLKSKKKTWQSYTTNNQKHTIYFEEGKLKVPKLKTLIDVHQHRE |
| | VKGQIKSATISAKNSEEYYVSLLCLEEITALPKTKKVVGVAYCPKHLVSVSCGREHLPELTKSTVEERLA |
| | RARQKLELRAKIVKKRKVHRDCAKNYQKQKRRVDKLYLTRAYQKNDYIDKLTLKLIEQYDYVFLEKEP |
| | NFEKNCSFTETDWHVFMQKLRYKGKWYGKELRLIDIASDQEEKSETLEHLGRTQFSK |
| 127 | MLKAFKFRMYPTEEQKQQLIRTFGCARFTYNHLLKKRQKSWQQTGVADFSLTPATLKKEYPFLKEVDS |
| | LALANAQLNLERAFRNYFKGRASFPKLKTKKSMWQSYTTNNQTRTIYLENGYLKLPKQKELIKINQHRP |
| | VEGSIRSATISARYNEEFYVALLCDVSPVKKESLAKWIGIAYHPKTLIQTSRPLEVTLPKFHQTEEKLQHA |
| | QRKLNVKVRSAHHRKTRLDQASNYQKQKRKVMDLYLKQKNQREDYLEQLSGKLVKQYDYLFVESFP |
| | KEEAHADFSIHDWHKLITKLRYKSQWYNKKFLLINTDGAEESNSVRKSQVVEEMGRHSLIKG |
| 128 | MAKFEIPEGWMVQAFRFTLDPTAEQARALARHFGARRKAYNWTVATLKADIDAWQATGIQTAKPSLR |
| | VLRKRWNTVKNDVCVNIETGVVWWPECSKEAYADGIDGAVDAYWNWQNSRSGKRDGKRMGFPRFK |
| | KKGRDPDRVTFTTGAMRVEPDRRHLTLPVIGTVRTHENTRRVERLIAKGRSRVLAITVRRNGTRIDASVR |
| | VLVQRPQQPKVTDPGSRVGVDVGVRRLATVATADGAVLERVPNHGLDDLQRLGKRGDSVANRRERDA |
| | VGLRLAPKPAGAQSQIETSLGNDVQRRSHLGQHGRMTVGIAQHAGAQPQLRGVAGQCRKCGPALEQG |
| | QRPRRGALARPAGFGAGRGAGVGGDAGDLRILAGAYRQEVVA |
| 129 | MPKFEVPDGWTVQAFRFTLDPTEDQAKALARHFGARRKAYNWTVATLKADIQAWHASGTVTAKPSLR |
| | VLRKRWNTVKDDVCVNTETGVAWWPECSKEAYADGIAGAVEAYWNWQTSRAGKRAGKRVGFPRFK |
| | RKGRDQDRVSFTTGAMRVEPDRRHLTLPVIGTVRTHENTRRIERLIKAGRARVLAISVRRNGTRLDASVR |
| | VLVQRPQQPKVVHPGSRVGVDVGVRRLATVATADGTAIEQVENPRPLGAALRELRHVCRARSRCTKGS |
| | RRYRERTTQISRLPGQRCPHPSPARPDDTVGSNPRPHCCRRLGRDRDVAAKRVAGCPRSSARTVGCGPG |
| | HSASALVLQDSLVRVGAGGRRPLVPVVENLPRLPACARHRLGRTMAMRPMLSGPSA |
| 130 | MKNLKGYRFRIYPNEAQKRFFIETFGCVRFIYNYFLKLDTAERTSEEIITPASLKRDYPFLKKTDSLALAN |
| | AKRNLDRAFQNYYQQRSGYPKLKNKSSVWQSYTTNNQNGTVRIEDGYLKLPKLKEKIQICEHRKITGKI |
| | KSVTISAKNNEEFYASILCVETIDKFEKTGKKIRLSFDAHQLVQQAKYRAEVIEPIQHTKGRLAFLQRRLK |
| | VKARVARKQNRILADCKNYQKQKKQYDKLLTHLNNQIKDYLNHLSIFYIKEYDVIEIVEPEDRSCAEDA |
| | LFTSNEWHQLVRLLKYKAQWYGKEIQIINCQNI |
| 131 | MKNLKGYRFRIYPNEAQKRFFIETFGCVRFIYNYFLKLDTAERTSEEIITPASLKRDYPFFKKTDSLALAN |
| | AKRNLDRAFQNYYQQRSGYPKLKNKSSVWQSYTTNNQNGTVRIEDGYLKLPKLKEKIQICEHRKITGKI |
| | KSVTISAKNNEEFYASILCVETIDKFEKTGKKIRLSFDAHQLVQQAKYRAEVIEPIQHTKGRLAFLQRRLK |
| | VKARVARKQNRILADCKNYQKQKKQYDKLLTHLNNQIKDYLNHLSIFYIKEYDVIEIVEPEDRSCAEDA |
| | LFTSNEWHQLVRLLKYKAQWYGKEIQIINCQNI |
| 132 | MKNLKGYRFRIYPNEAQKRFFIETFGCVRFIYNYFLKLDTAERTSEEIITPASLKRDYPFLKKTDSLALAN |
| | AKRNLDRAFQNYYQQRSGYPKLKNKSSVWQSYTTNNQNGTVRIEDGYLKLPKLKEKIQICEHRKITGKI |
| | KSVTISAKNNEEFYASILCVETIDKFEKTGKKIRLSFDAHQLVQQAKYRAEVIEPIQHTKGRLAFLQRRLK |
| | VKARVARNQNRILADCKNYQKQKKQYDKLLTHLNNQIKDYLNHLSIFYIKEYDVIEIVEPEDRSCAEDA |
| | LFTSNEWHQLVRLLKYKAQWYGKEIQIINCQNI |
| 133 | MNLAAWAERNGVARVTAYRWFHAGLLPVPARKVGRLILVDELASEAGAQPKTAVYARVSSADQKSDL |
| | DRQVARVTSWATAEQIPVDKVVTEVGSVLNGHRRKFPAVLRDLSVTRIVVEHRDRFCRFGSEYVHAAL |
| | AAQGRELVVVDSAEVDDDLVWDMTEILTSMCARLYGKRAAQNRASGPSRLPLSMIMRRPEMPRLEIPN |
| | GWCVQAFRFTLDPTAEQAHALARHFGARRKAYNWTVAQLKADIQAWRATGAQTAKPSLRVLRKRWN |
| | TVKDEVCVNAETGTVWWPECSKEAYADGIAGAVDAYWNWQQRRAGKRDGKRMGFPRFKKKGRDAD |
| | RVSFTTGAMRVEPDRRHLTLPVIGCVRTHENTRRIERLIAKDRARVLAITVRRNGTRLDASVRVLVQRPQ |
| | QPNVELPESRIGVDVGVRRLATVATADGACCPVLVPDG |
| 134 | MKLSVLKAYKFRIYPNGQQKQFFIETFGCVRFTYNQLLKAKMDELANKEVKLGLTPAKLKKDYPFLKET |
| | DSLALANAQRNLERAFRNYFQKRAGFPKMKTKKSVWQSYTTNNQQHTIYFVDDQLKLPKLKSLVPVKL |
| | HREIKGTIKSATISAKNGTEFYVSILCLEEVEPLPKQQQNIALIFDPQILVQANHSLPVACTHALSTLQKLV |
| | KAENKLTIKAKAVKRKKILLNNARNYQKQKGKVAKLYRLHGCQKREYIDQMSYHLVKQYDTIFIEKINE |
| | DMDVAGNYSVSDWHQFIRKMQYKAKWYGKELHFVPLSATENQKMTELLSQMGS |
| 135 | MEKAYKFRMYPNKKQQELINKTFGCCRFVYNKYLAKKIEVYENNKETFTYKQCSSDLTNFKKELEWLK |
| | EPDKFSLQNTLKDLENAYKKFFKENAGFPKFKSKKTNRFSYRTNFTNENIMYCGQYIKLPKLGMVKVRD |
| | KQVPQGRILNATISKEPSGKYYVSLCCTDIDIKAFENTNNQIGLDLGVKEFCISSCGDFIENPKYLKKSLNK |
| | LAKLQRELSRKTIGSLNRNKARLKVARLQEHIANQRKDFLQKLSTKLI |
| 136 | MKVLKAYKFRLYPSAEQKAFFIFTFGCVRFTYNHLLKERQQEYQRTGFLGKGRTPAQLKKEFPFLKKTD |
| | SLALANAQLNLDRAYRNYFRSQAGFPKLKTKKSLWQSYTTNNQQGTIDLVDGQLKLPKLKEHIPVLVH |
| | RAVKGKIKSATISAKYNEIFYVSLLCEEEVAPLPKTEKQVAVVFCQEIGIRTSQKILYPPYAVAGLESSLAK |
| | AERRLQIKATSARKRKVKLMDARNYQKQKRRVAQLYQIRYQRKRDYLEKLSFELVQAFDVIFIGKDSIQ |
| | EQPGPFDQQDWLLFLQKLAYKAKWYQKQLVFVEVPRLLQDPSELERTGTALLNKPNWQGRQGSPRE |
| 137 | MKKEDLVKVLKGYKFRIYPDEKQIQYFIQTFGCVRFTYNQLLLARQKALQEGEYKTDVSPAKLKLDYPF |
| | LKKTDSLALANAQRNLDRAFKNYFSKRAGYPKLKTKKNSWQTYTTNNQKHTIYFVGNQLKLPKLKTLI |
| | NVNLHREVLGEIKSATISAKDNQLFFVSILCLEEVTPLPKTGKSIAISYCPKHLVQIPATNYLPAFRQEKLQ |
| | WQLDKAMKRLKVRAKAAKNRKVLLEKAKNYQKQKVKVQKLYMAKNEQKKNYMNQVSYRLVRDYD |
| | YIYLEKTPTFMENMNFSETDWHHFLRKLQYKVQWYGKKIIFVDAVENVRTKENSPLNV |
| 138 | MEKAYKFRMYPNKKQQELINKTFGCCRFVYNKYLAKRIDVYKNDKETFTYKQCSSDLTNLKKELNWL |
| | KEPDKFSLQNALKDLENAYNKFFKEKAGFPKFKSKKINRFSYKTNFTNGNIMYCGQHIKLPKLGMVKIR |
| | DKQVPKGRILNATISKEPSGRYYVSLCCTDVDIEAFENTNNQIGLDLGIKEFCISSCGEFIENPKYLKKSLN |
| | KLAKLQRELSRKTIGSLNRNKARLKVARLQEHIANQRNDFLQKLSTKLIKE |
| 139 | MEKAYKFRMYPNKKQQELINKTFGCCRFVYNKYLAKRIEVYKNDKETFTYKQCSSDLTNLKKELKWL |
| | KEPDKFSLQNALKDLDNAYKKFFKEKVGFPKFKSKKINRFSYKTNFTNGNIMYLGQHIKLPKLGMIKIRD |
| | KQVPQGRILNATISKEPSGRYYVSLCCTDVDIEAFENTNNQIGLDLGIKEFCISSCGEFIENPKYLKKSLNK |
| | LAKLQRELSRKTIGSLNRNKARLKVARLQEHIANQRKDFLQKL |
| 140 | MLKLRQQNPSDESTLPEKMTGVWEKKTTATPAKLKRDYPFLKETDSLALANAQRNLTKAFQNYYRGR |
| | ASYPKLKSKKNAWQSYTTNNQGHTIYLTNEGLKLPKLKSKVPIHQHRQVCGKIRSATISAKNRQEFYVS |
| | LLCEEEITALPKTGFDITITYDPIKLIGTSKVLSDRPNFCQQRLLVQLKNAQRKLYCRGKSAQRRNVKLEQ |
| | AKNYQKQKLRLQKLYIHQIKQKEDFMEQLSIALLRQFDLVTVTMPKAFESLSANHSAAIHQDCSANYKN |
| | TAVNFTIRDWNRFVLKLKYKANWYGKKLIFTDQEKVI |
| 141 | MSVLKAYRFRIYPNEEQKHFFVTTFGCVRFTYNHLLVARQQSEGGKLTPAALKKDYPFLKATDSLALAN |
| | AQRNLEKAFRRYYTGKSDYPSLKNKSNPLQSYTTNNQGQTICLSDGYLKLPKLKSLVAVNCHREIKGTI |
| | KSATISSRNNEEFFVSFLCVEEVEPLPKTLKTIHLVYSPNKLLESSEYTPPTLCNQEQLLDKIDRAQRKLRV |
| | RGKIARKRRVPLAYAKNYQKQKEKLGRLQLSCREKKENYFDQVSYAIVRQFDFIHVTKELLFETLPDQP |
| | LYFSKADWQMFLKKLEYKAEWYGKELTYE |
| 142 | MVVVEKAYKFRMYPNKKQQELINKTFGCCRFVYNKYLAKRIDVYKNNKETFTYKQCSSDLTNLKKEL |
| | KWLKEPDKFSLQNALKDLDNAYKKFFKEKAGFPKFKSKKINRFSYKTNFTNGNIMYCGQHIKLPKLGM |
| | VKIRDKQVPKGRILNATISKEPSGRYYVSLCCTDVDIEAFENTNNHIGLDLGIKEFCISSCGEFIENPKYLK |
| | KSLNKLAKLQRELSRKTIGSLNRNKARLKVARLQEHIA |
| 143 | MKLGVLKAYKFRIYPNGQQKQFFIETFGCVRFTYNQLLEAKMEELANNEAKQGLTPAKLKKEYPFLKET |
| | DSLALANAQRNLDRAFRNYFQKRAGFPKMKTKKSIWQSYTTNNQQHTIYFEDDQIKLPKLKTLVPVKK |
| | HRAIKGKIKSATISAKNNEEFYISILCLEEIPPLPKQQASVAVVYDPQQLVKANQPIPITCEHAIQTKQKLTR |
| | AERKLQVKATAVKRKKILLTQARNYQKLKGKVARLYRFHCCQKREFIDQVSYHLVKQYDTIYLEQIAE |
| | DTVLKAGHYSISDWHQFVRKIQYKAQWYGKELRFVTLDTQDQQKLERLSGEMSS |
| 144 | MKKAYKFRLYPNKKQQELINKTFGCCRFVYNKYLAKRIDVYKNNKETFTYKQCSSDLTNLKKELKWLK |
| | EPDKFSLQNALKDLDNAYKKFFKEKAGFPKFKSKKINRFSYKTNFTNGNIMYCGQHIKLPKLGMVKVRD |
| | KQVPKGRILNATISKEPSGRYYVSLCCTDVDIEAFENTNNQIGLDLGIKEFCISSCGEFIENPKYLKKSLNK |
| | LAKLQRELSRKTIGSLATYSHFIFSFFSYYNGFDKSVINFYK |
| 145 | MIAVKKAYKFRIYPNKKQQELINKTFGCCRFVYNKYLAKRIDVYKNDKETFTYKQCSSDLTNLKKELN |
| | WLKEPDKFSLQNALKDLDNAYKKFFKEKAGFPKFKSKKINRFSYKTNFTNGNIMYCGQHIKLPKLGMV |
| | KVRDKQVPKGRILNATISKEPSGRYYVSLCCTDVDIEALENTNNHIGLDLGIKEFCISSCGEFIENPKYLKK |
| | SLNKLAKLQRELSRKTIGSLNRNKARLKVARLQEHIANQRNDFL |
| 146 | MVVVEKAYKFRMYPNKKQQELINKTFGCCRFVYNKYLAKRIDVYKNNKETFTYKQCSSDLTNLKKEL |
| | KWLKEPDKFSLQNALKDLDNAYKKFFKEKTGFPKFKSKKINRFSYKTNFTNGNIMYCGQHIKLPKLGM |
| | VKIRDKQVPQGRILNATISKEPSGRYYVSLCCTDVDIEAFENTNNHIGLDLGIKEFCISSCGEFIENPKYLK |
| | KSLNKLAKLQRELSRKTIGSLNRNKARLKVARLQEHIANQR |
| 147 | MIAVKKAYKFRIYPNKKQQELINKTFGCCRFVYNKYLAKRIDVYKNDKETFTYKQCSSDLTNLKKELK |
| | WLKEPDKFSLQNALKDLDNAYKKFFKEKAGFPKFKSKKINRFSYKTNFTNGNIMYCGQHIKLPKLGMV |
| | KIRDKQVPKGRILNATISKEASGRYYVSLCCTDVDIEVFENTNNQIGLDLGIKEFCISSCGEFIENPKYLKK |
| | SLNKLAKLQRELSRKTIGSLNRNKARLKVARLQEHIANQRNDFL |
| 148 | MLKAFKFRIYPTASQKEWFIQNFGCVRFTYNHLLKARQESYARTGAIDYSMTPATLKKKYAFLKSADSL |
| | ALANAQLNLDRAFRNYFNGRASFPKLKNKKSMWQSYTTNNQKGTIYLEDKYLKLPKQKELIQVRLHRP |
| | VEGVIRSATISARYNESFYVSLLCEVQIAGVPTTNRWLGVAYDPKKLVETSSPVEVQMPLFRQTRDKMK |
| | VAKRKLVIKSKAAQKRKVRLENARNYQKQKRKVMDLYQKQKLQKEDYLERVSGNLIRNYDYLFVEAV |
| | PSELSSADFQLQDWYKLITKLRYKAQWYNKTLLFINVNEQLNEPPEKKSMELEKIGKQVIFE |
| 149 | MKLGVLKAYKFRIYPNGQQKQFFIETFGCVRFTYNQLLKAKMDELANKEVKLGLTPAKLKKDYPFLKE |
| | TDSLALANAQRNLERAFRNYFQKRAGFPKMKTKKSIWQSYTTNNQQHTIYFVEDQLKLPKLKSLVPVK |
| | QHRAIKGTIKSATISAKNGTEFYVSILCLEEVEPLPKKQQKIALIFDPQLLVQANHSLPVACTHALATLQK |
| | LARAENKLTIKAKAVKRKKILLNNARNYQKQKGKVAKLYRLHGCQKREYIDQMSYHLVKQYDTIYIEK |
| | ISEDAQVSGNYTISDWHQFVRKMQYKAKWYGKELHFVALSATDNRKMPELLAQMGS |
| 150 | MKLGVLKAYKFRIYPNGQQKQFFIETFGCVRFTYNQLLEAKMEELANNEAKQGLTPAKLKKEYPFLKET |
| | DSLALANAQRNLDRAFRNYFQKRAGFPKMKTKKSIWQSYTTNNQQHTIYFEEDQIKLPKLKTLVPVKK |
| | HREIKGKIKSATISAKNNEEFYISILCLEEITPLPKQQASIAVVYDPQQLVKANQPVPITCEHAIQTKQKLTR |
| | AERKLQVKATAVKRKKILLTQARNYQKLKGKVARLYRFHCCQKREFIDQVSYHLVKQYDTIYLEQIAE |
| | DTVLKAGHYSISDWHQFVRKIQYKAQWYGKELRFVTLDTQDQQKLERLSGEMSS |
| 151 | MKLGVLKAYKFRIYPNGQQKQFFIETFGCVRFTYNQLLEAKMEELANNEAKQGLTPAKLKKEYPFLKET |
| | DSLALANAQRNLDRAFRNYFQKRAGFPKMKTKKSIWQSYTTNNQQHTIYFEEDQIKLPKLKTLVPVKK |
| | HREIKGKIKSATISAKNNEEFYISILCLEEITPLPKQQASIAVVYDPQQLIKANQSVPVTCEHAIQTKQKLTR |
| | AERKLQVKATAVKRKKILLTQARNYQKLKGKVARLYRFHCCQKREFIDQVSYHLVKQYDTIYLEQIAEE |
| | TVLKAGHYSISDWHQFVRKIQYKAQWYGKELRFVTLDTQDQQKLERLSGEMSS |
| 152 | MLKAFKFRMYPTEEQKQQLIRTFGCVRFTYNHLLKERQKSWQQTGVADFSLTPATLKKEYPFLKEVDSL |
| | ALANAQLNLDRAFRNYFKGRASFPKLKTKKSMWQSYTTNNQTHTVYLKSGYLKLPKQKELIKINQHRP |
| | VEGTIRSATISARYNEEFYVALLCDVSSIKKESSAKWIGIAYHPKTLIETSQPIEVTLPKFDQTEEKLQHAQ |
| | RKLSVKVRSAHHRKTRLDQASNYQKQKRKVMDLYLKQKNQREDYLEQLSGKLVKQYDYLFVESFPKE |
| | EAHADFSIHDWHKLITKLRYKSQWYNKKFLFINTDGAEESNSVRKSQVLEQLGRHSVIKE |
| 153 | MLKAFKFRIYPTDSQKQWLIQTFGCVRFTYNHLLKARQAYYLETQEIDYTLTPASLKKQYPFLKEVDSL |
| | ALANAQLNLDRAFRNYFKGRASFPKLKNKKSIWQSYTTNNQKGTIYLEETYLKLPKLKEKIRIHAHRPIE |
| | GTIRSATISSRYNEIFYVSLLCEVPQKTMKASNKWIGIAYDPDRLVEMSTPLDITIPKFKQVDQQLLRAKR |
| | KLVIKGRSAQHRRTHVERVKNYQKQKRKIKDLYLKQKFQREDYLEQISGTVIRHYDYLFVESISADCPEG |
| | DFSIQDWHKLLAKLQYKSQWYSKKLVLIDMKEQTNPSTNKKSLELVEIGKQVLFE |
| 154 | MKNLKGYRFRIYPNEAQKRFFIETFGCVRFIYNYFLKLDTAERTSEEIITPASLKRDYPFLKKTDSLALAN |
| | AKRNLDRAFQNYYQQRSGYPKLKNKSSVWQSYTTNNQNGTVRIEDGYLKLPKLKEKIQICEHRKITGKI |
| | KSVTISAKNNEEFYASILCVETIDKFEKTGKKIRLSFDAHQLVQQAKYRAEVIEPIQHTKGRLAFLQRRLK |
| | VKARVARKQNRILADCKNYQKQKKQYDKLLTHLNNQIKDYLNHLSIFYIKEYDVIEIVEPEDRSCAEDA |
| | LFTSNEWHRLVRLLKYKAQWYGKEIQIINCQNI |
| 155 | MKNLKGYRFRIYPNEAQKRFFIETFGCVRFIYNYFLKLDTAERTSEEIITPASLKRDYPFLKKTDSLALAN |
| | AKRNLDRAFQNYYQQRSGYPKLKNKSSVWQSYTTNNQNGTVRIEDGYLKLPKLKEKIQICEHRKITGKI |
| | KSVTISAKNNEEFYASILCVETIDKFEKTGKKIRLSFDAHQLVQQTKYRAEVIEPIQHTKGRLAFLQRRLK |
| | VKARVARKQNRILADCKNYQKQKKQYDKLLTHLNNQIKDYLNHLSIFYIKEYDVIEIVEPEDRPCAKDD |
| | LFTSNEWHQLVRLLKYKAQWYGKEIQIINCQNI |
| 156 | MKNLKGYRFRIYPNEAQKRFFIETFGCVRFIYNYFLKLDTAERTSEEIITPASLKRDYPFLKKTDSLALAN |
| | AKRNLDRAFQNYYQQRSGYPKLKNKSSVWQSYTTNNQNGTVRIEDGYLKLPKLKEKIQICEHRKITGKI |
| | KSVTISAKNNEEFYASILCVETIDKFEKTGKKIRLSFDAHQLVQQAKYHAEVIEPIQHTKGRLAFLQRRLK |
| | VKARVARKQNRILADCKNYQKQKKQYDKLLTHLNNQIKDYLNHLSIFYIKEYDVIEIVEPEDRSCAEDA |
| | LFTSNEWHQLVRLLKYKAQWYGKEIQIINCQNI |
| 157 | MKILKAYKFRIYPDEAQQEFFIKTFGCVRFTYNTLLKLRQQNPSDESTLPEKMTGVWEKKTTATPAKLK |
| | RDYPFLKETDSLALANAQRNLTKAFQNYYRGRASYPKLKSKKNAWQSYTTNNQGHTIYLTNEGLKLPK |
| | LKSKVPIHQHRQVCGKIRSATISAKNRQEFYVSLLCEEEITALPKTGFDITITYDPIKLIGTSKVLSDRPNFC |
| | QQRLLVQLKKAQRKLYCRGKSAQRRNVKLEQAKNYQKQKLRLQKLYIHQIKQKEDFMEQLSIALLRQF |
| | DLVTVTMPKAFESLSANHSAAIHQDCSVNYKNTAVNFTIRDWNRFVLKLKYKANWYGKKLIFTDQEKV |
| | I |
| 158 | MLKAFKFRIYPTASQKEWFIQNFGCVRFTYNHLLKARQESYARTGAIDYSMTPATLKKKYAFLKSADSL |
| | ALANAQLNLDRAFRNYFNGRASFPKLKNKKSMWQSYTTNNQKGTIYLEDKYLKLPKQKELIQVRLHRP |
| | VEGVIRSATISARYNESFYVSLLCEVQIAGVPTTNRWLGVAYDPKKLVETSSPVEVQMPLFRQTRDKMK |
| | VAKRKLVIKSKAAQKRKVRLENARNYQKQKRKVMDLYQEQKLQKEDYLERVSGNLIRNYDYLFVEAV |
| | PSELSSADFQLQDWYKLITKLRYKAQWYNKTLLFINVNEQLNEPPEKKSMELEKIGKQVIFE |
| 159 | MVVVEKAYKFRMYPNKKQQELINKTFGCCRFVYNKYLAKRIEVYKNDKETFTYKQCSSDLTNLKKELK |
| | WLKEPDKFSLQNALKDLDNAYEKFFKEKAGFPKFKSKKINRFSYKTNFTNGNIMYFSQHIKLPKLGMVK |
| | IRDKQVPKGRILNATISKEPSGRYYVSLCCTDVDIEAFENTNNQIGLDLGIKEFCISSCGDFIENPKYLKKSL |
| | NKLAKLQRELSRKTIGSLNRNKARLKVARLQEHIANQRNDFLQ |
| 160 | MIAVKKAYKFRMYPNKKQQELINKTFGCCRFVYNKYLAKRIEVYKNNKETFTYKQCSSDLTNLKKELN |
| | WLKEPDKFSLQNALKDLENAYEKFFKEKTGFPKFKSKKTNRFSYKTNFTNGNIMYCGQHIKLPKLGMV |
| | KIRDKQVPKGRILNATISKEPSGRYYVSLCCTDVDIEAFENTNNQIGLDLGIKEFCISSCGDFIENPKYLKK |
| | SLNKLAKLQRELSRKTIGSLNRNKARLKVARLQEHIANQR |
| 161 | MVVVEKAYKFRMYPNKKQQELINKTFGCCRFVYNKYLAKRIDVYKNNKETFTYKQCSSDLTNLKKEL |
| | KWLKEPDKFSLQNALKDLDNAYKKFFKEKTGFPKFKSKKINRFSYKTNFTNGNIMYCGQHIKLPKLGM |
| | VKIRDKQVPQGRILNATISKEPSGRYYVSLCCTDVDIEAFENTNNHIGLDLGIKEFCISSCGEFIENPKYLK |
| | KSLNKLAKLQRELSRKTIGSLNRNKARLKVARLQEHIANQRNDFLQK |
| 162 | MKNSSLLNKGYKFRIYPNIHQIAKIEKNFGCVRFVYNYFLSQRIRAYDSAGKTIGYLEQQNHLPLLKKQY |
| | PWLKVADSTSLQISIRNLDKAFQNFFKNKAFGFPNFKSKKSIRKCYTVNCVNSNIVIKDGKIKLPKLKWV |
| | DAKVHRKVEGRIISATVIKSSSGKYYVSVITEQKKRQIPSTEGKNIISLQMKDFITISNDKSIYYFKYIKKIK |
| | KLERKLLSKEKESNNRKKLEKQIGKLYEKIQNKRDDFLHKLSKNIVDENQIIYIQECNVKKGTDYIENCA |
| | HLKSFSWSKFCKFLEYKSCWYNKSLIYVENSDSYLNLEYNYKSLNTNIPLNLGEKINVTLMKKILRPHSF |
| 163 | MLKAFKFRIYPTESQKQWLIQTFGCVRFTYNHLLKARQAYYLETKEIDYTLTPASLKKQYPFLKEVDSLA |
| | LANAQLNLDRAFRNYFKGRASFPKLKNKKSIWQSYTTNNQKGTIYLEETSIKLPKLKEKIRIHAHRPIEGT |
| | IRSATISSRYNEIFYVSLLCEVPQKTMEASNKWIGIAYDPDRLVEMSTPLDIAIPKFKQVDQQLQRAKRKL |
| | VIKGRAAQHRRAHVERVKNYQKQKRKIKDLYLKQKFQREDYFEQISGTVIRHYDYLFVESIPADCREGD |
| | FSIQDWHKLLAKLQYKAQWYSKKLVLIDMKEQTNPSTTKKSLELVEIGKQVLFE |
| 164 | MKTLQAYRFALDLSPRQERAVLAHAGAARVAHNWALARVRAVMSQRAAERTYGVPDELLSPPISWSL |
| | PSLRKAWNAAKDEVAPWWAECSKEAFNTGLDALARALKNWSDSRKGARKGHAVGFPRFKSRRRSTPT |
| | VTTGVMRIEADRRHVVLPRLGALRLHESARKLARRLEAGTARIMSATVRREGGRWFVSFTCQVERAVR |
| | APARPGSMVGVDLGVKHLAVLSTGERVANPRHLVVAARRMRRLARAVSRCVTPDRRVRRVGSNRCPG |
| | RSKSFRGRTRASSGYAATVYTSSPPG |
| 165 | MSSCRTLDNKVDSMKNLKGYRFRIYPNEAQKRFFIETFGCVRFIYNYFLKLDTAERTSEEVITPASLKRD |
| | YPFLKKTDSLALANAKRNLDRAFQNYYQQRSGYPKLKNKSSAWQSYTTNNQNGTVRIEDGYLKLPKLK |
| | EKIQICEHRKITGKIKSVTISAKNNEEFYASILCVETIDKFEKTGKKIRLSFDEHQLVKQAKYRAEVIEPIQQ |
| | TKGRLEFLQRKLKVKARVARKQNRVLADCKNYQKQKKQYDKLLTHLNNQIKDYLNHLSIFYIKEYDVI |
| | EIVEPEDRSCAKDDLFTSNEWHQLTRLLKYKAQWYGKEIQIINCQNI |
| 166 | MSSCRTLNNKVDSMKNLKGYRFRIYPNEAQKRFFIETFGCVRFIYNYFLKLDTAERTSEEIITPASLKRDY |
| | PFLKKTDSLALANAKRNLDRAFQNYYQQRSGYPKLKNKSSVWQSYTTNNQNGTVRIEDGYLKLPKLKE |
| | KIQICEHRKITGKIKSVTISAKNNEEFYASILCVETIDKFEKTGKKIRLSFDAHQLVQQAKYRAEVIEPIQHT |
| | KGRLAFLQRRLKVKARVARKQNRILVDCKNYQKQKKQYDKLLTHLNNQIKDYLNHLSIFYIKEYDVIEI |
| | VEPEDRPCAKDDLFTSNEWHQLVRLLKYKAQWYGKEIQIINCQNI |
| 167 | MADFSLTPATLKKEYPFLKEVDSLALANAQLNLDRAFRNYFKGRASFPKLKTKKSMWQSYTTNNQTHT |
| | VYLKNGHLKLPKQKELIKINQHRPVEGTIRSATISARYNEEFYVALLCDVSSIKKESSAKWIGIAYHPKTLI |
| | ETSQPIEVTLPKFDQTEEKLQHAQRKLSVKVRSAHHRKTRLDKASNYQKQKRKVMDLYLKQKNQRED |
| | YLEQLSGKLVKQYDYLFVESFPKEEAHADFSIHDWHKLITKLRYKSQWYNKKFLLINTDGAEESNSVRK |
| | SQVLEQLGRHSVIKE |
| 168 | MKNLKGYRFRIYPNEAQKRFFIETFGCVRFIYNYFLKLDTAERTSEEVITPASLKRDYPFLKKTDSLALAN |
| | AKRNLDRAFQNYYQQRSGYPKLKNKSSAWQSYTTNNQNGTVRIEDGYLKLPKLKEKIQICEHRKITGKI |
| | KSVTISAKNNEEFYASILCVETIDKFEKTGKKIRLSFDEHQLVKQAKYRAEVIEPIQQTKGRLEFLQRKLK |
| | VKARVARKQNRVLADCKNYQKQKKQYDKLLTHLNNQIKDYLNHLSIFYIKEYDVIEIVEPEDRSCAKDD |
| | LFTSNEWHQLTRLLKYKAQWYGKEIQIINCQNI |
| 169 | MLKAFKFRIYPTTLQKQWFIQNFGCVRFTYNYLLKVRQESYAKTGAIDYTVTPASLKKKYPFLKTADSL |
| | ALANAQLNLDRAFRNYFKGRASFPKLKNKKSMWQSYTTNNQNGTIYLEKNYLKLPKQKERIKVNLHRP |
| | VEGVIRSATISARYNEVFYVSLLCEVSAQNLEGSNRWIGVAYDPQKLIETSSPLNVQLPLLKQTQDSIKIA |
| | QRKLWIKSKAAQKRKVRLEKAKNYQKQKRKVMDLYLKQKYQKEDYLEQLSGKLIRHYDYLFIEAVPN |
| | DCLSTKFSLQDWYKFIHKLRYKAHWYNKSLLLINVNEQSHLSCNQKSVTLENIGKQMMFDEMN |
| 170 | MKNLKGYRFRIYPNEAQKRFFIETFGCVRFIYNYFLKLDTAERTSEEIITPASLKRDYPFLKKTDSLALAN |
| | AKRNLDRAFQNYYQQRSGYPKLKNKSSVWQSYTTNNQNGTVRIEDGYLKLPKLKEKIQICEHRKITGKI |
| | KSVTISAKNNEEFYASILCVETIDKFEKTGKKIRLSFDAHQLVQQAKYRAEVIEPIQHTKGRLAFLQRRLK |
| | VKARVARKQNRILVDCKNYQKQKKQYDKLLTHLNNQIKDYLNHLSIFYIKEYDVIEIVEPEDRPCAKDD |
| | LFTSNEWHQLVRLLKYKAQWYGKEIQIINCQNI |
| 171 | MIVVEKAYKFRMYPNKKQQELINKTFGCCRFVYNKYLAKRIDVYKNDKETFTYKQCSSDLTNLKKELK |
| | WLKEPDKFSLQNALKDLDNAYEKFFKEKAGFPKFKSKKINRFSYKTNFTNGNIMYCGQHIKLPKLGMV |
| | KIRDKQVPQGRILNATISKEPSGRYYVSLCCTDVDIEAFENTNNHIGLDLGIKEFCISSCGDFIENPKYLKK |
| | SLSKLAKLQRELSRKTIGSLNRNKARLKVARLQEHIANQRND |
| 172 | MLKAFKFRMYPTEEQKQQLIRTFGCVRFTYNHLLKERQKSWQQTGVVDFSLTPATLKKEYPFLKEVDSL |
| | ALANAQLNLDRAFRNYFKGRASFPKLKTKKSMWQSYTTNNQTHTVYLKNGHLKLPKQKELIKINQHRP |
| | VEGTIRSATISARYNEEFYVALLCDVSSIKKESSAKWIGIAYHPKTLIETSHPIEVTLPKFDQTEEKLQHAQ |
| | RKLSVKVRSAHHRKTRLDQASNYQKQKRKVMDLYLKQKNQREDYLEQLSGKLVKQYDYLFVESFPKE |
| | DAHADFSIHDWHKLIKKLRYKSQWYNKKFLLINTDGAEESNFVRKSQVLEQLGRHSVIKE |
| 173 | MEVLKAYKFRLYPTQQQRRFFIETFGCVRFTYNTLLKYRQESHKPKNVRLTPARLKEDFPFLKKTDSLAL |
| | ANAQLNLERAFRNYYKGHAGYPKLKTKRCIWQSYTTNNQHHTIYFQDGKLKLPKLKTLVSLNKHREVP |
| | GQIKSATISAKNNRIFYVSILCKEKVVPLPLTKRSVRLNFSKTCLVEASDSELSFPDFSQAEIEGKLQKAER |
| | KLAVRGKAARNRHISLSQAKNYQKQKEKVRNLYTHYYERKKTYLNELSMQIIRTYDEIYVETNNKRVN |
| | ATGPFTSSDWFHFIQKLKYKAVWYGKTVYLNEENRSKIG |
| 174 | MLRMKAYRFRIYPTEEQRVFLIKTFGCVRFTYNTLLKSGSNMQERLSPAKLKKDFPFLKEVDSLALANA |
| | QRHLDRAFKNYYQGRASYPKLKSKRSRWQSYTTNNQQHTVYIQDGMLKVPKLKSLIPLELHREIKGNIK |
| | TATISAEDSKEFYVSLLCEEDIPIIKKTNKTIKIHFSRERLIEPEMCLEHYYLDILKTEEIIRKAEKRLGVRKH |
| | AALKQHKKLSQAQNYQKQKQRVNRLYVHRQNQKNALFDKLSIHLVREYDRIYIQNLPSQEESEKIFYST |
| | DWQRFLTKLSYKAEWYGKEIILDE |
| 175 | MKKEDLVKVLKGYKFRIYPNEKQIQYFIQTFGCVRFTYNHLLHARQKALQAGDYQTQVSPASLKRDYPF |
| | LKKTDSLALANAQRNLDRAFKNYFSKRAGYPKLKTKKNNWQSYTTNNQKHTIYFVGNQLKLPKLKSL |
| | VTVNLHRKVAGEIKSATVSAQNNQMFFVSLLCLEEINPLPKTGTTIGVAYCPENLVQMSAVNRLPVYKQ |
| | ETLQYQLDKAIKRLEVRAKAAKRRKVLLEQAKNYQKQKSKVQKLYMAKNDQKKNYIDQLTYRLVHD |
| | YDCICLEKQPEFTENTKFSETDWQHFLRKIQYKARWYDKQLVFVDSIEKENETKCFTIEQVGKKLINQ |
| 176 | MQAYRFALDLTPSQERAVWSHAGAGRKAHNWALARVKAVLDQRAAERSYGLADDALTPALRWSLPA |
| | LRKAWNAAKEQVAPWWRECSKEAFNTGLDALARGLKNWSDSRTGKRAGRKVGFPRFKTKHRTTPSV |
| | RFTTGTIRVEPDRKHVVLPRLGRLKLHESARKLARSKRWLRAKARLGRAHARVANLRRDGLHKLTTRL |
| | AREHATVVVEDLNVAGMMANRRLARHVADAGKRLPGTAPAGKTGTVPPQGRAAA |
| 177 | MLKAFKFRIYPTDSQKQWLIQTFGCVRFTYNHLLKARQAYYLETQEIDYTLTPASLKKQYPFLKEVDSL |
| | ALANAQLNLDRAFRNYFKGRASFPKLKNKKSIWQSYTTNNQKGTIYLEETYLKLPKLKEKIRIHAHRPIE |
| | GTIRSATISSRYNEIFYVSLLCEVPPKTMKASNKWIGIAYDPDRLVEMSTPLDITIPKFKQVDQQLLRAKR |
| | KLVIKGRSAQHRRTHVERVKNYQKQKRKIKDLYLKQKFQREDYLEQISGTVIRHYDYLFVESISADCPEG |
| | DFSIQDWHKLLAKLQYKSQWYSKKLVLIDMKEQTNPSTNKKSLELIEIGKQVLFE |
| 178 | MKLGVLKAYKFRIYPNGQQRQFFIETFGCVRFTYNQLLEAKMEELANNEAKQGLTPAKLKKEYPFLKET |
| | DSLALANAQRNLDRAFRNYFQKRAGFPKMKTKKSIWQSYTTNNQQHTIYFEDDQIKLPKLKTLVPVKK |
| | HRAIKGKIKSATISAKNNEEFYISILCLEEIPPLPKQQASVAVVYDPQQLVKANQPIPITCEHAIQTKQKLTR |
| | AERKLQVKATAVKRKKILLTQARNYQKLKGKVARLYRFHCCQKREFIDQVSYHLVKQYDTIYLEQIAE |
| | DTVLKAGHYSISDWHQFVRKIQYKAQWYGKELRFVTLDTQDQQKLERLSGEMSS |
| 179 | MEKAYKFRMYPNKKQQELINKTFGCCRFVYNKYLAKRIDVYKNDKETFTYKQCSSDLTNLKKELKWL |
| | KEPDKFSLQNALKDLDNAYKKFFKEKTGFPKFKSKKINRFSYKTNFTNGNIMYCGQHIKLPKLGMVKIR |
| | DKQVPQGRILNATISKEPSGRYYVSLCCTDVDIEAFENTNNHIGLDLGIKEFCISSCGEFIENPKYLKKSLN |
| | KLAKLQRELSRKTIGSLNRNKARLKVARLQEHIANQRXKLSILQEMTTFY |
| 180 | MIVVEKAYKFRMYPNKKQQELINKTFGCCRFVYNKYLAKRIEVYKNDKETFTYKQCSSDLTNLKKELK |
| | WLKEPDKFLLQNALKDLDNAYKKFFKEKAGFPKFKSKKINRFSYKTNFTNGNIMYFSQHIKLPKLGMVK |
| | IRDKQVPKGRILNATISKEPSGRYYVSLCCTDVDIEVFENTNNQIGLDLGIKEFCISSCGDFIENPKYLKKSL |
| | NKLAKLQRELSRKTIGSLNRNKARLKVARLQEHIANQRKDFLQKLH |
| 181 | MIAVKKAYKFRLYPNKKQQELINKTFGCCRFVYNKYLAKRIDVYKNNKETFTYKQCSSDLTNLKKELK |
| | WLKEPDKFSLQNALKDLDNAYKKFFKEKAGFPKFKSKKINRFSYKTNFTNGNIMYCGQHIKLPKLGMV |
| | KIRDKQVPQGRILNATISKEPSGRYYVSLCCTDVDIEAFENTNNHIGLDLGIKEFCISSCGEFIENPKYLKKS |
| | LNKLAKLQRELSRKTIGSLNRNKARLKVARLQEHIANQRKDFLQKLSTKLIK |
| 182 | MLKAFKFRMYPTEEQKQQLIRTFGCVRFTYNHLLKERQKSWQQIGVADFSLTPATLKKEYPFLKEVDSL |
| | ALANAQLNLDRAFRNYFKGRASFPKLKTKKSMWQSYTTNNQTHTVYLKNGHLKLPKQKELIKINQHRP |
| | VEGTIRSATISARYNEEFYVALLCDVSSIKKESSAKWIGIAYHPKTLIETSQPIEVTLPKFDQTEEKLQHAQ |
| | RKLSVKVRSAHHRKTRLDKASNYQKQKRKVMDLYLKQKNQREDYLEQLSGKLVKQYDYLFVESFPKE |
| | EAHADFSIHDWHKLITKLRYKSQWYNKKFLLINTDGAEESNSVRKSQVLEQLGRHSVIKE |
| 183 | MKKSSLLNKGYKFRIYPNNEQIAKIEGNFGCARFVYNYYLSQRIGAYNSEGKTIGYLEQQNHLPLLKKH |
| | YPWLKVADSTSLQISIRNLDKAFQNFFNNKAFGFPNFKRKKSLRKCYTVNCVNSNIAVKNGKIKLPKLK |
| | WVEAKVHRKVEGRIISATVIKNSSGRYYVSIITEQKKREISFIEGENIVSLQMKDFINISNEESIYYFKYIKKI |
| | SKLEIKLLRKEKESNNRKKLEKQIGKLYEKVQNKRDDFLHNLSKNIVDENQIIYIQEANVKGEKSSVKDY |
| | QNLKSFSWSKFCKFLEYKSSWYNRSLIYVENNDNYFNLNYGQKLLNTNIPINFGDKINVTLMKKILHPHS |
| | FKYTGIL |
| 184 | MEKAYKFRIYPNKKQQELINKTFGCCRFVYNKYLAKRIDVYKSDKETFTYKQCSSDLTNLKKELKWLK |
| | EPDKFSLQNALKDLDNAYKKFFKEKAGFPKFKSKKINRFSYKTNFTNGNIMYCGQHIKLPKLGMVKVRD |
| | KQIPQGRILNATISKEPSGRYYVSLCCTDVDIEVFENTNNQIGLDLGIKEFCISSCGEFIENPKYLKKSLNKL |
| | AKLQRELSRKTIGSLNRNKARLKVARLQEHIANQRNDFLQKLSTKLIKEXXXXXG |
| 185 | MLKAFKFRIYPTASQKEWFIQNFGCVRFTYNHLLKARQESYARTGAIDYSMTPATLKKKYAFLKSADSL |
| | ALANAQLNLDRAFRNYFNGRASFPKLKNKKSMWQSYTTNNQKGTIYLEDKYLKLPKQKELIQVRLHRP |
| | VEGVIRSATISARYNESFYISLLCEVQIAGVPTTNRWLGVAYDPKKLVETSSPVEVQMPLFRQTRDKMKV |
| | AKRKLVIKSKAAQKRKARLENARNYQKQKRKVMDLYQKQKLQKEDYLERVSGNLIRNYDYLFVEAVP |
| | SELSSADFQLQDWYKLITKLRYKAQWYNKTLLFINVNEQLNEPPEKKSMELEKIGKQVIFE |
| 186 | MIAVEKAYKFRMYPNKKQQELINKTFGCCRFVYNKYLAKRIEVYKNDKETFTYKQCSSDLTNLKKELK |
| | WLKEPDKFSLQNALKDLDNAYKKFFKEKAGFPKFKSKKINRFSYKTNFTNGNIMYCGQHIKLPKLGMV |
| | KIRDKQVPKGRILNATISKEPSGRYYVSLCCTDVDIEVFENTNNQIGLDLGIKEFCISSCGEFIENPKYLKKS |
| | LNKLAKLQRELSRKTIGSLNRNKARLKVARLQEHIANQRNDFLQKLSTKLIKE |
| 187 | MKVLKGYKFRIYPNEKQIQYFIQTFGCVRFTYNHLLHARQKALQAGDYQTQVSPASLKRDYPFLKKTDS |
| | LALANAQRNLDRAFKNYFSKRAGYPKLKTKKNNWQSYTTNNQKHTIYFVGNQLKLPKLKSLVTVNLH |
| | RKVAGEIKSATVSAQNNQMFFVSLLCLEEINPLPKTGTTIGVAYCPENLVQMSAVNRLPVYKQETLQYQ |
| | LDKAIKRLEVRAKAAKRRKVLLEQAKNYQKQKSKVQKLYMAKNDQKKNYIDQLTYRLVHDYDCICLE |
| | KQPEFTENTKFSETDWQHFLRKIQYKARWYDKQLVFVDSIEKENETKCFTIEQVGKKLINQ |
| 188 | MKTIQAYRFALDLTPGQEWAVYAHAGAARVAHNWALARVKAVLDQRAAERTYGVSDDQLTPAVSWS |
| | LPALRKAWNAAKPEVAPWWGEVSKEAFNTGLDALARGLKNWADSRKGKRAGRPVGFPRFKSRRRTTP |
| | SVRFTTGAIRVEPDRKHIVLPRLGRLKLHESARKLARRLEAGTARIMSAAVRRDGGRWHVSFTVEVERA |
| | ERTPDRPGSVIGIDVGIKHLAVLSTGELVPNPRHLATAQDRLRRLGRALSRKSGPDRRTGRRPSKRWQRA |
| | AYAGRWPRSVNPARHQSVRPGPSHRKAGLPTVCSLERTER |
| 189 | MNVLKAYKFRIYPTLEQQQFFIETFGCVRFTYNVLLKNREHQELREYPEEALTPAKLKQDYPFLKKTDSL |
| | ALANAQRNLERAFRNYYAGRCSHPKLKTKKAMWQSYTTNNQQGTIRIENSQLKLPKIKSLVPLHQHREI |
| | KGTIKSATISAKNLEEFYVSLLCEEQVRHLPKTKQKLTIHYSPGQLLTTDQQLDLTAFDQEQLKQKIAKEE |
| | RRLEVRGISARRRLVKLKDAKNYQKQKKRVLALHRHKRARQEAYMDELSLLLVKEFDTIHILATPPQST |
| | GNFSYSDWQKFLQKLTYKAHWYGKTLHHEATAKQG |
| 190 | MKVLKAYKFRIYPTSEQRQFFIETFGCVRFTYNSLLKNREYRDLRDDPGELLTPAKLKQKHPFLKKTDSL |
| | ALANAQRNLDRAFRNYYAGRCSHPKLKTKKAMWQSYTTNNQQGTIRIETGRLKLPKIKTLIPLLLHREIK |
| | GEIKSATISAKNLEEFYVSLLCEEQVAHLPKTSRTISIRFCPQQLVLADAPLSGLGFCQKELSEKLLKEERR |
| | LAIRALSARRRLVKLKEAKNYQKQKNRVMDLQRHKRARQKAYMDELSLTLVKDFDEIIICFEPKQSAVA |
| | FNWSDWQKFLQKLKYKARWYGKTVNLQTLSKNA |
| 191 | MLLTLRQQESGKTVEERTSARLQKQKMTPAKLKKDYPFLKATDSLALANAQRNLEKAFQNYYRGRAS |
| | YPKLKSKKSAWQSYTTNNQGHTIYLAEDGLKLPKLKSKVLVHQHRSVAGKIRSATISAKNRQEFYVSLL |
| | CEEDIPALPKTGSEIEIAYDPTGLVVTNKPIVGIPTFCQTQVLEKLKKAQRRLSCRAKSAQRRNAKLEQAK |
| | NYQKQKSQVQQLYIHKLKQKEDFTEQLSIALLRQFDCIIITKPPELRENKESKAAKTVKKSKHTTVFPSFE |
| | DNFTLSDWNRLLLKLKYKAEWYEKELVFICPTNGK |
| 192 | MDQRAAERSYGIPQEHLTPTIGWSLPALRRWWNAVKGEVAPWWRDYSKEAYNTGLDALARALKNWA |
| | ESRSGRRAGGRAVGFPRFKSRRRSIPSVRFTTGTIRVEPDRRHVVLPRLGRLRLHESARKLARRLQAGTA |
| | RILSATVRRHGHRWYVSFTCHVERAHRTPARPDATVGVDLGVKHERTFTCTTCSLVLDRDVNAARNLA |
| | ALAATVAGSGPETLNGRGADHKTPPTGPVAVKRPPGTATADKTGTVPPQGGTSDHELIPAS |
| 193 | MAGAKSYPVVSVPGVGHRDRLSVVQAYRFALDLSPAQERAVLGHAGAARTAYNWGLERVKAVLNQR |
| | AAERSYGIGDDQLTPTIGWSLPALRRSWNAAKDEVAPWWRDYSKEAYNTGLDALARALKNWADSRSG |
| | RRASRPVGCPRFRSRRRSAPSVRFTTGAIRVEPDRKHVVLPRLGRLRLHESARKLARRLEAGAARFLSAT |
| | VRRDGHRWYVSFTCEVQRAPRTPARPCATVGVDLGVRHLAVLSTGGPVPNPRHLDAALRKLRRLSRGL |
| | SRKVAPDRRTRRDASIRWQRARGQLGRVHARVANLRRTATADKTGTVPPQGRTSNHALTPAS |
| 194 | MKNLKGYRFRIYPNEAQKRFFIETFGCVRFIYNYFLKLDTAERTSEEIITPASLKRDYPFLKKTDSLALAN |
| | AKRNLDRAFQNYYQQRSGYPKLKNKSSVWQSYTTNNQNGTVRIEDGYLKLPKLKEKIQICEHRKITGKI |
| | KSVTISAKNNEEFYASILCVETIDKFEKTGKKIRLSFDTHQLVQQAKYRAEVIEPIQHTKGRLAFLQRRLK |
| | VKARGARKQNRILADCKNYQKQKKQYDKLLTHLNNQIKDYLNHLSIFYIKEYDVIEIVEPEDRSCAEDA |
| | LFTSNEWHQLVRLLKYKAQWYGKEIQIINCQNI |
| 195 | MKNLKGYRFRIYPNEAQKRFFIETFGCVRFIYNYFLKLDTAERTSEEIITPASLKRDYPFLKKTDSLALAN |
| | AKRNLDRAFQNYYQQRSGYPKLKNKSSAWQSYTTNNQNGTVRIEDGYLKLPKLKEKIQICEHRKITGKI |
| | KSVTISAKNNEEFYASILCVETIDKFEKTGKKIRLSFDEHQLVKQAKYRAEVIEPIQHTKGRLAFLQRRLK |
| | VKARVARKQNRILADCKNYQKQKKQYDKLLTHLNNQIKDYLNHLSIFYIKEYDVIEIVEPEDRSCAEDA |
| | LFTSNEWHQLVRLLKYKAQWYGKEIQIINCQNI |
| 196 | MKNLKGYRFRIYPNEAQKRFFIETFGCVRFIYNYFLKLDTAERTSEEIITPASLKRDYPFLKKTDSLALAN |
| | AKRNLDRAFQNYYQQRSGYPKLKNKSSVWQSYTTNNQNGTVRIEDGYLKLPKLKEKIQICEHRKITGKI |
| | KSVTISAKNNEEFYASILCVETIDKFEKTGKKIRLSFDAHQLVQQAKYRAEVIEPIQHTKGRLAFLQRRLK |
| | VKARVARKQNRILADCKNYQKQKKQYDKLLTHLNNQIKDYLNHLSVFYIKEYDVIEIVEPEDRSCAEDA |
| | LFTSNEWHQLVRLLKYKAQWYGKEIQIINCQNIQKNNW |
| 197 | MKNLKGYRFRIYPNEAQKRFFIETFGCVRFIYNYFLKLDTAERTSEEIITPASLKRDYPFLKKTDSLALAN |
| | AKRNLDRAFQNYYQQRSGYPKLKNKSSVWQSYTTNNQNGTVRIEDGYLKLPKLKEKIQICEHRKITGKI |
| | KSVTISAKNNEEFYASILCVETIDKFEKTGKKIRLSFDAHQLVQQAKYRAEVIEPIQHTKGRLAFLQRRLK |
| | VKARVARKQNRILVDCKNYQKQKKQYDKLLTHLNNQIKDYLNHLSIFYIKEYDVIEIVEPEDGPCAKDD |
| | LFTSNEWHQLVRLLKYKAQWYGKEIQIINCQNI |
| 198 | MLKAFKFRMYPTEEQKQQLIRTFGCVRFTYNHLLKERQKSWQQTGVVDFSLTPATLKKEYPFLKEVDSL |
| | ALANAQLNLDRAFRNYFKGRASFPKLKTKKSMWQTYTTNNQTHTVYLKNGHLKLPKQKELIKISQHRP |
| | VEGTIRSATISARYNEEFYVALLCDVSSIKKESSAKWIGIAYHPKTLIETSHPIEVTLPKFDQTEEKLQHAQ |
| | RKLSVKVRSAHHRKTRLDQASNYQKQKRKVMDLYLKQKNQREDYLEQLSGKLVKQYDYLFVESFPKE |
| | DAHADFSIHDWHKLITKLRYKSQWYNKKFLLINTDGAEESNFVRKSQVLEQLGRHSVIKE |
| 199 | MSVLKAYKFKIYPNEAQKEFFVKTFGCVRFTYNHLLIARSQTDGKKMTPASLKKEYPFLKETDSLALAN |
| | AQRNLETAFRRYYTGKSDYPKFKNKSNIWQSYTTNNQGQTICLTDGLLKLPKLKTRIAVNEHREIKGQIK |
| | SATISAKNNEEFYVSILCLESIEALPKTTLEIQLRYSPEELLDNLSGLTTLNFDQAAILCKMAKMNRRLKLR |
| | GKIARKKKVPLAYAKNYQKQKVKLSRLQGHQKEKKEDYFNQLSYTLIRDFDRITVDKAKLSDRSDDET |
| | VNFTKADWQTFLRKLQYKADWYGKEIIYQ |
| 200 | MKELKGYRFRIYPDEIQKKFFVETFGCVRFTYNHLLMNKQEPGIDKMTPAQLKQAHPFLKEVDSLALAN |
| | AQRNLERAFRNYHNGRAGYPKLKSKKNSWQSYTTNNQKGTIHLSEGYLKLPKLKERVALNQHREVKG |
| | EIKSATISAKNNQEFYVSLLCLEEIPPLKKTGEVVHLNFDEEHLVQLDRKLILPKFCQEKLEQKIEQAERRL |
| | SCRKKAARRKKIQLQSAQNYQKQKRIVEQLQQEKANQMKNHLEQVSFLLVNHFDKINIQSQSSNLEAPN |
| | AIPNFQLKDWKQFVSKLRYKTQWYQKELVKQK |
| 201 | MKAIQAYRYALDLTPAQERAALAHAGAARVAHNWALARVAAVMNQRAAERTYGVADADLTPAIGWS |
| | LPALRKAWNAPKDEAAPWWRECSKEAFNTGLDALARALKNWSDSRTGKRAGRPVGFPRFKSRRRSVP |
| | SVRFTTGPIRVEPDRKHVVLPRLGRLKLHGFGELRRQLAYKTQWNGGRLIVADRWYPSSKTCSGCGAV |
| | KTKLALSERTYTCTTCGMVLDRDLNAARNLAALATGVDTAGSGPVTGRGADRKTRPGGQVATKRQPG |
| | TAIADQTGTVPPQGRTTDHVLARAH |
| 202 | MVLKAYKFRIYPTNEQKEFLIQTFGCVRFTYNTLLKHHQQNGGGKSKKLTPASLKKEFLFLKVTDSLAL |
| | ANAQQNLKRAFQNYYQGRSGYPKLKLKKSVWQSYTTNNQKQTIWLKDDLLKVPKLKQPIAVHCHRPV |
| | TGQIKSATIMAKNGQQFFVSLLCEEQITPLPKTNVTTTLHFSPDQLVSGSDLVFFRTLCQKNVENKLTKA |
| | KRKLEIKAKSAQQRGVKLSAAQNYQKQKVKVQQLYHHKQQQKKAWMDELSLHLIKKYDFLYIKVPHN |
| | IQEGVFTLTDWQHFLVKLQYKATWYDKKVIFAAEKVI |
| 203 | MKSIRTKLKLNNKQKTLMAQHAGYSRWVYNWGLSLWNAAYRDGYQPNARKLREVFTNHTKPLYPW |
| | MKSLSSKVYQYALINLGEAFKRFFQGLGKYPRFKKKGKHDSFTIDNFGKPIELNGWSHKLPFIGMVKTY |
| | EPIEATTQKITISRQADDWYLSLAFEFTPTSTEKITDVVGVDLGVKTLATLSTGEVFNSVKPYRKAQNKLA |
| | KLQRQVSRKVKHSRNWYKAVIKLAKQHRRVANIRKDALHKLTTYLAKVRLVPVRSL |
| 204 | MKSIRTKLKLNNKQKTLMAQHAGYSRWCYNWGLSLWNAAYKDGFKPNARKLRDVFTNHTKPLYPW |
| | MKNLSSKVYQYAFINLSEAFKRFFKGLGKYPRFKKKGRSDSFTIDNCGKPIELNGWNHKLPFIGMVKTY |
| | EPIEATTQKITISRQASDWYLSCSYEFTPTATSKTTEVVGVDLGIKTLATLSTGEIFKSVKPYRQAQNRLA |
| | KLQRQLSRKVKHSNNWYKVVIKLAKQHRQVANIRKDALDKLTTYLAKVRLVPVRSL |
| 205 | MVVQAYRFALDPTPAQDRDLHRHAGAGRFAFNWALAAVRANLDQRAAERTYGLDGEQLTPALGWSL |
| | PALRRAWNTAKPQVVPWWGQCSKEAFNTGLDGLARALGNWSASRSGRRAGARVGFPRFRSRRRVTPS |
| | VRFTTGTIRVEDTRHHVTLPRLGRIRTHESTRKLARRLHAGTARIMSATVRHTGGRWHVSFTVQITRTVC |
| | TPAYSQQTVGVDVGIANLAVLSTGQIVPNPAIWPPLPGGCAPQPGPCPDGKDQTGAPAGSRPGAGSRPKP |
| | AWPAHTPGSRTCAPTACTNSPRPWPAPTARSWSRTSTSPG |
| 206 | MKNLKGYRFRIYPNEAQKRFFIETFGCVRFIYNYFLKLDTAERTSEEIITPASLKRDYPFLKKTDSLALAN |
| | AKRNLDRAFQNYYQQRSGYPKLKNKSSVWQSYTTNNQNGTVRIEDGYLKLPKLKEKIQICEHRKITGKI |
| | KSVTISAKNNEEFYASILCVETIDKFEKTGKKIRLSFDAHQLVQQAKYRAEVIEPIQHTKGRLAFLQRRLK |
| | VKARVARKQNRILADCKNYQKQKKQYDKLLTHLNNQIKDYLNHLSIFYIKEYDVIEIVEPEDRSCAEDA |
| | LFTNNEWHQLVRLLKYKAQWYGKEIQIINCQNI |
| 207 | MSVLKAYRFKIYPDEAQKQFFVATFGCVRFTYNHLLVASQQKKEQKLTPAKLKKEYPFLKETDSLALAN |
| | AQRNLEKAFRRYFTGKSDFPKFKHKSNPWQSYTTNNQGHTIYLKEGQLKLPKLKSLVKVNYHREITGQI |
| | KSATISAKNNTDFYVSILCVEEIPSLPQTSQSITIAYSPSELLEGSQSLLQITFNQDSLVTKIDKVQKKLKIRA |
| | KVARKNRIPLAEAKNYQKLKERLARLQVSQKEKKEDFFDQLSYYLVCHFDQIMVDATIIENNQEACTVV |
| | FTKADWHCFYKKLVYKSNWYGKKLIDLD |
| 208 | MKKLKGYRFRIYPEEDQRQFFIETFGCVRFTYNHLLMAKKDKTVESLTPAQLKKDYPFLKKTDSLALAN |
| | AQRNLDRAFSNYYRGRAGYPKLKNKKAIWQSYTTNNQKNTIQLLNGTLKLPKLKTAVKVEQHRVVHG |
| | LIKSATISAKNNTEFYVSLLCLEEIQPLEKTGEKTIVMFHPTTFIQTDANITLPTLDLNPLNQKIEKEQLKLV |
| | RRKKVARTRGVALSDSKNYQKQKQRVEQLVLTKSNKKINFFDQLTWILVQQFDKIAISTPAPEDFCEEGL |
| | YSPSDWQQFLIKIHYKIDWYQKELHQQQK |
| 209 | MISEGRQVPIKILKAYKFALYPDEAQKQFFIQTFGCVRFTYNTLLTLRQTNYQDNSETFTNPASGRLKTQ |
| | KLTPAKLKKEYSFLKATDSLALANAQRNLEKAFQNYYRGHASYPKLKSKKSAWQSYTTNNQGHTIYLE |
| | KDGLKLPKLKSKVLLHQHRNVTGKIRSATISAKNRQEFYVSLLCEEDSTALPKTGSKIEITYNGITLIEPSV |
| | AVRGIPTLCQVQLLAQLKKAQRRLAIRAKSAQRRNVKLEQAKNYQKQKLRLQQLYIRKMKQKEDFTEQ |
| | LSIALVRQFDCIVVTMPAAGDDETKNKGNKALKTQKNNQNTPVLQNIEEKFTLSDWNRLLLKLKYKAD |
| | WYEKELVFCSKQKAK |
| 210 | MSVLKGYKFRIYPDEKQKKFFIETFGCVRFTYNHLLMARQTGAARNTTMTPASLKKEYPFLKKTDSLAL |
| | ANAQRNLDRAFRNYFSGRAGYPKLKTKKSTWQSYTTNNQQHTVYLEGEYLKVPKLKSLVPVHLHREIR |
| | GKIKSVTISAKRNREFYASILCVEEVEELPKTNDLVGISYCPENLIQISAQRELPQIDQSHLIKQLGKEQKKL |
| | QLRAKVAKKRKVRLINAKNYQKQKERVLKLRTTKLDQKRNFIDQLTISLVRDFDYLFIESKPKFQNESGE |
| | FSEADWQQFIQRIQYKGRWYGKEVRYIEVKELKNEKCKEIERLGRAQLT |
| 211 | MKNLKGYRFRIYPNEAQKRFFIETFGCVRFIYNYFLKLDTAERTSEEIITPASLKRDYPFLKKTDSLALAN |
| | AKRNLDRAFQNYYQQRSGYPKLKNKSSVWQSYTTNNQNGTVRIEDGYLKLPKLKEKIQICEHRKITGKI |
| | KSVTISAKNNEEFYASILCVETIDKFEKTGKKIRLSFDAHQLVQQAKYRAEVIEPIQHTKGRLAFLQRRLK |
| | VKARVARKQNRILVDCKNYQKQKKQYDKLLTHLNNQIKDYLNHLSIFYIKEYDVIEIVEPEDRSCAKDD |
| | LFTSNEWHQLVRLLKYKAQWYGKEIQIINCQNI |
| 212 | MKNLKGYRFRIYPNEAQKRFFIETFGCVRFIYNYFLKLDTAERTSEEIITPASLKRDYPFLKKTDSLALAN |
| | AKRNLDRAFQNYYQQRSGYPKLKNKSSVWQSYTTNNQNGTVRIEDGYLKLPKLKEKIQICEHRKITGKI |
| | KSVTISAKNNEEFYALILCVETIDKFEKTGKKIRLSFDAHQLVQQAKYRAEVIEPIQHTKGRLAFLQRRLK |
| | VKARVARKQNRILVDCKNYQKQKKQYDKLLTHLNNQIKDYLNHLSIFYIKEYDVIEIVEPEDRSCAKDD |
| | LFTSNEWHQLVRLLKYKAQWYGKEIQIINCQNI |
| 213 | MISEGRQVPIKILKAYKFALYPDEAQKKFFIQTFGCVRFTYNTLLTLRQTNYQDNSETFTNPASGRLKTQ |
| | KLTPAKLKKEYSFLKATDSLALANAQRNLEKAFQNYYRGHASYPKLKSKKSAWQSYTTNNQGHTIYLE |
| | KDGLKLPKLKSKVLLHQHRNVTGKIRSATISAKNWQEFYVSLLCEEDSTALPKTGSKIEITYNGTTLIEPS |
| | VAVRGIPTLCQVQLLAQLKKAQRRLAIRAKSAQRRNVKLEQAKNYQKQKLRLQQLYIRKMKQKEDFTE |
| | QLSIALVRQFDCIVVTMPAAGDDETKNKGNKALKTQKNNQNTPVLQNIEEKFTLSDWNRLLLKLKYKA |
| | DWYEKELVFCSKQKAN |
| 214 | MGKNQRKVLKAYKFRIYPTKAQQKFLIQTFGCVRFTYNTLLKQRQFNTIEASKKLTPAALKKEFPFLKLT |
| | DSLALANAQRNLARAFQNYYQGRSGHPKMKLKKSTWQSYTTNNQQQTIWLKDNLLKVPKLKQPIAVV |
| | CHRKVVGKIKSATITAKNLQQFYVSLLCEEEVGHLPKTKTEIELRFAPNQLVVGNQLKFCRQLCVNDLET |
| | KLKKAKRKLEIKAKSAQQRKVRLAEAKNYQKQKLKVQKLYHHKQQQKKAWIDELTMHLIKNYDFLY |
| | VEVPKNGIEGSFTLADWQSFLVKLQYKANWYGKKVIFLTAAKTVRKIS |
| 215 | MDLTPRQERAVLAHAGAARVAHNWALARVKAVMDQRAAERTYGIDEVDLTPTQGWSLPALRRAWN |
| | QAKADVAPWWAECSKEAFNTGLDALARGLKNWSDSRTGKRAGRRVGFPRFKSRRRSTPSVRFTTGAIR |
| | VEPDRRHVVLPRLRRLKLHESARKLARRLEAGTARVVSATVRRDGGRWYVSFTCAVQRVQGVPACPD |
| | ATVGVDLGVSHLAVLSTGEVEPNPRHLDVAARRLRRLARRGPLAGSARTGAPVGVGRCGGSARPARSG |
| | ACPGCSSAP |
| 216 | MKNLKGYRFRIYPNEAQKRFFIETFGCVRFIYNYFLKLDTAERTSEEIITPASLKRDYPFLKKTDSLALAN |
| | AKRNLDRAFQNYYQQRSGYPKLKNKSSVWQSYTTNNQNGTVRIEDGYLKLPKLKEKIQICEHRKITGKI |
| | KSVTISAKNNEEFYASILCVETIDKFEKTGKKIRLSFDAHQLVQQAKYRAEVIEPIQHTKGRLAFLQRRLK |
| | VKARVARKQNRILVDCKNYQKQKKQYDKLLTHLNNQIKDYLNHLSIFYIKEYDVIEIVEPEDRPCAKDD |
| | LFTSNEWHQLVRLLKYKAQWYGKEIQIINCQNIKKITGRGARVRLGNN |
| 217 | MKNLKGYRFRIYPNEAQKRFFIETFGCVRFIYNYFLKLDTAERTSEEVITPASLKRDYPFLKKTDSLALAN |
| | AKRNLDRAFQNYYQQRSGYPKLKNKSSVWQSYTTNNQNGTVRIEDGYLKLPKLKEKIQICEHRKITGKI |
| | KSVTISAKNNEEFYASILCVETIDKFEKTGKKIRLSFDEHQLVKQAKYRAEVIEPIQQTKGRLEFLQRKLK |
| | VKARVARKQNRVLADCKNYQKQKKQYDKLLTHLNNQIKDYLNHLSIFYIKEYDVIEIVEPEDRSCAKDA |
| | LFTSNEWHQLTRLLKYKAQWYGKEIQIINCQNI |
| 218 | MKNLKGYRFRIYPNEAQKRFFIETFGCVRFIYNYFLKLDTAERTSEEIITPASLKRDYPFLKKTDSLALAN |
| | AKRNLDRAFQNYYQQRSGYPKLKNKSSVWQSYTTNNQNGTVRIEDGYLKLPKLKEKIQICEHRKITGKI |
| | KSVTISANNNEEFYASILCVETIDKFEKTGKKIRLSFDAHQLVQQAKYRAEVIEPIQHTKGRLAFLQRRLK |
| | VKARVARKQNRILADCKNYQKQKKQYDKLLTHLNNQIKDYLNHLSIFYIKEYDVIEIVEPEDRSCAEDA |
| | LFTSNEWHQLVRLLKYKAQWYGKEIQIINCQNI |
| 219 | MKNLKGYRFRIYPNEAQKRFFIETFGCVRFIYNYFLKLDTAERTSEEVITPASLKRDYPFLKKTDSLALAN |
| | AKRNLDRAFQNYYQQRSGYPKLKNKSSAWQSYTTNNQNGTVRIEDGYLKLPKLKEKIQICEHRKITGEI |
| | KSVTISAKNNEEFYASILCVETIDKFEKTGKKIRLSFDEHQLVKQAKYRAEVIEPIQQTKGRIEFLQRKLKV |
| | KARVARKQNRVLADCKNYQKQKKQYDKLLTHLNNQIKDYLNHLSIFYIKEYDVIEIVEPEDRSCAKDAL |
| | FTSNEWHQLTRLLKYKAQWYGKEIQIINCQNI |
| 220 | MKVLKGYRFRIYPDEEQLTFFRQTFGCVRFTYNQLLMARKNTANSEESMKLTPAALKKDYPFLKKTDSL |
| | ALANAQRNLERAYANFFQGRASYPKLKNKKSTWQSYTTNNQKHTIYFVDEKLKLPKLKSLIQVHQHREI |
| | KGLIRSATISAKNNEEFYVSLLCLEEVTSLPKTKKAIGISYCPKHLLHVSKPLDHLETIEEQMQEDRLIKAK |
| | RKLFLRAKIAKKHKVKLKDAKNYQKQKQKVHKLIQEKACRKKDFIDQLTFSLVKEFDYIFVEKQPSTAD |
| | SEETSLFTSSDWYLFMQKLTYKTQWYGKKYLAIEKPANTENSGQMIEELGKQRLGL |
| 221 | MKVLKGYRFRIYPDEEQLTFFRQTFGCVRFTYNQLLMARKNTANSEESMKLTPAALKKDYPFLKKTDSL |
| | ALANAQRNLERAYANFFQGRASYPRLKNKKSTWQSYTTNNQKHTIYFVDEKLKLPKLKSLIQVHQHREI |
| | KGLIRSATISAKNNEEFYVSLLCLEEVTSLPKTKKAIGISYCPKHLLHVSKPLDHLETIEEQMQEDRLIKAK |
| | RKLFLRAKIAKKHKVKLKDAKNYQKQKQKVHKLIQEKACRKKDFIDQLTFSLVKEFDYIFVEKQPSTAD |
| | SEETSLFTSSDWYLFMQKLTYKTQWYGKKYLAIEKPANTENSGQMIEELGKQRLGL |
| 222 | MIAVEKAYKFRVYPNKKQQELINKTFGCCRFVYNKYLAKRIDVYKNNKETFTYKQCSSDLTNLKKELK |
| | WLKEPDKFSLQNALKDLDNAYKKFFKEKAGFPKFKSKKINRFSYKTNFTNGNIMYCGQHIKLPKLGMV |
| | KVRDKQVPKGRILNATISKEPSGRYYVSLCCTDVDIEAFENTNNHIGLDLGIKEFCISSCGEFIENPKYLKK |
| | SLNKLVKLQSELSRKTIGSLNRNKARLKVARLQEHIANQRNDFLQKLSTKLIKENDI |
| 223 | MKQKKRFFIETFGCVRFIYNYFLKLDTAERTSEEIITPASLKRDYPFLKKTDSLALANAKRNLDRAFQNY |
| | YQQRSGYPKLKNKSSVWQSYTTNNQNGTVRIEDGYLKLPKLKEKIQICEHRKITGKIKSVTISAKNNEEF |
| | YASILCVETIDKFEKTGKKIRLSFDAHQLVQQAKYRAEVIEPIQHTKGRLAFLQRRLKVKARVARKQNRI |
| | LADCKNYQKQKKQYDKLLTHLNNQIKDYLNHLSIFYIKEYDVIEIVEPEDRSCAEDALFTSNEWHQLVRL |
| | LKYKAQWYGKEIQIINCQNI |
| 224 | MKNLKGYRFRIYPNEAQKRFFIETFGCVRFIYNYFLKLDTAERTSEEVITPASLKRDYPFLKKTDSLALAN |
| | AKRNLDRAFQNYYQQRSGYPKLKNKSSAWQSYTTNNQNGTVRIEDGYLKLPKLKEKIQICEHRKITGKI |
| | KSVTISAKNNEEFYASILCVETIDKFEKTGKKIRLSFDAHQLVKQAKYRAEVIEPIQQTKGRLEFLQRKLK |
| | VKARVARKQNRVLADCKNYQKQKKQYDKLLTHLNNQIKDYLNHLSIFYIKEYDVIEIVEPEDRSCAKDA |
| | LFTSNEWHQLVRLLKYKAQWYGKEIQIINCKNI |
| 225 | MLKAYKFRIYPTNEQKEFLIQTFGCVRFTYNTLLKHHQQNGGGKSKKLTPASLKKEFLFLKVTDSLALA |
| | NAQQNLKRAFQNYYQGRSGYPKLKLKKSVWQSYTTNNQKQTIWLKDDLLKVPKLKQPIAVHCHRPVT |
| | GQIKSATIMAKNGQQFFVSLLCEEQITPLPKTNVTTTLHFSPDQLVSGSDLVFFRTLCQKNVENKLTKAK |
| | RKLEIKAKSAQQRGVKLSAAQNYQKQKVKVQQLYHHKQQQKKAWMDELSLHLIKKYDFLYIKVPHNI |
| | QEGVFTLTDWQHFLVKLQYKATWYDKKVIFAAEKVI |
| 226 | MKVLKAYKFRIYPNEEQIQYFIQTFGCVRFTYNQLLYTRKKALQEGDYETRLTPAQLKKDYPFLKQTDS |
| | LALANAQRNLDRAFKNYFSKRAGYPKWKSKKSSWQSYTTNNQKHTIYFIGEELKLPKLKSLIKVNLHRE |
| | ILGEIKSATISAKNNQLFFVSILCLENVVSLPKTGKSIGIAYCPENLVQMSSTNVFLNRKSNSYYQLKTAKK |
| | KLELRARLAKKRKVLLSQAKNYQKQKRKVQKLYMKIDNQKNDYINQLTYYLVKNYDHIYLEKYPKFS |
| | ENVQFSETDWQHFLRKIQYKVSWYNKQLVFIAPNTKEIEEKCFAIEQLGRQLTTS |
| 227 | MMEVTRVIVIQLKPTKEQKIILKHLTYSASKLWNIANYNIKQGNIKPKELKPTLKENFWYKNLHSQSAQA |
| | VLEKLQIAWENCYKKHTKEPRFQPKDGHFPVRWKKQGLQINNGQIRLSLSKQTKQYLKNMHSIKSDYL |
| | WISLPKNLSLNGVQEVEIKPPSSKKLHYLIIKERNYVRDYIHKVSTFIVREALSKDVKTIAIGKLSKNITKID |
| | IGRQNNEKLHKIPFGKLCNMIEYKAKEVGINVIYVNEGYTSQTCSICGDVNKTNRKYRGLYICKCGNVIN |
| | ADVNGGINILKRVSPNLTLGRSRGNLNIPTRVRMYNTL |
| 228 | MRADTVYSSLRKSRYESWNVLPSILPYSGNEANYQRRQAFLKKQKKLPNYSQQCRHFKHSDNFKAIGT |
| | GKGQAVLKKLDEAWSSFWTLKRLQSEEGRLPPNIRRVRMPSYLKDRDSKQTVVRGFYVRNDCYRLDR |
| | KRSTITIIGKNLRLRYAADRVREGKKGRLDVMYDRLKDAWYAFIPVDTAPAKQAVVSGQPEKVGSIDLG |
| | ICNLVAFYAENEQPVIYSGRAVLSDYVYRTKKIAELQSRLPQKQQHTSRKIGLSYRKRTRRFKHATRAML |
| | KDLFERMKQIGITKVAVGDLNGIRDGNNLGAHTNQKLHNFWSHLQTIEWIRHMCEDYSMEFVQVSEKG |
| | TSKTCCVCAVKDIMAGYIEACTSAKKTG |
| 229 | MKQQVSFKFRLKPDGQQERQMRRFAGACRFVFNRALALQNENHEAGKKYIPYTKMASWLVEWKKDT |
| | ETEWLKDSPSQPLQQSLKDLERAYKNFFQNRAAFPRFKKRGQNDAFRYPQGVKLDQENSRIFLPKLGW |
| | MRYRNSRQVTGIVKNVTVSQSCGKWYISIQTEREVSTPVHPSASMVGLDAGVAKLATLSDGTVFEPVNS |
| | FQKNQKKLARLQRQLSRKVKFSNNWQKQKRKIQRLHS |
| 230 | MSKNLYNLSTYRYRQHFFQTGQKLSFNDLYHQVSKTSAYYALPNTKVAKQIIRRIDQSWKGYFQAHKD |
| | WSRVDNYLHTVSRRVIDWCLLNSIGTLVIGKNDHWKQSINIGKKNNQQFVSIPHARLIEMLCYKGELMGI |
| | KVVVTEESYTSQSSFLDFDTLPSYGEKKPKFSGKRIKRGLYKTSTGKLINADVNGSYNCIRKHLQQEKVK |
| | SNAFHSHDLMALPFMPVTYDPLRTHNLNFLQIV |
| 231 | MHESFALVNASKLWNVARWTAGRVWDACGQIPDDGVLKSYLKGSGRYVDLHSQSSQRVLEELAEAFT |
| | GWYGHRNNGNQKAXXRSTVTFKQAGFKHDTENQRIRLSKGRNLKDHRSDFVLCEYDVIGPRGTTVEN |
| | VQQVRAVHEHGIWRLHIVCNVEIDVPDAPGNGVAGIDLGICNVAAVVCNVEIDVPDAPGNGVAGIDLGI |
| | CNVAAVSFGDESLLYPGGALKEDDYYFAKKRAECDECSSREARRLDQKRTDRRTHFLHALSKHIVQQC |
| | VERGVGTIVVGDLGG |
| 232 | MPRRRDVDTEPVVHRTARIGLRLTRAQRQRCFGLLRCAGDVWACLLEINWWRRHRGDPPVAGYQQLC |
| | RLLAESGPGIFGELDSAGARSVLRRYSDAWFSAAARRKAGALEVRYPRRRRASMPIRWYNGTFTLTGRA |
| | LRLPTARGCPPLMVRLDRHLPYPPGTVRSVTLLFADGRLCIDVTAELPVTTYPAERAPDPQRVAGVDLGI |
| | IHPFAVAGPDGEALLVSGRAIRAEHRLHLADTEHRQRATADRAPSRGQHGSRRWRKTRRRARLVEGRH |
| | RRRVRQALHEAAKTVIHWAIQQRIGTLTVGDPRGVLNLQAGRRHNLRLRXWQIGRTLQILHDKATLAGI |
| | QLHLVDERAPRRPVPTAGNASPNPPAGPCPARIASSPGIVISPRRSPSPPAPRAAQPPPSASRRLGWLRTVE |
| | PDDTSPESPRHGVTPAADHRRPAGPLAGGGPPLSQGSRSPTPVSEDPQHHRTQPGRRSWTHRTSVTAWT |
| | SSSCCPSWSCFGFRWGTPISGAIRAGSP |
| 233 | MLKSFKTEIDPTLEQKQKIHQTIGTCRFVYNFYLSHNKEVYEAEKKFVSGMDFQKWLNNVYLKEHPEFS |
| | WIKDVSSKSVKQSIMNADKAFRSFFKHQTSFPKFKKKGTSDVKMYFVKTDAKAVIYCERHRIKIPTLGW |
| | VRLKEKGYLPTTKTGMVIKSGTVSMKAGRYYASVVVEIDDSPSVKNNENGGIGIDLGLKDLAIVSDGKA |
| | YKNINKSAKIKKLEKRLRREQRSLSRKLENTKKGESTQKNIQKQKLKVQKLHQ |
| 234 | MHYAYRYRLNPTEAKQETLDCHRDTCRQLYNHALTEFEQIPDSAGTLNQRVRQVRDQLTDLKHWWDE |
| | LTDLYSTVAQAAVVRIEQSLKALSGLKQNGYNVGSLNWKAPSEFRSFTYVQSGFEFDNKNGQTVLSLSK |
| | LAEIPITVHRQIPDGITVKEVSLKKERTGEWYGSFAVEGKEEPEKPENPDRCVGVDAGILTYAHDTDGCA |
| | VGSVELQDERERLTRDQRSLSRKQQGLNDWEKQRLRVAEFHQRVRRKRHDFLQKLSKYYAPEYKLVA |
| | GSC |
| 235 | MIKKQAFKFLLEPNKGQLSDFLAFAGSCRFVYNKGLALLNENYRSGKKFIGYNQLASELVEWKNEESLS |
| | WLKEAPSQCLQQSLRDLDKAFRNFFTGKSQYPKFKKKGRHDSFRTPSQRVRVDQEKKLVSLPKVGWVK |
| | YRKSREIIAELKNVTISMKQGKWYISFNTEHTVPDPIHPSDIKTKIVLNNVNSVHLSSGIGGDNTSQAEEK |
| | KKLIRLNKRLARRKKHSKNWLKTKGKIDRVKSKAARLRLDNIHKATTAICKSHAVIEVVNLMGSVSDK |
| | NDNTLSMRYEFVRQLIYKQEWLGGEVIRRESKPL |
| 236 | MHYAYRYRLHPTESQRETLDYYRDTCRQLYNHALTEFEQIPQSAGTLNQRVRQVRDQLPALKNWWDD |
| | LTDLYSTVSQAAVMRIEDSVKALSQLKQNGYNVGSLNWKAPREFRSFTYVQSGFEFDRKNGQTVLSLS |
| | KLADIPLTRHRDIPDSVTVKSVTVKKERTGEWYASFAVDGKDEPTKPDNPDRCVGIDVGILKYAQDTDG |
| | RAVGFPDLQDERERLRREQRALSRTQQGSNNWHKQRQTVAECYQALRRKRHD |
| 237 | MANYQTMQIWVKKNHRMHGYFKEMCQHAKNMHNTTNFYIRQVFTAFTQEKAFQPLQEEVLDTIQKH |
| | MPIINANQFVVYQKKVVKEHSKPARERKEIKCHLFKEPSRENPYVDYNFLDALFKSMAQEDYRSLPTQS |
| | SQGVMKTVFQNWKAFYGSLREYKTNPSKFKARPKIPGYRRKKEKEVLFSNQDCVIKENKFLKFPKTKER |
| | LNIGKLGFTEGRLKQVRLIPKYGHYMVELIFQMPSEQEMKASKKRYMSVDLGMDNLATIVTNTGRKPVI |
| | VKGKNIKSINQRYNQLKAHYHGILRQGKNTNEGLFTSKRLEKINYKRFNQIKDLFHKASYRIEKIALEEDI |
| | DTIIIGQNKAWKQHAKMGKRNNQSFTTIPHRLLMQMIKYKAQRHGIKVIVTEETGRVSRMSMRRHLPQN |
| | LPYNQYLSMLFSWIIPHFLNVMKLVMIINECYFISPSTCFSQSSSTPQAISGSPFNDFIVPTYTLFVDLPISI |
| 238 | MKRERGHKARLYPDSDQLSALEDQGHASRAMWNLLHDWWTMASENRRVQLKEADQAIRQARKDID |
| | WLSDLPAQAAQAVLKTYFRAWGNYWEGRAKAPTFKARFRSRMAIDVPQGRDLGIRRITRRWGVVKVP |
| | KVGMIRFRWTKDLPVGKHTDVKNKVTGARLVREANGWHVVFRVRTETKELAPQLGPGVGIDRGVAKP |
| | LALSDGSFREHDPWLSRLSRNVCADWRRQRHVRSTLASAVREHRTVSSGPMTRSQACAREPSAAPWTG |
| | STRPPPDLPRPSA |
| 239 | MIKKQAFKFLLEPNKGQLSDFLAFAGSCRFVYNKGLALLNENYRSGKKFIGYNQLASELVEWKNEESLS |
| | WLKEAPSQCLQQSLRDLDRAFRNFFTGKSQYPKFKKKGRHDSFRIPCQRVRVDQEKKLVSLPKVGWVK |
| | YRKSREIIGDLKNATISLNQGKWYISFNTEQTVPDPIHPSDIKTTIVLNNVNSVHLSSGVGGDNTYQAEEK |
| | KKLIRLNKTLARRKKYSKNWLKTKGKIDRVRSKAARIRLDNIHKATTAICKNHAVVEVVNLMDSVSAK |
| | NDNTPSTRYEFVRQLIYKQEWLGGEIIRRESKLL |
| 240 | MIKKQVFKFLLEPNKGQLSDFLAFAGSCRFVYNKGLALLNENYRSGKKFIGYNQLASELVEWKNEESLS |
| | WLKEAPSQCLQQSLRDLDKAFRNFFTGKSQYPKFKKKGRHDSFRTPSQRVRVDQEKKLVSLPKVGWVK |
| | YRKSREIIAELKNVTISMKQGKWYISFNTEHTVPDPIHPSDIKTKIVLNNVNSVHLSSGIGGDNTSQAEEK |
| | KKLIRLNKRLARRKKHSKNWLKTKGKIDRVKSKAARLRLDNIHKATTAICKSHAVIEVVNLMGSVSDK |
| | NDNTLSMRYEFVRQLIYKQEWLGGEVIRRESKPL |
| 241 | MIKKQAFKFLLEPNKGQLSDFLAFAGSCRFVYNKGLALLNENYRSGKKIIGYNQLASELVEWKNEESLS |
| | WLKEAPSQCLQQSLRDLDRAFRNFFTGKSQYPKFKKKGRHDSFRIPCQRVRVDQEKKLVSLPKVGWVK |
| | YRKSREIIGDLKNATISLNQGKWYISFNTEQTVPDPIHPSDIKSTIVLNNVGSVHLSSGVGGDNTYQAEEK |
| | KKLIRLNKILTRRKKHSKNWLKTKGKIDRVKSKAARIRLDNIHKATTAICKNHALVEVVNFMDSVSDKN |
| | DNTLSMRYEFVRQLIYKQEWLGGEVIRRESKPL |
| 242 | MPRPSGRGGIGLLPNRAGTAGSRVRVIPSPPGTVVSKPPCIGGFQLPYLTGRLRVVTAGVQASGVAGYAR |
| | YTYRLRVSSTASGLLLAEWDRCRWIWNECVARAKKAHRDGEKCGPAALDRMLTETRRMTPWLREGSS |
| | VPQQQLIRDYGKARGKALKDIKDRLPNHRRAEMPRWKKKREARPSLNYTRRGFRLADGRLHLAGGITV |
| | PVVWSRDLPAVPSSVRVYQDSLGHWCASFVVPAQVEPLPSTGRVIGVDLGVRETATTTSDAYDLPHAEY |
| | GRKAAAGLARYQRMMARRKPVKGQAASRGYQEAGKQVARLHRKVARQRQDTARKWAKAVVRIMM |
| | PWRWRTSARSSSRKRRWPARPLMPRSVRRRQPWSRWAASTDAWCTWFIPRTPRWTAHGAEREPSTHS |
| | RSPNEPMPAPRAEPYPPGIKTPRA |
| 243 | MIKKQAFKFLLEPNKGQLSDFLAFAGSCRYVYNKGLALLNENYRSGKKFIGYNQLASELVEWKNEESLS |
| | WLKEAPSQCLQQSLRDLDRAFRNFFTGKSQYPKFKKKGRHDSFRIPCQRVRVDQEKKLVSLPKVGWVK |
| | YRKSREIIGDLKNATISLNQGEWYISFNTEQTVPDPIHPSDIKTTIVLNNVNSVHLSSGVGGDNTYQAEEK |
| | KKLIRLNKTLTRRKKYSKNWLKTKAKIDRVRSKAARIRLDNIHKATTAICKNHAVVEVVNLMDSVSAK |
| | NDNTLSMRYEFVRQLIYKQEWLGGEIIRRESKLL |
| 244 | MLACIAAHVLCGHVREYRPLLAKLSAQRFQKLNEVFDGRRLETLDQAMDVLHPAPWFRFQTQTNSVRD |
| | PHALQELEDFDHTNKWPTKQVKHERKIDAFDTRADRAQEVSNLTSTINILKCDAATHANDIVSASALRK |
| | EMSAKDKLMIRRIRKYRLFPTAEQRKKLHQFMGTCRWTYNKGVAHFRKTNVSSAQTLRDLYVTEKSKK |
| | QRVYPEDMEPPPQWAYETPKTFRFNALRKFESGVKSAFSNKINGNISKFKIQFKSRKKDGRYFTFCEDAG |
| | RANIMYKTGESRAMLSISKLKNIPIKAFGQVSSPNPKRTTGDGVDQELQRPSFRKAVASARESQASVPLR |
| | TAKLSNCVKEMHYQTSTYLTKHYDTIILPVFNSSVMVKKSNARNHTFNRLLSGLKHFQFRKLLQAKCEL |
| | MGKSLVVCSEMYSSQTCGRCARLHLKLGSRDMFSCPHCEHVAGRDVNAAFNILRFVCAGSLVVSATHH |
| 245 | MKLSFKFFPELTFLQLDILEELCYHTTKLYNIANYECITEGYKSYYEMEKLHTTNWHKAFLHSHTYQQCL |
| | KLLEQDWKSYFAAAADYKNNPHKYKAMPMPPKYKNVENHKNHIIFTNLAVRFKNNILMFSLAKEVQT |
| | KFGAESLNFEVSDKLQKLMNLDSIQQAKNSYFNKQIAYYTSLEMKKSGSTRFKRTARIRKLQKQRNDCI |
| | QDCLHKASRKLIDLALLHNCSTIVAGDISGIKQESPIKGFVQIPIQRLVEQIKYKVELVGMKVILQNESYTS |
| | GVSAIDLEPVNKEYYNKNRRIARGLFKSNAGILINADINGSLNILRKYKNVVPELVKQARDNGLVDNPIRI |
| | AA |
| 246 | MARRELELFTLPTKEKAFVGYNFLDALFKTIKQKDYYSLPGQINQQVIKNVVQNWDSFFKSLNGYNVNP |
| | QKYKGRPNIPGYLPKGSKKEVVLSNQICQLKGEKYLRFPKTRGKLNIGKLANVSGKFQQVRIIPKYDNFT |
| | VEVIFLMGKKVEISPKKKRILSIDLGVENIATLVSNVEMTPILFKGGKIKSINRWYNKLKSYYYAALRNGR |
| | SSKEGQRYSKRLSKLDSKRHNQIKDFFHKVSFNIVKVAKEHRIDTIIIGKNMDWKQKVALGSKNNQNFV |
| | QIPHAMLVSMIRYKANTEGIAVIETEESYTS |
| 247 | MDVKKGHRLFSYFEELCANGNNLYNLTNFYIRQVYTALKSDKPLQPLQREVLETIYRNIDKMNEKKTIA |
| | YYKKLKKENLLGKEKQKELELFTLPTKEKAFVGYNFLDALFKTIKQKDYYSLPGQINQQVIKNVVQNW |
| | DSFFKSLNDYKENPQKYIGRPSIPRYLPKGSKKEVVLSNQICLLKGEKYLRFPKTRGKLNIGKLANVSGKF |
| | QQVRIIPKYDSFTVEVIFFIGKKVEINPKKKRILSIDLGVENIATLVSNVEMTPILFKGGKIKSINRWYNKLK |
| | SYYYAALRNGRSSKEGQRYSKRLSKLDSKRHNQIKDFFHKVSFNIVKVAKEHRIDTIIIGKNMDWKQKV |
| | ALGSKNNQNFVQIPHAMLVSMIRYKANTEGIAVIETEESYTS |
| 248 | MKQQVSFKFRLKPDGQQERQMRRFAGACRFVFNRALALQNENHEAGKKYIPYTKMASWLVEWKKDT |
| | ETEWLKDSPSQPLQQSLKDLERAYKNFFQNRAAFPRFKKRGQNDAFRYPQGVKLDQENSRIFLPKLGW |
| | MRYRNSRQVTGIVKNVTVSQSCGKWYISIQTEREVSTPVHPSASMVGLDAGVAKLATLSDGTVFEPVNS |
| | FQKNQKKLARLQRQLSRKVKFSNNWQKQKRKIQRLHSRIA |
| 249 | MKQQVSFKFRLKPDGQQERQMRRFAGACRFVFNRALALQNENHEAGKKYIPYTKMASWLVEWKKDT |
| | ETEWLKDSPSQPLQQSLKDLERAYKNFFQNRAAFPRFKKRGQNDAFRYPQGVKLDQENSRIFLPKLGW |
| | MRYRNSRQVTGIVKNVTVSQSCGKWYISIQTEREVSTPVHPSASMVGLDAGVAKLATLSDGTVFEPVNS |
| | FQKNQKKLARLQRQLSRKVKFSNNWQKQKRKI |
| 250 | MLSGMIALRNIEHKRIITRPCERGRRSTVGTKRHFTNRTRLLKRLKIQRAPTAISICRLPLRSNPAITNKPPG |
| | YRKRGDRHPRSTVTWKQNGIKHDDKHGQLRLSKGWNLKDGRSDFILVEYETRPDVTVENIQQVRAVW |
| | TGDRWELHLVCETVIPVEDAPGDNTAGIDLGISNYLAIDYEDGPSELYPGNRLKQDKHYFTRDEYQIEGE |
| | NGPSKRARRARRKLSRRKDHFLHTLSKHIVERCIEEEIGTIAVGDLSDIREDDDGDSRDWGQRGNKKLHG |
| | WEFDRFTRLLEYKAEAYGILVDRVDEENTSKTCSCCGQI |
| 251 | LDALCDYRRYCWNKGLETWQLMYEAHTLNKKDNPSPNERRVRDELVTNKADWQYDLSARCLQLAIK |
| | DLANAWKNFFDKAQPDWGIPSFKSKKSPRQGFKTDRAKIVNGKLRLDRPRSISKDSWHDLSSYEVLKMS |
| | EVKVVSIFKEKGAYYAALTYEEEPISKTKTHQKTAVDVNVGHFNYTDGKINVLPAKLQKLYKRIKHYQR |
| | MLARKREVNGKLATKSNNYYAVRIKLQRDYRKVANIQNDLLQQFTTKLVDNYDQ |
| 252 | MSGDLNQCGFSASKLWNVARYYTQGRWDEDGEIPDDGELKSELKEHERYRDLHSQSSQRVLEELAESF |
| | TSWYKARQRGDEDANPPGYRKHGDNHPRSTVTWKQKGIKHDPKHNHLRLFKGFNHKSEGENGPSRRA |
| | LRACQKLSRRKDHFLHALAKHIVERCIDHEVGRIAIGNLSKIREAENGEARNWGKRGNKKLHGWAFDRF |
| | ATLLEYKAEEHGILVERKSERDTSKTCSCCEQKRDANRVERGLYVCASCGGTMNADVNGAVNIRRKIT |
| | QNPPTEDMSNGRLARPVTYLFNQTSGSFHPREQVGCEL |
| 253 | MYNPREHRNYKFRIYPTKTQAETLTNWLTLCRLCYNAALVDRKNHYLRNKASLTRTKQQTTLKLDKDK |
| | HPQLKEVHSQVLQEVLFRVEKAYQAFFRRVKAGENPGYPRYKGMGQYNSLTYTQFGDGRGAYFKEEK |
| | LALSKIGLLKIKLHREIPGKVKTCIIKRETTGKWYAVLSVEGYPVLYSPNWKKTGLDVGIEKLATLSDGE |
| | QIPNPKPIQKSEKKVKRAQRDLCRKKKGSKNREKARQRLAQIHERIRHQRQDYLHKIANYLVWKRYNN |
| | KGKRIETRDLGYQRGFPVTCKEMNKFMF |
| 254 | MLDPNQEQLSMMTVISGACRYVFNKALEIAVKNHLAGEKYVPYNKTAPLLVQWKSQENLSWLKLAPS |
| | QSLQQSLKDLDRAFHGYISRKSGFPKFRKKGTDESFRFPQQRVKVDEGNKKVYLPKIGWVRYRKSRDIIG |
| | EIKNITISQSANKWYVSFQTQIEVPDPVHTSNSTIKVTLSDEGTIFLSDGKKYALPATYSKHFNQLNKLIRQ |
| | KHRKIKNSQSWLAFHHSTILKKAKLRNILIDFLHKTSTLICNNHAKISVDTKKGNSARKTKPLPINFKPYEF |
| | LRQITYKQSWNGGSVCMEQS |
| 255 | MLETTRTYRAKIVNHSQVSDNLDDCGHSVSKLWNVARYHAQQEWDDTGEIPSEADLKRELKDHERYS |
| | DLHSQSSQRVLEELAESFNGWFKKRKNGDTDANPPGYRKRGDNHPRSTVTWKQNGIKHDSKHNQLRLS |
| | KGFNLKNHRSDFILCEYETRPDVTVENIQQVRAVWNGDHWELHLVCKVKIPVEDAPGDNTAGIDLGISN |
| | YLAIAYDDGEAELYPGNVLKQDKHYFTRDEYDTEGENGPSRRALRTRQKLSRRKDHFLHALAKHIVEQ |
| | CIDHEVGHIAIGDLSEIREDENGDSRNWGRSGNKKLHGWEFDRFTTLLEYKAEEHGILV |
| 256 | MITYKTMQIWVKKGHRMHPYFTEMCQNAKNMYNSTNFYIRQIFTGLTQEKELHPLQTEVLNTLQKHLP |
| | RMNDNQLLAYQKKIAKEKAKPVQKQKEVKCNLFEKPSKEKPYVDYHLLDALFKSISLNDYRSLPTQSSQ |
| | GIMKTVFQNWKSFYASLKEYKMNPTKFKARPRIPGYSRSKEKEVLFSNQDCVIKENKFLKFPKTKEIDNV |
| | ATIVTNTGRIPVLMKGKNIKSVNQRYNQLRAHFMGILRQGKNTNEGPFTSKRLEQINRKRFNQIKDLFHK |
| | ASHQIEKIALEEDVDTIIIGQNKEWKQQSNMGKRNNQSFTAIPHSLLIQMIKYKAARHGIKVIVNEESYTS |
| | KASFLDHDEIPVYGEVDLKKSFSGKRMKRGLYCSKNGTIINADVNGAANIMRKVFPKAFNETFACVQAL |
| | LQPISLLLK |
| 257 | MAEQIEEVPAELIQTRVYELHPNKTMRRVLDEACDYRRYCWNQGLALWNKMYKARQALKSSLASDSK |
| | KLTEEQKVLLKEKPSPSERRVRNMLVTDKKDWQYTQSARILQLAISDLGKAWNNFFDKAQPGWGKPKF |
| | RSKREARQGFKSDQSKIKDGILYLERAKESSVPKDQWRGFKLSEKPLSDEFGTVSYFKEKGRYYVAIPYK |
| | IKAEDVKLPDKTGKATAVDVNVGHFDYTGGRVNVLPKKLDRIYKKIKPLSKEACQKASRKWRSCLQNR |
| | ELLEDESQASSMLS |
| 258 | MRTIHFTLERCRLLYNRLLEERILAYKTEGKSLNYDQANTFNERKQHIPALKQVHSQVLQDVAKRLDKA |
| | FQAFFRRVKHGETPGFPRFKPQQQYDSFTYPQGGHAIKGNKVRLSKIGDVKIKLHRQPQGKIKTCTITVK |
| | NGKYYACFSFEVDPQQLPVSDEKVVLILACCILQLLQTAQRLRHQSNCEETKCRLKQLLTVCNTQETRFL |
| | IAERRLFTFWPNCMKRWRISIRIMHIRFPDNW |
| 259 | MRQFGHRARLALTSAQIRLMDDQAHAARTMWNCLHDWWTMLPKEKRSLAAADAATRQARKEIDWL |
| | GVLPAQAAQAVLNTYFQVWRNCWDGRADEPNFKARSRTVMSVDIPQGRDLNISRVHRRWGMVQIPRI |
| | GRIRFRWTKDLPVGKRANTENLITGARLVKDALGWHIAFRYDQIKQLRARATRRAVDWQHKTTTDIAR |
| | QYGTVVVEALTITNMVNSAKGTIEEPGKNVAQKSGLNRSISQEAWGRTVTMLTYKTARQGGTLVKVPA |
| | PGTSQRCSACGFTTPGSRQASPWRQARRRKVGRNLPRLRGRALQGGEPDAAEAVGEETGRRAQSSTGD |
| | VPVHHGGEVRSVRGGAGRLRRGRRAPGDGAGARRRARAAARGGLGGGSRGRRAA |
| 260 | MGIRRTYKVQIGRGHGLYPWCETITSLANNLYNACRFRQRQLITAARKTDRELTDNEKGVIAEFLSVLNC |
| | NGRSGLPACPRYETFDTVMKLTKNPDYYAKGLPRQSAQQVLKRSCADVDNFFAAVKAWKDRGCPEGE |
| | RPKFPGYKRKGGHGAVAITNQDCTLKEGRDGNLIAGLPFAKSMPLKIGFPLGRLKQAEVCPDNGVYVIA |
| | FSFELDLEVPVPVHPASWIAAIDFGVDNLMAVTNNCGLPCLLYKGGIVKSTNQGYNKRLAQIMQEEMK |
| | KPGCPKNKEGKPWFVPTEESMGMTLRRNNIVHDFMHKAAKHLVLWCVENRIDTIVGVNAGFKQEVNIG |
| | HINNQNFVQIPFAYLRSCIKYLCEEQGILYVKREEDLEYDQMSLVEYIDPFTGEPVRKNKK |
| 261 | MAKENPSNYKTLQIWIKKGHRMYSYFQECCHNAKNMYNTTNFYIRQVYTGLTQEKELQPLQKEVLANI |
| | HKNIGKMNDTQLLAYQKKLEKEKLKPKEEQKEITCNLFSEPNFEKPYVDYNFLDALFKAMIQNDYRALP |
| | TQCSQSIMKGVFQNWKSFFASLKDYKKNPNKYAGMPRIPKYIRSSEKEILYTNQDCIIKNSRFLKFPKTKL |
| | QLNIGKLGFTEGKLKQVRVIPKYNEYVVELVIDVPSEQQMIEENARYMSIDLGIDNLATIVTNTGMKPVL |
| | VKGKHVKSINQYYNKMKSHFTSILRNGKQTNEGPFTSKRIEKLHQKRYLKI |
| 262 | MTEQIEEVPAELIQTRVYELRPNETMRRVLDEACDYRRYCWNQGLALWNEMYKARQALKSSSASDSK |
| | KLTEEQKVLLKEKPSPSERRVRNMLVADKKDWQYTQSARILQLAISDLGKAWNNFFDKAQPGWGKPKF |
| | RSKREARQGFKSDRSKIKDGILYLERARGSRVPKDQWRGFKLSEKPLSDEFGVVSYFKEKGRYYVAIPY |
| | KIKAEDVKLPDKTGKATAVDVNVGHFDYTGGRVNVLPKKLDRIYKKIKHNQRQLAKKASPKWRSCLR |
| | KQELLEDESQASSVLSQGKQYPKRLDAQIYDRTG |
| 263 | MTKENPSNYKTLQIWIKKGHRMYSYFQECCHNAKNMYNTTNFYIRQVYTGLTQEKELQPLQKEVLANI |
| | HKNIGKMNDTQLLAYQKKLEKEKLKPKEEQKEITCNLFSEPNFEKPYVDYNFLDALFKAMIQNDYRALP |
| | TQCSQSIMKGLFQNWKSFFASLKDYKKNPNKYAGMPRIPKYIRSSEKEILYTNQDCIIKNSRFLKFPKTKL |
| | QLNIGKLGFTEGKLKQVRVIPKYNEYVVELVIDVPSEQQIIEENARYMSIDLGIDNLATIVTNTGMKPVLV |
| | KGKHVKSINQYYNKMKSHFTSILRNGKQTNEG |
| 264 | MEGIKEYRTYQIRIKKGHKLYEYFDKLCMNSNNLYNTTNFYIRQVYTAINNKKNLQPLQKEVMETIYQN |
| | LNKMNDKQTIAYFKKLRKEKTRPNEIRKEMILNLFEAPSKEKSFLGYNFLDCLFKTIKQKDYYSLPGQIN |
| | QQTIKNVVQNWKSFFSSLKDYKENPHKYKERPSIPGYLPKGSRKEVVLSNQICKIVGEKFLRFPKTKTQL |
| | NIGKLVNLKGTFQQIRIVPKYGDFIVELIYLVGDKREVVAKKEHCMSLDLGVDNIVTAVFNLKIVPILFKG |
| | GKIKAINQWYNKLRSLYYAAIRNGKGPKEGGFHSKRLVKLERDRHLKIKDLLHKVSFNIVKIAKAHQIDT |
| | IVIGKNKEWKQNSNLGKVNNQKFVQIPHTLLIELITYKANAKGIAVIVTEESYTSKASFLDGDHIPTFNPG |
| | NKEPHIFSGKRVHRGMYHSKHNILLNAHVNGAANILRKVVPKAFANGIAAVCSQPLVVNVQ |
| 265 | MLLTYKFRICPSKQQEQKLLFTLDKCRFTYNKLLEILNKQEKINQSEIQAKIPKLKQEYSDLNEIYSKTLQ |
| | YECYRLFSNLRALSRLKKNGKRIGKLRYKGKDWFKTFTYNQSGFVLGIKNKRYNKLHLSKIGILQIRTHR |
| | IINGSIKQVQIKKECSGKWFALLCVHKGEEKPKERTNKSIGIDLGTINFIYDSDGNHIDAPKFLSKSLKKLA |
| | GEQRKLSKKKKGSKNRIKQKINVARIHECIFNQRNDFLHKISRYYVNNYDF |
| 266 | MLKKYANKSLTQRESKQSSPEINSFKALINKKTAFFFMLLTYKFRIYPSKQQQEKLLFVLDKCRFTYNKL |
| | LEILNKQEKINQSEIQAEIPKLKEQYPDLNEIYSKTLQYESYRLFSNLRALSRLKKNGKKIGCLRFKGKDW |
| | FKTFTYNQSGFVLEIKNKKYNKLHLSKIGSIPIRTHRVINGSIKQVQIKKECSGKWFALLCVHMNEPKQRE |
| | KTKKSIGIDLGTINFIYDSDGNHADHPKFLNKSLKKLAAEQRKLSRKKKGSNNRTKQKINVAKIHEAICN |
| 267 | MIRTHIFACNIDRKLADSLNRESGRIYTQVMVEQWRTFRHAGHWISPRGVEKLADFYDKQAGQKPLLHA |
| | HSVDAAQQGFPKACKTAKACKNIGLNSSYPHKRKPYRSTIWKNTGISKTEDEKLQLALARGQSPIFIELPP |
| | NLKNLVKECYVEMRLVYNKNHKFYQWHVVVDDGMDSKVASGTNVIGIDLGEIHPVAATDGETSVVFS |
| | ARALRSVNQYSNKWLASFQSKISKKKKGSQSYKRMMARKRKFLAKQARRRKDIEQKVSRAVVDYAVE |
| | RNCNEIAIGDVRKVANKCKLGKKSNQKVSNWSHGKIRTMIEYKANAEGISVTMVKEHYTSQTCPNLDC |
| | QHKYKPSGRTYRCPVCGFVGLSHLR |
| 268 | MSYRWCWVWVVPRRRDPAAPRVVHRTARVAVRVTPGQRRRCFGLLRSAGDVWACLLEVNAWRRRR |
| | RDAPLVGYQQLCRELSGSGPGTLGELDTTGARSVLRRFSDAWFAAAKRRKDGDLSARFPRRRRGLVPV |
| | RWYHGTFTLDGRRARIPTAKGTAPLWIRLAREVPYPAEQVRSITLLCEGGRLFLDVTAEVPLAVYPPGEK |
| | PDPARFAGVDLGIIHPYAVAGPDGEGLLVSGRAIRAEHRMHLADTKARRRAVARRAPKRGEQGSRRWR |
| | KYRRRARLVEGRHRRRVRQAQHEAARQVVSWAVERRVGVLHVGDPRGVLDIAAGRRHNLRLRQWQI |
| | GRLLQVLTDKATLAGITSGWSTNAAPRPPAPPAAHAFRNLVAGPCPARAVDSPGTATWSRPPASPPAPR |
| | AADPPPRQPLLCCRRWSRTVEPAGTSPVPGGPGEDQLARGGPPHHLVGSRSPTRRGSTTTTEHPVNVRG |
| | HRTRGRMRRVSIGGRAGAGWGRIGSSRSAPRVGR |
| 269 | MIKKQAFKFLLEPNKGQLSDFLAFAGSCRFVYNKGLALLNENYRSGKKFIGYNQLASELVEWKNEESLS |
| | WLKEAPSQCLQQSLRDLDRAFRNFFTGKSQYPKFKKKGRHDSFRIPCQRVRVDQEKKLVSLPKVGWVK |
| | YRKSREIIGDLKNATISLNQGKWYISFNTEQTVPDPIHPSDIKTTIVLNNVNSVHLSSGVGGDNTYQAEEK |
| | KKLIRLNKTLARRKKYSKNWLKTKGKIDRVRSKAARIRLDNIHKATTAICKNHAVVEVVNLMGSVSAK |
| | NDNTPSTRYEFVRQLIYKQEWLGGEIIRRESKLL |
| 270 | MYVIALTVDLDQPRLKVGADLGKDRLQFLKSPAVEDTAAVFGYQHQMNMHSKHAVSSVPKVLAFVPR |
| | PDQNASMERQAFQFELMPNGEQPRQMSRSAGCVRYVYNQALALKKERYEKQEKLTRFELDKMLVGW |
| | KQETPWPSEAPAHALQQALLGLDRAYTNFFRKRAEFPKFHKKGIRDSFRESDPKCIKLDQVNRRIQVPKL |
| | GWVRYRNRREVLGEIPSVTVSLSAGKWFVSISTRREVEPPLHPSTSSVGLDWGMARFYTDAEHQDQL |
| 271 | MYVIALTVDLDQPRLKVGADLGKDRLQFLKSPAVEDTAAVFGYQDQMNMHSKHAVSSVPKVLAFVPR |
| | PDQNASMERQAFQFELMPNGEQPRQMSRSAGCVRYVYNQALALKKERYEKQEKLTRFELDKMLVGW |
| | KQETPWPSEAPAHALQQALLGLDRAYTNFFRKRAEFPKFHKKGIRDSFRESDPKCIKLDQVNRRIQVPKL |
| | GWVRYRNRREVLGEIPSVTVSLSAGKWFVSISTRREVEPPLHPSTSSVGLDWGMARFYTDAEHQDQL |
| 272 | MIRYKTEIKPNKKQIKEINKTINACRSVYNKFIEINKIRYDNGLKFLNHMKFSVWYNNEFIPNNEDKKWT |
| | KEVSTKTIKQAMANAENAYNRFWNYNSGYPNFKKKQSNGSYYLIGTIKIERHRIKLPNLKWVRLKEKG |
| | YIPKHNIKSATISKEFDRYYVSVLVDEEPKIIFKKLQTEGIGIDLGLKDTLFTPSGVKITDLRKNKRLIKLNK |
| | SLKRQQRKLSRKQKKSNNVKIVVQ |
| 273 | MKRLLRAYKTEIRPTEGQIILIHKTIGTCRYVYNLYLQKNREAYEATSSFLSGYDFSKWLNNEHATQDEF |
| | AWIKEVPSKAVKQAIMNADVAYKRFFKKLSSSPRSKRKSDYGSFYLVGTIHVKRHLIQLPKLGKVKLKE |
| | KGYIPFDGVKSATVSREGDRYFVSVLVEEPSRVVQKHGQTDGIGIDMGIKELLFDSDGNAVANINRSNQII |
| | KLTRSLKRQQRKLSRRVKGSENFKKQKVIV |
| 274 | MAEQVKEAPAELIQTRVYELCPNKTMRKVLDEACDYRRYCWNQGLDLWNEMYKERQALKSSLASDS |
| | KKLTEEQKVLLKEKPSPSERRVRNMLVADKKDWQYTQSARILQLAISDLGKAWNNFFDKAQPGWCKP |
| | KFRSKREARQGFKSDRSKIKDGILYLERARGSRVPKDQWRGFKLSEKPLSDEFGTVSYFKEKGRYYVAIS |
| | YKIKAEDVKLPDKTGKATAVDINVGHFDYTGGRVNVLPKKLDRIYKKIKHYQRQLAKKRVQNGAAAC |
| | ESKNYLKTKAKLQA |
| 275 | MMTVISGACRYVENKALEIAVKNHLAGEKYVPYNKTAPLLVQWKSQENLSWLKLAPSQSLQQSLKDLD |
| | RTFHGYISRKSGFPKFRKKGTDESFRFPQQRVKVDEGNKKVYLPKIGWVRYRKSRDIIGEIKNITISQSAN |
| | KWYVSFQTQIEVPDPVHTSNSTIKVTLSDEGTIFLSDGKKYALPATYSKHFNQLNKLIRQKHRKIKNSQS |
| | WLAFHHSTILKKAKLRNILIDFLHKTSTLICNNHAKISVDTKKGNSARKTKPLPINFKPYEFLRQITYKQS |
| | WNGGSVCMEQS |
| 276 | MTKGKDSTHSRKETKQLQALSRKRDAFLRDFFYKTAWYLVRYAKEQRVDVIVIGHNEEQKQNIRIGKQ |
| | NNQNFVSIPFCLFIKILRNTAAKVGIPVVDREESYTSKASLLDLDAIPTYRKGNAQTYTFSGKRVHRGLYK |
| | TNSGCVINADINGDGNILRKEYPYAFDGQDMSYLYKTTKVVSYTDIYAGAKSVCKEKYNQKSHEPGLGS |
| | RVNHRYRQDTRLIYRKLWGRSTFVWTGKKKTA |
| 277 | MSMQLTETVKLYPNKYQTELIKATMTEYISTVNHLVFDAINGRTITKITTADVNAILPSALCNQCIRDSKSI |
| | IRKYNKALRNSDTQVKLPVLKKMCCYINNQNFRISDDCISFPVIINGKSKRISVKTKISKRQKSIFSSSKLGT |
| | MRIVVKGHDLVAQIQNIRSTTRTSRKNNHNLHTWSFYRLATFIEYKAKLAGIEVEYVDPAYTSQICPICG |
| | RIQHAKDRNYTCRCGYQTHRDLLGAINICNSTEYIGNRYTA |
| 278 | MRTFKMIIDPTKNKKDAAFCQYFKTNTADSKCMYNTANFYIRNTMTGLKKSPEERTHLETEVLHYVFTG |
| | IQKANEVIGQKNMKKKFAELNLSKVGGMNSAVIAFSIVSQEPFQYPTEEKWFLSYGTLDAIFKFTDNPVY |
| | RRMNSQVNQNAIRKAVTAWQGYFESLKAYKKNPAGFTGKPKIPGYKQDEEYIAWFSKQVAKLKEEDG |
| | RCYIQFVNNPDRFEIGKASLYSDLKYVKTEVKAMYGKYYILITFDDKIAEVEAPENPKRILGLDPGVNNF |
| | LGVANNFGGVPFVMNGRAVKSANQRFNKKRAKLISSVTKGSDSKSSVKYSKHLNILSQKRESFLRDYFY |
| | KCAWYICRYAKAAGVDVIVMGHNDGQKQEIDLKDNVNQNFVSIPYTKFITILKAVASKCGIAVVIREES |
| | YTL |
| 279 | MKSIRTKLKLNNKQKTLMAQHAGYSRWCYNWGLSLWNAAYTDGYKPNPRKLREVFTNHTKPLYPWM |
| | KNLSSKVYQYAFINLGEAFKRFFQGLGKRPRFKKKGKSDSFTIDNCGKPIELNGWSHKLPFIGMVKTYEP |
| | IEATTQKITISRQAGDWYLSLSYEFTPSPTPTTTEVVGVDLGVKTLATLSDGKVFESVKSYRRFETKLSRL |
| | QYLNRNKIIGSAN |
| 280 | MLRAYKTEINPSFEQCQTINQTIGTCRWIYNKFIETNQYLYEKEKSYMDGYTFSKWMNNVYLPSHPDKH |
| | WVKQSASKAIKQSIMNAHRAYQTFFKNKQGYPKFKKKSGIGSYYLIGTIHVQRHRIQLPKLGWIKLKER |
| | GYIPTNNIKSATIVKEYDRYYVSVLVDQPPPPIFKPEQTEGIGIDLGLKEAVFTPSGVKIRSFKTNQTIIKLD |
| | KSLKRQQRKLSRKKKGSRN |
| 281 | MLRAYRTEIDPSFEQRQTINQTIGTCRWIYNKFIETNQNFHKTGQSYMNGFAFSKWMNNVYLPNNPNKH |
| | WIKQSASKAVKQSIMNAHRAYQTFFKNKKGYPKFKKKSGIGSYYLIGTIHVQRHRIRLPKLGWIQLKEK |
| | GYIPTNNIKSATVIREFDRYYVSVLIDCEPSPLFKPKQTEGIGIDLGLKEAVFTPSGVKIRSFKTNQTIVRLD |
| | KSLKRQQRKLSRKKKGSHNWYKQLLKVQRLYRRIKNKKEISNAKAYSLLFAQIRNLLRLKI |
| 282 | MTEQIEEVPAELIQTRVYELRPNETMRRVLDEACDYRRYCWNQGLALWNEMYKARQALKSSLASDSK |
| | KLTEEQKVLLKEKPSPSERRVRNMLVADKKDWQYTQSARILQLAISDLGKAWNNFFDKAQPGWGKPKF |
| | RSKREARQGFKSDRSKIKDGILYLERARGSRVPKDQWRGFKLSEKPLSDEFGVVSYFKEKGRYYVAIPY |
| | KIKAEDVKLPDKTGKATAVDVNVGHFDYTGGRVNVLPKKLDRIYKKIKHNQRQLAKKASPKWRSCLR |
| | KQELLEDESQASSVLSQGKQYPKRLDAQIYDRTG |
| 283 | MIKKQAFKFLLEPNKSQLSDFLAFAGSCRFVYNKGLALLNENYRSGKKFIGYNQLASELVEWKHEESLS |
| | WLKEAPSQCLQQSLRDLDRAFRNFFTGKAQYPKFKKKGRHDSFRIPCQRVRVDQEKKLVSLPKVGWVK |
| | YRKSREIIGDLKNVTISMKHGKWYISFNTEHTVPDPIHPSDIKTTIVLNNENSVHLSTRVGGANTYQAEEK |
| | KKLVRLNKILARRKKHSNNWLKTKGKIDSVILKSARIRLDNIHKATTAICKNHAVVEVVNLMDSVSDKN |
| | DNTLSMRYEFVRQLIYKQEWLGGEIIRR |
| 284 | MLRAYRTEIDPSFEQRQTINQTIGTCRWIYNKFIETNQNFHKTGQSYMNGFAFSKWMNNVYLPNNPNKH |
| | WIKQSASKAVKQSIMNAHRAYQTFFKNKKGYPKFKKKSGIGSYYLIGTIHVQRHRIRLPKLGWIQLKEK |
| | GYIPTNNIKSATVIREFDRYYVSVLIDCEPSPLFKPKQTEGIGIDLGLKEAVFTPSGVKIRSFKTNQTIVRLD |
| | KSLKRQQRKLSRKKKGSHNWYKQLLKVQRLYR |
| 285 | MIKHQAFKYMLDPNQEQLSMMTVISGACRYVENKALEIAVKNHLAGEKYVPYNKTAPLLVQWKSQEN |
| | LSWLKLAPSQSLQQSLKDLDRAFHGYISRKSGFPKFRKKGTDESFRFPQQRVKVDEGNKKVYLPKIGWV |
| | RYRKSRDIIGEIKNITISQSANKWYVSFQTQIEVPDPVHTSNSTIKVTLSDEGTIFLSDGKKYALPATYSKH |
| | FNQLNKLIRQKHRKIKNSQSWLAFHHSTILKKAKLRNILIDFLHKTSTLICNNHAKISVDTKKGNSARKTK |
| | PLPINFKPYEFLRQITYKQSWNGGSVCMEQS |
| 286 | MTEQIEEVPAELIQTRVYELRPNETMRRVLDEACDYRRYCWNQGLALWNEMYKARQALKSSLASDSK |
| | KLTEEQKVLIKEKPSPSERRVRNMLVADKKDWQYTQSARILQLAISDLGKAWNNFFDKAQPGWGKPKF |
| | RSKREARQGFKSDRSKIKDGILYLERTRGSRVPKDQWHGFKLSEKPLSDEFGVVSYFKEKGRYYVAISY |
| | KIKAEDVKQPDKTGKATAVDINVGHFDYTGGRVNVLSKKLDRIYKKIKHYQRQLAKKRVQNGAAACE |
| | SKNYLKTKAKLQA |
| 287 | MIVLEYKVKGKPNQYQAIDQAIRTTQFVRNKAIRYWMDNSRELKIDRFALNKYSTTLRNEFPFVADLNS |
| | MAVQSASERGWSAISRFYDNCQKKISGKKGYPKFQKDCRSVEYKTSGWALHPTKRQITFTDKNGIGKLK |
| | LLGKWDIQSYNVKDIIRQWIEYFAAKFDKLAIPVAPHYTSQKCSNCGVIVKKSLSTRTHVCNCGCELHRD |
| | TNAAINILNLGKQARGGHPRSNANGLETSTLLGETLVAARI |
| 288 | MAKENPSNYKTLQIWIKKGHRMYSYFQECCHNAKNMYNTTNFYIRQVYTGLTQEKELQPLQKEVLANI |
| | HKNIGKMNDTQLLAYQKKLEKEKLKPKEEQKEITCNLFSEPNFEKPYVDYNFLDALFKAMIQNDYRALP |
| | TQCSQSIMKGLFQNWKSFFASLKDYKKNPNKYAGPPRIPKYIRSSEKEILYTNQDCIIKNDRFLKFPKTKL |
| | QLNIGKLGFTEGKLKQVRVIPKYNEYVVELVIDVPYEQQMIEENARYMSIDLGIDNLATIVTNTGMKPVL |
| | VKGKHVKSINQYYNKMKSHFTSILRNGKQT |
| 289 | MDQIKQLRIYPPEKGSCKIIVVYEVPDQEELPQNGHELSIDLGLHNLMTCYDSENGNTFILGRKYLGLERY |
| | FHKEIARVQAQWYGQQSGKGVKHPTTSKHIRKLYKRKHDSVTDYLHKVTRYLAEYCREQGITCVIAGD |
| | XENKIFRGMDQIKQLRIYPPEKGNCKIIVVYEVPDQEELPQNGHELAIDLGLHNLMTCYDPGNGKTFILG |
| | RKYLALERYFHKEIARVQAQWYGQQSGKGVKHPVTSKHIRKLYKRKHDSVTDYLHKVTRYLAEYCRE |
| | QGITCVVAGDIRNIRREKDLGRRTNQKLHSLPYNRIYIMLEYKLKRYGIRFIKQPANKKSRLN |
| 290 | MAEQVKEAPAELIQTRVYELCPNKTMRKVLDEACDYRRYCWNQGLDLWNEMYKERQALKSSLASDS |
| | KRLTEEQKVLLKEKPSPSERRVRNMLVTDKKDWQYTQSARILQLAISDLGKAWNNFFDKAQPGWGKPK |
| | FRSKREARQGFKSDQSKIKDGILYLERAKESSVPKDQWRGFKLSEKPLSDEFGTVSYFKEKGRYYVAIPY |
| | KIKAEDVKLPDKTGKATAVDVNVGHFDYTGGRVNVLPKKLDRIYKKIKPLSKEACQKASRKWRSCLQN |
| | RELLEDESQASSMLS |
| 291 | MIKKQAFKFLLEPNKGQLSDFLAFAGSCRFVYNKGLALLNENYRSGKKFIGYNQLASELVEWKNEASLS |
| | WLKEAPSQCLQQSLRDLDRAFRNFFTGKSQYPKFKKKGRHDSFRIPCQRVRVDQEKKLVSLPKVGWVK |
| | YRKSREIIGDLKNATISLNQGKWYISFNTEQTVPDPIHPSDIKTTIVLNNVNSVHLSSGVGGDNTYQAEEK |
| | KKLIRLNKTLTRRKKYSKNWLKTKGKIDRVRAKAARIRLDNIHKATTAICKNHAVVEVVNLMDSVSAK |
| | NDNTLSMRYEFVRQLIYKQEWLGGEIIRRESKLL |
| 292 | MIKKQAFKFLLEPNKGQLSDFLAFAGSCRFVYNKGLALLNENYRSGKKFIGYNQLASELVEWKNEESLS |
| | WLKEAPSQCLQQSLRDLDRAFRNFFTGKSQYPKFKKKGRHDSFRIPCQRVRVDQEKKLVSLPKVGWVK |
| | YRKSREIIGDLKNATISLNQGKWYISFNTEQTVPDPIHPSDIKTTIVLNNVNSVHLSSGVGGDNTYQAEEK |
| | KKLIRLNKTLTRRKKYSKNWLKTKGKIDRVRAKAARIRLDNIHKATTAICKNHAVVEVVNLMDSVSAK |
| | NDNTLSMRYEFVRQLIYKQEWLGGEIIRRESKLL |
| 293 | MIKKQAFKFLLEPNKGQLFDFLAFAGSCRFVYNKGLALLNENYRSGKKFIGYNQLASELVEWKNEESLS |
| | WLKEAPSQCLQQSLRDLDRAFRNFFTGKSQYPKFKKKGRHDSFRIPCQRVRVDQEKKLVSLPKVGWVK |
| | YRKSREIIGDLKNATISLNQGKWYISFNTEQTVPDPIHPSDIKTTIVLNNVNSVHLSSGVGGDNTYQAEEK |
| | KKLIRLNKTLTRRKKYSKNWLKTKGKIDRVRSKAARIRLDNIHKATTAICKNHAVVEVVNLMDSVSAK |
| | NDNTLSMRYEFVRQLIYKQEWLGGEIIRRESKLL |
| 294 | MLELNAWRRQRRDTPLASYQELCRELAASGPGVFGELDSTGARSVLRRFSDAWFAAAKRRRGGDAAA |
| | RFPRRRRGLVPVRWYHGTFTLDPGGRRVRIPAARGGQPLWLRLARSLPYPVDQVRSVTLLAEGGRLFLD |
| | VTAEVPVTVYEPGCGPDPARTAGVDLGIIHPYAVAGPDGQALLVSGRAIRGEHRMHLADTKQRRRAVA |
| | GRAPTRGQRGSRRWRKYRRRARAVDGRHARRVRQAQHEAAKTVVSWAVGQRVGTLHMGDPRGVLQ |
| | VAAGRRHNLRLRQWQIGQLIRILADKATVAGITFTSSTNAAPRPPARAAGGGSRNHPGGS |
| 295 | MISYRTEIKPNKKQIREINKTIDACRTVYNKFLEVNKIIYENNKSFMSHTKFSVWYNNEFIPNNEDKKWT |
| | KEVNTKATKQAMANAENAYKRFWKNNNGFPKFKKKQNNGSYYLIERIHVERHRIKLPNLKWVKLKEK |
| | GYIPSSNIKSTTIIKDGNRYFVSVLVDEEHKTIFKPLQTEGIGLDLGLKDTLFTPKGVHITDLRKNKKLINLD |
| | KSLKRQQRKLTRKQRKSNNWFKQLLKVQRLYRKISNIKKDIKRKKVLEII |
| 296 | MIKKQAFKFLLEPNKGQLSDFLAFAGSCRFVYNKGLALLNENYRSGKKIIGYNQLASELVEWKNEESLS |
| | WLKEAPSQCLQQSLRDLDRAFRNFFTGKSQYPKFKKKGRHDSFRIPCQRVRVDQEKKLVSLPKVGWVK |
| | YRKSREIIGDLKNATISLNQGKWYISFNTEQTVPDPIHPSDIKSTIVLNNVGSVHLSSGVGGDNTYQAEEK |
| | KKLIRLNKILTRRKKHSKNWLKTKGKIDRVKSKAARIRLDNIHKATTAICKNHALVEVVNLMDSVSDKN |
| | DNTLSMRYEFVRQLIYKQEWLGGEVIRRESKPL |
| 297 | MIKKQAFKFLLEPNKGQLSDFLAFAGSCRFVYNKGLALLNENYRSGKKFIGYIQLASELVEWKNEESLS |
| | WLKEAPSQCLQQSLRDLDRAFRNFFTGKSQYPKFKKKGRHDSFRIPCQRVRVDQEKKLVSLPKVGWVK |
| | YRKSREIIGDLKNATISLNQGKWYISFNTEQTVPDPIHPSDIKSTIVLNNVDSVHLSSGGGGDNTYQAEEK |
| | KKLIRLNKTLTRRKKHSQNWLKTKGKIDRVKSKAARIRLDNIHKATTAICKNHAVVEVVNLMDSVSAK |
| | NDKTLSMRYEFVRQLIYKQEWLGGEIIRRESKLL |
| 298 | MLTITHRYRIYPDATQKQQFIDWMEVCRGAFNYALREIKDWCNSRKCLIDRCSLEKEYILPAELKFPSEIQ |
| | QLNNLPRAKKEFPRLSEVPSQVLQQAIKQLHKAWEYFQKRGFGFPRFKKYGQFKSLLFPQFKENPVPNL |
| | HVLLPKIGTIPINLHRPIPTGFVVKQVRILRKADRWYAWKRGNFFGEVDARGTSQECPECGGEVRKDLSV |
| | RIHNCPHCGYKTDRDVAAGQNIRNRGIKLISTVGQTGKETACADVLPGAEETQSRQVSKSPERSAALSLP |
| | KGRRGVTRKPKK |
| 299 | MLNLTYNYRIYPGLDQEAQMLDWLEQCCRVYNYAFAERKDWIGSRKCPVNACSIKQEYIISADAPYPD |
| | YYKQQNALTRAKREIPELKAVHSQVLQDALKRLDKSFKFMQKRGFGFPRFKKFGQYRSFVFPQFKFKM |
| | TSRGILAKHCLDAAWGSFLEILKWVAWKRGVYFARVDPNGTRQTCPQCGVHTGKKELGERVHHYSEC |
| | GYTTDRDVAAAQVVMQRGLVLAADGQSVMLPAEEGCLGTPMKQENPTARKGSPRSTR |
| 300 | MQTLEYKIKASINQYKAIEEAIRTTQFVRNKSIRYWMDSPQDAKINRFSLNKYSTELRNKYQFVSDLNSM |
| | AVQSASERAWISIQRFYDNCKKSSKGKKGYPKFQKDNRSVEYKTSGWKLHPSKRKITFTDKKGIGDLKL |
| | LGKWDIHLYPLKSIKRVRIVRRADLAKSISDVGWYLFRQWIEYFASKFGRIAIAVAPQYTSQKCSNCGRI |
| | VKKSLSTRTHVCVCGCELHRDTNAAINILNLAKQARAGQARSNATGDATSTLVAERLSQQVASMNVES |
| | PRL |
| 301 | MKSIRTKLKLNNKQKTLMAQHAGYSRWCYNWGLSLWNAAYRDGYKPNYRKLREVFTNHTKPLYPW |
| | MKNLSSKVYQYAFINLGEAFKRFFQGLGKYPRFKKKGRSDSFTIDNCGKPIELNGWSHKLPFIGIVKTSEP |
| | IEATTQKITISRQAGDWYLSCSYEFHSHTTPKKTDVVGVDLGMKTLATLSDGKVFESVRAYQKFEAKLS |
| | RLQYLNRHKQVGSANWRKAQLKIARLLRKVANIRQDALHKLTTYLAKVRLVPVRSL |
| 302 | MITLTYQYKLKPNKQQEADINLMLDVCKSVYNYGLRERKDWLNSRKSPINSCSIVSEYIIPADTPYPNYN |
| | HQAKNLTIAKKTNTKLKSVNAQVLQQTLKTLERAFSDMKYLGKGFPRFKKKLRSFVFPAMLKNCLGNN |
| | RVKLPQLGWIKIRQSRQYPDGFQAKQARIVKKATGYYLMIIFTSSESAPDNPVGKKSLGIDAGIESFVATS |
| | TGKLIKSPKFLLSQLR |
| 303 | MKSIRTKLKLNNKQKTLMAQHAGYSRWCYNWGLSLWNQAYTDGYKPNTRKLREVFTNHTKPLYPWM |
| | KNLSSKVYQYAFINLGEAFKRFFQGLGKRPRFKKKGKFDSFTIDNCGKPIELNGWNHKLPFIGIVKTYEPI |
| | EATTQKITISRQAGDWYLSLSHEFSATPTPKTTDVVGVDLGVKTLATLSDGKVFESVRAYQKFEAKLSRE |
| | QYLNRHKQVGSANWRKAQLKIARLHRKVANIRQDALHKLTAYLAKVRLVPVRSL |
| 304 | MLTGRRYLLALTDVQTGQAERFGAICRAVWNTGLQQRREYRRRGAWINYVQQARQMAEAKKDLDCS |
| | WLAEAPSHIPQQTLRDLEKACQAHGTGKVRWRSKSRTAPAFRFPDPNQIRVERLNRRWGRVRLPKLGW |
| | VRFRWSRPLGGPIRNATVARDGGRWYISFCVEDGVTGVAPTDAPGVNVRQKAGLNRAILNKGWGGVL |
| | LALEHTARYHGATVVSVNPAYTSQRCSRCTLVDANSRKSQAEFTCTGCGHRDNADVNAAKNMP |
| 305 | MNYNYRYRLMPTDSQRETLDYHRDTCRQLYNHALYRFNQIPEDEGTVKQRVRTIRDELPDLKDWWDA |
| | LTDVYSKVLQPTVMRIAKNINALGRLKEQGYKVGELRWKSPREFRSFTYNQSGFELDKNGGQTVLSLSK |
| | LADIPIELHRPLPEDATVKEVTLKKEKTGEWFAIFGIEMDTEPPAKPPLEDIDAENMVGIDVGILKYAHDT |
| | DGTAVESLDLSEERDRLEREQRKLSRKAYESNNWERQRRKVAECHLDIKRKRRDFLHKLSAYYAREYE |
| | LVRSKTST |
| 306 | MKTLKLRIKDKHCKVLDQLASEVNFVWNYVNDLGFRHLKRKGEFLSAFDIAKYTKGTSKECNLHSQTI |
| | QAVTEELVTRRKQFKKAKLKWRVSNKKSARRSLGWVPFKKVAIKYANGYVQYGKHQFKLWDSYGLS |
| | KYTFSDGTVISNPKFYRKYEQTLGIAQRARNKKRVRALHAKIANSRKDHLHKASTKLVNENALIIVGDL |
| | NAKKLVKTKMAKSVLDTGFSALKTMLKYKCENAGVLFEEVQEAYTTQICSCCGEITSSSPKGSTDLGIRE |
| | WECMSCGTVHDRDINSALNILALGHKRLAVGITLF |
| 307 | MKYLTGYDFHKWINKEYLPNNPDKLWIKEVYSKSTTRAMQNADKAYKNFLQGNSRFPKYKKKQTNGS |
| | YYLWGNMEVERHRIKLPKLKWVKLKRKGYIPTDLKVVSATLTKEVDRYYISVMFERELNVIFKKPQTEG |
| | IGIDLGLKDTLFTPSGVHITDLRKNQKLIKLTKSLKRQQRKLSRKQSKSNNWFKQLLKIQRLYRKISNIKK |
| | DIKQKKILEVESYQIVSNK |
| 308 | MLVGRKYRLEFDFGQRAFAERLGGICRAVWNTGLEQRREYRRRGQWINYAEQCKQLAEAKKDPYCG |
| | WLADAPAQVIQQTLKDLDQACRKHGTWKVRWKSKAKWRPSFRFPTAQHLPVERIGRRWGRVSLPKFA |
| | VKPKPDPGRPGRFLCNGAAAKSGLNRAILDKGWYGLEVALRSKARYTGSVIHKINPVYTSQTCPESACG |
| | KVDEKSRKSQAIFSCTSCGHTEHADIVGARNIKSKGQAAGLVVSGRGDPPGSAKRQAPRSTARAAQAAR |
| | AAA |
| 309 | MAEQIEEVPAELIQTRVYELHPNKTMRRVLDEACDYRRYCWNQGLALWNEMYKARQTLKSSLSTDSK |
| | KLTEEQKVLLKDKPSPSERRVRNMLVADKKDWQYAQSARILQLAISYLGKAWNNFFDKAQPGWGKPK |
| | FRSKREARQGFKSDQSKIKDGILYLERAKESSVPKDQWRGFKLSEKPLSDEFGVVSYFKEKGRYYVAIPY |
| | KIKAKDIKLPDKTGKATAVDVNVGHFDYTGGRINVLPKKLDKIYGKIKHYQRQLVKKQVKNGEAACES |
| | ENYLKTKAKLQACYRKASN |
| 310 | MAEQVKEAPAELIQTRVYELRPNKTMRKVLDEACDYRRYCWNQGLALWNEMYKARQTLKSSLSTDFK |
| | KLTEEQKVLLKDKPSPSERRVRNMLVADKKDWQYTQSARILQLAISDLGKAWNNFFDKAQPGWCKPK |
| | FRSKREARQGFKSDRSKIKDGILYLERARGSRVPKDQWRGFKLSEKPLSDEFGVVSYFKEKGRYYVAISY |
| | KIKAEDVKLPDKTGKATAVDVNVGHFDYTGGRVNVLPKKLDRIYKKIKHYQRQLAKK |
| 311 | MEKAYSYRFYPTPEQESLLRRTLGCVRLVYNQALHERTQAWYERQERVGYSQTSSMLTNWKKQEDLD |
| | FLNQVSCVPLQQGLRHLQTAFTNFFVGRAKYPNFKKKHQGGSAEFTKSAFKFKNGQIYLAKCLEPLAYK |
| | CRWYGRNYIEIDRWFPSSKRCSNCGHIVEKMPLNIREWDCPNCGTHHDRDLNASKNILAAGLAVSVCGA |
| | SVRPEQSKSVKATAKKQKPKL |
| 312 | MIKHQAFKYMLHPNQEQLSMMTVISGACRYVFNKALEIAVQNHIAGEKYVPYNKTAPLLVQWKSQESL |
| | SWLKLAPSQSLQQSLKDLDRAFHGYISRKSGFPKFRKKGTDESFRFPQQRVKVDEVNKKVYLPKIGWVR |
| | YRKSRDVIGEIKNITISQTANKWYVSFQTQIEIPDPVHTSSLTAKVTLSDEGTILLSDGKKYALPETYSRHF |
| | NQLNKLIRQKNRKIKNSQSWLAMHHSIILKKAKLRNILMDFLHKTSTLICNNHAKISVDTEKGNSARKTS |
| | PLPVNFKPYEFLRQLKYKQSWNGGSVCVEQT |
| 313 | MKQQVSFKFRLKPDGQQERQMRRFAGACRFVFNRALALQNENHEAGKKYIPYTKMASWLVEWKKDT |
| | ETEWLKDSPSQPLQQSLKDLERAYKNFFQNRAAFPRFKKRGQNDAFRYPQGVKLDQENSRIFLPKLGW |
| | MRYRNSRQVTGIVKNVTVSQSCGKWYISIQTEREVSTPVHPSASMVGLDAGVAKLATLSDGTVFEPVNS |
| | FQKNQKKLARLQRQLSRKVKFSNNWQKQKRKIQ |
| 314 | MRVAFVYRLYPTREQMRTIHFTLERCRLLYNRLLEERILAYKTEGKSLNYDQANTFNERKQHIPALKQV |
| | HSQVLQDVAKRLDKAFQAFFRRVKHGETPGFPRFKPQQQYDSFTYPQGGHAIKGNKVRLSKIGDVKIKL |
| | HRQPQGKIKTCTITVKNGKYYACFSFEVDPQQLPVSDEKVVLILACCILQLLQTAQRLRHQSNCEETKCR |
| | LKQLLTVCNTQETRFLIAERRLFTFWPNCMKRWRISIRIMHIRFPDNW |
| 315 | MKRLQAFKYELQPNGEQARSMRRFAGSCRFVFNKALAMQKAIYEGGEKKLGYAGLCKELTTWKTQPE |
| | TAWLKEIHSQVLQQSLKDLERAYKNFFDKRADFPRFKKKGMGDSFRYPQGCKLDQSNSRVFLPKLGWL |
| | KYRNSRDVLGTVSNITVSANGGKWFVSIQTEREVEQPVHPATSIVGIDVGITRFATLSDGSHIEPLNTFRK |
| | HQQRLARYQRAMSRKTKFSSNWKKAKARVQKIHTRIANVRKDFLHKTTTTISKKPRDCVHRGFAGTEY |
| | VQVRSRQQRFARAQCQSQIWPE |
| 316 | MKRLQAFKYELQPNGEQARSMRRFAGSCRFVFNKALAMQKAIYEGGEKKLGYAGLCKELTTWKTQPE |
| | TAWLKETHSQVLQQSLKDLERAYKNFFDKRADFPRFKKKGMGDSFRYPQGCKLDQSNSRVFLPKLGW |
| | LKYRNSRDVLGTVSNITVSANGGKWFVSIQTEREVEQPVHPATSIVGIDVGITRFATLSDGSHIEPLNTFR |
| | KHQQRLARYQRAMSRKTKFSSNWKKAKARVQKIHTRIANVRKDFLHKTTTTISKKPRDCVHRGFAGTE |
| | YVQVRSRQQRFARAQCQSQIWPE |
| 317 | MKRRQAFRFNVRPTDTQERIFRQFAGAFRFVHNRALVLEIDRHASGKAHLGYVGTANLLPLWKRDPET |
| | VWLSGIHSQILRQSLKDLDRAYKNFFEKRAGFPKFRRKGEKDSFRFPQGARLDEPNARIWLPKIGWVRY |
| | RKSRTVLGTIKNVTVRRSGDRWFVSIQTEREIESPVHPNPGIVGIDLGVARFATLSDGTAIAPGRFFSRHEA |
| | RLKRLQRALSRKKKGSKTGRRSERSWPGSTGTWPTRGTTSCTRSRRRSAKATRSSWSKT |
| 318 | MKRRQAFRFALRPTDTQERIFRQFAGACRFVHNRALALEIDRHASGEARLGYVGTANLLPLWKRDPETV |
| | WLSGIHSQILQQSLKDLDRTYRNFFEKRAGFPKFRRKGENDSFRFPQGARLDEPNARIWLPKIGWVRYRK |
| | SRTVLGTIKNVTVRRSGDRWFVSIQTEREIESPVHPNPGIVGIDLGVARFATLSDGTAIAPGRFFSRHEARL |
| | KRLQRALSRKKKGSKTGRRSERSWPGSTGTWPTRGTTSCTRSRRRSAKATRSSWSKT |
| 319 | MKRRQAFRFTVRPTDTQERIFRQFAGAFRFVHNRALVLEIDRHASGKAHLGYVGTANLLPLWKRDPETV |
| | WLSGIHSQILQQSLKDLDRAYKNFFGKQAGFPKFRRKGWNDSFRFPQGARLDEPNARIWLPKIGWARYR |
| | KSRTVLGTIKNVTVRRSGDRWFVSIQTEREIESPVHPNPGIVGIDLGVARFATLSDGTVIAPGRFFSRHEAR |
| | LKRLQRALSRKKKGSKTGRRSERSWPGSTGTWPTRGTTSCTRSRRRSAKATRSSWSKT |
| 320 | MARKKAVKVLRKQKKRETMQRFTQKQNIGRACLTAKEFRLLQRMSHSSKALRNVGLYTMKQIYLNNN |
| | RMATVKEVDTAMQADINYPGVQSNSVQAIRRALFTEVKSFFKALEQWKKKPEKFTGRPKFPNYSRSTD |
| | KRIIEIYQVPKVDDNGYWIIPMNVAFRKKFGSIKIRMPKNLRNKKISYIEIVPKQKGRFFEVHYTYEMHVS |
| | QMKKPSTTTSNALSCDLGVDRLVSCVTNTGDTFLIDGKKLKSINQYFNKTIRNLQQKNMENGLSKRVVT |
| | NQMAELWHKREQQINGYISQTVGLLFKKVKVFNIDTVVVGYNAGWKQESDMGKKNNQKFVQIPFHKLI |
| | AAIENKCVKEGIRFLKQEESYTSKPVFLIKIRFPFGLRMIGRIIALVANESLMVCTKVKQEHVFMLILMVR |
| 321 | MKYQTQKILLTGNIDDETHAYLLWCCEQSNKLYNSVLFTIRQDYFEKCNYKTWFDKNDNYRRSPRLRR |
| | VKISYAQLCKDFKDDVHYQAIGGQQGQQTIKSVVEAIKGYNKLLPMWFSGELKDTPRIPSYRKRGLYQV |
| | AFTSQNIRYEPLEGICYLPIPNSQRKELETPSIIIPSGVNFQSEDIAEVRVIPSNGKLWAEYVYKTQLLKASN |
| | LDYSQGLGIDHGVDNWLSCISTKGKSFIVNGRKIKSINQRYNRLVAKQKQGKSQEYWDEKLDQATHKC |
| | NCQMRDAVNKAARFIINYCLKYQIGNIVFG |
| 322 | MVKTMAKKKAVKVLRKQKKRETLRRFTQKQNIGRACLTAQEFRLLQRMSHSSKALRNVGLYTMKQSY |
| | LNHNKMATVKEVDAAMQADMNYWGIQSNSVQAIRRALFTEVKSFFKALEQWKKNPEKFTGRPKFPNY |
| | SHSTDKRIIEIYQVPKVDENGFWMIPMSVAFRKKFGSIKIRMPKNLRNKNIYYIEIVPKQKGRFFEVHYTY |
| | EMHVSQMKKQPMTTSNALGCDLGVDRLVSCVTNTGDAFLIDGKKTKNPLTSTSTKRYVIYNKKMWKM |
| | DFQNEL |
| 323 | MDKKTYKLLRTLTHLSKDLYNLTLYTVKQHYELNGTFLPFVKAYHMVKDSEPYKLLPSQVAQQTMKIV |
| | ERNFRSFFHVLKERKKGNYNRPVRPPKYLPKNGHFILIFPYQSFRVKEDRIILTLGKNFAEKYGVKHLEIP |
| | LPKNVKGHRIKEIRILPRYNALWFEVEYVYEVLPEERDLDRSKYLAIDLGLDNFATCVSTTGTAFIIEGRG |
| | LKSFNRWWNKEKAKLQSQYDKQGVKFGKRMVWLLKKRKNVVNDFMNKAVSYIVNYCLENGIGNVVI |
| | GELKGVKQNTDLGRRNNQNFHYIPYGLFKQKLKAKCERYGINYIEVDEAYTSKVDALTLEPIEKREKYL |
| | GKRGETWTVPVFRWCFNKC |
| 324 | MARKKAVKVLRKQKKRETMQRFTQKQNIGRACLTAKEFRLLQRMAHSSKALRNVGLYTIKQSYLNDN |
| | KMATVKEVDTAMQADMNYWGIQSNSVQAIRRTLFTEVKSFFKALEQWKKNPEKFTGRPKFPNYSRSTD |
| | KRIIEIYQVPKVDENGYWIIPMNVAFRKKFGSIKIRMPKNLRNKKISYIEIVPKQKGRFFEVHYTYEMHVS |
| | QMKKQPTTTSNALSCDLGVDRLVSCVTTTGDAFLIDGKKLKSINQYFNKVIRNLQQKNMENGLSKRIVT |
| | N |
| 325 | MARKKAVKVLRKQKKRENMQRFTQKQNIGRACLTAKEFRLLQRMSHSSKALRNVGLYTMKQSYLNN |
| | NRMATVKEVDTAMQNDMNYSGIQSNSVQAIRRSLFTEVKSFFKALEQWKKNPEKFTGRPKFPNYSRST |
| | DKRIIEIYQVPKVDEKGYWMIPMNVAFRKKFGSIKIRMPKNLRNKNISYIEIVPKQKGRFFEVHYTYEMH |
| | VSQMKKQPTTTSNALSCDLGVDRLVSCVTNTGDTFLIDGKKLKSINQYFNKMICNLQQKNMDNGISKRI |
| | VTNT |
| 326 | MRLVERHVIKKNHRFYAEIDRLCFLSKNLYNYANYLVRQSFIFENTYRNYHDVQKTLQSQQDYQAMPA |
| | KVSQQVLMILDRNWISFKESNLAYKESPSKFKARPRLPGYKHKIKGRNVVVYTAQAIRKKQLKRGIINPN |
| | KTAIYLKTKVDTSKIKQVRLVPRLNHYVIEVIYEADKQQYELEENRYASIDIGLNNLATLTFNQAGIKPLL |
| | INGKPLKSINQYYNKVKSDLQSLLGENKSSQKLKKLCNKREFKINDYLHKASRLIIDTLINQKIGTLIIGHN |
| | TDWKQKINLGKRNNQNFVSIPYNKFIEMLSYKAEMVGIKVIITEESYT |
| 327 | MYLTTVNRLRLNQNEFNLVKELCWLSKNLYNSTLYEVRQHYFNTSEFLKYTKAYHILKNTENYKLLPSQ |
| | VAQQTMKVVERTMKSFFGLLREKKKGNYNKPIKIPRYLNKEGKFVLLYTPAHMRYISNNQIRLTVKKEL |
| | LEKHNLKELIITIPKHIIGKTIKELRINPLGQFLKVEFIYLNNENNYPKVTKNKNILSIDLGIDNLCTMINNVN |
| | NQPIIIDGREIKSINRLFNKNLSKYKSISKKVNDRYSTKKIDRLYYKRNNVFKDKFHKVSNYIINYCIDNNI |
| | SKVIIGYNQEWKQNINIGKTN |
| 328 | PAKVAQQILMRLHEAWQGFFSSLASYKEEPEKFFCSPRIPSYLHKTNGRFPCIYTIQAISKKYLKHSQIKPS |
| | KTNIVIPTNVNQIRQVRLVPKGSYYVFEVVYKRLEEPQIHTSDGIAGIDIGLNNLAAVTSNIKGFKPILVNG |
| | KPLNKINAYYHKIRSKLQSLLPSKHKTSHQIQNLTRKRNFKIYDYLHKSSRLIIDYLAANQIGTLIIGHNDK |
| | WKQSIGLGKRNNQNFVSIPFDRFISMLKYKAKLIGIKVIITEESYTSKCSFIDEEPLSK |
| 329 | MTRKKAVKVLRKQKKRENMQRFTQKQNIGRACLTAKEFRLLQRMSHSSKALRNVGLYTMKQSYLNH |
| | NRMATVKEVDTAMQADTNYWGVQSNSVQAIRRALFTEVKSFFKALEQWKKNPEKFTGRPKFPNYSRS |
| | TDKRIIEIYQVPKVDENGYWMIPMNVAFRKKFGSIKIRMPKNLRNKNISYIEIVPKQKGRFFEVHYTYEM |
| | HVSQMKKPSTTTSNALSCDLGVDRLLSCVTHTGDAFLIDGKKLKSINQY |
| 330 | MARKKAVKVLRKQKKRENMQRFTQKQNIGRACLTAKEFRLLQRMSHSSKALRNVGLYTMKQSYLND |
| | NKMATVKEVDTAMQADTNYWGIQSNSVQAIRRALYAEVKSFFKALEQWKKNPEKFTGRPKFPNYSRST |
| | DKRIIEIYQVPKVDENGYWIIPMNVAFRKKFGSIQIRMPKNLRNKNISYIEIVPKQKGRFFEVHYTYEMHV |
| | SQMKKPPATTSNALSCDLGVDRLLSCVTNTGDAFLIDGKKLKSINQYFNKMICNLGQKNMDNGISKRIV |
| | TNKMAALWHKRERQINGYIA |
| 331 | MTRKKAVKVLRKQKKRETMQRFTQKQNIGRACLTAKEFRLLQRMSHSSKALRNVGLYTMKQSYLNHN |
| | KMATVKEVDTAMQADMNYWGIQSNSVQAIRRALYAEVKSFFKAMEKWKKNPEKFTGRPKFPNYSRPT |
| | DKRIIEIYQVPKVDDNGYWMIPMSVAFRKKFGSIKIRMPKNVRNKKISYIEIVPKQKGRFFEVHYTYELH |
| | VSQMKKQSTTTSNALSCDLGVDRLVSCATNTGDTFLIEGKKLKSINQYFNKMIRNLQQKNVENGISKRV |
| | VTNKMAALWHKRERQINGYISQTVGLLFKKVKAFGIDTVVVGYNAGWKQKSDMGKKNN |
| 332 | MWFKTGKILSGYDLTAQMKTNKHFNAGYASSMQQTCLNVGEAFKSFKKLLSKAKKGELNQKPLPPKY |
| | RKSGGLFTVTYPKRWLKLKSGLIRFPLGNQVKAWFGISEFFLPLPTNLNWSNIKEIRILPRNGCFYAEFVY |
| | KTSVEPIKLNKSNVLGIDHGLNNWLTCVSNVGTSLVVDGLHLKSLNQWYNKSIAKIKENKPYSFWSKRL |
| | ARITEKRNRQMRDAVNKAARIAVNHCLENNIGTLIFGWNEGQKNSSDMGKKNNQKFVQIPTARLKNRIE |
| | QLCEQYGIEFVETAIFLYF |
| 333 | MARKKAVKVLRKQKKRENMQRFTQKQNIGRACLTAKEFRLLQRMSHSSKALRNVGLYTMKQSYLNN |
| | NKMATVKEVDTAMQADMNYWGMQSNSVQAIRRALFTEVKSFFKAMEQWQKNPEKFTGRPKFPNYSR |
| | STDKRIIEIYQVPKVDDNGYWMIPMSVAFRQKFGSIKIRMPKNLRHKKISYIEIVPKQKGRFFEVHYTYEM |
| | HVSQMKKQSTTTSNALSCDLGVDRLVSCVTNTGDTFLIDGKKLKSINQYFNKMICNLQQKNIENGISKR |
| | VVTNRMAALWHKRERQINGYISQTVGLLFKKVKAFGIDTIVVGYNVG |
| 334 | MNSLRKAVKVLRKQKKRENIQRFTQKQNIGRACLTAKEFRLLQRMSHSSKALRNVGLYTMKQSYLNH |
| | NKMVTVKEVDTAMQADMNYWSMQSNSVQAIRRSLFTEVKSFFKAMEQWKKNPEKFTGRPKFPNYSGS |
| | TDKRIIEIYQVPKVDENGYWMIPMNVAFRKKFGSIKIRMPKNLRNKKISYIEIVPKQKGRFFEVHYTYEM |
| | HVSQMKKPFTTTSNALSCDLGVDRLVSCVTNTGDTFLIDGKKLKSINQYFNKMICNLQQKNIENRISKRV |
| | VTNQMAVLWHKRERQINGYISQTVGLLFKKVKAFGIDTIVVGYNVGWKQKADMGKKNNQTFLQIPFH |
| | KLIAAIENKCVKEGIRFLKQEESYTSKASF |
| 335 | MARKKAVKVLRKQKKRENIQRFTQKQNIGRACLTAKEFRLLQRMSHSSNALRNVGLYTMKQSYLNHN |
| | KMVTVKEVDTAIQADMNYWSMQSNSVQAIRRSLFTEVKSFFKAMEQWKKNPEKFTGRPKFPNYSGSTD |
| | KRIIEIYQVPKVDENGYWMIPMNVAFRKKFGSIKIRMPKNLRNKKISYIEIVPKQKGRFFEVHYTYEMHV |
| | SQMKKPFTTTSNALSCDLGVDRLVSCVTNTGDTFLIDGKKLKSINQYFNKMICNLQQKNIENRISKRVVT |
| | NQMAVLWH |
| 336 | MARKKAMKVLRKQKKRENMQRFTQKQNIGRACLTAKEFRLLQRMSHSSKALRNVGLYTMKQSYLNH |
| | NKMATVKEVDTAMQADMNYWGIQSNSVQAIRRALYAEVKSFFKAWEQWKKKPETFTGRPKFPNYSRS |
| | TDKRIIEIYQVPKVDDNGYWMIPMNVAFRKKFGSIKIRMPKNLRNKKISYIEIVPKQKGRFFEVHYTYEIH |
| | VSQMKKPSTTTSNALSCDLGVDRLLSCVTNTGDTFLIDGKKLKSINQYFNKMIRNLQQKNMDNGISKRI |
| | VTNQMAALWHKRERQINGYISQTVGLLFKKVKACNIDTIVVGYNVG |
| 337 | MARKKAMKVLRKQKKRENMQRFTQKQNIGRACLTAKEFRLLQRMSHSSKALRNVGLYTMKQSYLNH |
| | NKMATVKEVDTAMQADMNYWGIQSNSVQAIRRALYAEVKSFFKAWEQWKKKPETFTGRPKFPNYSRS |
| | TDKRIIEIYQVPKVDDNGYWMIPMNVAFRKKFGSIKIRMPKNLRNKKISYIEIVPKQKGRFFEVHYTYEM |
| | HVSQMKKPSTTTSNALSCDLGVDRLLSCVTNTGDTFLIDGKKLKSINQYFNKMIRNLQQKNMDNGISKR |
| | IVTNQMAALWHKRERQINGYISQTVGLLFKKVKACNIDTIVVGYNVG |
| 338 | MKRSVTVKLQPSKGQETTLFELASVGAKIWNHVNYLRRQQFFQEQIVDFNKTEKIVYEEYKKEIGSATV |
| | QQIARKNAEAWRSFFSLLRKKRNKELPNWFKPRPPNYLKEDGKRKPLIVLRNDQYKIEGNKLILKGLGK |
| | FGKLEIQFKGRIHLKGKQGRLEITYDEVKRKWYAHISFTVEEKLEGEEWVALPRQPKGNLSAGIKSIDFY |
| | WRKGMADYQSKLNKSGAKTSRKLKRMHEKAKLQAKHYINTAVRQTVRKLYELGVSRIVVGYPKGIAR |
| | NSDKGKKQNFLLSHIWRFNYVIKRLTEVAEEYCIQVELVDEAYTSKICPVCGRPHEGARFVRGLFKCPET |
| | GFVFNADLVGAFNILKKKVKTITPNLGGLYAQGRGNWPKARPGGFERTTLTGSLMKTPQTFPPVG |
| 339 | MAMLGRTLKVRLYPDASQATQLLEMSREYQHLANLVSQWVFDHDFPLNSLKINHALYKVFRRESLLNS |
| | QMIQSVFRTVVARYKTVLEQMKHHPYRYQDDDKKWVRVTKDLTWLFKPLHFSRPQADLVRRSNYSFG |
| | NGLTEISLTTLEKRAKMPFTIKGVEHYFQNGWKLGTAKLIHSRGKWYLHIGITKEVADFDSTIPSQIVGID |
| | RGLRFLTTTFDQRGKTRFFDGKKVLLKRHKFQKIRAELQHRGTKSAKKKLKQLQQRENRWMTDINHQL |
| | SKTLVTLYGPQTLFVL |
| 340 | MKGGSDSKSSVKYSKQLNILSQRRESFLRDYFYKCAWYICRYAKAADVDVIVMGHNDGQKQEIDLTDN |
| | VNQNFVSIPYTKFITILKTVASKCGIAVVIREESYTSQASLLDMDDIPTYKKGENKKHAFSGKRIHRGLYR |
| | SKNGTLLNADINGAANILRKEYPNAFDSIKNFAYLYVTTISIGYKDLYRNAKACAGRPKSYKYHKSGRCT |
| | VVRHMERSHKKCEYCKLWGKGKFVWRPDKNKQDTQQGKAA |
| 341 | MKQQVSFKFRLKPDGQQERQMRRFAGACRFVFNRALALQNENHEAGKKYIPYTKMASWLVEWKKDT |
| | ETEWLKDSPSQPLQQSLKDLERAYKNFFQNRAAFPRFKKRGQNDAFRYPQGVKLDQENSRIFLPKLGW |
| | MRYRNSRQVTGVVKNVTVSQSCGKWYISIQTEREVSTPVHPSASMVGLDAGVAKLATLSDGTVFEPVN |
| | SFQKNQKKLARLQRQLSRKVKFSNNWQKQKRKIQRLHSRIANIR |
| 342 | MHDDLAFHQFCSVYTGPVVIKKQAFKFLLEPNKGQLSDFLAFAGSCRYVYNKGLALLNENYRSGKKFIG |
| | YNQLASELVEWKNEESLSWLKEAPSQCLQQSLRDLDRAFRNFFTGKSQYPKFKKKGRHDSFRIPCQRVR |
| | VDQEKKLVSLPKVGWVKYRKSREIIGDLKNATISLNQGEWYISFNTEQTVPDPIHPSDIKTTIVLNNVNSV |
| | HLSSGVGGDNTYQAEEKKKLIRLNKTLTRRKKYSKNWLKTKAKIDRVRSKAARIRLDNIHKATTAICKN |
| | HAVVEVVNLMDSVSAKNDNTLSMRYEFVRQLIYKQEWLGGEIIRRESKLL |
| 343 | MTKENPSNYKTLQIWIKKGHRMYSYFQECCHNAKNMYNTTNFYIRQVYTGLTQEKELQPLQKEVLANI |
| | HKNIGKMNDTQLLAYQKKLEKEKLKPKEEQKEIKCNLFSEPNFEKPYVDYNFLDALFKAMIQNDYRALP |
| | TQCSQSIMKGLFQNWKSFFASLKDYKKNPNKYVGMPRIPKYIRSSEKEILYTNQDCIIKNSRFLKFPKTKL |
| | QLNIGKLGFTEGKLKQVRVIPKYNEYVVELVIDIPSEQQIIEENARYMSIDLGIDNLATIVTNTGMKPVLV |
| | KGKHVKSINQYYNKMKSHFTSILRNGKQTNEGPLTSKRIENLHQKCYLKIKDVFHKVSHHIVKLAQEEE |
| | VCKIVIGQNKSWKQETNMGKRNNQSFCHIPHNLLVQMITYKANAVGIQVVVTEESYTSKASFLDNDFIP |
| | TYGEN |
| 344 | MFAGSCRFVYNKALALLNDNYHSGKKFMGYNQLATELVEWKSEESLSWLKASPSQCLQQSLRDLDRA |
| | FRNFFSGKAQYPKFKKKGRHDSFRIPCQRVRVDQDKKMVSLPKVGWVKYRKSREIIGELKNVTISMKQD |
| | KWYISFNTESMVPDPMHPSDIKTKIVLSDQCEFPIRLDSSMDSSHQLDEVKKLARLNRILIRRIKYSSNWL |
| | KTKGKIDRIKARLARCRLDNIHKVTTAICKKHAVVEVLSLMDSVSDKNDITLSMRYEFVRQLIYKQEWL |
| | GGEVIRRELA |
| 345 | MKQQVSFKFRLKPDGQQERQMRRFAGACRFVFNRALALQNENHEAGKKYIPYTKMASWLVEWKKDT |
| | ETEWLKDSPSQPLQQSLKDLERAYKNFFQNRAAFPRFKKRGQNDAFRYPQGVKLDQENSRIFLPKLGW |
| | MRYRNSRQVTGIVKNVTVSQSCGKWYISIQTEREVSTPVHPSASMVGLDAGVAKLATLSDGTVFEPVNS |
| | FQKNQKKLARLQRQLSRKVKFSNNWQKQKRKIQRLH |
| 346 | PLYGYAQQLTAMANNLSNAARFRQRQLMTAAKKEPADWTANEQEVMDELYAAFPEDFMDGPADRQG |
| | FLNVYGNLEKLMRRSGNPDYFAEGFPRQCSQQVLKQAARDMKAFFDSLKAYQKNPSAFTGKPQLPGYK |
| | RKGGHCTVTVTNQDCKVSEKDGMWYAAFPLRKDCPLAIGHPIPDAVLKEATITPDNGRYRFCLKFEVM |
| | AELPPVTEQPGRVCAIDFGVDNLMAVTNNCGLPCLIYKGGVAKSINQKYNKTVAVMVSRQTAATGKKY |
| | VPDAAYHAVTNRRNDRIGDLLHKCAKHFITWCVENRIDAIVLGVNKYWKQEVALGDDRNQNFVQIPFL |
| | VLRRIIGYLAEWNGIHCIEQEESYTSKASFPDMDA |
| 347 | MEKAYSYRFYPTPEQESLLRRTLGCVRLVYNQALHERTQAWYERQERVGYSQTSSMLTNWKKQEDLD |
| | FLNQVSCVPLQQGLRHLQTAFTNFFAGRAKYPNFKKKHQGGSAEFTKSAFKFKNGQIYLAKCLEPLAYK |
| | CRWYGRNYIEIDRWFPSSKRCSSCGHIVEKMPLNIREWDCPNCGTHHDRDLNASKNILAAGLAVSDCGA |
| | SVRPEQSKSVKATAKKQKPKL |
| 348 | MRTACKCRASPTPAQATQLGRTFGCVLLVWNKTLAERHAAYHQRGEKTPYGQTGRALTGWKKTTDLA |
| | FLSEVSSVPLQQTLRHQHTAFQNFFSGRARSPRFKSRSSRQSAHYTRSAFRVRDGRLTLGEFRRRLEYKA |
| | ARRGRTLAVADRWFPSAKTCAHCGHLLDTLPLGTRFWACPRRRARHDRDVNAAKHILAAGRAAVRAR |
| | AGDACGAGVRRQGPSLPRSATKQEAAAARQST |
| 349 | MYCTVKQQLKHLSKEEYLLLKELCHTAKNLYNEGLYQVRQHYFQEKNYLNYQNNYHLLKGSENYKRL |
| | NSNMAQQILKEIDGVWKSFFGLIRLAKQGKYDFRAIRIPWYLPKDQQFALVVKRNRRVHDYLSKTCRKII |
| | NYCLNHRIGTLVIGYNENLQKGSNLGRRNNQNFVNIPIGMIKKKLEYLCQLYGMTFVQQEESYTSQASF |
| | WDRDELPTYDPSNVKTYTFSGKRVKRGLYRTASGKLLHADIHDALNILRKSNVVALTGLYARGEVDTP |
| | VRIRIA |
| 350 | MEKAYSYRFYPTPEQESLLRRTLGCVRLVYNQALHERTQAWYERQERVGYSQTSSMLTNWKKQEDLD |
| | FLNQVSCVPLQQGLRHLQTAFTNFFAGRAKYPNFKKKHQGGSAEFTKSAFKFKNGQIYLAKCLEPLAYK |
| | CRWYGRNYIEIDRWFPSSKRCSNCGHIVEKMPLNIREWDCPNCGTHHDRDLNASKNILAAGLAVSDCGA |
| | SVRPEQSKSVKATDKKQKPKL |
| 351 | MRLVQKHLINKNHPYWSYFDQQAFLSKNLFNLANYHIRQHFFNTRTVLSFTSLYHLVSKTDAYGALPNT |
| | KVAKQIIRRVHKAWIGYKQAHKDWQRHPEKYLGEPKIPKYKYKQNGRYIVVFPDETVSKPALRKGVVK |
| | LTPCPIEFNSGLRQVNEVRVIPRSGCYVVEIVYEQDRVASTTGDATAGVDIGLVNLVTLTTNQSGVKPLLI |
| | KGGALKAINTYYNKQKAKIQSELATKYQRKSSRRLESLTFKRNCRVDNYLHTVSLYSD |
| 352 | MRTAYKCRAHPNPEQAAALSRTFGCVRLVWNKTLNDRNRRYKTENKGTSYRETDATLTIWKRSDVLG |
| | FLSEVSCVPLQQTLRHQHSAFQNFFSRRSRYPRFKSRTGRQSAHCTRSAFRMRGGSLTLAKMSTPLPFTW |
| | SFTGVDVGELNPATVIVSREPDGRWYVSFAVDVRDSAAARPANREIGLDLGLRNFVTTSDGTRVPRPRS |
| | MDRKARNLGCRTRHDRDLNAAKNILAAGRAVARGFSGDACGADVRRQGPSLPLSAVNQEAHAETLGS |
| 353 | MLTGFRYRLAPTGEQAGLCQVYGDICRAVWNTGLHQRREAVRRWQRGQDLPFCGYHLQARQLAEAK |
| | TEEEWLKAAPSHILQQTLRDLDRACRDHGTFNVRWRAKGRWKPSFRFPAGARVIVQRLGRKWGRLKLP |
| | KLGWVRFRWSRSAKGTVDAPGTHVRQKAGLNRAILARGWHGFKLACQNAARRSATRIVEVNPAYTSQ |
| | TCHPCGHVASENRESPSVFRCGACGYRAHADVNAARNTRARGWTSPSG |
| 354 | MARKKAVKVLRKQKKRENIQRFTQKQNIGRACLTAKEFRLLQSMSHSSKALRNVGLYTIKQSYLNNNK |
| | MATVKEVDTAMQADMNYWGIQSNSVQAIRRSLFTEVKSFFKGLEQWKKKPETFAGRPKFPNYSGSTDK |
| | RIIEIYQVPKVDDNGYWMIPMNVAFRKKFGSIKIRMPKNVRNKKISYIEIVPKQKGRFFEVHYTYEMHVS |
| | QMKKPSTTTSNALSCDLGVDRLLSCVTNTGDTFLIDGKKLKSINQYFNKMIRNLQLK |
| 355 | MKNSKKNEEEDNWGYRRYSIVVRKSSPDYQKIDELCFKSKNLFNATLYSQRQSYFDTGKFIKHNDLNTS |
| | FAHTNQPDYRALPAKVSKYTQKKVDQAIKSFLGLKKSKKITFTPKIPKYLKKDGRFVTEYEKDALSFKRE |
| | GFIKLSKTNIYIPIPNKLKIKGKGKDLKKVFRVVRLVPKTGYYLIEVLYKKSIPKKRKKKMTHKTRFASID |
| | LGVNNLVTVTSNVFQPLIINGRPIKSINQYYNKYRKRKQQLLPKNQYTSKAIRQLGYKREMKLNDYLHK |
| | SAAFLVNYLVSQTIDVLVIGTNKGWKQNINIGKRNN |
| 356 | MTLTERHIIRPTHPIFKRIKDFCHLSKNLYNYANFILREHYFAGFKLPTAYDLINRFVKESQRDYKALPAQ |
| | SAQQVLMLLSQNWKSYLKALKAYKLKPSSFLARPKIPKFKPKDGVSIGVLTNQQTSFTKGRMTKIKFPK |
| | KANLKRLITKINPQTSRLKQVRLIPKTTCFIVEVVYEQTTHKLPQTHGIGIMGIDLGLNNFVTAIDNQSSPFI |
| | IKGGGVKSVNQWFNKLKAHYQAKAKTSNKRFWTKRLGKLALWRECKVNDFMHKASAYVVGHCLKK |
| | GISTIVIGKNDGWKQELKLGKRTNQNFTNIPYESFIEKLAYKCALVGITLHTTEERFTSKCDHLANEPMQH |
| | HEQYLGKRVK |
| 357 | MSKKTKKKVKNLGCQQVLLHPDQELRAILEYLCGEANKVFNCSVYYARQVWFKENRFVSKSELCEQM |
| | KWNRHFNAMYASSAQQICNGVVESFSSFRQLLKLFGKGELANKPKPPNYRKPGLFTVSYPKRWLKFTN |
| | EGIRVPLGRKVKAWFGLEAFYIPMVSNLDWDSIKEIRILPRHGCFYTEFVYEMKTPVAVKLDAGQALSID |
| | HGLDNWLTCVDTQGDSFIIDGKHLKSKNQWYNKQIATIKENQPQGFWSQRLARMTEKRNRQMRDAVN |
| | TRSAISY |
| 358 | MTLTERHIIRPTHPIFKRIKDFCHLSKNLYNYANFILREHYFAGFKLPTAYDLINRFVKESQRDYKALPAQ |
| | SAQQVLMLLSQNWKSYLKALKAYKLKPSSFLARPKIPKFKPKDGVSIGVLTNQQTSFTKGRMTKIKFPK |
| | KANLKRLITKINPQTSRLKQVRLIPKTTCFIVEVVYEQTTHKLPQTHGIGIMGIDLGLNNFVTAIDNQSSPFI |
| | IKGGGVKSVNQWFNKLKAHYQAKAKTSNKRFWTKRLGKLALWRECKVNDFMHKASAYVVGHCLKK |
| | GISTIVIGKNDGWKQELKLGKRTNQNFTNIPYESFIEKLAYKCALVGITLHKTEERFTSKCDHLANEPM |
| 359 | MGTAYKCRAYPDPEQAAIFGRTFGCVRLVWNKTLAERHRAWHSHGRRTSYKETDAALTAWKKTEELA |
| | FLSEVSSVPLQQALRHQHAAFAGFFAGRARYPRFKTRTSRQSAHYTRSAFRMRDGELQMAKAISDCGW |
| | GEFRRQLEYKAHRAGRTLIVIDRWYPSSKTCSNCGHLLEKLSPSTRHWTCPGCRTRHDRDHNAAKNILA |
| | AGRAAAGARPGEVCGADVRRQGSPLPQSATKQKPPRREPRESPSFQGEEEVNHALWRGGRPPR |
| 360 | MARKKAVKVLRKQKKRETMQRFTQKQNIGRACLTAKEFRLLQRMSHSSKALRNVGLYTMKQGYLND |
| | NKMATVKEVDTAMQADMNYWGIQSNSVQAIRRALFTEVKSFFKALEQWKKNPEKFTGRPKFPNYSRST |
| | DKRIIEIYQVPKVDDNGYWTIPMNVAFRKKFGSIKIRMPKNLRNKKISYIEIVPKQKGRFFEVHYTYEMH |
| | VSQMKKPSTTTSNALSCDLGVDRLLSCVTNTGDTFLIDGKKLKSINQYFNKMIRNLQQKNMDNGISKRI |
| | VTNKMAALWHKRERQINGYISQTVGLLFKKVKAFDIDTIVVGYNMGWKQKSDMGKKNNQRFVQIPFH |
| | KLMAAIENKCVKEGIRFLKQEESYTSKASFLDKDPVPVW |
| 361 | MARKKAVKVLRKQKKRENIQRFTQKQNIGRACLTAKEFRLLQRMSHSSKALRNVGLYTMKQSYLNHS |
| | KMATVKEVDTAMQADMNYSGMQSNSVQAIRRALYAEVKSFFKALEQWKKKPEAFTGRPRFPNYSRST |
| | DKRIIEIYQVPKVDDNGYWMIPMNVAFRKKYGSIKIRMPRNIRNKKISYIEIVPKQKGRFFEVHYTYEMH |
| | VSQMKKQFTTTSNALSCDLGVDRLLSCVTNTGDAFLIDGKKLKSINQYFNKMIRNLQLENIENGLSKRV |
| | VTNEMAALWHKRERQISGYISQTVGLLFKKVKAFDIDTIVVGYNTGWKQKSDMGKKNNQKFVQIPFHK |
| | LIAAIENKC |
| 362 | MYLCIKQQLKKISKEDYENLRELSHVAKNLYNYGLYNVRQYYFEQKEYLNYEKNYAIYKNNENYKLLN |
| | SNMAQQVLKEVDGVFKSFFGLIKLAKKGKYNFRDIKLPKYLKKDGFATLVIGFVRIKGITKKQSILRNNR |
| | NNRVNDYINKTCRYIINYCLDNNIGNLVIGYNETLQRDSNLGKVNNQNFVNIPVGNIKEKLEYLCKLYGI |
| | NFVKQEESYTSKASFFDNDNIPKYNADNPIQATFSGKRIKRGLYKTKSGYAYKNKDCINF |
| 363 | MTKTKKLMGVQQCLINPDKDLKAILEYICSESNKLHNCAVYYARQIWFKTRRFVTGFDLVNELGSNKHF |
| | STLPSEAAVQTCLSVGESVKSFSELLKKSRKGELEQNPKFPKYRKQGYQLVAFPKRALRLVGNTIRFPLG |
| | LQVKAWFGLKEFFLPMPSNLDFGLLKEVRILPRNGAFYAEFVYPKANIKAELDPAKCLGIDHGLNNWLT |
| | CVSNVETSFIVDGLHLKSLNQWYNKHTSDLMEGKPNGYWTKRLANREHPKFALSRNT |
| 364 | MARKKAVKVLRKQKKRENMQRFTQKQNIGRACLTAKEFRLLQRMSHNSKALRNVGLYTIKQSYLNDN |
| | KMATIKEVDTAMQADTNYWGMQSNSVQAIRRTLFTEVKSFFKALEQWKKNPEKFTGRPKFPNYSRSTD |
| | KRIVEIYQVPKVDDNGYWMIPMNVAFRKKFGSIKIRMPKNLKNKKISYIEIVPKQKGRFFEVHYTYEMH |
| | VSQMKKPSTTTSNALSCNLGVDRLVSCVTNTGDAFLIDGKKLKSINQYFNKMICNLGQKNMDNGISKRI |
| | VTNKMAALWHKRERQINGYIAQTVGLLFKKVKEFDIDTIVIGYNAGWKQNSHMGKKNNQKFVQIPFQK |
| | LMAAIENKCIKEGIRFFKQEESYTSKASFIDKDPVPVWSKDDKTQYCFSGKRITRGLYQSKAGTCIHADIN |
| | GALNTLQKSRVVQLDDNLKVKTPILLEVQKRKAVASRIA |
| 365 | MLKGGRVQLVERHVIKKSHKYHQEIDNLCFLSKNLYNVANYLIRQKLFQSGEILNYNQVQKLFSGSVDY |
| | KAIPAKVSQQILMVLDKNWKAFQAASKSYLKNPSKFLGKPKLPKYKHKTDGRNLLIYTVQALSKPALA |
| | KGFVNPSQTNIFIPTNAKDIAQVRIVPKLDHYVVEVVYHKEIEEKQLETTRIASVDLGLNNLAAVTFNQA |
| | GLVPFLINGRPLKSINQFFNKKKAELQAILKTGTSKRLKKLCTKRNLKVDDYLHKASRYLINKLVELNIGI |
| | LVIGKNDNWKQKIAIGNRNNQNFVQVPHTRFIDQITYKAELTGIKVIVNEESYTSIASFWDQDEIPVVRSV |
| | DSKTVKAGLLDFYEIESQCPQVGISHNFKFI |
| 366 | MARKKAVKVLRKQKKRENMQRFTQKQNIGRACLTAKEFRLLQRMSHSSKALRNVGLYTMKQSYLNN |
| | NRMATVKEVDTAMQNDMNYSGIQSNSVQAIRRSLFTEVKSFFKALEQWKKNPEKFTGRPKFPNYSRST |
| | DKRIIEIYQVPKVDEKGYWMIPMNVAFRKKFGSIKIRMPKNLRNKNISYIEIVPKQKGRFFEVHYTYEMH |
| | VSQMKKQPTTTSNALSCDLGVDRLVSCVTNTGDTFLIDGKKLKSINQYFNKMICNLQQKNMDNGISKRI |
| | VTNTMAALWHKRERQINGYIAQTVGLLFKKVKEFNIDTIIVGYNAG |
| 367 | MARKKAVKVLRKQKKRETMQRFTQKQNIGRACLTAKEFRLLQRMSHSSKALRNVGLYTIKQSYLNDN |
| | KMATVKEVDTAMRADMNYSGMQSNSVQAIRRALFTEVKSFFKAMEQWKKNPEKFTGRPKFPNYSRST |
| | DKRIIEIYQVPKVDKNGYWIIPMNVAFRKKFGSIQIRMPKNVRNKKISYIEIVPKQKGRFFEVHYTYEMHV |
| | SQMKKQSTTTSNALSCDLGVDRLVSCVTNTGDTFLIDGKKLKSINQYFNKMICNLQQKNMDNGLSKRIV |
| | TNRMAALWHKRERQINGYISQTVGLLFKKVKEFDIDTIVVGYNTGWKQKSHMRKKNNQTFAQIPFHKLI |
| | VAIENKCLKEGIRFL |
| 368 | MLTGFRYRLSLTDEQAERCAEYGDICRAVWNTALDQRRQAVQRWQRGYDQLFCGYHLQATQLAETKT |
| | EETWLRAAPSHILQQTLKDLDRACRDHGTFGVRWRGKGRWKPSFRFPDPKQITVERLGRRWGHLKLPK |
| | LGWVRFRWSRAPKGAVRSATVSRDGEHWYVSLLCEDGEHTPGEHAVPDAAVGIDRGVAVAVATSDGD |
| | LFDRTLQTPKEHERERRLRRKFKLACLNAARRTGTRIVEVDPAYTSQTCNPCGHVAPENRESQSVFRCTS |
| | CGHTAHADVNAAQNTLSRGWTGSLSG |
| 369 | MIRRQAYKFQLKPNPEQIASMKSFAGACRFVYNRALTMQSDVWRNGDRYIPYNKMAPWLVEWKSQEE |
| | MSWLSNAPSQILQQSLKDLDKAFNNLFARRATFPSSKKKGKNDAFRYPTQRVKLDEANERIQLPKLGW |
| | VRYRKSRNITGVIKNVTVSMKLDKWYVSLQTESEVETPAPLQSSIIGLDTCNIECLTTSEGTDFLSQATLP |
| | KMEKSLEKSIRRLRRKKKFSCNWVKQRHKVNRLLHRISNMRKDHFHKISTVLSKNHAIVVIENLEHATS |
| | LPNRSLGKKAAAVYNIYELKRQLDYKLSWNGGQLVTVHEHDNNLKQVEADSACTAYGAIRAKKILAA |
| | GHAVIACGGVDMLRHPLKQEPSEDNGSTAILL |
| 370 | MIRRQAYKFQLKPNPEQIASMKSFAGACRFVYNRALTMQSDIWRNGDRYIPYNKMAPWLVEWKSQEE |
| | MSWLSNAPSQILQQTLKDLDKAFNNLFSRRATFPSPKKKGKNDAFRYPTQRVKLDEGNERIQLPKLGWV |
| | RYRKSRSITGVIKNVTVSMKLDKWYVSLQTEAEVDEPSSQQSSMIGLDASNIECITTSDSTDFLSQASLPK |
| | MEKSLEKNIKRLRKKKRFSSNWVKQRHKVNRLLNRISNMRKDHFHKISTTLSKNHAIVVIENLEAATSLS |
| | KRPKSTKRFLSNETYELKRQLDYKLNWNGGELMTVRERDNNFKPVSDNASSNLYGRLRAEKILAAGHA |
| | VIACGGAEFLGHPMKQEPSEDGKSTVILL |
| 371 | MIRRQAYKFQLKPTPEQIASMKSFAGACRFVYNRALTMQSDIWRNGDRYIPYNKMAPWLVEWKSQEE |
| | MSWLSNAPSQILQQSLKDLDKAFNNLFARRATFPSPKKKGKNDAFRYPTQRVKLDEGNERIQLPKLGW |
| | VRYRKSRSITGVVKNVTVSMKLDKWYVSLQTEAEVDEPSSQQSSMIGLDTSNIECITTSDSTDFLSQASLP |
| | KMEKSLEKNIKRLRKKKRFSSNWVKQRHKVNRLLNRISNMRKDHFHKISTTLSKNHAIVVIENLEAATS |
| | LSKRPKSTKRFLSNETYELTRQLDYKLIWNGGELVTVRERDNNFKPVSDDASSNHYGKLRAERILAAGH |
| | AVIACGGAELLGHPMKQEPSEDGKSTANLL |
| 372 | MIRRKAYKFQLKPNPEQIASMKSFAGACRFVYNRALTMQSDIWRNGDRYIPYNKMAPWLVEWKSQEE |
| | MSWLSNAPSQILQQSLKDLDKAFNNLFARRATFPSPKKKGRNDAFRYPTQRVKLDEGNERIQLPKLGW |
| | MRYRKSRSITGVIKNVTVSMKLDKWYVSLQTEAEVDDPSPKQSSIIGLDTSNIKCITTSDSIDFLSQASLPK |
| | MEKSLEKSLKLLRKKKRFSSNWAKQKHKVNRLLHRISNMRKDHFHKISTALSKNHAIVVIENLEDATSL |
| | SNHRKRTSGFTLNDIYELKRQLDYKLKWNGGELVTVCERDDNLKPIIDDASSNHYGRLRAEKILAAGHA |
| | VIACGGADLLGHPMKQEPSEDGKSTVILL |
| 373 | MIKKQAFKFLLEPNKGQLSDFLAFAGSCRFVYNKGLALLNENYRAGKKFIGYNKLASELVEWKNEESLS |
| | WLKEAPSQCLQQSLRDLDRAFRNFFTGKSQYPKFKKKGRHDSFRIPCQRVRVDQEKKLVSLPKVGWVK |
| | YRKSREIIGDLKNATISLNQGKWYISFNTEQTVPEPIHPSDIKTTIVLNNVNSVHLSSGVGGDNTYQAEEK |
| | KKLVRLNKTLTRRKRYSKNWLKTKGKIDRVKSKAARIRLDNIHKATTAICKNHAVVEVVNLMDSVFDK |
| | NDNTLSMRYEFVRQLIYKQEWLGGEIIRRESKLL |
| 374 | MIKKKAFKFLLEPSKSQISDVLVFAGACRFVYNKGLALLSENYNNGKPFLNYNKLAPLLVEWKSDHKFE |
| | WLKLCPSQCLQQSLRDLDRAFQNFFSGRALYPRFKKKGRSDSFRVPCQRVRLNQEKGLVSLPKLGWVK |
| | YRKSREVTGNLKNVTISKKLDKWYISFNTEEFVSEPVHPSINKTKVLLNDGYVTLCAGNEVSVESFTGIV |
| | DEKKIKRLNKELSRKVKHSNNWLKSKIKIYIIRTSSGNFRLDALHKITTAICKKHAVVEVVDVKNFVSDK |
| | NNIAKNMRYEFVRQLLYKQEWLGGKIVQLDA |
| 375 | MIKQQAFKFALKLNDQQKANMLLFAGACRFVYNKGLALLKESYESGQKHMHYNQLAPLLVEWKSDPA |
| | LSWLKQAPSQSLQQSLRDLDKAFSNFFYGKAEHPRFKKKGQHDAFRFPSQRVKVDQEKQLVLLPKLGW |
| | VKYRKSRNITGAIKNVSISGKLGNWYISFNTQTDIAEPIHPAISKIGVYVDTKKNITLSDGTQYIPPQSLITL |
| | PKQIQRLTNCLRKKNRYSNNWLKSKHRINRLSSRLNQVKVDYLHKASTAISKNHAMIVIADFEKKSFSA |
| | DKQQKNLTTCEKSTSIHYELIRQLTYKQEWHGGLVIKLSAEKNVDAESAWTKACNLLAAGLAVTACGG |
| | EVSKDSPMKQEP |
| 376 | MKRLQAFKFQLRPGGQQEREMRRFAGACRFVFNRALALQNENHEAGNKYIPYPRMASWLVEWKNATE |
| | TQWLKDAPSQPLQQSLKDLERAYKNFFQKRAAFPRFKKRGQNDAFRYPQGVKLDQESSRIFLPKLGWM |
| | RYRNSRQVTGVVKNVTVSQSCGKWYISIQTESEVSTPVHPSVSMVGLDAGVAKLATLSDGTIFDPVNSF |
| | QKNQKTLARLQRQLSRKVRFSNNWQKQKRKIQQLHSRIANIRRDYLHKVTTTVSKNHAMIVIEDLKVSN |
| | MSRSAAGTVSQPGRNVRAKSGLNRSILDQGWYEMRRQLEYKQLWRGGQVLAVPPAY |
| 377 | MKRLQAFKFQLRPGDQQECEMRRFAGACRFVFNRALALQNENHEAGNKYIPYGKMASWLVEWKNAT |
| | ETQWLKDSPSQPLQQSLKDLERAYKNFFRKRAAFPRFKKRGQNDAFRYPQGVKLDQENSRIFLPKLGW |
| | MRYRNSRQVTGVVKNVTVSQSCGKWYISIQTESEVSTPVHPSASMVGLDAGVAKLATLSDGTVFEPVN |
| | SFQKNQKTLARLQRQLSRKVKFSNNWQKQKRKIQRLHSRIANIRRDYLHKVTTTVSKNHAMIVIEDLKV |
| | SNMSKSAAGTV |
| 378 | MYYDQKKAFKFLLEPSKSQISDVLVFAGACRFVYNKGLALLSENYNNGKPFLNYNKLAPLLVEWKNDN |
| | KLEWLKFCPSQCLQQSLRDLDRAFQNFFSGRSQYPRFKKKGRSDSFRVPCQRVRLDQEKGLVSLPKLGW |
| | VKYRKSRAITGDLKNVTVSRKFDKWYISFNTEEVVSNPVHPSVDKTRILLNDGYVTLCTGGDLSVKKFT |
| | SLVDEKKIKRINKELSRKVKNSNNWLKNKKKIDKIRLKSGSFRLDAIHKITTTICKKHAVVEVVNVKNFV |
| | SDKNNIATSMRYELVRQLLYKQEWLGGKIIHLDA |
| 379 | MNDFLVFAGSCRFVYNKGLALINENYDSGKKFLNYNQLASELVNWKNEECLAWLKMAPSQCLQQSLR |
| | DLDRAFKNFFSGKSQYPRFKKKGRNDSFRVPCQRVRLDQEKHLVSLPKLGWVKYRKSREITGVLKNVTI |
| | SRKLDKWYISFNTEEVVPEPLHPSFSKTKILLNNEWLMQLTACESLVEQFANMEGNKKLRNLNNILGRK |
| | VKYSSNWLKTKKKIDGVKARSSRRRLDALHKITTAICKKHAIVELVNLTDSLPDKNNGSVSMTYEFVRQ |
| | LMYKQEWLGGKVIRLGD |
| 380 | MGSIVIKKQAFKFLLEPNKNHINEFLVFAGSCRFVYNKGLALINENYDSGKKFLNYNQLASELVNWKNE |
| | ECLAWLKMAPSQCLQQSLRDLDKAFKNFFSGKSQYPRFKKKGRNDSFRVPCQRVRLDQEKHLVSLPKL |
| | GWVKYRKSREITGVLKNVTISRKLDKWYISFNTEVVVPEPVHPSFSKAKVLLNNECIVQLTSNESLVEQF |
| | TSMEGNKKLRNLNNILGRKVKYSSNWLKTKKKIDSVKARSSRRRLDALHKITTAICKKHAIVELVNLTD |
| | SLPDKNNGFVSMGYEFVRQLMYKQEWLGGQVIRLGD |
| 381 | MRRFAGACRFVFNRALALQNENHEAGNKYIPYGKMASWLVEWKNATETQWLKDSPSQPLQQSLKDLE |
| | RAYKNFFRKRAAFPRFKKRGQNDAFRYPQGVKLDQENSRIFLPKLGWMRYRNSRQVTGVVKNVTVSQ |
| | SCGKWYISIQTESEVSTPVHPSASMVGLDAGVAKLATLSDGTVFEPVNSFQKNQKTLARLQRQLSRKVK |
| | FSNNWQKQKRKIQRLHSRIANIRRDYLHKVTTTVSKNHAMIVIEDLKVSNMSKSAAGTVSASRGAMSG |
| | QNQV |
| 382 | MKRLQAFKFQLRPGDQQECEMRRFAGACRFVFNRALALQNENHEAGNKYIPYGKMASWLVEWKNAT |
| | ETQWLKDSPSQPLQQSLKDLERAYKNFFRKRAAFPRFKKRGQNDAFRYPQGVKLDQENSRIFLPKLGW |
| | MRYRNSRQVTGVVKNVTVSQSCGKWYISIQTESEVSTPVHPSASMVGLDAGVAKLATLSDGTVFEPVN |
| | SFQKNQKTLARLQRQLSRRVKFSNNWQKQKRKIQRLHSRIANIRRDYLHKVTTTVSKNHAMIVIEDLKV |
| | SNMSKSAAGTVSQPGRNVRAKSGL |
| 383 | MKRLQAFKFQLRPGDQQECEMRRFAGACRFVFNRALALQNENHEAGNKYIPYGKMASWLVEWKNAT |
| | ETQWLKDSPSQPLQQSLKDLERAYKNFFRKRAAFPRFKKRGQNDAFRYPQGVKLDQENSRIFLPKLGW |
| | MRYRNSRQVTGVVKNVTVSQSCGKWYISIQTESEVSTPVHPSASMVGLDAGVAKLATLSDGTVFEPVN |
| | SFQKNQKTLARLQRQLSRKVKFSNNWQKQKRKIQRLHSRIANIRRDYLHKVTTTVSKNHAMIVIEDLKV |
| | SNMSKSAAGTVSQ |
| 384 | MKRLQAFKFQLRPGGQQECEMRRFAGACRFVFNRALALQNENHEAGNKYIPYGKMASWLVEWKNAT |
| | ETQWLKDAPSQPLQQSLKDLERAYKNFFQKRAAFPRFKKRGQNDAFRYPQGVKLDQENSRIFLPKLGW |
| | MRYRNSRQVTGVVKNVTVSQSCGKWYISIQTESEVSTPVHPSASMVGLDAGVAKLATLSDGTVFEPVN |
| | SFQKNQKTLARLQRQLSRKVKFSNNWQKQKCKIQRLHSRIANIRRDYLHKVTTTVSKNHAMIVIEDLKV |
| | SNMSKSAAGTVSQPGRNVRAKSGLNR |
| 385 | MIKKQAFKFLLEPNKGQLSDFLAFAGSCRFVYNKGLALLNENYRAGKKFIGYNKLASELVEWKNEERLS |
| | WLKEAPSQCLQQSLRDLDRAFRNFFTGKSQYPKFKKKGRHDSFRIPCQRVRIDQEKKLVSLPKVGWVKY |
| | RKSREIIGDLKNATISLNQGKWYISFNTEQTVPEPIHPSNIKTTIILNNVNSVHLSSGVGGDNTYQAEEKKK |
| | LVRLNKTLTRRKRYSKNWLKTKGKIDRVKSKAARIRLDNIHKATTAICKNHAVVEVVNLMDSVFDKND |
| | NTLSMRYEFVRQLIYKQEWLGGEIIRRESKLL |
| 386 | MLEPNKGQLSDFLAFAGSCRFVYNKGLALLNENYRSGKKFIGYIQLASELVEWKNEESLSWLKEAPSQC |
| | LQQSLRDLDRAFRNFFTGKSQYPKFKKKGRHDSFRIPCQRVRVDQEKKLVSLPKVGWVKYRKSREIIGD |
| | LKNATISLNQGKWYISFNTEQTVPDPIHPSDIKSTIVLNNVDSVHLSSGGGGDNTYQAEEKKKLIRLNKTL |
| | TRRKKHSQNWLKTKGKIDRVKSKAARIRLDNIHKATTAICKNHAVVEVVNLMDSVSDKNDNTLSMRYE |
| | FVRQLIYKQEWLGGEVIRRESKPL |
| 387 | MGGLPFHFVYAGPAVIKKQAFKFLLEPNKGQLSDFLAFAGSCRFVYNKGLALLNENYRSGKKFIGYNQL |
| | ASELVEWKNEESLSWLKEAPSQCLQQSLRDLDKAFRNFFTGKSQYPKFKKKGRHDSFRTPSQRVRVDQE |
| | KKLVSLPKVGWVKYRKSREIIAELKNVTISMKQGKWYISFNTEHTVPDPIHPSDIKTKIVLNNVNSVHLSS |
| | GIGGDNTSQAEEKKKLIRLNKRLARRKKHSKNWLKTKGKIDRVKSKAARLRLDNIHKATTAICKSHAVI |
| | EVVNLMGSVSDKNDNTLSMRYEFVRQLIYKQEWLGGEVIRRESKPL |
| 388 | MKRLQAFKFQLRPGGQQEREMRRFAGACRFVFNRALALQNENHEAGNKYIPYGKMASWLVEWKNAT |
| | ETQWLKDAPSQPLQQSLKDLERAYKNFFRKRAAFPRFKKRGQNDAFRYPQGVKLDQENSRIFLPKLGW |
| | MRYRNSRQVTGVVKNVTASQSCGKWYISIQTENEVSTPVHPSALMVGLDAGVAKLATLSDGTVFGPVN |
| | SFQKNQKTLARLQRQLSRKVKFSNNWQKQKRKIQRLHSCIANICRDYLHKVTTTVSKNHAMIVIEDLKV |
| | SNMSKSAAGTVSQPGRNVRAKSGLNRSILDQGWYEMRRQLEYKQLWRGGQVLAVPPAYTSQRCACCG |
| | HTAKENRLSQSKFRCQACGYT |
| 389 | MQDDLAFHQFCSVYTGPVVIKKQAFKFLLEPNKGQLSDFLAFAGSCRYVYNKGLALLNENYRSGKKFIG |
| | YNQLASELVEWKNEESLSWLKEAPSQCLQQSLRDLDRAFRNFFTGKSQYPKFKKKGRHDSFRIPCQRVR |
| | VDQEKKLVSLPKVGWVKYRKSREIIGDLKNATISLNQGEWYISFNTEQTVPDPIHPSDIKTTIVLNNVNSV |
| | HLSSGVGGDNTYQAEEKKKLIRLNKTLTRRKKYSKNWLKTKAKIDRVRSKAARIRLDNIHKATTAICKN |
| | HAVVEVVNLMDSVSAKNDNTLSMRYEFVRQLIYKQEWLGGEIIRRESKLL |
| 390 | MTLRCLLNPWRFKQAFKFLLEPNKGQLSDFLAFAGSCRFVYNKGLALLNENYRSGKKFIGYNQLASELV |
| | EWKNEESLSWLKEAPSQCLQQSLRDLDKAFRNFFTGKSQYPKFKKKGRHDSFRTPSQRVRVDQEKKLV |
| | SLPKVGWVKYRKSREIIAELKNVTISMKQGKWYISFNTEHTVPDPIHPSDIKTKIVLNNVNSVHLSSGIGG |
| | DNTSQAEEKKKLIRLNKRLARRKKHSKNWLKTKGKIDRVKSKAARLRLDNIHKATTAICKSHAVIEVVN |
| | LMGSVSDKNDNTLSMRYEFVRQLIYKQEWLGGEVIRRESKPL |
| 391 | MKALKAYKYRLYPTSKQEEFIQKTFSCVRLVYNLMLQDRIDIYKEMRKNPQQTFKMPTPAKYKKQYPV |
| | LREVDSLALANAQVYLDRAFKNFYREKGMGFPKKKKKETVHSYTTNNQHGTVKILDNRYLKVPKLKSL |
| | IKMKVHRQPLGEIKSVTISMSASHNYYVSILCEAPIETKTKQQKMVGICSSREKFALLSNGESFEKSYCSK |
| | HLKQKLRQEERKLNKRKMIALEKGVDLSQAKNYQKQKIKVAKIREKIANQRTDILNKITTELVSSYDVIC |
| | IEKAHHSNERPPKHDRSELAWSLFLAKLLYKAQWYGKELICIESEEIETELSFSESTENSEYLRSQKILERG |
| | LSKRETL |
| 392 | MLKAFKFRMYPTEEQKQQLIRTFGCARFTYNHLLKKRQKSWQQTGVANFSLTPATLKKEYPFLKEVDS |
| | LALANAQLNLDRAFRNYFKGRASFPKLKTKKSMWQSYTTNNQTRTIYLENGYLKLPKQKELIKINQHRP |
| | VEGSIRSATISARYNEEFYVALLCDVSPVKKESLAKWIGIAYHPKTLIQTSRPLEVTLPKFHQTEEKLQHA |
| | QRKLNVKVRSAHHRKIRLDQASNYQKQKRKVMDLYLKQKNQREDYLEQLSGKLVKQYDYLFVESFPK |
| | EEAHADFSIHDWHKLITKLRYKSQWYNKKFLLINTDGAEESNSVRKSQVVEKMGRHSVIKG |
| 393 | MKALKAYKYRLYPTSKQEEFIQKTFSCVRLVYNLMLQDRIDIYKEMRKNPQQTFKMPTPAQYKKQYPV |
| | LREVDSLALANAQVYLDRAFKNFYREKGMGFPKKKKKETVHSYTTNNQHGTVKILDNRYLKVPKLKSL |
| | IKMKVHRQPLGEIKSVTISMSASHNYYVSILCEAPVETKTKQQKMVGICSSREKFALLSNGESFEKSYCSK |
| | HLKQKLRQEERKLNKRKMIALEKGVDLSQAKNYQKQKIKVAKIREKIANQRTDILNKITTELVSSYDVIC |
| | IEKAHHSNERPPKHDRSELAWSLFLAKLLYKAQWYGKELICIESEEIETELSFSESTENSEYLRSQKILERG |
| | LSKRETL |
| 394 | MKLSVLKAYKFRIYPTEEQKQFFIQTFGCVRFTYNQLLKAKMEELTTNAEKEKLTPAKLKKEYPFLKET |
| | DSLALANAQRNLERAFRNYFQKRAGFPKLKTKKNIWQSYTTNNQQHTIYLVDDQLKLPKLKSFVAVKR |
| | HRPINGQIKSATISARNNTEFYISILCIEEIQPLPKNQRKIALVYHPEVLVEANAQLPFISTNAIKSQQRLARA |
| | ERKLNVKAKAVKRKKMVLSHARNYQKQKGKVSQLYRAHRDQKKEYIDQVTFHLVKQYDTIFLERLID |
| | ETCRSTGNFSVSDWHQFIRKITYKAEWYGKEVRFISLSAKECQKMTQMLRVIESETNWEERQGSPRG |
| 395 | MLKAFKFRMYPTEEQKQQLIRTFGCARFTYNHLLKKRQKSWQQTGVANFSLTPATLKKEYPFLKEVDS |
| | LALANAQLNLDRAFRNYFKGRASFPKLKTKKSMWQSYTTNNQTRTIYLENGYLKLPKQKELIKINQHRP |
| | VEGSIRSATISARYNEEFYVALLCDVSPVKKESLAKWIGIAYHPKTLIQTSRPLEVTLPKFHQTEEKLQHA |
| | QRKLNVKVRSAHHRKTRLDQASNYQKQKRKVMDLYLKQKNQREDYLEQLSGKLVKQYDYLFVESFP |
| | KEEAHADFSIHDWHKLITKLRYKSQWYNKKFLLINTDGAEESNSVRKSQVVEEMGRHSLIKG |
| 396 | MKALKAYKYRLYPTSKQEEFIQKTFSCVRLVYNLMLQDRIDIYKEMRRNPQQTFKMPTPAKYKKQYPV |
| | LREVDSLALANAQVYLDRAFKNFYREKGMGFPKKKKKETVHSYTTNNQHGTVKILDNRYLKVPKLKSL |
| | IKMKVHRQPLGEIKSVTISMSASHNYYVSILCEAPIETKTKQQKMVGICSSREKFALLSNGESFEKSYCSK |
| | HLKQKLRQEERKLNKRKMIALEKGVDLSQAKNYQKQKIKVAKIREKIANQRTDILNKITTELVSSYDVIC |
| | IEKAHHSNERPPKHDRSELAWSLFLAKLLYKAQWYGKELICIESEEIETELSFSESTENSEYLRSQKILERG |
| | LSKRETL |
| 397 | MKALKAYKYRLYPTSKQEQFIQKTFSCVRLVYNLMLQDRIDIYKEMRKNPQQTFKMPTPAKYKKQYPV |
| | LREVDSLALANAQVYLDRAFKNFYREKGMGFPKKKKKETVHSYTTNNQHGTVKILDNRYLKVPKLKSL |
| | IKMKVHRQPLGEIKSVTISMSASHNYYVSILCEAPIETKTKQQKMVGICSSREKFALLSNGESFEKSYCSK |
| | HLKQKLRQEERKLNKRKMIALEKGVDLSQAKNYQKQKIKVAKIREKIANQRTDILNKITTELVSSYDVIC |
| | IEKAHHSNERPPKHDRSELAWSLFLAKLLYKAQWYGKELICIESEEIETELSFSESTENSEYLRSQKILERG |
| | LSKRETL |
| 398 | MKALKAYKYRLYPTSKQEEFIQKTFSCVRLVYNLMLQDRIDIYKEMRKNPQQTFKMPTPAKYKKQYPV |
| | LREVDSLALANAQVYLDRAFKNFYREKGMGFPKKKKKETVHSYTTNNQHGTVKILDNRYLKVPKLKSL |
| | IKMKVHRQPLGEIKSVTISMSASHNYYVSILCEAPVETKTKQQKMVGICSSREKFALLSNGESFEKSYCSK |
| | HLKQKLRQEERKLNKRKMIALEKGVDLSQAKNYQKQKIKVAKIREKIANQRTDILNKITTELVSSYDVIC |
| | IEKAHHSNERPPKHDRSELAWSLFLAKLLYKAQWYGKELICIESEEIETELSFSESTENSEYLRSQKILERG |
| | LSKRETL |
| 399 | MKALKAYKYRLYPTSKQEEFIQKTFSCVRLVYNLMLQDRIDIYKEMRKNPQQTFKMPTPAKYKKQYPV |
| | LREVDSLALANAQVYLDRAFKNFYREKGMGFPKKKKKETVHSYTTNNQHGTVKILDNRYLKVPKLKSL |
| | IKMKVHRQPLGEIKSVTISMSASHNYYVSILCEAPIETKTKQQKMVGICSSREKFALISNGESFEKSYCSKH |
| | LKQKLRQEERKLNKRKMIALEKGVDLSQAKNYQKQKIKVAKIREKIANQRTDILNKITTELVSSYDVICIE |
| | KAHHSNERPPKHDRSELAWSLFLAKLLYKAQWYGKELICIESEEIETELSFSESTENSEYLRSQKILERGLS |
| | KRETL |
| 400 | MLKAFKFRMYPTEEQKQQLIRTFGCARFTYNHLLKKRQKSWQQTGVANFSLTPATLKKEYPFLKEVDS |
| | LALANAQLNLDRAFRNYFKGRASFPKLKTKKSMWQSYTTNNQTRTIYLENGYLKLPKQKELIKINQHRP |
| | VEGSIRSATISARYNEEFYVALLCDVSPVKKESLAKWIGIVYHPKTLIQTSRPLEVTLPKFHQTEEKLQHA |
| | QRKLNVKVRSAHHRKIRLDQASNYQKQKRKVMDLYLKQKNQREDYLEQLSGKLVKQYDYLFVESFPK |
| | EEAHADFSIHDWHKLITKLRYKSQWYNKKFLLINTDGAEESNSVRKSQVVEKMGRHSVIKG |
| 401 | MLKAFKFRMYPTEEQKQQLIRTFGCARFTYNHLLKKRQKSWQQTGVANFSLTPATLKKEYPFLKEVDS |
| | LALANAQLNLDRAFRNYFKGRASFPKLKTKKSMWQSYTTNNQTRTIYLENGYLKLPKQKELIKINQHRP |
| | VEGSIRSATISARYNEEFYVALLCDVSSVKKESLAKWIGIAYHPKTLIQTSRPLEVTLPKFHQTEEKLQHA |
| | QRKLNVKVRSAHHRKIRLDQASNYQKQKRKVMDLYLKQKNQREDYLEQLSGKLVKQYDYLFVESFPK |
| | EEAHADFSIHDWHKLITKLRYKSQWYNKKFLLINTDGAEESNSVRKSQVVEEMGRHSVIKG |
| 402 | MKLGVLKAYKFRIYPNGQQKQFFIETFGCVRFTYNQLLEAKMEELANNEAKQGLTPAKLKKEYPFLKET |
| | DSLALANAQRNLDRAFRNYFQKRAGFPKMKTKKSIWQSYTTNNQQHTIYFEDDQIKLPKLKTLVPVKK |
| | HRAIKGKIKSATISAKNNEEFYISILCLEEISPLPKQQASVAVVYDPQQLVKANQPIPITCEHAIQTKQKLTR |
| | AERKLQVKATAVKRKKILLTQARNYQKLKGKVARLYRFHCCQKREFIDQVSYHLVKQYDTIYLEQIAE |
| | DTVLKAGHYSISDWHQFVRKIQYKAQWYGKELRFVTLDTQDQQKLERLSGEMSS |
| 403 | MKALKAYKYRLYPTSKQEEFIQKTFSCVRLVYNLMLQDRIDIYKEMRKNPQQTFKMPTPAKYKKQYPV |
| | LREVDSLALANAQVYLDRAFKNFYREKGMGFPKKKKKETVHSYTTNNQHGTVKILDNRYLKVPKLKSL |
| | IKMKVHRQPLGEIKSVTISMSASHNYYVSILCEAPIETKTKQQKMVGICSSREKFALLSNGESFEKSYCSK |
| | HLKQKLRQEERKLNKRKMIALEKGVDLSQAKNYQKQKIKVAKIREKIANQRMDILNKITTELVSSYDVI |
| | CIEKAHHSNERPPKHDRSELAWSLFLAKLLYKAQWYGKELICIESEEIETELSFSESTENSEYLRSQKILER |
| | GLSKRETL |
| 404 | MKALKAYKYRLYPTSKQEEFIQKTFSCVRLVYNLMLQDRIDIYKEMRKNPQQTFKMPTPAKYKKQYPV |
| | LREVDSLALANAQVYLDRAFKNFYREKGMGFPKKKKKETVHSYTTNNQHGTVKILDNRYLKVPKLKSL |
| | IKMKVHRQPLGEIKSVTISMSASHNYYVSILCEAPIETKTKQQKMVGICSSREKFALLSNGESFEKSYCSK |
| | HLKQKLRQEERKLNKRKMIALEKGVDLSQAKNYQKQKIKVAKIREKIANQRTDILNKITTELVSNYDVIC |
| | IEKAHHSNERPPKHDRSELAWSLFLAKLLYKAQWYGKELICIESEEIETELSFSESTENSEYLRSQKILERG |
| | LSKRETL |
| 405 | MIEEEIGVRGGEMSVLKGYKFRIYPDEKQKKFFIETFGCVRFTYNHLLMARHTGTARNTTLTPASLKKEY |
| | PFLKKTDSLALANAQRNLERAFRNYFSGRAGYPKLKTKKSTWQSYTTNNQQHTVYLEGEYLKVPKLKS |
| | LVPIHLHREVRGTIKSVTISAKRNREFYASILCVEEVEELPKTNDLVGISYCPENLIQISAKKELPQIDQSHL |
| | VKQLGKEQKKLQLRAKVAKKRKVRLIHAKNYQKQKERVLKLRATKLDQKRNFIDQLTINLVRDFDYLF |
| | IESKPKFKNETGEFSEADWQQFIQRIQYKGRWYGKEIRYIEVKELKNEKCKEIERLGRAQLT |
| 406 | MEQLKAYKFRIYPTEEQEIFFAKSFGCVRKVYNLMLDDRKKAYEEVKNDSSKKMTFPTPAKYKKEFPFL |
| | KEIDSLALANAQLNLDKAYKNFFRDKSVGFPRFKSKKNPVQSYTTNNQNGTIALIDSKFIKVPKLKSLIRI |
| | KLHRQPKGMIKSATISRHSSGKYYISLLCKEEISELPKTNSAIGIDLGITDFAILSDGQKIDNNKFTSKMEKK |
| | LKREQRKLSRRALLAKQKGINLFEAKNYQKQKRKVARLHEKVMNQRTDFLNKLSTEIIKNHDIICIEDLN |
| | VKGMLRNHKLAKSISDVSWSKFVTKLQYKADWYGRKIIKVDK |
| 407 | MKLGVLKAYKFRIYPNGQQKQFFIETFGCVRFTYNQLLEAKMEELANNEAKQGLTPAKLKKEYPFLKET |
| | DSLALANAQRNLDRAFRNYFQKRAGFPKMKTKKSIWQSYTTNNQQHTIYFEDDQIKLPKLKTLVPVKK |
| | HRAIKGKIKSATISAKNNEEFYISILCLEEIPPLPKQQASVAVVYDPQQLVKANQPVPITCEHAIQTKQKLT |
| | RAERKLQVKATAVKRKKILLTQARNYQKLKGKVARLYRFHCCQKREFIDQVSYHLVKQYDTIYLEQIAE |
| | DTVLKAGHYSISDWHQFVRKIQYKAQWYGKELRFVILDTQDQQKLERLSGEMSS |
| 408 | MKALKAYKYRLYPTSKQEEFIQKTFSCVRLVYNLMLQDRIDIYKEMRKNPQQTFKMPTPAKYKKQYPV |
| | LREVDSLALANAQVYLDRAFKNFYREKGMGFPKKKKKETVHSYTTNNQHGTVKILDNRYLKVPKLKSL |
| | IKMKVHRQPLGEIKSVTISMSASHNYYVSILCEAPIETKTKQQKMVGICSSREKFALLSNGESFEKSYCSK |
| | HLKQKLRQEERKLNKRKMIVLEKGVDLSQAKNYQKQKIKVAKIREKIANQRTDILNKITTELVSSYDVIC |
| | IEKAHHSNERPPKHDRSELAWSLFLAKLLYKAQWYGKELICIESEEIETELSFSESTENSEYLRSQKILERG |
| | LSKRETL |
| 409 | MLKAFKFRMYPTEEQKQQLIRTFGCARFTYNHLLKKRQKSWQQTGVANFSLTPATLKKEYPFLKEVDS |
| | LALANAQLNLDRAFRNYFKGRASFPKLKTKKSMWQSYTTNNQTRTIYMENGYLKLPKQKELIKINQHR |
| | PVEGSIRSATISARYNEEFYVALLCDVSPVKKESLAKWIGIAYHPKTLIQTSRPLEVTLPKFHQTEEKLQH |
| | AQRKLNVKVRSAHYRKIRLDQASNYQKQKRKVMDLYLKQKNQREDYLEQLSGKLVKQYDYLFVESFP |
| | KEEAHADFSIHDWHKLITKLRYKSQWYNKKFLLINTDGAEESNSVRKSQVVEKMGRHSVIKG |
| 410 | MKALKAYKYRLYPTSKQKEFIQKTFSCVRLVYNLMLQDRIDIYKEMRKNPQQTFKMPTPAKYKKQYPV |
| | LREVDSLALANAQVYLDRAFKNFYREKGMGFPKKKKKETVHSYTTNNQHGTVKILDNRYLKVPKLKSL |
| | IKMKVHRQPLGEIKSVTISMSASHNYYVSILCEAPIETKTKQQKMVGICSSREKFALLSNGESFEKSYCSK |
| | HLKQKLRQEERKLNKRKMIALEKGVDLSQAKNYQKQKIKVAKIREKIANQRTDILNKITTELVSSYDVIC |
| | IEKAHHSNERPPKHDRSELAWSLFLAKLLYKAQWYGKELICIESEEIETELSFSESTENSEYLRSQKILERG |
| | LSKRETL |
| 411 | MKVLKAYKYRLYPTSLQEEFIKKTFSCVRLVYNLLLQERIQLYKELKENPDLKVKMPTPAQYKKEYPCL |
| | KEVDSLALANAQVYLDRAFKKFHREKAVGFPKLKQKKNAVCSYTTNNQNGTIKIIDEKYLKVPKLKSL |
| | MKMKMHRPVIGKIKSATISLTPSNKYFVSILCEEEIPAVEKTHFAIGITLGASEFAVLSNGRRFDNDKYTK |
| | EFERRITREERKLRRRKEIAKIKGTDLSQQKNYQKQKVKVVKMREKLMNQRIDFLNKITTEIVRKYDLICI |
| | EDIHQADFYRNNKLHRGVTDVSWALFVSKLEYKASWYNKRLIKVSVCHKCSEHSDNTRISKLFFHEINE |
| | KKGRQDPETAASIQVLTQGLKEATVND |
| 412 | MKALKAYKYRLYPTSKQEEFIQKTFSCVRLVYNLMLQDRIDIYKEMRKNPQQTFKMPTPAKYKKHYPV |
| | LREVDSLALANAQVYLDRAFKNFYREKGMGFPKKKKKETVHSYTTNNQHGTVKILDNRYLKVPKLKSL |
| | IKMKVHRQPLGEIKSVTISMSASHNYYVSILCEAPIETKTKQQKMVGICSSREKFALLSNGESFEKSYCSK |
| | HLKQKLRQEERKLNKRKMIALEKGVDLSQAKNYQKQKIKVAKIREKIANQRTDILNKITTELVSSYDVIC |
| | IEKAHHSNERPPKHDRSELAWSLFLAKLLYKAQWYGKELICIESEEIETELSFSESTENSEYLRSQKILERG |
| | LSKRETL |
| 413 | MKALKAYKYRLYPTSKQEQFIQKTFSCVRLVYNLMLQERIDIYKEMRKNPQQTFKMPTPAKYKKQYPV |
| | LREVDSLALANAQVYLDRAFKNFYREKGMGFPKKKKKETVHSYTTNNQHGTVKILDNRYLKVPKLKSL |
| | IKMKVHRQPLGEIKSVTISMSASHNYYVSILCEAPIETKTKQQKMVGICSSREKFALLSNGESFEKSYCSK |
| | HLKQKLRQEERKLNKRKMIALEKGVDLSQAKNYQKQKIKVAKIREKIANQRTDILNKITTELVSSYDVIC |
| | IEKAHHSNERPPKHDRSELAWSLFLAKLLYKAQWYGKELICIESEEIETELSFSESTENSEYLRSQKILERG |
| | LSKRETL |
| 414 | VKVLKAYKFRIYPNEEQIQYFIQTFGCVRFTYNQLLYARKKALQAGDYVTRLTPAQLKKDYPFLKQTDS |
| | LALANAQRNLDRAFKNYFSKRAGYPKWKSKKSHWQSYTTNNQKHTIYFIGEELKLPKLKSLVKANLHR |
| | EILGEIKSATISAKNNQLFFVSILCLENVMSLPKTGESIGVAYCSENLVQMSSTNVFLSRKSNSYYQLKTA |
| | KKRLELRAKLAKKRKVLLSQAKNYQKQKRKVQKLYMIIDNQKNDYINQLTYFLVKNYDYIYLEKHPKF |
| | SENAKFSETDWQHLLRKIQYKVSWYNKQLAFVAPDTKESEEKCFTIEQLGRQLTTS |
| 415 | MKVLKAYKYRLYPTSLQEEFIKKTFSCVRLVHNLLLQERIQLYKQLKENPDLNVKLPTPAQYKKEHPCL |
| | REVDSLALSNAQVYLDRAFKKFHREKSVGFPKLKQKKNAVNSYTTNNQNGTVKIIDGKYLKVPKLKSLI |
| | KMKMHRPVIGKIKSATISLTPSNKYFVSILCEEEIPTVEKTHSAIGITLGVSEFAVLSNGRRIDNDKYTKEFE |
| | QRITREERKLMRRKEIAKSKGTELSQQKNYQKQKLKIVKMREKLMNQRIDFLNKITTEIVRKYDLICIEDI |
| | QQADFYRNNKLHRGVTDVSWALFVSKLEYKASWYNKRLIKVSACGKCSEHSDNKELSQIFFQDINTKK |
| | SKNDPETAASVQVLIRGLQEVVQ |
| 416 | MKVLKAYKYRLYPTLLQEEFIKKTFSCVRLVHNLLLQERIQLYKELKNNPDLKVKLPTPAQYKKEHPCL |
| | KEVDSLALSNAQVYLDRAFKKFHREKTVGFPRLKQKKNAVTSYTTNNQNGTIKIIDEKYLKVPKLKSLIK |
| | MKLHRPVIGKIKSATISLTPSNKYFVSILCEEEIPKVEKTYSAIGITLGASEFAVLSNGKRIDNDKFTKEFEQ |
| | RITREERKLTRRKEIAKSKNTELSQQKNYQKQKLKVAKMREKLMNQRIDFLNKITTEIVRQYDLICIEDIH |
| | QADFFRNSKLHRGVSDVSWALFVSKLEYKAAWYKKRLIKVSACGKCSEHSDNSLVSQIFTQDINEKKGQ |
| | HDPETAASIQVLIQGLKDTKAN |
| 417 | MKVLKAYKYRLYPTLAQEEFIKKTFSCVRFVYNLLLQDRISLYKALKENPSLTVKLPTPAHYKKEHPFLK |
| | EVDSLALANAQVYLDRAFKKFHREKSVGFPKLKQKKDSVSSYTTNNQNGTIKIIDDKYVKVPKLKSVVK |
| | VKMHRPLKGKIKSATISLTPSHKYFISILCEEEVPSVAKTYSAIGITLGTSEFAVLSNGRRIDNDKYTKAFK |
| | QRIAREERKLTRRKEIAKLKGVELSQQKNYQKQKLKVAKMREKLMNQRTDFLNKITTEIVQKYDVICIE |
| | DIQQSDIYRNSKLHCGISDVSWAMFVSKLEYKATWYNKRLIKVSMCNECSEHSDNNKRSNLFIQDIDKQ |
| | KGQCDPETAASIQVLNKGLSS |
| 418 | MKVLKAYKYRLYPNPLQEEFIRKTFSCVRLVHNLLLQDRVEIYRKLKKDSKLKIKYPTPAKYKKDYPFL |
| | KEVDSLALSNAQVHLDRAFKNFHKNKSVGFPKLRQRKDSVSSYTTNNQNGTIKILDSKYLKVPKLKTLI |
| | KMKVHRPLTGEIKSATISLSPSKKYFVSLLCEEEIPKAPKTYSAVGITLGTSEFAILSNGQRIDNDKYTQNF |
| | QIRLKREEKKLIRRKEIAQSKKMDISQQKNYQKQKLKIAKMHEKLMNQRIDFLNKITTEIVTKYDVICVE |
| | DIHKEDFFRNSKLNRGITDVSWAMFISKLEYKALWYNKKIIKVSACQDSSVIVEETESKLFTPDVNKKKA |
| | LEDPEIAASVQVLSMGLNEAIAN |
| 419 | MKALKAYKYRLYPTSKQEEFIQKTFSCVRLVYNLMLQDRIDIYKEMRKNPQQTFKMPTPAKYKKQYPV |
| | LREVDSLALANAQVYLDRAFKNFYREKGMGFPKKKKKETVHSYTTNNQHGTVKILDNRYLKVPKLKSL |
| | IKMKVHRQPLGEIKSVTISMSASHNYYVSILCEAPIETKTKQQKMVGICSSREKFALLSNGESFEKSYCSK |
| | HLKQKLRQEERKLNKRKMIALEKGVDLSQAKNYQKQKIKVAKIREKIANQRTDILNKITTELVSSYDVIC |
| | IEKAHHSNERPPKHDRSELAWSLFLAKLLYKAQWYGKKLICIESEEIETELSFSESTENSEYLRSQKILERG |
| | LSKRETL |
| 420 | VHNLLLQERIKLYKQLKEDPNLKVKLPTPAQYKKEYPCLKEVDSLALSNAQVYLDRAFKKFHREKSIGF |
| | PKLKQKKDSVCSYTTNNQNGTVKIIDEKYLKVPKLKSLVRMKMHRPVIGKIKSATISLAPSNKYFVSILC |
| | EEEIPTIEKTYSAVGITLGASEFAILSNGRRIDNDKFTKEFEQRITREERKLTRRKEIAKAKGTDLSQQKNY |
| | QKQKLKVAKMREKLMNQRIDFLNKITTEIVRKYDLICIEDIHQADFYRNSKLHRGISDVSWALFVSKLEY |
| | KATWYNKRVIKVLACGKCSEHSENNVSQIFTQDINEQKGLQDPETAASINVLIQGLKETTGN |
| 421 | VHNLLLQERIQLYKELKKNPDLKVKLPTPAQFKKEHPCLKEVDSLALSNAQVYLDRAFKKFYREKSVGF |
| | PKLKQKKNAVSSYTTNNQNGTIKIIDEKYLKVPKLKSLIKMKMHRPVIGKIKSATISLTPSNKYFVSILCEE |
| | ELPRVEKTYSAIGITLGASEFAVLSNGRRIDNDKFTKEFEQRITREERKLTRRKEIAKSKGTELLQQKNYQ |
| | KQKLKVAKMREKLMNQRIDFLNKITTEIVKKYDLICIEDIHQADFFRNTKLHRGVSDVSWALFVSKLEY |
| | KATWYNKRLIKVSACGKCSEHSDNDLVSQIFTQDVNEEKGKHDPETAASIQVLIQGLKGTTAN |
| 422 | MQERVQLYKELKENPDLKVKLPTPAQYKKEHPCLKEVDSLALSNAQVYLDRAFKKFYREKSVGFPKLK |
| | QKKDSVSSYTTNNQNGTVKIIDEKYLKVPKLKSLLKMKMHRPVIGKIKSVTISLTKSNKYFVSILCEEEIPI |
| | IEKTHSAIGITLGASEFAVLSNGNRIDNDKYTKEFEQRITREERKLQRRKEIAKVKGTDLSQQKNYQKQKL |
| | KVAKMREKLMNQRVDFLNKITTEIIRKYDLICIEDIHQADVYRNNKLYRGVSDVSWALFVSKLEYKASW |
| | YNKRLIKVSACGKCSEHSDNTQVSQMFTQDINEQKGLHDPETAASIQVLIKGLKETTRK |
| 423 | MKENPDLKVKLPTPAQYKKEHPCLKEIDSLALSNAQVYLDRAFKKFHREKSVGFPKLKQKKNAVRSYT |
| | TNNQNGTIKIIDGRYLKVPKLKSLIKMKMHRQMVGKIKSATISLTPSQKYFVSILCEEEVPTVEKTYAAIGI |
| | TLGSSEFAVLSNGKRIDNDKYTKEFETRINREERKLMRRKEIAKSKGIELSQQKNYQKQKLKVAKMREK |
| | LMNQRIDFLNKVTTEIVRKYDLICIEEIHQADVFRNNKLHRGVSDVSWALFVSKLEYKASWYNKRLIKV |
| | SICGKSSEHSDNDMSSRLFFQDINEKRAMIDPETATSVQVLTQGLKEVVI |
| 424 | VHNLLLQERIQLYKKLKENPNLKVKMPTPAQYKKEHPCLREVDSLALANAQVYLDRAFKKFHREKSVG |
| | FPKLKQKKNAVCSYTTNNQNGTIKIIDEKYLKVPKLKSLMKMKMHRPVIGKIKSATISLTPSNKYFVSILC |
| | EEEIPAVEKTHFAIGITLGASEFAVLSNGRRFDNDKYTKEFERRITREERKLRRRKEIAKLKGTDLSQQKN |
| | YQKQKTKVAKMREKLMNQRIDFLNKITTEIVRKYDLICIEDIHQADFYRNNKLHRGVTDVSWALFVSKL |
| | EYKASWYNKRLVKVSVCQKCSEHSDNNRMSKIFFHDINEKKGRQDPETAASIHVLTQGLKEATVTD |
| 425 | MKLGVLKAYKFRIYPNGQQKQFFIETFGCVRFTYNQLLEAKMEELANNEAKQGLTPAKLKKEYPFLKET |
| | DSLALANAQRNLDRAFRNYFQKRAGFPKMKTKKSIWQSYTTNNQQHTIYFEEDQIKLPKLKTLVPVKK |
| | HREIKGKIKSATISAKNNEEFYISILCLEEITPLPKQQASIAIVYDPQQLVKANQPVPITCEHAIQTKQKLTR |
| | AERKLQVKATAVKRKKILLTQARNYQKLKGKVTRLYRFHCCQKREFIDQVSYHLVKQYDTIYLEQIAED |
| | TVLKAGHYSISDWHQFVRKIQYKAQWYGKELRFVTLDTQDQQKLERLSGEMSS |
| 426 | MKALKAYKYRLYPTSKQEEFIQKTFSCVRLVYNLMLQDRIDIYKEMRKNPQQTFKMPTPAKYKKQYPV |
| | LREVDSLALANAQVYLDRAFKNFYREKGMGFPKKKKKETVHSYTTNNQHGTVKILDNRYLKVPKLKSL |
| | IKMKVHRQPLGEIKSVTISMSASHNYYVSILCEAPIETKTKQQKMVGICSSREKFALLSNGESFEKSYCSK |
| | HLKQKLRQEERKLNKRKMIALEKGVDLSQAKNYQKQKIKVAKIREKIANQRTDILNKITTELVSSYDVIC |
| | IEKAHHSSERPPKHDRSELAWSLFLAKLLYKAQWYGKELICIESEEIETELSFSESTENSEYLRSQKILERG |
| | LSKRETL |
| 427 | MVYNLMLQDRIDIYKEMRKNPQQTFKMPTPAKYKKQYPVLREVDSLALANAQVYLDRAFKNFYREKG |
| | MGFPKKKKKETVHSYTTNNQHGTVKILDNRYLKVPKLKSLIKMKVHRQPLGEINSVTISMSASHNYYVS |
| | ILCEAPIETKTKQQKMVGICSSREKFALLSNGESFEKSYCSKHLKQKLRQEERKLNKRKMIALEKGVDLS |
| | QAKNYQKQKIKVAKIREKIANQRTDILNKITTELVSSYDVICIEKAHHSNERPPKHDRSELAWSLFLAKLL |
| | YKAQWYGKELICIESEEIETELSFSESTENSEYLRSQKILERGLSKRETL |
| 428 | MKALKAYKYRLYPTSKQEQFIQKTFSCVRLVYNLMLQDRIDIYKEMRKNPQQTFKMPTPAKYKKQYPV |
| | LREVDSLALANAQVYLDRAFKNFYREKGMGFPKKKKKETVHSYTTNNQHGTVKILDNRYLKVPKLKSL |
| | IKMKVHRQPLGEIKSVTISMSASHNYYVSILCEAPVETKTKQQKMVGICSSREKFALLSNGESFEKSYCSK |
| | HLKQKLRQEERKLNKRKMIALEKGFDLSQAKNYQKQKIKVAKIREKIANQRTDILNKITTELVSSYDVICI |
| | EKAHHSNERPPKHDRSELAWSLFLAKLLYKAQWYGKELICIESEEIETELSFSESTENSEYLRSQKILERGL |
| | SKRETL |
| 429 | MKVLKAYKYRLYPTSIQEEFIKKTFSCVRLVHNLLLQERIQLYKQLKENPDLKVKLPTPAQYKKEYPCLK |
| | EVDSLALSNAQVYLDRAFKKFHREKSIGFPKLKQKKDSVSSYTTNNQNGTVKIIDEKYLKVPKLKSLVK |
| | MKMHRPVIGKIKSVTISLTPSNKYFASILCEEEIPTIEKTYSAVGITLGASEFAVLSNGRRIDNDKFTKEFEQ |
| | RITREERKLTRRKEIAKAKGTDLSQQKNYQKQKLKVAKMREKLMNQRIDFLNKITTEIVRKYDLICIEDI |
| | HQADFYRNSKLHRGISDVSWALFVSKLEYKATWYNKRVIKVLACGKCSEHSENRVSQIFTQDINEQKGL |
| | QDPETAASINVLIQGLKKTTGN |
| 430 | MKVLKAYKYRLYPTALQEEFIKKTFSCVRLVHNLLLQERIQLYKELKKTPDLKVKLPTPAQFKKEHPCL |
| | REVDSLALSNAQVYLDRAFKKFYREKSVGFPKLKQKKNAVRSYTTNNQSGTIKLIDKKYLKVPKLKSLI |
| | KIKMHRPVMGKIKSATISLTPSNKYFVSILCEEEIPTVEKTYSAVGITLGASEFAVLSNGRRIDNDKFTKDF |
| | EQRITREERKLLRRKEIAKLKGNELSQQKNYQKQKLKVAKMREKLMNQRVDFLNKITTEIVRKYDLICIE |
| | DIHQADFFRNNKLHRGISDVSWALFVSKLEYKATWYNKRLVKVTSCGESSEHSDNNALSKIFTQDINEK |
| | KGQKDPETAASIQVLIKGLRDTKNG |
| 431 | MLKAFKFRMYPTEEQKQQLIRTFGCARFTYNHLLKKRQKSWQQTGVADFSLTPATLKKEYPFLKEVDS |
| | LALANAQLNLDRAFRNYFKGRASFPKLKTKKSMWQSYTTNNQTRTIYLENGYLKLPKQKELIKINQHRP |
| | VEGSIRSATISARYNEEFYVALLCDVSPVKKESLAKWIGIAYHPKTLIQTSRPLEVTLPKFHQTEEKLQHA |
| | QRKLNVKVRSAHHRKIRLDQASNYQKQKRKVMDLYLKQKNQREDYLEQLSGKLVKQYDYLFVESFPK |
| | EEAHADFSIHDWHKLITKLRYKSQWYNKKFLLINTDGAEESNSVRKSQVVEKMGRHSVIKG |
| 432 | MKVLKAYKYRLYPTLSQEVFIKKTFSCVRLVHNLLLQERIQLFKTLKEQPELKVKMPTPAQFKKEHPCL |
| | KEVDSLALSNAQVYLDRAFKKFHREKSVGFPKLKQKKDAVSSYTTNNQNGTIKIIDEKYLKVPKLKSLIK |
| | MKMHRPIIGKIKSATISLSPSNKYFVSILCEAEIPTVEKTYSAIGITLGTSEFAVLSNGRRIDNDKFTKEFEQ |
| | RITREERKLTRRKEIAKVKGTDITQQKNYQKQKLKVAKMREKLMNQRIDFLNKITTELVRKYDLICIEDI |
| | HQNDFFRNSKLHRGVSDVSWALFVSKLEYKVSWYNKRLIKVSACGKCSEHSDNTQLSQMFTQDINAKK |
| | GQNDSETAASIQVLVQGLKNIRT |
| 433 | VKVLKACKYRLYPTSSQIEFFEKTFSSVYLVHNLLLQDRINLYREAKKNPQLKQSLPTPAKYKREHPLLK |
| | EVDSLALANAQVHLERSLKRFYSGKDVGFPKMKSRKNPVMSYTTNNQNGTIKFVGLNCLKIPKLKSLIK |
| | VKMHREVKGKIKSATISKSSTGKYFVSILCEETIACQKKTNKAVGISLGCSELAVLSNGRRIDNDCLTEEIE |
| | RKIRREEKKLARKKKLASQKGLDLLEQKNYQKQKMKVAKLRERLLNQRNDFLNKVTTDLIKEYDLICIE |
| | EAHKKEFHRNCKLTKRVSDVSWSLFVSKLEYKAMWHDKRLIKIKKNDQIEATKIPTKMILDIDQELSESD |
| | TETASSIQLLLQGLNQ |
| 434 | MRVLKAYKYRLYPTSAQEEFIKKTFSCVRLVYNLLLQDRIALYKALKENPDLTVKLPTPAQYKKEHPCL |
| | KEVDSLALANAQVYLDRAFKKFHREKGVGFPKLKQKKDSVSSYTTNNQNGTIKIIDDKCIKVPKLKTPM |
| | KVKMHRPIKGKIKSATISLTPSHKYFISILCEEEVPEVEKTYSAIGITLGTSEFAVLSNGRRIDNDKYTREFE |
| | QRLAREERKLVRRKEIAKVKGIELSQQKNYQKQKLKVAKMREKLMNQRTDFLNKITTEIVRKYDVICIE |
| | DIHQTEVYRNRKLHRGISDVSWALFVSKLEYKASWYNKRLIKVSACNECSEHSENKKQSKIFLEDIDKQ |
| | KGASDPETAASIHVLNKGLSY |
| 435 | MRVLKAYKYRLYPTSAQEEFIKKTFSCVRLVYNLLLQDRIALYKALKENPDLTVKLPTPAQYKKEHPCL |
| | KEVDSLALANAQVYLDRAFKKFHREKGVGFPKMKQKKDSVSSYTTNNQNGTIKIIDDKWIKVPKLKTP |
| | MKVKMHRPIKGKIKSATISLTPSHKFFISILCEEEVLAVEKTHSAIGITLGTSEFAVLSNGRRIDNDKYTKEF |
| | EQRLIREERKLVRRKEIAKLKGTELSQQKNYQKQKLKVAKMREKLMNQRTDFLNKITTEIVHKYDVICIE |
| | DIHQSDVYRNSKLHRGISDVSWALFVSKLEYKASWYNKRLIKVSACDKCSEHSENKKRSKIFIEDIDKQK |
| | EVSDLETAASIHVLNKGLSY |
| 436 | MKLGVLKAYKFRIYPNGQQKQFFIETFGCVRFTYNQLLEAKMEELANNEAKQGLTPAKLKKEYPFLKET |
| | DSLALANAQRNLDRAFRNYFQKRAGFPKMKTKKSIWQSYTTNNQQHTIYFEEDQIKLPKLKTLVPVKK |
| | HREIKGKIKSATISAKNNEEFYISILCLEEITPLPKQQASIAVVYDPQQLVKANQPVPITCEHAIQTKQKLTR |
| | AERKLQVKATAVKRKKILLTQARNYQKLKGKVARLYRFHCCQKREFIDQVSYHLVKQYDTIYLEQIAE |
| | DTVLKAGHYSISDWHQFVRKIQYKAQWYGKELRFVILDTQDQQKLERLSGEMRS |
| 437 | MLKAFKFRMYPTEEQKQQLIRTFGCARFTYNHLLKKRQKSWQQTGVANFSLTPATLKKEYPFLKEVDS |
| | LALANAQLNLDRAFRNYFKGRASFPKLKTKKSMWQSYTTNNQTRTIYLENGYLKLPKQKELIKINQHRP |
| | VEGSIRSATISARYNEEFYVALLCDVSPVKKESLAKWIGIAYHPKTLIQTSRPLEVTLPKFHQTEEKLQHA |
| | QRKLNVKVRSAHHRKIRLDQASNYQKQKRKVMDLYLKQKNQREDYLEQLSGKLVKQYDYLFVESFPK |
| | EEAHADFSIHDWHKLITKLRYKSQWYNKKFLLINTDEAEESNSVRKSQVVEKMGRHSVIKG |
| 438 | VKVLKAYKFRIYPNEEQIQYFIQTFGCVRFTYNQLLYARKKALQAGDYVTRLTPAQLKKDYPFLKQTDS |
| | LALANAQRNLDRAFKNYFSKRAGYPKWKSKKSHWQSYTTNNQKHTIYFIGEELKLPKLKSLVKANLHR |
| | EILGEIKSATISAKNNQLFFVSILCLENVMSLPKTGESIGVAYCSENLVQMSSTNVFLSRKSNSYYQLKTA |
| | KKRLELRAKLAKKRKVLLSQAKNYQKQKRKVQKLYMIIDNQRNDYINQLTYFLVKNYDYIYLEKHPKF |
| | SENAKFSETDWQHLLRKIQYKVSWYNKQLAFVAPDTKESEEKCFTIEQLGRQLTTS |
| 439 | MKALKAYKYRLYPTSKQEQFIQKTFSCVRLVYNLMLQDRIDIYKEMRKNPQQTFKMPTPAKYKKQYPV |
| | LREVDSLALANAQVYLDRAFKNFYREKGMGFPKKKKKETVHSYTTNNQHGTVKILDNRYLKVPKLKSL |
| | IKMKVHRQPLGEIKSVTISMSASHNYYVSILCEAPIETKTKQQKMVGICSSREKFALLSNGESFEKSYCSK |
| | HLKQKLRQEERKLNKRKMIVLEKGVDLSQAKNYQKQKIKVAKIREKIANQRTDILNKITTELVSSYDVIC |
| | IEKAHHSNERPPKHDRSELAWSLFLAKLLYKAQWYGKELICIESEEIETELSFSESTENSEYLRSQKILERG |
| | LSKRETL |
| 440 | VERLKAYKFRIYPTEEQEIFFAKTFGCVRKVYNLMLNDRKKAYEEVKNDPSKKMAFPTPAKYKKEFPFL |
| | KEVDSLALANAQLHLDKAYKNFFRDKSVGFPRFKSKKNPVQSYTTNNQKGTIALIGSKFIKLPKLKSLVR |
| | IKLHRQPKGMIKSATISRHSSGKYYISLLCKEEISELPKTNSAIGIDLGITDFAILSDGQKIDNHKFTSKMEK |
| | KLKREQRKLSRRALLAKQKGINLFEAKNYQKQKRKVARLHEKVMNQRTDFLNKLSTEIIKNHDIICIEDL |
| | NVKGMLRNHKLARSISDVSWSSFVAKLQYKADWYGREIIKVNQWFPSSQICSECGHKDGKKPLDI |
| 441 | MKLGVLKAYKFRIYPNGQQKQFFIETFGCVRFTYNQLLEAKMEELANNEAKQGLTPAKLKKEYPFLKET |
| | DSLALANAQRNLDRAFRNYFQKRAGFPKMKTKKSIWQSYTTNNQQHTIYFKDDQIKLPKLKTLVPVKK |
| | HRAIKGKIKSATISAKNNEEFYISILCLEEIPQLPKQQASVAVVYDPQQLVKANQPIPITCEHAIQTKQKLT |
| | RAERKLQVKATAVKRKKILLTQARNYQKLKGKVARLYRFHCCQKREFIDQVSYHLVKQYDTIYLEQIAE |
| | DTVLKAGHYSISDWHQFVRKIQYKAQWYGKELRFVTLDTHDQQKLERLSGEMSS |
| 442 | MKLGVLKAYKFRIYPNGQQKQFFIETFGCVRFTYNQLLEAKMEELANNEAKQGLTPAKLKKEYPFLKET |
| | DSLALANAQRNLDRAFRNYFQKRAGFPKMKTKKSIWQSYTTNNQQHTIYFEDDQIKLPKLKTLVPVKK |
| | HRAIKGKIKSATISAKNNEEFYISILCLEEIPPLPKQQASVAIVYDPQQLVKANQPVPITCEHAIQTKQKLTR |
| | AERKLQVKATAVKRKKILLTQARNYQKLKGKVARLYRFHCCQKREFIDQVSYHLVKQYDTIYLEQIAE |
| | DTVLKAGHYSISDWHQFVRKIQYKAQWYGKELRFVTLDTQDQQKLERLSGEMSS |
| 443 | VKVLKGYKFRIYPNEEQIQFFIQTFGCVRFTYNCLLCARKESLQKRSYETKLSPAHLKKDYPFLKQADSL |
| | ALANAQRNLDRAFKNYFSKRMGYPKFKTKNNTWQSYTTNNQKNTIYLVGKQLKLPKLKSLVSVNLHR |
| | EVFGEIKSATISAKNNQLFFVSLLCLEEVFPLPKTGKAIGIAYCPKHLVQLTSDRSLPVYECKGVQHRLKR |
| | ANKKLELRAKVAKKRAVVVKQAKNYQKQKHKVQKLTVKKNNQKRNYIDQLTHLLVHEYDSIYLEENP |
| | HFIDNTHFLEADWHHFLRTIRYKAHWYNKKLIFVEDVKKFDEFVMN |
| 444 | MLKAFKFRMYPTEEQKQQLIRTFGCARFTYNHLLKKRQKSWQQSGVADFSLTPATLKKEYPFLKEVDSL |
| | ALANAQLNLDRAFRNYFKGRASFPKLKTKKSMWQSYTTNNQTRTIYLENGYLKLPKQKELIKINQHRPV |
| | EGSIRSATISARYNEEFYVALLCDVSPVKKESLAKWIGIAYHPKTLIQTSRPLEVTLPKFHQTEEKLQHAQ |
| | RKLNVKVRSAHHRKIRLDQASNYQKQKRKVMDLYLKQKNQREDYLEQLSGKLVKQYDYLFVESFPKE |
| | EAHADFSIHDWHKLITKLRYKSQWYNKKFLLINTDGAEESNSVRKSQVVEKMGRHSVIKR |
| 445 | MKLGVLKAYKFRIYPNGQQKQFFIETFGCVRFTYNQLLEAKMEELANNEAKQGLTPAKLKKEYPFLKET |
| | DSLALANAQRNLDRAFRNYFQKRAGFPKMKTKKSIWQSYTTNNQQHTIYFEEDQIKLPKLKTLVPVKK |
| | HREIKGKIKSATISAKNNEEFYISILCLEEITPLPKQQASIAVVYDPQQLVKANQPVPITCEHAIQTKKKLTR |
| | AERKLQVKATAVKRKKILLTQARNYQKLKGKVARLYRFHCCQKREFIDQVSYHLVKQYDTIYLEQIAE |
| | DTVLKAGHYSISDWHQFVRKIQYKAQWYGKELRFVTLDTQDQQKLERLSGEMSS |
| 446 | MKLGVLKAYKFRIYPNGQQKQFFIETFGCVRFTYNQLLEAKMEELANNEAKQGLTPAKLKKEYPFLKET |
| | DSLALANAQRNLDRAFRNYFQKRAGFPKMKTKKSIWQSYTTNNQQHTIYFEEDQIKLPKLKTLVPVKK |
| | HREIKGKIKSATISAKNNEEFYISILCLEEITPLPKQQASIAVVYDPQQLVKANQPVPITCEHAIQTKQKLIR |
| | AERKLQVKATAVKRKKILLTQARNYQKLKGKVARLYRFHCCQKREFIDQVSYHLVKQYDTIYLEQIAE |
| | DTVLKAGHYSISDWHQFVRKIQYKAQWYGKELRFVILDTQDQQKLERLSGEMSS |
| 447 | MLKAFKFRMYPTEEQKQQLIRTFGCARFTYNHLLKKRQKSWQQTGVANFSLTPATLKKEYPFLKEVDS |
| | LALANAQLNLDRAFRNYFKGRASFPKLKTKKSMWQSYTTNNQTRTIYLENGYLKLPKQKELIKINQHRP |
| | VEGSIRSATISARYNEEFYVALLCDVSPVKKESLAKWIGIAYHPKTLIQTSRPLEVTLPKFHQTEEKLQHA |
| | QRKLNVKVRSAHHRKIRLDQAGNYQKQKRKVMDLYLKQKNQREDYLEQLSGKLVKQYDYLFVESFPK |
| | EEAHADFSIHDWHKLITKLRYKSQWYNKKFLLINTDGAEESNSVRKSQVVEKMGRHSVIKG |
| 448 | MKLGVLKAYKFRIYPNGQQRQFFIETFGCVRFTYNQLLEAKMEELANNEAKQGLTPAKLKKEYPFLKET |
| | DSLALANAQRNLDRAFRNYFQKRAGFPKMKTKKSIWQSYTTNNQQHTIYFEDDQIKLPKLKTLVPVKK |
| | HRAIKGKIKSATISAKNNEEFYISILCLEEISPLPKQQASVAVVYDPQQLVKANQPIPITCEHAIQTKQKLTR |
| | AERKLQVKATAVKRKKILLTQARNYQKLKGKVARLYRFHCCQKREFIDQVSYHLVKQYDTIYLEQIAE |
| | DTVLKAGHYSISDWHQFVRKIQYKAQWYGKELRFVTLDTQDQQKLERLSGEMSS |
| 449 | MKLGVLKAYKFRIYPNGQQKQFFIETFGCVRFTYNQLLEAKMEELANNEAKQGLTPAKLKKEYPFLKET |
| | DSLALANAQRNLDRAFRNYFQKRAGFPKMKTKKSIWQSYTTNNQQHTIYFEDDQIKLPKLKTLVPVKK |
| | HRAIKGKIKSATISAKNNEEFYISILCLEEIPPLPKQQASVAVVYDPQQLVKANQPIPITCEHAIQTKQKLTR |
| | AERKLQVKATAVKRKKILLTQARNYQKLKGKVARLYRFHCCQKREFIDQVSYHLVKQYDTIYLEQIAE |
| | DTVLKAGHYSISDWHQFVRKIQYKAQWYGKELRFVTLDTQDQQKLERLSNEMSS |
| 450 | MKLGVLKAYKFRIYPNGQQKQFFIETFGCVRFTYNQLLEAKMEELANNEAKQGLTPAKLKKEYPFLKET |
| | DSLALANAQRNLDRAFRNYFQKRAGFPKMKTKKSIWQSYTTNNQQHTIYFEDDQIKLPKLKTLVPVKK |
| | HREIKGKIKSATISAKNNEEFYISILCLEEIPPLPKQQASVAVVYDPQQLVKANQPVPITCEHAIQTKQKLT |
| | RAERKLQVKATAVKRKKILLTQARNYQKLKGKVARLYRFHCCQKREFIDQVSYHLVKQYDTIYLEQIAE |
| | DTVLKAGHYSISDWHQFVRKIQYKAQWYGKELRFVILDTQDQQKLERLSGEMSS |
| 451 | MKALKAYKYRLYPTSKQEEFIQKTFSCVRLVYNLMLQDRIDIYKEMRKNPQQTFKMPTPAKYKKQYPV |
| | LREVDSLALANAQVYLDRAFKNFYREKGMGFPKKKKKETVHSYTTNNQHGTVKILDNRYLKVPKLKSL |
| | IKMKVHRQPLGEIKSVTISMSASHNYYVSILCEAPIETKTKQQKMVGICSSREKFALLSNGESFEKSYCSK |
| | HLKQKLRQEERKLNKRKMIALEKGVDLSQAKNYQKQKIKVAKIREKIANQRTDILNKITTELVSSYDVIC |
| | IEKAHHSNERPPKHYRSELAWSLFLAKLLYKAQWYGKELICIESEEIETELSFSESTENSEYLKSQKILERG |
| | LSKRETL |
| 452 | MVKILKACKYRLYPTSSQIEFFEKTFSSVYLVHNLLLQDRINLYKEAKKNPNSKKSPPTPAKYKREYPLL |
| | KEVDSLALANAQVHLERALKRYYSGKDVGFPKMKSKKNPVNSYTTNNQNGTIKFVGLNCLKIPKLKSLI |
| | KVKVHREPKGKIKSATISRSSTGKYFVSILCEETICCQKKTNRAVGISLGCSELAVLSNGRRIDNDHLTEEI |
| | ERKIQREEKKLARKKYLASAKGLDLLEQKNYQKQKMKVARLRERLLNQRNDFLNKVTTHLVKEYDLIC |
| | IEDAHKKEFNRNCKLTKRVSDVSWSLFVSKLEYKAMWHDKQLIKLKKNDDKIVTTASTEMTLDIDPELS |
| | KNDPETAASIQLLLQGLNQ |
| 453 | MKVLKAYKYRLYPTLLQEEFIKKTFSCVRLVHNLLLQERTQLYKELKNNPDLKVKLPTPAQYKKEHPCL |
| | KEVDSLALSNAQVYLDRAFKKFHREKSVGFPKLKQKKNAVTSYTTNNQNGTIKIIDEKYLKVPKLKSLIK |
| | MKLHRPVIGKIKSATISLTPSNKYFVSILCEEEIPKVEKTYSAIGITLGASEFAVLSNGKRVDNDKFTKEFE |
| | QRITREERKLTRRKEIAKSKNTELSQQKNYQKQKLKVAKMREKLMNQRIDFLNKITTEIVRKYDLICIEDI |
| | HQADFFRNSKLHRGVSDVSWALFVSKLEYKAAWYKKRLIKVSACGKCSEHSDNSLVSQIFTQDINEKKG |
| | QHDPETAASIQVLIQGLRDTKAN |
| 454 | MKVLKAYKYRLYPTLLQEEFIKKTFSCVRLVHNLLLQERIQLYKELKKNPDLKVKLPTPAHYKKEHPCL |
| | REVDSLALSNAQVYLDRAFKKFHREKSVGFPKLKQKKNAVRSYTTNNQNGTIKIIDDKYLKVPKLKSLI |
| | KMRMHRPVIGKIKSATISLTPSNKYFVSILCEEEIPRIDKTYSAIGITLGASEFVVLSNGRRIDNDKFTKEFE |
| | QRITREERKLKRRKEIAKLKGTELSRQKNYQKQKLKVAKMREKLTNQRIDFLNKITTEIVKKYDLICIEDI |
| | QQADFFRNSKLQRGFSDVSWALFVSKLEYKATWYNKRMIKVSACGKCSEHSDNNPVSQIFMQDIDEKT |
| | GRHDPETAASIQVLMQGLKEIMTY |
| 455 | MKVLKAYKYRLYPTSLQEEFIKKTFSCVRLVHNLLLQERIQLYKNLKENPNLKVKLPTPAQYKKEHPCL |
| | KEVDSLALSNAQVYLDRAFKNFHREKSVGFPKLKQKKNSVTSYTTNNQNGTVKIIDEKYLKVPKLKSLI |
| | KMKMHRPIMGKIKSATISLTPSKKYFVSILCEEDIPKVEKTYSAIGITLGASEFAVLSNGRRIDNDKYTKEF |
| | EQRITREERKLTRRKEIAKVKGIELSQQKNYQKQKLKVAKMREKLMNQRIDFLNKITTEIVRKYDLICIED |
| | IHRADFFRNNKLHRGISDVSWALFVSKLEYKASWYNKRLIKVSACGKCSEHSDNKSVSQIFIQDIDEKKG |
| | IQDPETAASIQVLVQGLKESVAN |
| 456 | MKVLKAYKYRLYPTSLQEEFIKKTFSCVRLVHNLLLQERIQLYKNLKENPGLKVKLPTPAQYKKEHPCL |
| | KEVDSLALSNAQVYLDRAFKNFHREKSVGFPKLKQKKNSVTSYTTNNQNGTIKIIDEKYLKVPKLKSLIK |
| | MKMHRPVIGKIKSATISLTPSKKYFVSILCEEDIPIVEKTYSAIGITLGASEFAVLSNGRRIDNDKYTKEFEQ |
| | RITREERKLTRRKEIAKVKGIELSQQKNYQKQKLKVAKMREKLMNQRIDFLNKITTEIVRKYDLICIEDIH |
| | RADFFRNNKLHRGISDVSWALFVSKLEYKASWYNKRLIKVSACGKCSEHSDNKRISQIFIQDIDEKKGIQ |
| | DPETAASIQVLVQGLKESVAN |
| 457 | MKVLKAYKYRLYPTSIQEEFIKKTFSCVRLVHNLLLQERIQLYKQLKENPDLKVKLPTPAQYKKEYPCLK |
| | EVDSLALSNAQVYLDRAFKKFHREKSIGFPKLKQKKDSVSSYTTNNQNGTVKIIDEKYLKVPKLKSLVK |
| | MKMHRPVIGKIKSVTISLTPSNKYFASILCEEEIPTIEKTYSAVGITLGASEFAVLSNGRRIDNDKFTKEFEQ |
| | RITREERKLTRRKEIAKAKGTDLSQQKNYQKQKLKVAKMREKLMNQRIDFLNKITTEIVRKYDLICIEDI |
| | HQADFYRNSKLHRGISDVSWALFVSKLEYKATWYNKRVIKVLACKKCSEHSENSVSQIFTQDINEQKGL |
| | QDPETAASINVLIQGLKETTGN |
| 458 | MKACKYRLYPTSSQIEFFEKTFSSVHLVHNLLLQDRIALYKEAKKNPQRKNSLPTPAKYKREYPLLKEVD |
| | SLALANAQVHLERALKRFYSGKDVGFPKMKSKKNPVTSYTTNNQKGTIKIVGLNCLKIPKLKTLIKLKV |
| | HREPKGKIKSATISRSSTGKYFVSILCEETIQCRKKTNRAVGITLGCSELAILSNGQRIDNDQLTKEIEGRIQ |
| | REEKKLARKKQLASEKGLDLLEQKNYQKQKMKVARLRERLLNQRHDFLNKVTTNLVNEYDLICIEDAH |
| | KKEFNRNCKLNKRVSDVSWSLFVSKLEYKAMWHDKQLIKLKRSCTEEPCAKPLTELLLDIDSENGKHD |
| | KEIASSIQLLFQGLNQ |
| 459 | MRVLKAYKYRLYPTSAQEEFIKKTFSCVRLVYNLLLQDRIALYKALKENPDLTVKLPTPAQYKKEHPCL |
| | KEVDSLALANAQVYLDRAFKKFHREKGVGFPKLKQKKDSVSSYTTNNQNGTIKIIDDKCIKVPKLKTPM |
| | KVKMHRPIKGKIKSATISLTPSHKYFISILCEEEVPEVEKTYSAIGITLGTSEFAVLSNGRRIDNDKYTREFE |
| | QRLAREERKLVRRKEIAKVKGTELSQQKNYQKQKLKVAKMREKLMNQRTDFLNKITTEIVRKYDVICIE |
| | DIHQTEVYRNRKLHRGISDVSWALFVSKLEYKASWYNKRLIKVSACNECSEHSENKKQSKIFLEDIDKQ |
| | KGASDPETAASIHVLNKGLSY |
| 460 | MVKVLKAYKYRLYPTPSQIEFFEKNFYSVSLVHNLLLQDRIMQYRASKKNPDLHLKPPTPAKYKKEYPF |
| | LKEADSLALANAQVYLERGLKYYYTGKNVGFPKLKSRKNPVTSYTTNNQGGTIKIIGLNYLKIPKLKTFV |
| | KVKAHREIKGKIKSATISKTPSGKYFVSLLCEEKIHCKEKTNRAVGISLGQTEFAVLSNGQKIDNDQLTDE |
| | IEQRIRREEKKLARKKHLAGRKGLDLLNQKNYQKQKMKVAKLREKLLNQRHDFLNKVTTELIDTYDVI |
| | CVEDAHKEDFCRNYKLNKRVSDVSWALFVSKLEYKATWHDKQLIKLKKCDEKMAVSLKNGLIGDVDL |
| | ELAKEDSETDASIQLLLQGLKNK |
| 461 | MKLGVLKAYKFRIYPNGQQKQFFIETFGCVRFTYNQLLEAKMEELANNEAKQGLTPAKLKKEYPFLKET |
| | DSLALANAQRNLDRAFRNYFQKRAGFPKMKTKKSIWQSYTTNNQHHTIYFEDDQIKLPKLKTVVPVKK |
| | HRAIKGKIKSATISAKNNEEFYISILCLEEIPPLPKQQASVAVVYDPQQLVKANQPIPITCEHAIQTKQKLTR |
| | AERKLQVKATAVKRKKILLTQARNYQKLKGKVARLYRFHCCQKREFIDQVSYHLVKQYDTIYLEQIAE |
| | DTVLKAGHYSISDWHQFVRKIQYKAQWYGKELRFVTLDTQDQQKLERLSGEMSS |
| 462 | MEQLKAYKFRIYPTEEQEIFFAKSFGCVRKVYNLMLDDRKKAYEEVKNDSSKKMTFPTPAKYKKEFPFL |
| | KEIDSLALANAQLNLDKAYKNFFRDKSVGFPRFKSKKNPVQSYTTNNQNGTVALIDSKFIKVPKLKSLVR |
| | IKLHRQPKGIIKSATISRHSSGKYYISLLCKEEVRELPKSNSAVGIDLGIIDFAILSDGQKIDNNKFTSKMEK |
| | KLKREQRKLSRRALLAKQKGINLFEARNYQTQKRKVARLHEKVMNQRTDFLNKLSTEIIKNHDIICIEDL |
| | NTKGMLRNHKLAKSISDVSWSSFVSKLQYKADWYGRKGSVAKF |
| 463 | VLKAYKFRIYPTNEQKEFLIQTFGCVRFTYNTLLKHHQQSGGGKSKKLTPASLKKEFLFLKVTDSLALAN |
| | AQQNLKRAFQNYYQGRSGYPKLKLKKSVWQSYTTNNQKQTIWLKDDLLKVPKLKQPIAVHCHRPVTG |
| | QIKSATIMAKNGQQFFVSLLCEEQITPLPKTNVTTTLHFSPDQLVSGSDLVFFRTLCQKNVENKLTKAKR |
| | KLEIKAKSAQQRGVKLSAAQNYQKQKVKVQQLYHHKQQQKKAWMDELSLHLIKKYDFLYIKVPHNIQ |
| | EGVFTLTDWQHFLVKLQYKATWYDKKVIFAAAEKVI |
| 464 | VWDISVLKAYKFRIYPTNEQKEFLIQTFGCVRFTYNTLLKHHQQSGGGKSKKLTPASLKKEFLFLKVTDS |
| | LALANAQQNLKRAFQNYYQGRSGYPKLKLKKSVWQSYTTNNQKQTIWLKDDLLKVPKLKQPIAVHCH |
| | RPVTGQIKSATIMAKNGQQFFVSLLCEEQITPLPKTNVTTTLHFSPDQLVSGSDLVFFRTLCQKNVENKLT |
| | KAKRKLEIKAKSAQQRGVKLSAAQNYQKQKVKVQQLYHHKQQQKKAWMDELSLHLIKKYDFLYIKVP |
| | HNIQEGVFTLTDWQHFLVKLQYKATWYDKKVIFAAAEKVI |
| 465 | IKILKAYKFRIYPDEAQQEFFIKTFGCVRFTYNTLLKLRQQNPSDESTLPEKMTGVWEKKTTATPAKLKR |
| | DYPFLKETDSLALANAQRNLTKAFQNYYRGRASYPKLKSKKNAWQSYTTNNQGHTIYLTNEGLKLPKL |
| | KSKVPIHQHRQVCGKIRSATISAKNRQEFYVSLLCEEEITALPKTGFDITITYDPIKLIGTSKVLSDRPNFCQ |
| | QRLLVQLKNAQRKLYCRGKSAQRRNVKLEQAKNYQKQKLRLQKLYIHQIKQKEDFMEQLSIALLRQFD |
| | LVTVTMPKAFESLSANHSAAIHQDCSANYKNTAVNFTIRDWNRFVLKLKYKANWYGKKLIFTDQEKVI |
| 466 | MSSCRTLNNKVDSMKNLKGYRFRIYPNEAQKRFFIETFGCVRFIYNYFLKLDTAERTSEEVITPASLKRD |
| | YPFLKKTDSLALANAKRNLDRAFQNYYQQRSGYPKLKNKSSAWQSYTTNNQNGTVRIEDGYLKLPKLK |
| | EKIQICEHRKITGKIKSVTISAKNNEEFYASILCVETIDKFEKTGKKIRLSFDEHQLVKQAKYRAEVIEPIQQ |
| | TKGRLEFLQRKLKVKARVARKQNRVLADCKNYQKQKKQYDKLLTHLNNQIKDYLNHLSIFYIKEYDVI |
| | EIVEPEDRSCAKDDLFTSNEWHQLTRLLKYKAQWYGKEIQIINCQNI |
| 467 | MLKAFKFRIYPTASQKEWFIQNFGCVRFTYNHLLKARQESYARTGAIDYSMTPATLKKKYAFLKSADSL |
| | ALANAQLNLDRAFRNYFKGRASFPKLKNKKSMWQSYTTNNQKGTIYLEDKYLKLPKQKELIQVRLHRP |
| | VEGVIRSATISARYNESFYVSLLCEVQIAGVPTTNRWLGVAYDPKKLVETSSPVEVQMPLFRQTRDKMK |
| | VAKRKLVIKSKAAQKRKARLENSRNYQKQKRKVMDLYQKQKLQKEDYLERVSGNLIRNYDYLFVEAV |
| | PSELSSADFQLQDWYKLITKLRYKAQWYNKTLLFINVNEQLNEPPEKKSMELEKIGKQVIFE |
| 468 | IQTFGCVRFTYNMLLTLRQQESGKTVEERTSARLQKQKMTPAKLKKDYPFLKATDSLALANAQRNLEK |
| | AFQNYYRGRASYPKLKSKKSAWQSYTTNNQGHTIYLAEDGLKLPKLKSKVLVHQHRSVAGKIRSATISA |
| | KNRQEFYVSLLCEEDIPALPKTGSEIEIAYDPTGLVVTNKPIVGIPTFCQTQVLEKLKKAQRRLSCRAKSA |
| | QRRNAKLEQAKNYQKQKSQVQQLYIHKLKQKEDFTEQLSIALLRQFDCIIITKPPELRENKESKAAKTVK |
| | KSKHTTVFPSFEDNFTLSDWNRLLLKLKYKAEWYEKELVFICPTNGK |
| 469 | MGKNQRKVLKAYKFRIYPTKAQQKFLIQTFGCVRFTYNTLLKQRQFNTIEASKKLTPAALKKEFPFLKLT |
| | DSLALANAQRNLARAFQNYYQGRSGHPKMKIKKSTWQSYTTNNQQQTIWLKDNLLKVPKLKQPIAVV |
| | CHRKVVGKIKSATITAKNLQQFYVSLLCEEEVCHLPKTKTEIELRFAPNQLVVGNQLKFCRQLCVNDLET |
| | KLKKAKRKLEIKAKSAQQRKVRLAEAKNYQKQKLKVQKLYHHKQQQKKAWIDELTMHLIKNYDFLY |
| | VEVPKNGIEGSFTLADWQSFLVKLQYKANWYGKKVIFLTAAKTVRKIS |
| 470 | MKKEDLVKVLKGYKFRIYPNEKQIQYFIQTFGCVRFTYNHLLHARQKALQAGDYQTQVSPASLKRDYPF |
| | LKKTDSLALANAQRNLDRAFKNYFSKRAGYPKLKTKKNNWQSYTTNNQKHTIYFVGNQLKLPKLKSL |
| | VTVNLHRKVAGEIKSATVSAQNNQMFFVSLLCLEEINPLPKTGTTIGVAYCPENLVQMSAVNRLPVYKQ |
| | ETLQYQLDKAIKRLEVRAKAAKRRKVLLEQAKNYQKQKSKVQKLYMAKNDQKKNYIDQLTCRLVHD |
| | YDCICLEKQPEFTENTKFSETDWQHFLRKIQYKARWYDKQLVFVDSIEKENETKCFTIEQVGKKLINQ |
| 471 | MLKAFKFRIYPTESQKQWLIQTFGCVRFTYNHLLKARQAYYLETKEIDYTLTPASLKKQYPFLKEVDSLA |
| | LANAQLNLDRAFRNYFKGRASFPKLKNKKSIWQSYTTNNQKGTIYLEETSIKLPKLKEKIRIHAHRPIEGT |
| | IRSATISSRYNEIFYVSLLCEVPQKTMEASNKWIGIAYDPDRLVEMSTPLDIAIPKFKQVDQQLQRAKRKL |
| | VIKGRAAQHRRAHVERVRNYQKQKRKIKDLYLKQKFQREDYFEQISGTVIRHYDYLFVESIPADCREGD |
| | FSIQDWHKLLAKLQYKAQWYSKKLVLIDMKEQTNPSTTKKSLELVEIGKQVLFE |
| 472 | MFLRKAATTEGIISEGRQVPIKTLKAYRFALYPDEAQKHFFIQTFGCVRFTYNMLLTLRQQESGKTVEER |
| | TSARLQKQKMTPAKLKKDYPFLKATDSLALANAQRNLEKAFQNYYRGRASYPKLKSKKSAWQSYTTN |
| | NQGHTIYLAEDGLKLPKLKSKVLVHQHRSVAGKIRSATISAKNRQEFYVSLLCEEDIPALPKTGSEIEIAY |
| | DPTGLVVTNKPIVGIPTFCQTQVLEKLKKAQRRLSCRAKSAQRRNAKLEQAKNYQKQKSQVQQLYIHKL |
| | KQKEDFTEQLSIALLRQFDCIIITKPPELRENKESKAAKTVKKSKHTTVFPSFEDNFTLSDWNRLLLKLKY |
| | KAEWYEKELVFICPTNGKENWHRNSSALSL |
| 473 | MARKSRAAEGQVIQYTTLKVRLYPTPAQAELFEKTFGCCRYIWNQMLSDQQMFYAETGAHFIPTPAKY |
| | KKGAPFLTEVDNQALIQEHNKLSQAFRVFFKRPEAFGHPNFKKKKTDRDSFTACNHVFESGPTIYTTRDG |
| | IRMTKAGVVKARFSRRAQAWWRLKRITVEKTKTQKYYCYILYEHSGKQPEPVIPTPETTVGLKYSMRHF |
| | YVADDGTTADPPRWLKQSQEKLVRVQQKLARMEPGSRNYEEAVQKYRLLHERIANQRRDFLHKESSRI |
| | ANGWDAVCMRDDALAEMSKGPLRKDAASSGFRMLRELLQYKLERQGKRLILLDRYAPTTRVCSVCGQ |
| | LQDSVDYGARTWTCPKCGTVHDREVNAAKNIKLEGLAQFLPTASPA |
| 474 | MKQQRAVKVELYPTDEQRILIHKTFGCVRAVWNDMLGDEQEFYAAADKHFIPTTAKYKKKRPYLSEVD |
| | SLALCNAQLALKKAFKRFFENPGHFGHPKFKTKKKAKKSYTTNCQYHVSGPTVYTAKDAIRLPKLGLV |
| | KAKLYRNTPDNWVLKSATISETKSGRIFCALLYEFDVPAPKEVLPTLENSIGLDYSSPLFYVDHENRSPDK |
| | PQWFRESEAKLAHEQRLLSHMKYGSKNYIRQLHKIEVLQEHIANQRKDFAHKESRRIANAYGAVCVEDL |
| | DLQAMAQSLNLGKATNDNGFGMFREFLKYKLEEQGKHLIKVDKWYPSSKTCHYCGGYYKDLQLGEEE |
| | WVCPHCGKHILRNQNAGINIRREGIRQFYAERAVEPVTFFESHAAAS |
| 475 | MKQQRAVKVELYPTDEQRILIHKTFGCVRAVWNDMLGDEQEFYAAADKHFIPTTAKYKKKRPYLSEVD |
| | SLALCNAQLALKKAFKRFFENPGHFGHPKFKTKKKAKKSYTTNCQYHVSGPTVYTAKDAIRLPKLGLV |
| | KAKLYRNTPDNWVLKSATISETKSGRIFCALLYEFDVPAPKEVLPTLENSIGLDYSSPLFYVDHENRSPDK |
| | PQWFRESEAKLAHEQRLLSHMKYGSKNYIRQLHKIEVLQEHIANQRKDFAHKESRRIANAYGAVCVEDL |
| | DLQAMAQSLNLGKATNDNGFGMFREFLKYKLEEQGKHLIKVDKWYPSSKTCHYCGGYYKDLQLGEEE |
| | WVCPHCGKHILRNQNAGINIRREGIRQFYAERAVEPVTFFESHVAAS |
| 476 | MCIQYNTIKVRLYPSVNQKELFQKTFGCCRYIWNQMLSDHERFYLETDVHFIPTPAKYKKSAPFLSKVD |
| | NQALIQEHNKLSQAFRNFFRNPGAFGYPRFKRKKDDRDTFTACNQFFGRSATIYITQNAVRMTKVGLVR |
| | AVFPRRPRSGWRLTRITVERTRTDKYYGYLLYACPVRPPQPVTPTEETTVGLNYSVSRFYVADDGTAAD |
| | PPRWLRQSQDKLCQIQRQLCRMQKGSKNYQEMVQKYRLLHEHIANQRRDFLHKESRRIANEWDAVCV |
| | RSDSLTALAAKTGGGCILDTGFGMFREMLRYKLERQGKSLLLVDRFRPTTKVCSVCGYVNEDLPAEALR |
| | WRCPVCGTEHRRERNAAANVKAIGLGRYRTETAAGGIG |
| 477 | MASREKQYNVLKLRLYPTSEQAELFEKTFGCCRYLWNQMLADQQRFYLETGVHFIPTPAKYKKGAPFL |
| | KEVDNQALIQEHNQLSRAFRLFFQNPEAFGHPNFKRKKDDRDSFTACNHVFTSGPTIYTTRDGIRMTKAG |
| | MIRAVFPRRPQNGWKLKRVTVEKARTGRYYAYVLYESLVQPPEPVLPAPERTLGLKYSLRHFYVDDQG |
| | NRADPPRWLKQSQEKLVHLQRRLNRMQPGSKNYEEAVLKYRLLHEHIANQRRDFLHKESRRIANAWD |
| | AVCVRGDDLGAMTDTLIRAGSAVKEAGFGMFREMLCYKLARQGKAFIQVDRYLPTTRSCSACGLTRDA |
| | LHARDYRRSGWVCPECGAVHDREVNAAKNIKARGLEQFFDLQGQNRSARPFPGVLCSALTICRPGHR |
| 478 | MASREKQYNVLKLRLYPTSEQAELFEKTFGCCRYLWNQMLADQQRFYLETGVHFIPTPAKYKKGAPFL |
| | KEVDNQALIQEHNQLSRAFRLFFQNPEAFGHPNFKRKKDDRDSFTACNHVFTSGPTIYTTRDGIRMTKAG |
| | MIRAVFPRRPQNGWKLKRVTVEKARTGRYYAYVLYESLVQPPEPVLPAPERTLGLKYSLRHFYVDDQG |
| | NRADPPRWLKQSQEKLVHLQRRLNRMQPGSKNYEEAVLKYRLLHEHIANQRRDFLHKESRRIANAWD |
| | AVCVRGDDLGAMTDTLIQAGSAVKESGFGMFREMLCYKLARQGKAFIQVDRYLPTTRSCSACGLTRDA |
| | LHARDYRRSGWVCPECGAVHDREVNAAKNIKARGLEQFFDLQGQDRSA |
| 479 | MASREKQYNVLKLRLYPTSEQAELFEKTFGCCRYLWNQMLADQQRFYLETGVHFIPTPAKYKKGAPFL |
| | KEVDNQALIQEHNQLSRAFRLFFQNPEAFGHPNFKRKKDDRDSFTACNHVFTSGPTIYTTRDGIRMTKAG |
| | MIRAVFPRRPQNGWKLKRVTVEKARTGRYYAYVLYESLVQPPEPVLPAPERTLGLKYSLRHFYVDDQG |
| | NRADPPRWLKQSQEKLVHLQRRLNRMQPGSKNYEEAVLKYRLLHEHIANQRRDFLHKESRRIANAWD |
| | AVCVRGDDLGAMTDTLIQAGSAAKEAGFGMFREMLCYKLARQGKAFIQVDRYLPTTRSCSACGLTRDA |
| | LHARDYRRSGWVCPECGAVHDREVNAAKNIKARGLEQFFDLQGQNRSA |
| 480 | MSSREKQYNVLKLRLYPTSEQAELFEKTFGCCRYLWNQMLADQQRFYLETGVHFIPTPAKYKKGAPFL |
| | KEVDNQALIQEHNQLSRAFRLFFQNPEAFGHPNFKRKKDDRDSFTACNHVFTSGPTIYTTRDGIRMTKAG |
| | MIRAVFPRRPQNGWKLKRVTVEKARTGRYYAYVLYESLVQPPEPVLPVPERTLGLKYSLRHFYVDDQG |
| | NRADPPRWLKQSQEKLVHLQRRLNRMQPGSKNYEEAVLKYRLLHEHIANQRRDFLHKESRRIANAWD |
| | AVCVRGDDLGAMTDTLIQAGSAVKEAGFGMFREMLCYKLARQGKAFIQVDRYLPTTRSCSACGLTRDA |
| | LHARDYRRSGWVCPECGAVHDREVNAAKNIKARGLEQFFDLQGQNRSA |
| 481 | MASREKQYNVLKLRLYPTSEQAELFEKTFGCCRYLWNQMLADQQRFYLETGVHFIPTPAKYKKGAPFL |
| | KEVDNQALIQEHNQLSRAFRLFFQNPEAFGHPNFKRKKDDRDSFTACNHVFTSGPTIYTTRDGIRMTKAG |
| | MIRAVFPRRPQNGWKLKRVTVEKARTGRYYAYVLYESLVQPPEPVLPALERTLGLKYSLRHFYVDDQG |
| | NRADPPRWLKQSQEKLVHLQRRLNRMQPGSKNYEEAVLKYRLLHEHIANQRRDFLHKESRRIANAWD |
| | AVCVRGDDLGAMTDTLIRAGSAVKEAGFGMFREMLCYKLARQGKAFIQVDRYLPTTRSCSACGLTRDA |
| | LHARDYRRSGWVCPECGAVHDREVNAAKNIKARGLEQFFDLQGQNRSARPFPGVLCSALTICRPGHR |
| 482 | MSSREKQYNVLKLRLYPTSEQAELFEKTFGCCRYLWNQMLADQQRFYLETGVHFIPTPAKYKKGAPFL |
| | KEVDNQALIQEHNQLSRAFRLFFQNPEAFGHPNFKRKKDDRDSFTACNHVFTSGPTIYTTRDGIRMTKAG |
| | MIRAVFPRRPQNGWKLKRVTVEKARTGRYYAYVLYESLVQPPEPVLPAPERTLGLKYSLRHFYVDDQG |
| | NRADPPRWLKQSQEKLVHLQRRLNRMQPGSKNYEEAVLKYRLLHEHIANQRRDFLHKESRRIANAWD |
| | AVCVRGDDLGAMTDTLIQAGSAVKEAGFGMFREMLCYKLARQGKAFIQVDRYLPTTRSCSACGLTRDA |
| | LHARDYRRSGWVCPECGAVHDREVNAAKNIKARGLEQFFDLQGQNRSA |
| 483 | MSTETRKSRYTVLKVPAYPTPEQAQLMEKTFGCCRYLWNQMLSDVQEFYAATDIHYIPTPARYKKQAP |
| | FLKEVDSQALCAVHQSLRKAYLDFFRNPKVFQYPKPKTKKARKDSFTVYCRPYHTGPSLRLTNAGLQM |
| | PKLGLLQVRLYRKPLHWWSLRSVTMTKTKTGKYFCSITFGYEAELPEPVIPTPARTVGLNYSMARFYVD |
| | SNGNSPELPPQMAAAREKLARMQRKLSRMQQGSKNYEAQLHKIRLQYEHIANQRRDFAHQQSRRIANA |
| | WDAVCVRDDDLNVMAQRLKGGNVPDSGFGMFRAFLRYKLEAQGKAYIDVDPYAPAAKTCHACGHVN |
| | ENLPARARSWVCPHCGEELLREENTAQNIRDFGLMAVTRQPGVA |
| 484 | MKQQRAVKVELYPTDEQCVLIHKTFGCVRAVWNDMLGDEQEFYAATDKHFIPTPAKYKKKRPYLREV |
| | DSLALCNAQQSLKKAFKNFFENPKHFGRPCFKTKKKAKKSYTTNCQYLSSGPTVFTTKDAVRLPKLGLV |
| | KAKLYRQIPDDWVLKSATISETKSGRIFCALLYEFDVPTPAEVLPTLEGSIGLDYSSPLFYVDHENRSPDK |
| | PQWFRASEAKLAHEQRLLSHMKYGSKNYIRQLHKVQVLQEHIANQRKDFAHKESRRIANACEAVCVED |
| | LDMRAMAQSLNLGKSTNDNGFGMFREFLKYKLEEQGKHLIKVDKWYPSSKTCHYCGGYYKDLQLGEE |
| | EWTCPHCGRRILRNQNAGINIRREGIRQFYAERAAADPAAQ |
| 485 | MSTETRKSRYTVLKVPAYPTPEQAQLMEKTFGCCRYLWNQMLSDVQEFYAATDIHYIPTPARYKKQAP |
| | FLKEVDSQALCAVHQSLRKAYLDFFRNPKVFQYPKPKTKKARKDSFTVYCRPYHTGPSLRLTDTGLQMP |
| | KLGLLQVRLYRKPLHWWSLRSVTITRTKTGKYFCSITFGYEAEPPEPVAPTPARTVGLNYSMARFYVDS |
| | NGHSPELPPRMAAAREKLARMQRKLSRMQQGSKNYEAQLHKIRLQYEHIANQRRDFAHQQSRRIANA |
| | WDAVCVRGDDLNVMAQRLKGGNVPDSGFGMFRAFLRYKLEAQGKAYIDVDPYAPAAKTCHACGHVN |
| | ENLPARARSWVCPHCGEELLREENTARNIRDFGLMAVTRQPGVA |
| 486 | MSSREKQYNVLKLRLYPTSEQAELFEKTFGCCRYLWNQMLADQQRFYLETGVHFIPTPAKYKKGAPFL |
| | KEVDNQALIQEHNQLSRAFRLFFQNPEAFGHPNFKRKKDDRDSFTACNHVFTSGPTIYTTRDGIRMTKAG |
| | MIRAVFPRRPQNGWKLKRVTVEKARTGRYYAYVLYESLVQSPEPVLPVPERTLGLKYSLRHFYVDDQG |
| | NRADPPRWLKQSQEKLVHLQRRLNRMQPGSKNYEEAVLKYRLLHEHIANQRRDFLHKESRRIANAWD |
| | AVCVRGDDLGAMTDTLIQAGSAVKEAGFGMFREMLCYKLARQGKAFIQVDRYLPTTRSCSACGLTRDA |
| | LHARDYRRSGWVCPECGAVHDREVNAAKNIKARGLEQFFDLQGQDRSA |
| 487 | MKMNDNRRPSAPKRTTQYNTIKIRLYPNQEQEELFQRTFGCCRYIWNRMLADHERFYYETDAHFIPTPA |
| | KYKTEAPFLKEVDHQALTQEYNKLSQAFRNFFRNPASFGYPKFKRKKDDRDSFSACNQVMGNSATIYIT |
| | QDAVRMTKAGLVRAKFPRRPRSGWKLTRITVERTKTGKYYGYLLFACPVHAPEPVKPTADTTIGLKYSL |
| | THFYVRDDGITADPPRWLRQSQDKVSSIQEKLNRMQPGSRNYREMVQKYRLLHEHIANQRRDFLHKES |
| | RRIANDWDAVCIRDDSLKAISEELGGSDIHDTGFGMFREMLRYKLDRQGKQLLEVGRFDPTTKVCSVCG |
| | AINETLSPKARHWVCPVCGAEHKRGKNAAVNIKAHGLACYQNKQVAEAVS |
| 488 | MKQQRAVKVELYPTDEQRILIHKTFGCVRAVWNDMLGDEQEFYAAADKHFIPTPAKYKKKRPYLSEVD |
| | SLALCNAQLALKKAFKRFFKNPGHFGHPKFKTKKKAKKSYTTNCQYHVSGPTVYTAKDAIRLPKLGLV |
| | KAKLYRNTHDNWVLKSATISETKSGRIFCALLYEFDVPVPKEVLPTLENSIGLDYSSPLFYVDHENRSPD |
| | KPRWFRESEAKLAHEQRMLSHMKYGSKNYIRQLRKIEVLQERIANQRKDFAHKESRRIANAYGAVCVE |
| | DLDLQAMAQSLNLGKSTNDNGFGMFREFLKYKLEEQGKHLIKVDKWYPSSKTCHYCGGYYKDLQLGE |
| | EEWICPHCGKHILRNQNAGINIRREGIRQFYAERAVEPVTFFESHVAAS |
| 489 | MARKPKVADGQVIQYTTLKVRLYPTEAQAELFEKTFGCCRYIWNRMLADQRRFYEETGAHFIPTPAKY |
| | KNGAPFLKEVDNQALTQEYNKLAQAFRVFFKSPEVFRHPKFKRKKDDRDSFTACSHEFESGPTIYTTRD |
| | GIRMTKAGIVKAKFSRRPQAWWKLKRITVSKTKAGKYYCSILYDCPVKKPEPVVPTPETTLGLKYSMGH |
| | FYVADNGEMAGPPRWLKQSREKLVRIQQKLSRMEPGSRNYEQAVQKYRLLHEHIANQRRDFLHKESSR |
| | IANGWDAVCMRDDDMREMSQKVMLGNALEAGFGTFRELLRYKLERQGKSLVLLDRYTPTTRTCSVCA |
| | MVQSGVDYTASAWTCPKCGTIHNREVNAAKNIKLEGLARLCA |
| 490 | MSSREKQYNVLKLRLYPTSEQAELFEKTFGCCRYLWNQMLADQQRFYLETGVHFIPTPAKYKKGAPFL |
| | KEVDNQALIQEHNQLSRAFRLFFQNPEAFGHPNFKRKKDDRDSFTACNHVFTSGPTIYTTRDGIRMTKAG |
| | MIRAVFPRRPQNGWKLKRVTVEKARTGRYYAYVLYESLVQPPEPVLPVPERTLGLKYSLRHFYVDDQG |
| | NRADPPRWLKQSQEKLVHLQRRLNRMQPGSKNYEEAVLKYRLLHEHIANQRRDFLHKESRRIANAWD |
| | AVCVRGDDLGAMTDTLIQAGSAVKESGFGMFREMLCYKLARQGKAFIQVDRYLPTTRSCSACGLTRDA |
| | LHARDYRRSGWVCPECGAVHDREVNAAKNIKARGLEQFFDLQGQDRSA |
| 491 | MASREKQYNVLKLRLYPTSEQAELFEKTFGCCRYLWNQMLADQQRFYLETGVHFIPTPAKYKKGAPFL |
| | KEVDNQALIQEHNQLSRAFRLFFQNPESFGHPNFKRKKDDRDSFTACNHVFTSGPTIYTTRDGIRMTKAG |
| | MIRAVFPRRPQNGWKLKRVTVEKARTGRYYAYVLYESLVQPPEPVLPVPERTLGLKYSLRHFYVDDQG |
| | NRADPPRWLKQSQEKLVHLQRRLNRMQPGSKNYEEAVLKYRLLHEHIANQRRDFLHKESRRIANAWD |
| | AVCVRGDDLGAMTDTLIQAGSAVKEAGFGMFREMLCYKLARQGKAFIQVDRYLPTTRSCSACGLTRDA |
| | LHARDYRRSGWVCPECGAVHDREVNAAKNIKARGLEQFFDLQGQNRSA |
| 492 | MKVRLYPSVNQKELFQKTFGCCRYIWNQMLSDHERFYLETDVHFIPTPAKYKKSAPFLSKVDNQALIQE |
| | HNKLSQAFRNFFRNPGAFGYPRFKRKKDDRDTFTACNQFFGRSATIYITQNAVRMTKVGLVRAVFPRRP |
| | RSGWRLTRITVERTRTDKYYGYLLYACPVRPPQPVTPTEETTVGLNYSVSRFYVADDGTAADPPRWLRQ |
| | SQDKLCQIQRQLCRMQKGSKNYQEMVQKYRLLHEHIANQRRDFLHKESRRIANEWDAVCVRSDSLTAL |
| | AAKTGGGCILDTGFGMFREMLRYKLERQGKSLLLVDRFRPTTKVCSVCGYVNEDLPAEALRWRCPVCG |
| | TEHRRERNAAANVKAIGLGRYRTETAAGGIG |
| 493 | MSSREKQYNVLKLRLYPTSEQAELFEKTFGCCRYLWNQMLADQQRFYLETGVHFIPTPAKYKKGAPFL |
| | KEVDNQALIQEHNQLSRAFRLFFQNPEAFGHPNFKRKKDDRDSFTACNHVFTSGPTIYTTRDGIRMTKAG |
| | MIRAVFPRRPQNGWKLKRVTVEKARTGRYYAYVLYESLVQPPEPVLPVPERTLGLKYSLRHFYVDDQG |
| | NRADPPRWLKQSQEKLVHLQRRLNRMQPGSKNYEEAVLKYRLLHEHIANQRRDFLHKESRRIANAWD |
| | AVCVRGDDLGTMTDTLIQAGSAVKESGFGMFREMLCYKLARQGKAFIQVDRYLPTTRSCSACGLTRDA |
| | LHARDYRRSGWVCPECGAVHDREVNAAKNIKARGLEQFFDLQGQDRSA |
| 494 | MNRAVKIRIYPNKEQRVQIEQTIGCSRFIYNQMLADKISYYQKEKKMLRNTPAGYKKEYPWLKEVDSLA |
| | LANAQLHLESAFRKFFREPACGFPRYKSKKHVRNSYTTNALNGNILLQDTHLKLPKMSVIRIKLHRQIPS |
| | DWKLKSVTVSREPSGKYFASLLFCCEDQTVEKRPAERFLGIDFAMQGMCVFSTGERAGYPMFYRKAEK |
| | KLAREQRKLSHCEKESRNYQKQKKRAALCHEKIKNQRKDFQHKLSRELAERYDAVCVEDLNLKGMSG |
| | GLHLGKGVQDNGYGQFLFMLGYKLEECGKHLIKVDRYFASSKICSVCGHKKKELALSDRMYVCECGN |
| | RMDRYVNAAVNIREEGKRIYKECA |
| 495 | MGHRETVGQAIQYNTIKVRLYPSVNQKELFQKTFGCCRYIWNQMLSDHERFYLETDVHFIPTPAKYKKS |
| | APFLSKVDNQALIQEHNKLSQAFRNFFRNPGAFGYPRFKRKKDDRDTFTACNQFFGRSATIYITQNAVR |
| | MTKVGLVRAVFPRRPRSGWRLTRITVERTRTDKYYGYLLYACPVRPPQPVTPTEETTVGLNYSVSRFYV |
| | ADDGTAADPPRWLRQSQDKLCQIQRQLCRMQKGSKNYQEMVQKYRLLHEHIANQRRDFLHKESRRIA |
| | NEWDAVCVRSDSLTALAAKTGGGCILDTGFGMFREMLRYKLERQGKSLLLVDRFRPTTKVCSVCGYVN |
| | EDLPAEALRWRCPVCGTEHRRERNAAANVKAIGLGRYRTETAAGGIG |
| 496 | MGHRETVGQAIQYNTIKVRLYPSVNQKELFQKTFGCCRYIWNQMLSDHERFYLETDVHFIPTPAKYKKS |
| | APFLSKVDNQALIQEHNKLSQAFRNFFRNPGAFGYPRFKRKKDDRDTFTACNQFFGRSATIYITQNAVR |
| | MTKVGLVRAVFPRRPRSGWRLTRITVERTRTDKYYGYLLYACPVRPPQPVTPTEETTVGLNYSVSRFYV |
| | ADDGTAADPPRWLRQSQDQLCQIQRQLCRMQKGSKNYQEMVQKYRLLHEHIANQRRDFLHKESRRIA |
| | NEWDAVCVRSDSLTALAAKTGGGCILDTGFGMFREMLRYKLERQGKSLLLVDRFRPTTKVCSVCGYVN |
| | EDLPAEALRWRCPVCGTEHRRERNAAANVKAIGLGRYRTETAAGGIG |
| 497 | MASREKQYNVLKLRLYPTSEQAELFEKTFGCCRYLWNQMLADQQRFYLETGVHFIPTPAKYKKGAPFL |
| | KEVDNQALIQEHNQLSRAFRLFFQNPEAFGHPNFKRKKDDRDSFTACNHVFTSGPTIYTTRDGIRMTKAG |
| | MIRAVFPRRPQNGWKLKRVTVEKARTGRYYAYVLYESLVQPPEPVLPVPERTLGLKYSLRHFYVDDQG |
| | NRADPPRWLKQSQEKLVHLQRRLNRMQPGSKNYEEAVLKYRLLHEHIANQRRDFLHKESRRIANAWD |
| | AVCVRGDDLGAMTDTLIQAGSTVKEAGFGMFREMLCYKLARQGKAFIQVDRYLPTTRSCSACGLTRDA |
| | LHARDYRRSGWVCPECGAVHDREVNAAKNIKARGLEQFFDLQGQDRSA |
| 498 | MASREKQYNVLKLRLYPTSEQAELFEKTFGCCRYLWNQMLADQQRFYLETGVHFIPTPAKYKKGAPFL |
| | KEVDNQALIQEHNQLSRAFRLFFQNPEAFGHPNFKRKKDDRDSFTACNHVFTSGPTIYTTRDGIRMTKAG |
| | MIRAVFPRRPQNGWKLKRVTVEKARTGRYYAYVLYESLVQPPEPVLPAPERTLGLKYSLRHFYVDDQG |
| | NRADPPRWLKQSQEKLVHLQRRLNRMQPGSKNYEEAVLKYRLLHEHIANQRRDFLHKESRRIANAWD |
| | AVCVRGDDLGAMTDTLIQAGSAVKEAGFGMFREMLCYKLARQGKAFIQVDRYLPTTRSCSACGLTRDA |
| | LHARDYRRSGWVCPECGAVHDREVNAAKNIKARGLEQFFDLQGQDRSA |
| 499 | MYGKGAARKGGKTQYTTIKVRLEPTAEQAELFEKTFGCCRYIWNQMLADQQRFYAETDAHFIPTPAKY |
| | KKEAPFLKEVDNQALIQEHNKLSQAFRVFFKNPESFGYPHFKRKKNDRDSFTACNHVFESGPTIYLTKNG |
| | IRMTKAGIVRARFHRRPQNGWDLKRITVEKTRAGKYYCCILYAYAAEEPEPVVPAPETTVGLNYSVSHF |
| | YAADDGSTADPPRWMKQSQEKLVRLQRRLSRMQPGSQNYREAVRKYRLLHEHIANQRLDFVHKESRRI |
| | ANAWEAVCVRGDDLGDIARKLVYGNALESGYGMFRECLRYKLERQGKPLIVVDRYAPTARTCSACGL |
| | VRDAVGLKEDLWTCPKCGAAHRREVNAAKNIKAQGLARYFGSQERRVSA |
| 500 | MAAKRSKSETLRYTTLKVRLYPSAEQAALFEKTFGCCRYIWNQMLADQQRFYIETDKFFIPTPAKYKAG |
| | APFLKEVDNQALIQEHNKLGQAFRVFFKSPENFGYPKFKRKKDDRDSFTVCNHVMGNSETVYTTRDGL |
| | RMTKAGIVRAKFPRRPQGWWKLKRVTVDRTRSGKYYGYILYECPEKKPEVVVPTPETTVGLKYSMARF |
| | YVADTGETADPPHWLKQSQEKLARIQQRLNRMRPGSKNYQETVQKYRLLHEHIANQRRDFIHKESRRIA |
| | NAWDAVCVRGDDMEQISRITNRGNALEAGFGMFRECLRYKLARQGKELLVVDRYFPSTRTCSACGRV |
| | MPEEISMKRRTWTCPQCGAVLKREANAARNIKDQGLAQYFSTRERRESA |
| 501 | MASREKQYNVLKLRLYPTSEQAELFEKTFGCCRYLWNQMLADQQRFYLETGVHFIPTPAKYKKGAPFL |
| | KEVDNQALIQEHNQLSRAFRLFFQNPEAFGHPNFKRKKDDRDSFTACNHVFTSGPTIYTTRDGIRMTKAG |
| | MIRAVFPRRPQNGWKLKRVTVEKARTGRYYAYVLYESLVQPPEPVLPVPERTLGLKYSLRHFYVDDQG |
| | NRADPPRWLKQSQEKLVHLQRRLNRMQPGSKNYEEAVLKYRLLHEHIANQRRDFLHKESRRIANAWD |
| | AVCVRGDDLGAMTDTLIQAGSAVKEAGFGMFREMLCYKLARQGKAFIQVDRYLPTTRSCSACGLTRDA |
| | LHARDYRRSGWVCPECGAVHDREVNAAKNIKARGLEQFFDLQGQNRSA |
| 502 | MSSREKQYNVLKLRLYPTSEQAELFEKTFGCCRYLWNQMLADQQRFYLETGVHFIPTPAKYKKGAPFL |
| | KEVDNQALIQEHNQLSRAFRLFFQNPEAFGHPNFKRKKDDRDSFTACNHVFTSGPTIYTTRDGIRMTKAG |
| | MIRAVFPRRPQNGWKLKRVTVEKARTGRYYAYVLYESLVQPPEPVLPAPERTLGLKYSLRHFYVDDQG |
| | NRADPPRWLKQSQEKLVHLQRRLNRMQPGSKNYEEAVLKYRLLHEHIANQRRDFLHKESRRIANAWD |
| | AVCVRGDDLGAMTDTLIQAGSAVKEAGFGMFREMLCYKLARQGKAFIQVDRYLPTTRSCSACGLTRDA |
| | LHARDYRRSGWVCPECGAVHDREVNAAKNIKARGLEQFFDLQGQDRSA |
| 503 | MASREKQYNVLKLRLYPTSEQAELFEKTFGCCRYLWNQMLADQQRFYLETGVHFIPTPAKYKKGAPFL |
| | KEVDNQALIQEHNQLSRAFRLFFQNPEAFGHPNFKRKKDDRDSFTACNHVFTSGPTIYTTRDGIRMTKAG |
| | MIRAVFPRRPQNGWKLKRVTVEKARTGRYYAYVLYESLVQPPEPVLPVPERTLGLKYSLRHFYVDDQG |
| | NRADPPRWLKQSQEKLVHLQRRLNRMQPGSKNYEEAVLKYRLLHEHIANQRRDFLHKESRRIANAWD |
| | AVCVRGDDLGAMTDTLIQAGSAVKEAGFGMFREMLCYKLARQGKAFIQVDRYLPTTRSCSACGLTRDA |
| | LHARDYRRSGWVCPECGAVHDREVNAAKNIKARGLEQFFDLQGQDRSA |
| 504 | MVGRSQSSHVQAGKTSLYTTIKARLYPTAEQAELFEKTFGCCRFIWNRMLSDQQKFYDETGAHFIPTPA |
| | KYKDGAPFLKEVDNQALIQTHNQLSQAFRIFFKNPEHFGHPRFKRKKDGRDAFTACNHVFSSGPTIYLTR |
| | DGIRMTKAGVVKAKFPRRPRNGWKLKRITVSKTRTGTYNCSIVFEYPAPAPQPIPPTPERTIGLKYSVSHF |
| | YVADNGAMADPPHWLKLTQEKLARLQQRMARMTPGSRNYEEAVQKYRLLHEHIANQRRDYIHKESRR |
| | IANAWDAVCVRADDLADGNRAMKLSNGLELGFGMFRACLDYKLSRQGKSLLMVERCAPTSRQCHSCG |
| | YLLPEGVDYRREQWRCPACGAALQREINAAQNIKTAGLRQVLTTQKSA |
| 505 | MSTETRKSRYTVLKVPAYPTPEQAQLMEKTFGCCRYLWNQMLSDVQEFYAATDIHYIPTPARYKKQAP |
| | FLKEVDSQALCAVHQSLRKAYLDFFRNPKVFQYPKPKTKKARKDSFTVYCRPYHTGPSLRLTDAGLQM |
| | PKLGLLQVRLYRKPLHWWSLRSVTMTKTKTGKYFCSITFGYEAELPEPVIPTPARTVGLNYSMSRFYVD |
| | SNGHSPELPPQMAAAREKLARMQRKLSRMQQGSKNYEAQLHKIRLQYERIANQRRDFAHQQSRRIANA |
| | WDAVCVRGDDLNVMAQRLKGGNVPDSGFGMFRAFLRYKLEAQGKAYIDVDPYAPAAKTCHACGHVN |
| | ENLPARARSWVCPLCGEELLREENTAQNIRDFGLMAVTRQPGVA |
| 506 | MASREKQYNVLKLRLYPTSEQAELFEKTFGCCRYLWNQMLADQQRFYLETGVHFIPTPAKYKKGAPFL |
| | KEVDNQALIQEHNQLSRAFRLFFQNPEAFGHPNFKRKKDDRDSFTACNHVFTSGPTIYTTRDGIRMTKAG |
| | MIRAVFPRRPQNGWKLKRVTVEKARTGRYYAYVLYESLVQPPEPVLPAPERTLGLKYSLRHFYVDDQG |
| | NRADPPRWLKQSQEKLVHLQRRLNRMQPGSKNYEEAVLKYRLLHEHIANQRRDFLHKESRRIANAWD |
| | AVCVRGDDLGAMTDTLIQAGSTVKEAGFGMFREMLCYKLARQGKAFIQVDRYLPTTRSCSACGLTRDA |
| | LHARDYRRSGWVCPECGAVHDREVNAAKNIKARGLEQFFDLQGQDRSA |
| 507 | MASREKQYNVLKLRLYPTSEQAELFEKTFGCCRYLWNQMLADQQRFYLETGVHFIPTPAKYKKGAPFL |
| | KEVDNQALIQEHNQLSRAFRLFFQNPEAFGHPNFKRKKDDRDSFTACNHVFTSGPTIYTTRDGIRMTKAG |
| | MIRAVFPRRPQNGWKLKRVTVEKARTGRYYAYVLYESLVQPPEPVLPAPERTLGLKYSLRHFYVDDQG |
| | NRADPPRWLKQSQEKLVHLQRRLNRMQPGSKNYEEAVLKYRLLHEHIANQRRDFLHKESRRIANAWD |
| | AVCVRGDDLGAMTDTLIQAGSAVKEAGFGMFREMLCYKLARQGKAFIQVDRYLPTTRSCSACGLTRDA |
| | LHARDYRRSGWVCPECGAVHDREVNAAKNIKARGLEQFFDLQGQNRSA |
| 508 | MASREKQYNVLKLRLYPTSEQAELFEKTFGCCRYLWNQMLADQQRFYLETGVHFIPTPAKYKKGAPFL |
| | KEVDNQALIQEHNQLSRAFRLFFQNPEAFGHPNFKRKKDDRDSFTACNHVFTSGPTIYTTRDGIRMTKAG |
| | MIRAVFPRRPQNGWKLKRVTVEKARTGRYYAYVLYESLVQSPEPVLPVPERTLGLKYSLRHFYVDDQG |
| | NRADPPRWLKQSQEKLVHLQRRLNRMQPGSKNYEEAVLKYRLLHEHIANQRRDFLHKESRRIANAWD |
| | AVCVRGDDLGAMTDTLIQAGSAVKEAGFGMFREMLCYKLARQGKAFIQVDRYLPTTRSCSACGLTRDA |
| | LHARDYRRSGWVCPECGAVHDREVNAAKNIKARGLEQFFDLQGQNRSA |

fliC-associated TldRs

| | Predicted | Predicted ωRNA | Predicted |
|---|---|---|---|
| TldR | ωRNA | right end | guide |
| SEQ ID NO | SEQ ID NO | SEQ ID NO | SEQ ID NO |
| 1 | 509 | 598 | 687 |
| 1 | 510 | 599 | 688 |
| 3 | 511 | 600 | 689 |
| 8 | 512 | 601 | 690 |
| 11 | 513 | 602 | 691 |
| 11 | 514 | 603 | 692 |
| 13 | 515 | 604 | 693 |
| 13 | 516 | 605 | 694 |
| 13 | 517 | 606 | 695 |
| 15 | 518 | 607 | 696 |
| 16 | 519 | 608 | 697 |
| 16 | 520 | 609 | 698 |
| 17 | 521 | 610 | 699 |
| 17 | 522 | 611 | 700 |
| 17 | 523 | 612 | 701 |
| 20 | 524 | 613 | 702 |
| 21 | 525 | 614 | 703 |
| 22 | 526 | 615 | 704 |
| 22 | 527 | 616 | 705 |
| 23 | 528 | 617 | 706 |
| 23 | 529 | 618 | 707 |
| 24 | 530 | 619 | 708 |
| 24 | 531 | 620 | 709 |
| 32 | 532 | 621 | 710 |
| 34 | 533 | 622 | 711 |
| 35 | 534 | 623 | 712 |
| 36 | 535 | 624 | 713 |
| 37 | 536 | 625 | 714 |
| 45 | 537 | 626 | 715 |
| 46 | 538 | 627 | 716 |
| 49 | 539 | 628 | 717 |
| 49 | 540 | 629 | 718 |
| 54 | 541 | 630 | 719 |
| 56 | 542 | 631 | 720 |
| 57 | 543 | 632 | 721 |
| 58 | 544 | 633 | 722 |
| 59 | 545 | 634 | 723 |
| 60 | 546 | 635 | 724 |
| 61 | 547 | 636 | 725 |
| 62 | 548 | 637 | 726 |
| 72 | 549 | 638 | 727 |
| 72 | 550 | 639 | 728 |
| 73 | 551 | 640 | 729 |
| 74 | 552 | 641 | 730 |
| 75 | 553 | 642 | 731 |
| 79 | 554 | 643 | 732 |
| 86 | 555 | 644 | 733 |
| 87 | 556 | 645 | 734 |
| 95 | 557 | 646 | 735 |
| 100 | 558 | 647 | 736 |
| 104 | 559 | 648 | 737 |
| 106 | 560 | 649 | 738 |
| 111 | 561 | 650 | 739 |
| 113 | 562 | 651 | 740 |
| 235 | 563 | 652 | 741 |
| 240 | 564 | 653 | 742 |
| 241 | 565 | 654 | 743 |
| 243 | 566 | 655 | 744 |
| 243 | 567 | 656 | 745 |
| 254 | 568 | 657 | 746 |
| 269 | 569 | 658 | 747 |
| 275 | 570 | 659 | 748 |
| 283 | 571 | 660 | 749 |
| 285 | 572 | 661 | 750 |
| 291 | 573 | 662 | 751 |
| 292 | 574 | 663 | 752 |
| 293 | 575 | 664 | 753 |
| 296 | 576 | 665 | 754 |
| 297 | 577 | 666 | 755 |
| 312 | 578 | 667 | 756 |
| 342 | 579 | 668 | 757 |
| 344 | 580 | 669 | 758 |
| 369 | 581 | 670 | 759 |
| 370 | 582 | 671 | 760 |
| 371 | 583 | 672 | 761 |
| 372 | 584 | 673 | 762 |
| 373 | 585 | 674 | 763 |
| 374 | 586 | 675 | 764 |
| 375 | 587 | 676 | 765 |
| 378 | 588 | 677 | 766 |
| 379 | 589 | 678 | 767 |
| 380 | 590 | 679 | 768 |
| 381 | 591 | 680 | 769 |
| 384 | 592 | 681 | 770 |
| 385 | 593 | 682 | 771 |
| 386 | 594 | 683 | 772 |
| 387 | 595 | 684 | 773 |
| 389 | 596 | 685 | 774 |
| 390 | 597 | 686 | 775 |

oppF-associated TldRs

| TldR | Predicted ωRNA | Predicted guide |
|---|---|---|
| SEQ ID NO | SEQ ID NO | SEQ ID NO |
| 114 | 776 | 1081 |
| 116 | 777 | 1082 |
| 119 | 778 | 1083 |
| 119 | 779 | 1084 |
| 120 | 780 | 1085 |
| 121 | 781 | 1086 |
| 121 | 782 | 1087 |
| 122 | 783 | 1088 |
| 123 | 784 | 1089 |
| 124 | 785 | 1090 |
| 125 | 786 | 1091 |
| 126 | 787 | 1092 |
| 127 | 788 | 1093 |
| 130 | 789 | 1094 |
| 130 | 790 | 1095 |
| 130 | 791 | 1096 |
| 131 | 792 | 1097 |
| 132 | 793 | 1098 |
| 134 | 794 | 1099 |
| 136 | 795 | 1100 |
| 137 | 796 | 1101 |
| 140 | 797 | 1102 |
| 141 | 798 | 1103 |
| 143 | 799 | 1104 |
| 143 | 800 | 1105 |
| 143 | 801 | 1106 |
| 143 | 802 | 1107 |
| 143 | 803 | 1108 |
| 143 | 804 | 1109 |
| 143 | 805 | 1110 |
| 143 | 806 | 1111 |
| 143 | 807 | 1112 |
| 143 | 808 | 1113 |
| 143 | 809 | 1114 |
| 148 | 810 | 1115 |
| 148 | 811 | 1116 |
| 149 | 812 | 1117 |
| 150 | 813 | 1118 |
| 150 | 814 | 1119 |
| 150 | 815 | 1120 |
| 150 | 816 | 1121 |
| 150 | 817 | 1122 |
| 150 | 818 | 1123 |
| 150 | 819 | 1124 |
| 151 | 820 | 1125 |
| 151 | 821 | 1126 |
| 151 | 822 | 1127 |
| 151 | 823 | 1128 |
| 151 | 824 | 1129 |
| 151 | 825 | 1130 |
| 151 | 826 | 1131 |
| 151 | 827 | 1132 |
| 151 | 828 | 1133 |
| 152 | 829 | 1134 |
| 153 | 830 | 1135 |
| 153 | 831 | 1136 |
| 153 | 832 | 1137 |
| 154 | 833 | 1138 |
| 155 | 834 | 1139 |
| 156 | 835 | 1140 |
| 156 | 836 | 1141 |
| 158 | 837 | 1142 |
| 163 | 838 | 1143 |
| 165 | 839 | 1144 |
| 166 | 840 | 1145 |
| 167 | 841 | 1146 |
| 168 | 842 | 1147 |
| 169 | 843 | 1148 |
| 170 | 844 | 1149 |
| 170 | 845 | 1150 |
| 170 | 846 | 1151 |
| 170 | 847 | 1152 |
| 172 | 848 | 1153 |
| 173 | 849 | 1154 |
| 174 | 850 | 1155 |
| 175 | 851 | 1156 |
| 175 | 852 | 1157 |
| 175 | 853 | 1158 |
| 177 | 854 | 1159 |
| 177 | 855 | 1160 |
| 178 | 856 | 1161 |
| 178 | 857 | 1162 |
| 178 | 858 | 1163 |
| 182 | 859 | 1164 |
| 185 | 860 | 1165 |
| 189 | 861 | 1166 |
| 190 | 862 | 1167 |
| 191 | 863 | 1168 |
| 194 | 864 | 1169 |
| 195 | 865 | 1170 |
| 196 | 866 | 1171 |
| 197 | 867 | 1172 |
| 198 | 868 | 1173 |
| 199 | 869 | 1174 |
| 200 | 870 | 1175 |
| 202 | 871 | 1176 |
| 206 | 872 | 1177 |
| 206 | 873 | 1178 |
| 207 | 874 | 1179 |
| 208 | 875 | 1180 |
| 209 | 876 | 1181 |
| 210 | 877 | 1182 |
| 211 | 878 | 1183 |
| 212 | 879 | 1184 |
| 213 | 880 | 1185 |
| 214 | 881 | 1186 |
| 216 | 882 | 1187 |
| 217 | 883 | 1188 |
| 218 | 884 | 1189 |
| 219 | 885 | 1190 |
| 220 | 886 | 1191 |
| 220 | 887 | 1192 |
| 220 | 888 | 1193 |
| 221 | 889 | 1194 |
| 223 | 890 | 1195 |
| 224 | 891 | 1196 |
| 225 | 892 | 1197 |
| 226 | 893 | 1198 |
| 391 | 894 | 1199 |
| 391 | 895 | 1200 |
| 391 | 896 | 1201 |
| 391 | 897 | 1202 |
| 391 | 898 | 1203 |
| 391 | 899 | 1204 |
| 391 | 900 | 1205 |
| 391 | 901 | 1206 |
| 391 | 902 | 1207 |
| 391 | 903 | 1208 |
| 391 | 904 | 1209 |
| 391 | 905 | 1210 |
| 391 | 906 | 1211 |
| 391 | 907 | 1212 |
| 391 | 908 | 1213 |
| 391 | 909 | 1214 |
| 391 | 910 | 1215 |
| 391 | 911 | 1216 |
| 391 | 912 | 1217 |
| 391 | 913 | 1218 |
| 391 | 914 | 1219 |
| 391 | 915 | 1220 |
| 391 | 916 | 1221 |
| 391 | 917 | 1222 |
| 391 | 918 | 1223 |
| 391 | 919 | 1224 |
| 391 | 920 | 1225 |
| 391 | 921 | 1226 |
| 391 | 922 | 1227 |
| 391 | 923 | 1228 |
| 391 | 924 | 1229 |
| 391 | 925 | 1230 |
| 391 | 926 | 1231 |
| 391 | 927 | 1232 |
| 391 | 928 | 1233 |
| 391 | 929 | 1234 |
| 391 | 930 | 1235 |
| 391 | 931 | 1236 |
| 391 | 932 | 1237 |
| 391 | 933 | 1238 |
| 391 | 934 | 1239 |
| 391 | 935 | 1240 |
| 391 | 936 | 1241 |
| 391 | 937 | 1242 |
| 391 | 938 | 1243 |
| 392 | 939 | 1244 |
| 392 | 940 | 1245 |
| 392 | 941 | 1246 |
| 392 | 942 | 1247 |
| 392 | 943 | 1248 |
| 392 | 944 | 1249 |
| 392 | 945 | 1250 |
| 392 | 946 | 1251 |
| 392 | 947 | 1252 |
| 392 | 948 | 1253 |
| 392 | 949 | 1254 |
| 393 | 950 | 1255 |
| 394 | 951 | 1256 |
| 394 | 952 | 1257 |
| 394 | 953 | 1258 |
| 394 | 954 | 1259 |
| 394 | 955 | 1260 |
| 394 | 956 | 1261 |
| 394 | 957 | 1262 |
| 395 | 958 | 1263 |
| 395 | 959 | 1264 |
| 395 | 960 | 1265 |
| 396 | 961 | 1266 |
| 397 | 962 | 1267 |
| 397 | 963 | 1268 |
| 398 | 964 | 1269 |
| 398 | 965 | 1270 |
| 398 | 966 | 1271 |
| 398 | 967 | 1272 |
| 398 | 968 | 1273 |
| 398 | 969 | 1274 |
| 398 | 970 | 1275 |
| 398 | 971 | 1276 |
| 398 | 972 | 1277 |
| 398 | 973 | 1278 |
| 399 | 974 | 1279 |
| 400 | 975 | 1280 |
| 401 | 976 | 1281 |
| 401 | 977 | 1282 |
| 401 | 978 | 1283 |
| 401 | 979 | 1284 |
| 401 | 980 | 1285 |
| 401 | 981 | 1286 |
| 402 | 982 | 1287 |
| 402 | 983 | 1288 |
| 402 | 984 | 1289 |
| 402 | 985 | 1290 |
| 402 | 986 | 1291 |
| 402 | 987 | 1292 |
| 402 | 988 | 1293 |
| 402 | 989 | 1294 |
| 403 | 990 | 1295 |
| 403 | 991 | 1296 |
| 403 | 992 | 1297 |
| 403 | 993 | 1298 |
| 403 | 994 | 1299 |
| 403 | 995 | 1300 |
| 403 | 996 | 1301 |
| 404 | 997 | 1302 |
| 404 | 998 | 1303 |
| 405 | 999 | 1304 |
| 406 | 1000 | 1305 |
| 407 | 1001 | 1306 |
| 407 | 1002 | 1307 |
| 408 | 1003 | 1308 |
| 408 | 1004 | 1309 |
| 409 | 1005 | 1310 |
| 410 | 1006 | 1311 |
| 411 | 1007 | 1312 |
| 411 | 1008 | 1313 |
| 412 | 1009 | 1314 |
| 412 | 1010 | 1315 |
| 413 | 1011 | 1316 |
| 414 | 1012 | 1317 |
| 415 | 1013 | 1318 |
| 415 | 1014 | 1319 |
| 416 | 1015 | 1320 |
| 417 | 1016 | 1321 |
| 418 | 1017 | 1322 |
| 419 | 1018 | 1323 |
| 419 | 1019 | 1324 |
| 420 | 1020 | 1325 |
| 421 | 1021 | 1326 |
| 422 | 1022 | 1327 |
| 423 | 1023 | 1328 |
| 424 | 1024 | 1329 |
| 425 | 1025 | 1330 |
| 426 | 1026 | 1331 |
| 426 | 1027 | 1332 |
| 426 | 1028 | 1333 |
| 426 | 1029 | 1334 |
| 426 | 1030 | 1335 |
| 427 | 1031 | 1336 |
| 428 | 1032 | 1337 |
| 429 | 1033 | 1338 |
| 429 | 1034 | 1339 |
| 430 | 1035 | 1340 |
| 431 | 1036 | 1341 |
| 432 | 1037 | 1342 |
| 433 | 1038 | 1343 |
| 434 | 1039 | 1344 |
| 435 | 1040 | 1345 |
| 436 | 1041 | 1346 |
| 437 | 1042 | 1347 |
| 438 | 1043 | 1348 |
| 439 | 1044 | 1349 |
| 440 | 1045 | 1350 |
| 441 | 1046 | 1351 |
| 442 | 1047 | 1352 |
| 443 | 1048 | 1353 |
| 444 | 1049 | 1354 |
| 445 | 1050 | 1355 |
| 445 | 1051 | 1356 |
| 446 | 1052 | 1357 |
| 447 | 1053 | 1358 |
| 448 | 1054 | 1359 |
| 449 | 1055 | 1360 |
| 450 | 1056 | 1361 |
| 451 | 1057 | 1362 |
| 452 | 1058 | 1363 |
| 453 | 1059 | 1364 |
| 453 | 1060 | 1365 |
| 454 | 1061 | 1366 |
| 455 | 1062 | 1367 |
| 456 | 1063 | 1368 |
| 457 | 1064 | 1369 |
| 458 | 1065 | 1370 |
| 459 | 1066 | 1371 |
| 460 | 1067 | 1372 |
| 461 | 1068 | 1373 |
| 462 | 1069 | NNNNNNNNNNNNNNN |
| | | NNNNN |
| 463 | 1070 | 1374 |
| 464 | 1071 | 1375 |
| 465 | 1072 | 1376 |
| 466 | 1073 | 1377 |
| 467 | 1074 | 1378 |
| 468 | 1075 | 1379 |
| 469 | 1076 | 1380 |
| 470 | 1077 | 1381 |
| 471 | 1078 | 1382 |
| 472 | 1079 | 1383 |
| 477 | 1080 | 1384 |

TnpB-transposase fusion sequences

| | Fusion | | | | |
|---|---|---|---|---|---|
| Transposase | protein | | SEQ | HMM | |
| domain | accession | Fusion protein sequence | ID NO | description | Organism |
| Crinkler | KAG9062067.1 | MDLADLKGIRVSGGIVVTSQDLVED | 1453 | Crinkler | Linnemannia |
| | | AGRPILQDRTFTAIWRFYKYTTGKR | | effector | hyalina |
| | | VKDSFWHISNWIPTRPIEQVPVLTRG | | protein N- | |
| | | WRTEEFAPETSTKSPPKPKTNVEKAP | | terminal | |
| | | ASAKKPLAEMKKECFRLAAGKKRE | | domain | |
| | | AQRLIGIFVETLRIRTDSAEEALRIKL | | | |
| | | PPGKLTVSEEQRTKARRGAASGTER | | | |
| | | EIFDHLCERIKPKDYVEDDDEDATD | | | |
| | | KKRENNSDLRDLKGFGARELLPKD | | | |
| | | KDDDRDKDKGKKEKTSLGIVVNYLI | | | |
| | | DWLVTGHFYKPSRRRGEIEVKMPYT | | | |
| | | PTYVVRSVAGQLAVELKKLYGNGSH | | | |
| | | ELRKKVLTVHKKGVLDASIDIVIQE | | | |
| | | QVSAFENFLFLNKLTSSSRRIVPLTTS | | | |
| | | HQPFVSFSERIDQQTEEEGWTSTSCL | | | |
| | | DALDDIRSHLQQFLQEDEKVKKNIK | | | |
| | | DDDEGVFHWAMYKEKGYVLRGSIL | | | |
| | | TDGFRVKLQSFKLRELQDVRYRRW | | | |
| | | KEDRLPSRLTSTVGGIDFFLQEIRNV | | | |
| | | LTCKEDIERLWPGVDVKDIRTLTLDA | | | |
| | | GQACIIGAFAHLPEEIAKRARSLGYL | | | |
| | | VVGLNEYYTSKKCPRCGQFVGQVD | | | |
| | | MRRFYCSQFQVFHHRDVMAAENM | | | |
| | | ANIVQGYLLDLQRLDCLHPIAPDGN | | | |
| | | MPWKEASSGLGTPSTTGPTATKIAAT | | | |
| | | SGPTRVALRSKGQRKRSSTASSLKQ | | | |
| | | ATSNQSLWCIVDGDPMLRAFELVIPS | | | |
| | | SVTTLGQLRSYIHLRKPIWFKYLEAE | | | |
| | | DLTLWSVSIPITKDNEDTPILLEDVPS | | | |
| | | SDKNKLGPTDDVSELFQQVPLKKTI | | | |
| | | HVIVQRPPPAVTMKRLLEQDPQYLP | | | |
| | | QKKRIRIEEGWKPFTASDGILVDLPP | | | |
| | | YWIDILASTEFVPKPRAAFDHLKGN | | | |
| | | LQAGDAIIVPSMGQNPKDFGLYGQD | | | |
| | | HNLFVTEQMLELWDEMRGDQEFTY | | | |
| | | RRILSGPMGVGKSYLSYFLAARAYA | | | |
| | | EGWLVLYISDAGVLDKNKQDESAL | | | |
| | | QAVKRFLALNKDILTGAEMEMLVN | | | |
| | | DYNGTDDISGNAMSVIFGTLLKSRD | | | |
| | | RKTLLLVDEHGKLFEKEPYVPDKFR | | | |
| | | SLVPLLLYNWWGEDAKGSRVVFTG | | | |
| | | TAHAKYEMGILEESYRFTSLVLVGPL | | | |
| | | SMHVFSKLLDMYPRLAAPAIRKEVT | | | |
| | | AITNCVPRELVHLSVYLELFPDPIAID | | | |
| | | NLQVWTSKRTKVFLSTAKTYYESRT | | | |
| | | PFRKNDFYEALVHTFLGSTSIVDFE | | | |
| | | WDFLDLGLIYRCKDVGRIGTHHHIL | | | |
| | | CRPAQRALLELFKNISLPDAIKKRIC | | | |
| | | DGSLDENEFEGVLYHQLICATKPIVL | | | |
| | | GTTDLNGKNPDTISLDFSLCETLRAG | | | |
| | | MTCLESDHEMALTRGYDSHPRFDF | | | |
| | | MLGPMFMQVSVSDFGKHNTASAEL | | | |
| | | GKAFNDRDNNGTNQIERYLNDLYGP | | | |
| | | GHSAKIDNSKFIVTKNGVDVLGFRI | | | |
| | | VYICGSPGQPSHSKWVKKFPDVRHV | | | |
| | | SFEEVKENLFKNIVTSTVAIAPMTT | | | |
| DDE_3 | XP_052966910.1 | MTIRHTSRVPARRSTFFEQACPVIRT | 1454 | DDE | Polychytrium |
| | | LIEQDPFQTGPVLQCKLESILQRKVS | | superfamily | aggregatum |
| | | LSLCHTAIQRAGLSHKRATHLYKSK | | endonuclease | |
| | | RLDERVAQFRDQVRSIDPRRFVFVD | | | |
| | | ETGIRKSIFPLYGYSPKGAPLRQCNH | | | |
| | | MKHKSVSAAFAINHSGVLHRMYIPT | | | |
| | | SFKTHSMVEFFERATFPDDSVVVMD | | | |
| | | NVSMHKTRAVLDCIERRGWSVIFTP | | | |
| | | PASPDFNPIENFFGVVKHQYRKAAA | | | |
| | | LNASEGFKVGMVTLFEVTSPTSPQR | | | |
| | | RAPALGHPAFSGPMPPKRKGTGDGQ | | | |
| | | PRPPRPKKAKSQSEPVSDPMDVDPT | | | |
| | | EPGPSTSSSTGKRCRQCDGTDHERC | | | |
| | | NTSKCPKYRPLKSSVVPLVDGRSSA | | | |
| | | PQFSCFKQTMDGCCLNPALRDKIQA | | | |
| | | TVEAMTQIQFEASRLLNLHILRCIEQ | | | |
| | | DLPVPVISKATPAFIRQCFTIVEAGAL | | | |
| | | SPTGDNEKYNEHLVASFRDYQTTRH | | | |
| | | ADLPPAPRLPDGAHSQLLTLAVNAY | | | |
| | | ATNCTTHLNLAYWRLLRRFCAAVFP | | | |
| | | ANKHKHEAIEACLELFEKPGQTPPK | | | |
| | | ADLEFLYPDFGHVLDEFRYSNDQDR | | | |
| | | FRALHRLSHHVRILARDKMVDDVH | | | |
| | | KWIDCDMPALRVTELQRQAKLDELT | | | |
| | | TQGIPSDDKRFTTAKSELGTTKAKIN | | | |
| | | KLASRINWALKQLALDTPPAVCTIVP | | | |
| | | LCTAKVKYVKIDTVTLWQLLDTEQ | | | |
| | | HLGLTWDMLKEEGEDGINNQDRLW | | | |
| | | RSCFKLRSSLFQERDVNKKLFNYEIS | | | |
| | | TDGIGCTIGLVKFVRRTDHTETTTPV | | | |
| | | KTAEQRIQAHIGSPDPDKTTWIGIDP | | | |
| | | GVGSIFTAVIQAPGHQDEVVSFSNGH | | | |
| | | YQHMCGHKSNTDWHNTMKYRLSIE | | | |
| | | TWMSTTPSPKVSSSEAFKVHLTHVL | | | |
| | | RPELRVQLDFHLGKKARHHRFTGH | | | |
| | | KRRQVAVDRMCKAVLKHAPIRTDV | | | |
| | | VIAFGNASWRQGKGYASSPRRQRFA | | | |
| | | RYFEQFEHHRRRPNHPHGSVKVAST | | | |
| | | NEFNTSQVCSKCLEPVRLEGLDAPS | | | |
| | | VANSHFVRSCKNPSCRTVWNRDVN | | | |
| | | AARNMITSTRIRSVKGQLRIRLKDYI | | | |
| | | TKQTKEIVPLSKEASERAKRFWEIVR | | | |
| | | KAFLRKDIDAFALLAGTKAPVPYPIT | | | |
| | | IRQGFQFKYRLRSKHAIVCAIQHPRV | | | |
| | | PIRFEGGCLGTEADAGYEESEDESSL | | | |
| | | EDDHDHPDGKESTKVKKSRPYTIAC | | | |
| | | VDRARGIIVWDVTRVSFSTKPRIML | | | |
| | | KLKTDLTNFVFLSKFGMYCGCSYD | | | |
| | | KSIKFFNARFELANIYYTMKAVQFV | | | |
| | | RYNSISHELVTAGSHNICPTLKYEIET | | | |
| | | DLSTDEWITSIYLDEANHRMYAIIDT | | | |
| | | RILICCILHYSEYNYTIIACADGSIKIK | | | |
| | | NLTNAVVHEFTSHTKRVTGLAVYPF | | | |
| | | GPIIMSCALDMTVRMYNLKNFKEV | | | |
| | | YCFHIREQPMGIEIADKAVLNIYTRE | | | |
| | | GILAWNLNHINTSFSSINSQAKRLVN | | | |
| | | YQGTRTPCRILAWSDDSVIRLISPATG | | | |
| | | KSITTVLPLVESESITALSYCPSIEKLF | | | |
| | | IMLTNSEIWVIATNVNPCLVVDIWRP | | | |
| | | NGPIREDCTCICVCDGVFQHHQPSPS | | | |
| | | GYERSKGFAFLFGGTGNGQVLVYTR | | | |
| | | FGVLHNGEVTQIIYISKQQLLITGGA | | | |
| | | DELIKICTLEPMSSELIQVKVSIKAGF | | | |
| | | IPRLISISDNAVAATSDDWSIHMFQFN | | | |
| | | LHRNESRKMPTHLRSDDHTDAVTAI | | | |
| | | CPIPMLGLFISSSRDGTLRLWDSFNT | | | |
| | | LIREVQFTQPLEAVCVNSERGDILVG | | | |
| | | IQNRVDIIQYSLYLPPGYIATVQSLEF | | | |
| | | PEMPVEPSLPFDDNQAIWKAVPLQS | | | |
| | | YSTRQDFFHAINLVSTGVEALSSQSL | | | |
| | | SSATTFELETPMLSKEHQLSSTENIY | | | |
| | | RMLDVLMLRRQEVVDRAKKRISEE | | | |
| | | LSNVRRKDQILHEEYEKYIKYRPLM | | | |
| | | QRELEEDSEKAGYRSYSLSYLQFSA | | | |
| | | PITPRGEVAEELTLLREVKEIQMNEA | | | |
| | | ESIESVAALEQAAESIQSVTLEEPSVP | | | |
| | | IIQEVPQESISQIIAKMPVTPKHRLKV | | | |
| | | APDGEIPNSVLSHNVESWRSKHTGY | | | |
| | | QRAGAIRGIRRKKKEAPKPADTVER | | | |
| | | KKKSDEYKERLKNLLENMAKKEEE | | | |
| | | EKAQANEANIVVIEDEDENEAEEEE | | | |
| | | EVYRSRLPANTGLRNVQMYDPIVQ | | | |
| | | VVAEKVPMIVQKALAFSWFPDDEKI | | | |
| | | NPTPEAIAEIIVGKLWEYSKPEIKLE | | | |
| | | MLDFINWIYEELGIRDTTMIMRTLCR | | | |
| | | YLQSRLTESMDDTDVKLREKIIGVLT | | | |
| | | KFSVPYTEVISTLIMQLILPYEPIVAPS | | | |
| | | KHLMSALGIACAESQFLKMQIEEIY | | | |
| | | NESQNQLMAFNAARGESGSRPQTLT | | | |
| | | KPKDFRELATLWIRTCLKNYLMKTL | | | |
| | | KDKDAIALLKKLTPFGIEDRGSTSNS | | | |
| | | SAPSTPAQASSTGTAKTSNPSTPSNQI | | | |
| | | DKSRRSSVKGRRESTATQSRRPTSPQ | | | |
| | | KTRSRQTSIATGANQGRPRASSVSFH | | | |
| | | PDVGESGPEDPKDQLRRLAVTLESS | | | |
| | | NEKLDEETNEAIVSRPVTAIGDSTIE | | | |
| | | GVVIETRDPGSRDPVSILRNPSGQDF | | | |
| | | VDAVNYFIVTLEKKAAKEEQERLAK | | | |
| | | LREQSAQAQRQRLEAEKKAQLEEY | | | |
| | | LRQKEEERQARSAARRERIASLRAQ | | | |
| | | EKAKADESQKRRRGVNWKTVGQT | | | |
| | | HQSKCHPSRETLNVALDKFPSMCGS | | | |
| | | FLRSFTNEITLNMASLAKTMPMEHV | | | |
| | | VLSPFGEPPLSQRILSAAAREKVHGR | | | |
| | | DYPYSPFVNSQHTLVPEWKEYHAD | | | |
| | | ERRSSTTRSDVSYIRAPLTFRENNVR | | | |
| | | IVKDLYLQEFDPEGDESAKFKTQKK | | | |
| | | YFIPSLAVPDIDDELNDELQNMDESE | | | |
| | | RPSQAHSHRHSHSHSHSQSFHRLSET | | | |
| | | DQQLQRMKNRRYI | | | |
| DDE_3 | XP_052966910.1 | MTIRHTSRVPARRSTFFEQACPVIRT | 1455 | DDE | Polychytrium |
| | | LIEQDPFQTGPVLQCKLESILQRKVS | | superfamily | aggregatum |
| | | LSLCHTAIQRAGLSHKRATHLYKSK | | endonuclease | |
| | | RLDERVAQFRDQVRSIDPRRFVFVD | | | |
| | | ETGIRKSIFPLYGYSPKGAPLRQCNH | | | |
| | | MKHKSVSAAFAINHSGVLHRMYIPT | | | |
| | | SFKTHSMVEFFERATFPDDSVVVMD | | | |
| | | NVSMHKTRAVLDCIERRGWSVIFTP | | | |
| | | PASPDFNPIENFFGVVKHQYRKAAA | | | |
| | | LNASEGFKVGMVTLFEVTSPTSPQR | | | |
| | | RAPALGHPAFSGPMPPKRKGTGDGQ | | | |
| | | PRPPRPKKAKSQSEPVSDPMDVDPT | | | |
| | | EPGPSTSSSTGKRCRQCDGTDHERC | | | |
| | | NTSKCPKYRPLKSSVVPLVDGRSSA | | | |
| | | PQFSCFKQTMDGCCLNPALRDKIQA | | | |
| | | TVEAMTQIQFEASRLLNLHILRCIEQ | | | |
| | | DLPVPVISKATPAFIRQCFTIVEAGAL | | | |
| | | SPTGDNEKYNEHLVASFRDYQTTRH | | | |
| | | ADLPPAPRLPDGAHSQLLTLAVNAY | | | |
| | | ATNCTTHLNLAYWRLLRRFCAAVFP | | | |
| | | ANKHKHEAIEACLELFEKPGQTPPK | | | |
| | | ADLEFLYPDFGHVLDEFRYSNDQDR | | | |
| | | FRALHRLSHHVRILARDKMVDDVH | | | |
| | | KWIDCDMPALRVTELQRQAKLDELT | | | |
| | | TQGIPSDDKRFTTAKSELGTTKAKIN | | | |
| | | KLASRINWALKQLALDTPPAVCTIVP | | | |
| | | LCTAKVKYVKIDTVTLWQLLDTEQ | | | |
| | | HLGLTWDMLKEEGEDGINNQDRLW | | | |
| | | RSCFKLRSSLFQERDVNKKLFNYEIS | | | |
| | | TDGIGCTIGLVKFVRRTDHTETTTPV | | | |
| | | KTAEQRIQAHIGSPDPDKTTWIGIDP | | | |
| | | GVGSIFTAVIQAPGHQDEVVSFSNGH | | | |
| | | YQHMCGHKSNTDWHNTMKYRLSIE | | | |
| | | TWMSTTPSPKVSSSEAFKVHLTHVL | | | |
| | | RPELRVQLDFHLGKKARHHRFTGH | | | |
| | | KRRQVAVDRMCKAVLKHAPIRTDV | | | |
| | | VIAFGNASWRQGKGYASSPRRQRFA | | | |
| | | RYFEQFEHHRRRPNHPHGSVKVAST | | | |
| | | NEFNTSQVCSKCLEPVRLEGLDAPS | | | |
| | | VANSHFVRSCKNPSCRTVWNRDVN | | | |
| | | AARNMITSTRIRSVKGQLRIRLKDYI | | | |
| | | TKQTKEIVPLSKEASERAKRFWEIVR | | | |
| | | KAFLRKDIDAFALLAGTKAPVPYPIT | | | |
| | | IRQGFQFKYRLRSKHAIVCAIQHPRV | | | |
| | | PIRFEGGCLGTEADAGYEESEDESSL | | | |
| | | EDDHDHPDGKESTKVKKSRPYTIAC | | | |
| | | VDRARGIIVWDVTRVSFSTKPRIML | | | |
| | | KLKTDLTNFVFLSKFGMYCGCSYD | | | |
| | | KSIKFFNARFELANIYYTMKAVQFV | | | |
| | | RYNSISHELVTAGSHNICPTLKYEIET | | | |
| | | DLSTDEWITSIYLDEANHRMYAIIDT | | | |
| | | RILICCILHYSEYNYTIIACADGSIKIK | | | |
| | | NLTNAVVHEFTSHTKRVTGLAVYPF | | | |
| | | GPIIMSCALDMTVRMYNLKNFKEV | | | |
| | | YCFHIREQPMGIEIADKAVLNIYTRE | | | |
| | | GILAWNLNHINTSFSSINSQAKRLVN | | | |
| | | YQGTRTPCRILAWSDDSVIRLISPATG | | | |
| | | KSITTVLPLVESESITALSYCPSIEKLF | | | |
| | | IMLTNSEIWVIATNVNPCLVVDIWRP | | | |
| | | NGPIREDCTCICVCDGVFQHHQPSPS | | | |
| | | GYERSKGFAFLFGGTGNGQVLVYTR | | | |
| | | FGVLHNGEVTQIIYISKQQLLITGGA | | | |
| | | DELIKICTLEPMSSELIQVKVSIKAGF | | | |
| | | IPRLISISDNAVAATSDDWSIHMFQFN | | | |
| | | LHRNESRKMPTHLRSDDHTDAVTAI | | | |
| | | CPIPMLGLFISSSRDGTLRLWDSFNT | | | |
| | | LIREVQFTQPLEAVCVNSERGDILVG | | | |
| | | IQNRVDIIQYSLYLPPGYIATVQSLEF | | | |
| | | PEMPVEPSLPFDDNQAIWKAVPLQS | | | |
| | | YSTRQDFFHAINLVSTGVEALSSQSL | | | |
| | | SSATTFELETPMLSKEHQLSSTENIY | | | |
| | | RMLDVLMLRRQEVVDRAKKRISEE | | | |
| | | LSNVRRKDQILHEEYEKYIKYRPLM | | | |
| | | QRELEEDSEKAGYRSYSLSYLQFSA | | | |
| | | PITPRGEVAEELTLLREVKEIQMNEA | | | |
| | | ESIESVAALEQAAESIQSVTLEEPSVP | | | |
| | | IIQEVPQESISQIIAKMPVTPKHRLKV | | | |
| | | APDGEIPNSVLSHNVESWRSKHTGY | | | |
| | | QRAGAIRGIRRKKKEAPKPADTVER | | | |
| | | KKKSDEYKERLKNLLENMAKKEEE | | | |
| | | EKAQANEANIVVIEDEDENEAEEEE | | | |
| | | EVYRSRLPANTGLRNVQMYDPIVQ | | | |
| | | VVAEKVPMIVQKALAFSWFPDDEKI | | | |
| | | NPTPEAIAEIIVGKLWEYSKPEIKLE | | | |
| | | MLDFINWIYEELGIRDTTMIMRTLCR | | | |
| | | YLQSRLTESMDDTDVKLREKIIGVLT | | | |
| | | KFSVPYTEVISTLIMQLILPYEPIVAPS | | | |
| | | KHLMSALGIACAESQFLKMQIEEIY | | | |
| | | NESQNQLMAFNAARGESGSRPQTLT | | | |
| | | KPKDFRELATLWIRTCLKNYLMKTL | | | |
| | | KDKDAIALLKKLTPFGIEDRGSTSNS | | | |
| | | SAPSTPAQASSTGTAKTSNPSTPSNQI | | | |
| | | DKSRRSSVKGRRESTATQSRRPTSPQ | | | |
| | | KTRSRQTSIATGANQGRPRASSVSFH | | | |
| | | PDVGESGPEDPKDQLRRLAVTLESS | | | |
| | | NEKLDEETNEAIVSRPVTAIGDSTIE | | | |
| | | GVVIETRDPGSRDPVSILRNPSGQDF | | | |
| | | VDAVNYFIVTLEKKAAKEEQERLAK | | | |
| | | LREQSAQAQRQRLEAEKKAQLEEY | | | |
| | | LRQKEEERQARSAARRERIASLRAQ | | | |
| | | EKAKADESQKRRRGVNWKTVGQT | | | |
| | | HQSKCHPSRETLNVALDKFPSMCGS | | | |
| | | FLRSFTNEITLNMASLAKTMPMEHV | | | |
| | | VLSPFGEPPLSQRILSAAAREKVHGR | | | |
| | | DYPYSPFVNSQHTLVPEWKEYHAD | | | |
| | | ERRSSTTRSDVSYIRAPLTFRENNVR | | | |
| | | IVKDLYLQEFDPEGDESAKFKTQKK | | | |
| | | YFIPSLAVPDIDDELNDELQNMDESE | | | |
| | | RPSQAHSHRHSHSHSHSQSFHRLSET | | | |
| | | DQQLQRMKNRRYI | | | |
| DDE_Tnp_1 | WP_016084423.1 | MSLSIQEEFHLFAQELQQYLSPHILQ | 1456 | Transposase | Bacillus cereus |
| | | QLAQETGFVKRKSKYGARDLAALCI | | DDE domain | BAG1X2-1 |
| | | WISQHVASDSLTRLCSQLYANTATLM | | | |
| | | SPEGLNQRFNRCAVLFLQRVFSLLIK | | | |
| | | SKLNDFSQISNQYTSYFQRIRILDATI | | | |
| | | FQVPNHLAPIYPGSGGCAQTAGIKIQ | | | |
| | | LEYDLHSGKFLNFQMEPGKNNDKT | | | |
| | | FGTDCLDTLRPGDLCIRDLGYFSLK | | | |
| | | DLDQMDQRGVFYVSRLKLNNRVYV | | | |
| | | KNDYPEFFRDGTVKKQSLYVLLNLE | | | |
| | | DIMHQIKPGDTYENPKFFRSLEDKL | | | |
| | | AKAQRVLSRRLKGSSRWNKQRVKV | | | |
| | | SRIHEYISNTRKDYLDKISTEIIKNHD | | | |
| | | VIGIEDLHVSNMLKNHKLAKAISEV | | | |
| | | SWSQFRSMLEYKAKWYGKQVIVVS | | | |
| | | KTFASSQLCSCCGYQNKDVKNLNL | | | |
| | | RKWDCPSCCTHHDRDINASINLKNE | | | |
| | | AIRLLTARTAGLA | | | |
| DDE_Tnp_1 | WP_016084423.1 | MSLSIQEEFHLFAQELQQYLSPHILQ | 1457 | Transposase | Bacillus cereus |
| | | QLAQETGFVKRKSKYGARDLAALCI | | DDE domain | BAG1X2-1 |
| | | WISQHVASDSLTRLCSQLYANTATLM | | | |
| | | SPEGLNQRFNRCAVLFLQRVFSLLIK | | | |
| | | SKLNDFSQISNQYTSYFQRIRILDATI | | | |
| | | FQVPNHLAPIYPGSGGCAQTAGIKIQ | | | |
| | | LEYDLHSGKFLNFQMEPGKNNDKT | | | |
| | | FGTDCLDTLRPGDLCIRDLGYFSLK | | | |
| | | DLDQMDQRGVFYVSRLKLNNRVYV | | | |
| | | KNDYPEFFRDGTVKKQSLYVLLNLE | | | |
| | | DIMHQIKPGDTYENPKFFRSLEDKL | | | |
| | | AKAQRVLSRRLKGSSRWNKQRVKV | | | |
| | | SRIHEYISNTRKDYLDKISTEIIKNHD | | | |
| | | VIGIEDLHVSNMLKNHKLAKAISEV | | | |
| | | SWSQFRSMLEYKAKWYGKQVIVVS | | | |
| | | KTFASSQLCSCCGYQNKDVKNLNL | | | |
| | | RKWDCPSCCTHHDRDINASINLKNE | | | |
| | | AIRLLTARTAGLA | | | |
| DDE_Tnp_1 | WP_016083199.1 | MSLSIQEEFHLFAQELQQYLSPHILQ | 1458 | Transposase | Bacillus cereus |
| | | QLAQETGFVKRKSKYGARDLAALCI | | DDE domain | BAG1X1-1 |
| | | WISQHVASDSLTRLCSQLYANTATLM | | | |
| | | SPEGLNQRFNRCAVLFLQRVFSLLIK | | | |
| | | SKLNDFSQISNQYTSYFQRIRILDATI | | | |
| | | FQVPNHLAPIYPGSGGCAQTAGIKIQ | | | |
| | | LEYDLHSGKFLNFQMEPGKNNDKT | | | |
| | | FGTDCLDTLRPGDLCIRDLGYFSLK | | | |
| | | DLDQMDQRGVFYVSRLKLNNRVYV | | | |
| | | KNDYPEFFRDGTVKKQSLYVLLNLE | | | |
| | | DIMHQIKPGDTYENPKFFRSLEDKL | | | |
| | | AKAQRVLSRRLKGSSRWNKQRVKV | | | |
| | | SRIHEYISNTRKDYLDKISTEIIKNHD | | | |
| | | VIGIEDLHVSNMLKNHKLAKAISEV | | | |
| | | SWSQFRSMLEYKAKWYGKQVIVVS | | | |
| | | KTFASSQLCSCCGYQNKDVKNLNL | | | |
| | | REWDCFFCRTHHDRDINASINLKNE | | | |
| | | AIRLLTARTAGLA | | | |
| DDE_Tnp_1 | WP_016085235.1 | MSLSIQEEFHLFAQELQQYLSPHILQ | 1459 | Transposase | Bacillus cereus |
| | | QLAQETGFVKRKSKYGARDLAALCI | | DDE domain | BAG2O-1 |
| | | WISQHVASDSLTRLCSQLYANTATLM | | | |
| | | SPEGLNQRFNRCAVLFLQRVFSLLIK | | | |
| | | SKLNDFSQISNQYTSYFQRIRILDATI | | | |
| | | FQVPNHLAPIYPGSGGCAQTAGIKIQ | | | |
| | | LEYDLHSGKFLNFQMEPGKNNDKT | | | |
| | | FGTDCLDTLRPGDLCIRDLGYFSLK | | | |
| | | DLDQMDQRGVFYVSRLKLNNRVYV | | | |
| | | KNDYPEFFRDGTVKKQSLYVLLNLE | | | |
| | | DIMHQIKPGDTYENPKFFRSLEDKL | | | |
| | | AKAQRVLSRRLKGSSRWNKQRVKV | | | |
| | | SRIHEYISNTRKDYLDKISTEIIKNHD | | | |
| | | VIGIEDLHVSNMLKNHKLAKAISEV | | | |
| | | SWSQFRSMLEYKAKWYGKQVIVVS | | | |
| | | KTFASSQLCSCCGYQNKDVKNLNL | | | |
| | | REWDCPSCCTHHDRDINASINLKNE | | | |
| | | AIRLLTARTAGLA | | | |
| DDE_Tnp_1 | WP_016084599.1 | MSLSIQEEFHLFAQELQQYLSPHILQ | 1460 | Transposase | Bacillus cereus |
| | | QLAQETGFVKRKSKYGARDLAALCI | | DDE domain | BAG1X2-2 |
| | | WISQHVASDSLTRLCSQLYANTATLM | | | |
| | | SPEGLNQRFNRCAVLFLQRVFSLLIK | | | |
| | | SKLNDFSQISNQYTSYFQRIRILDATI | | | |
| | | FQVPNHLAPIYPGSGGCAQTAGIKIQ | | | |
| | | LEYDLHSGKFLNFQMEPGKNNDKT | | | |
| | | FGTDCLDTLRPGDLCIRDLGYFSLK | | | |
| | | DLDQMDQRGVFYVSRLKLNNRVYV | | | |
| | | KNDYPEFFRDGTVKKQSLYVLLNLE | | | |
| | | DIMHQIKPGDTYENPKFFRSLEDKL | | | |
| | | AKAQRVLSRRLKGSSRWNKQRVKV | | | |
| | | SRIHEYISNTRKDYLDKISTEIIKNHD | | | |
| | | VIGIEDLHVSNMLKNHKLAKAISEV | | | |
| | | SWSQFRAMLEYKAKWYGKQVIVVS | | | |
| | | KTFASSQLCSCCGYQNKDVKNLNL | | | |
| | | RKWDCPSCQTNHDRDINASINLKNE | | | |
| | | AIRLLTARTAGLA | | | |
| DDE_Tnp_1 | MBB5866658.1 | MRWRVRVGAPWRDVPPCYGTWQA | 1461 | Transposase | Allocatelliglobosispora |
| | | VYGLFRRKQRAGVWLRLVAGLQRR | | DDE domain | scoriae |
| | | ADALGLIGWDVSVDATTVRAHQHA | | | |
| | | AGARRNGDAQAEPPVGEPADHAFG | | | |
| | | RSRGGWTTKLHLACEQGRKPLSML | | | |
| | | LTAGHRGDSPQFAAVLAGIRVVGRV | | | |
| | | VGGVWHGVVARFTAFRFTVDPTPG | | | |
| | | QEVLLRRYAGASRFGYNQCLRLVK | | | |
| | | DALDAKVRGGVMKVPWTGFDLVN | | | |
| | | AFNAWKRSGDAGRVMVAAGDGTV | | | |
| | | SIEATGLVWRAEVSQQVFEEAAVDL | | | |
| | | GRALAAYTGSKAGARAGRRVGFPR | | | |
| | | FKSKKRTRLGFRVRCKTSRAGKADV | | | |
| | | RVGDNVARSVTLPGIGVLVVREDTR | | | |
| | | QLRRMLSKGRAKVLSATVGYRAGR | | | |
| | | WFVSLTCEAADLHQARQHPQPDPA | | | |
| | | DAATGTTGCGWVGVDRGLSAFVVA | | | |
| | | ARADGTPVLRVDDPPRPSRAGMGW | | | |
| | | QRRLARSVSRKQLGSANRRDAAAR | | | |
| | | LANHHAYVRTVRQRFLHHVSNQLV | | | |
| | | KTHDRLALETLNITGMLRTHRLAAA | | | |
| | | IADAAWAELARQVTYKQAWHGGRV | | | |
| | | VLVDRWYPSTKTCSACRTITPAMPL | | | |
| | | GQRVSTCGTCGYRADRDHNAAVNL | | | |
| | | AVWAEQHHARPGTSTQGARSPTPAE | | | |
| | | GKALARAPARVKPAPTTWEPHPPPP | | | |
| | | E | | | |
| DDE_Tnp_1 | MBP2579587.1 | MDENTTTVVVRETLDPTADQRAILQ | 1462 | Transposase | Streptomyces sp. |
| | | RYADASRCSFNYALGLKHGAQQLW | | DDE domain | PvR006 |
| | | AHGRDQLVAQGQTPAEAARNAPKIE | | | |
| | | VPSQFAVQKIFLAQRDQPLPGPQLPG | | | |
| | | QEPRLLFPWWKGVNAIVCQQAFRD | | | |
| | | ADAAFSNWKSAGRRKGVPVGYPRF | | | |
| | | KRRGRRRDSFRMFAVRLVEQDLRH | | | |
| | | VRIGGGGGQPAFSVRLHRPARRLAR | | | |
| | | LLARGGVAKSVTISREGHRWVAAFN | | | |
| | | VRVPVGPVPRPSRRQREAGAVGVDL | | | |
| | | GVKVFVATSDPVVINDHKIQLFENA | | | |
| | | RHLENTRRQLRKWQRRMARRHVR | | | |
| | | GLRSHEQSQGWRDARDQVARLHAL | | | |
| | | VAARRASSQHLVTKRLVTQYAHVAL | | | |
| | | EDLRVKSMTASARGAVESPGRNVRA | | | |
| | | KAGLNRAILDVGFGEIRRQIEYKAVL | | | |
| | | NGTRVTVVDPAYTSQTCNRCGHVD | | | |
| | | AKSRRTAISSPAPTAATPLTPTIPSRSC | | | |
| | | WRRSSPSSPPTSPVSRSRSTRRCTAY | | | |
| | | TSRICVTTLQTSSSPGSPPWTPSGSRS | | | |
| | | PTPTKAGDSAAPFVAFGRLRTFTPKG | | | |
| | | CCRRLSSGHFPCMGGVLRAEPVWV | | | |
| | | ETFTGLRMDRFVKLVKVVRERGGN | | | |
| | | GPGGGRPWCLPLPDRVLLVAVYYRT | | | |
| | | NLTMRQLAPLFGISPATVCRVIQRLR | | | |
| | | PLLALERAPQPVVDTERLWIVDGTLI | | | |
| | | PVRDRKVGASSRNYRFSANVQVIID | | | |
| | | ADTRLVIAAARPAPGNKADAHVWR | | | |
| | | GSDLPALAAGTTVIADGAYLGTGLI | | | |
| | | VPHRKRAGRPLLRGQEEDNAEHRR | | | |
| | | VRARVEHTFARMKNWKILRDCRQK | | | |
| | | GDGLHHAIQAAATMHNLAMTR | | | |
| DDE_Tnp_1_7 | KAG9067727.1 | MDSSLEFLGSFDVSDSQGTVVASAE | 1463 | Transposase | Linnemannia |
| | | EVDEAQEEEEELLFSVRCRTRPTPGT | | IS4 | hyalina |
| | | DSSGDEEEEKAGDEGVIDASAPPTK | | | |
| | | KIFSDPVLTDLADNTNAYAASKGAG | | | |
| | | TGEGSRQWVKTTPDELRTFLGIIVY | | | |
| | | MGVFRQNSVSEYWSTFPECPQHNIT | | | |
| | | TFMSLVRFEQLKRFFHVSNPNEPEQ | | | |
| | | HWFSKVEPQASSGPERAADVDGAG | | | |
| | | MSTHTTTSTRQASSSPKRAADVDDA | | | |
| | | DTADTASSNKRLRPLQISSGSSTLVE | | | |
| | | DMQRLLATQPSQIRFDESGALTTICA | | | |
| | | QEKDFRSVGAAIEKILSSRLSKDITM | | | |
| | | LHMDGLRSMEKEWAHGKRDQALS | | | |
| | | KQLETLERDYTEGKLHNKRQLYKR | | | |
| | | LKASYRAPPEALRAVSEVLRQSGWT | | | |
| | | ICQCLNQSDTCIARTVNNAAVPGDIR | | | |
| | | VITKDSDLMAFESIMSVTMPVKNTW | | | |
| | | TTFHKDELLNEHGLPTPVHLTLAAL | | | |
| | | VSNNDYTNGVFSYGLTSNVDTIRQF | | | |
| | | KMTGLDGTVGQDRVEVVRIYVRRY | | | |
| | | LDIIHQKARTIKDSATQSARRRLRCN | | | |
| | | PNPTVKAHDKDLRRIETADRQLRVD | | | |
| | | VTEFGHALKTFGAATDAEATPPPLPT | | | |
| | | APKAGSAPYPQATSAGSPSIRQTHGP | | | |
| | | AEHPPSHKQKIKKQRRHGSRALQRR | | | |
| | | RQKWRRSRFRSRTDVQDRYVPDTV | | | |
| | | FLEKASPVDVVELSGLKPSTPRPSKP | | | |
| | | KEQSPRIDQVPAPTAKKKKKKLLGE | | | |
| | | PKGIAGPKALKRAFQSVFATVTLTTG | | | |
| | | SLQGCLGRSTNLSKAEVAQLTQHVS | | | |
| | | SAVSTVNSAKHIVYKLIEMRILQPLIE | | | |
| | | TGLNQAEDGPDESFLEKILDSDWAE | | | |
| | | RFVQNLLSFVLRNSIVPQGRPPASDK | | | |
| | | SKDAVAEAISTFNEFKKTLCPGFKAL | | | |
| | | NSTDLALSNIIAELAPKICLDQKLHY | | | |
| | | RRIPETLRTKLSKLSIDCDGLPEIDQD | | | |
| | | GTDAGGDAGAADVNEGVDDDDAL | | | |
| | | KRSKKIIFKPGHIQLCWRYFLLLPSS | | | |
| | | KRPRFCTQAKTSDSFIDINEEALVAL | | | |
| | | LWGEKAVQLDNVWEDTRYTHNWA | | | |
| | | AAKQRSSYGEVIKELFIGDRDVIKEA | | | |
| | | RNKQQTTYGKRTTTMAEREEAHPHI | | | |
| | | YGQLELARYLINKVNFFRERHNASL | | | |
| | | TAPTPPLPSSTPSSSTTASSHPTSAAAI | | | |
| | | EKLYPTRQHLIDAFGDDLDSVIVVGI | | | |
| | | DPGEVVSGAFCLTLPGGKVINLLIKR | | | |
| | | ASLYQPTLAFRDWEQHWKRRHPTA | | | |
| | | GPGDVVDSSLWTRITDLDKLTTLPS | | | |
| | | VHDLENSLPSTNYDTSLDALTAAHK | | | |
| | | KYYEQEPLIHGIYASREWKVAVHEH | | | |
| | | RMAKMSELDLAVAGVLRMVDEACE | | | |
| | | GVPSAALGYKAALVDEYLTSTMCPT | | | |
| | | CVVENRATRLAKPSMRTCACVECTR | | | |
| | | WIHRDGVGAHNIALIGEQYLKSLGR | | | |
| | | PEPLARPPKQT | | | |
| DDE_Tnp_1_7 | KAG9062473.1 | MDSSLEFLGSFDVSDSQGTVVASAE | 1464 | Transposase | Linnemannia |
| | | EVDEAQEEEELLFSVRCRTRPTPGTD | | IS4 | hyalina |
| | | SSGDEEEEKAGDEGVIDASAPPTKKI | | | |
| | | FSDPVLTDLADNTNAYAASKGAGTG | | | |
| | | EGSRQWVKTTPDELRTFLGIIVYMG | | | |
| | | VFRQNSVSEYWSTFPECPQHNITTF | | | |
| | | MSLVRFEQLKRFFHVSNPNEPEQHW | | | |
| | | FSKVEPQASSGPERAADVDGAGMS | | | |
| | | THTTTSTRQASSSPKRAADVDDADT | | | |
| | | ADTASSNKRLRPLQISSGSSTLVEDM | | | |
| | | QRLLATQPSQIRFDESGALTTICAQE | | | |
| | | KVIDFRSVGAAIEKILSSRLSKDITML | | | |
| | | HMDGLRSMEKEWAHGKRDQALSK | | | |
| | | QLETLERDYTEGKLHNKRQLYKRL | | | |
| | | KASYRAPPEALRAVSERQCIARTVN | | | |
| | | NAAVPGDIRVITKDFDLMAFESIMSV | | | |
| | | TMPVKNTWTTFHKDELLNEHGLPT | | | |
| | | PVHLTLAALVSNNDYTNGVFSYGLT | | | |
| | | SNVDTVRQFKMTGLDGTVGQDRVE | | | |
| | | VVRIYVRRYLDIIHQKARTIKDSATQ | | | |
| | | SARRRLRCNPNPTVKAHDKDLRRIE | | | |
| | | TADRQLRVDVTEFGHALKTFGAATD | | | |
| | | AEATPPPLPTAPKAGSAPYPQATSAG | | | |
| | | SPSIRQTHGPAEHPPSHKQKIKKQRR | | | |
| | | HGSHALQRRRQKWRRSRFRSRTDV | | | |
| | | QDRYVPDTVFLEKASPVDVVELSGL | | | |
| | | KPSTPRPSKPKEQPPRIDQVPAPAAK | | | |
| | | KKKKKLLGEPKGIAGPKALKRAFQS | | | |
| | | VFATVTLTTGSLQGCLGRSTNLSKAE | | | |
| | | VAQLTQHVSSAVSTVNSAKHIVYKLI | | | |
| | | EMRILQPLIETGLNQAEDGPDESFLE | | | |
| | | KILDSDWAERFVQNLLSFVLRNSIVP | | | |
| | | QGRPPASDKSKDAVAEAISTFNEFKK | | | |
| | | TLCPGFKALNSTDLALSNIIAELAPKI | | | |
| | | CLDQKLHYRRIPETLRTKLSKLSIDC | | | |
| | | DGLPEIDQDGTDAGGDAGAADVNE | | | |
| | | GVDDDDALKRSKKIIFKPGHIQLCW | | | |
| | | RYFLLLPSSKRPRFCTQAKMSDSFID | | | |
| | | INEEALVALLWGEKAVQLDNVWED | | | |
| | | TRYTHNWAAAKQRSSYGEVIKELFI | | | |
| | | GDRDVIKEARNKQQTTYGKRTTTM | | | |
| | | AEQRHNASLTAPTPPLPSSTPSSSTTS | | | |
| | | TPPPLPTPRQQPRSYRYALNNYIRTD | | | |
| | | GHQLQILAYDLTKPRQSPNYSEFLSR | | | |
| | | IEKLYPTRQHLIDAFGDDLDSVIVVG | | | |
| | | IDPGEVVSGAFCLTLPGGKVINLLIK | | | |
| | | RASLYQPTLAFRDWEQHWKRRHPT | | | |
| | | AGPGDVVDSSLWTRITDLDKLTTLP | | | |
| | | SVHDLENSLPSTNYDTSLDALTAAH | | | |
| | | KKYYEQEPLIHGIYASREWKVAVHE | | | |
| | | HRMAKMSELDLAVAGVLRMVDEA | | | |
| | | CEGVPSAALGYKAALVDEYLTSTM | | | |
| | | CPTCVVENRATRLAKPSMRTCACVE | | | |
| | | CTRWIHRDGVGAHNIALIGEQYLKS | | | |
| | | LGRPEPLARPPKQT | | | |
| DDE_Tnp_1_7 | KAG9072475.1 | MDSSLEFLGSFDVSDSQGTVVASAE | 1465 | Transposase | Linnemannia |
| | | EVDEAQEEEELLFSVRCRTRPTPGTD | | IS4 | hyalina |
| | | SSGDEEEEKAGDEGVIDASAPPTKKI | | | |
| | | FSDPVLTDLADNTNAYAASKGAGTG | | | |
| | | EGSRQWVKTTPDELRTFLGIIVYMG | | | |
| | | VFRQNSVSEYWSTFPECPQHNITTF | | | |
| | | MSLVRFEQLKRFFHVSNPNEPEQHW | | | |
| | | FSKVEPQASSGPERAADVDGAGMS | | | |
| | | THTTTSTRQASSSPKRAADVDDADT | | | |
| | | ADTASSNKRLRPLQISSGSSTLVEDM | | | |
| | | QRLLATQPSQIRFDESGALTTICAQE | | | |
| | | KVIDFRSVGAAIEKILSSRLSKDITML | | | |
| | | HMDGLRSMEKEWAHGKRDQALSK | | | |
| | | QLETLERDYTEGKLHNKRQLYKRL | | | |
| | | KASYRAPPEALRAVSEVLRQSGWTI | | | |
| | | CQCLNQSDTCIARTVNNAAVPGDIR | | | |
| | | VITKDSDLMAFESIMSVTMPVKNTW | | | |
| | | TTFHKDELLNEHGLPTPVHLTLAAL | | | |
| | | VSNNDYTNGVFSYGLTSNVDTIRQF | | | |
| | | KMTGLDGTVGQDRVEVVRIYVRRY | | | |
| | | LDIIHQKARTIKDSATQSARRRLRCN | | | |
| | | PNPTVKAHDKDLRRIETADRQLRVD | | | |
| | | VTEFGHALKTFGAATDAEATPPPLPT | | | |
| | | APKAGSAPYPQATSAGSPSIRQTHGP | | | |
| | | AEHPPSHKQKIKKQRRHGSRALQRR | | | |
| | | RQKWRRSRFRSRTDVQDRYVPNTV | | | |
| | | FLEKASPVDVVELSGLKPSTPRPSKP | | | |
| | | KEQSPRINQVPAPAAKKKKKKLLGE | | | |
| | | PKGIAGPKALKRAFQSVFATVTLTTG | | | |
| | | SLQGCLGRSTNLSKAEVAQLTQHVS | | | |
| | | SAVSTVNSAKHIVYKLIEMRILQPLIE | | | |
| | | TGLNQAEDGPDESFLEKILDSDWAE | | | |
| | | RFVQNLLSFVLRNSIVPQGRPPASDK | | | |
| | | SKDAVAEAISTFNEFKKTLCPGFKAL | | | |
| | | NSTDLALSNIIAELAPKICLDQKLHY | | | |
| | | RRIPETLRTKLSKLSIDCDGLPEIDQD | | | |
| | | DTDAGGDAGAADVNEGVDDDDAL | | | |
| | | KRSKKIIFKPGHIQLCWRYFLLLSSS | | | |
| | | KRPRFCTQAKMSDSFIDINEEALVAL | | | |
| | | LWGEKAAQLDNVWEDTRYTHNWA | | | |
| | | AAKQRSSYGEVIKELFIGDRDVIKEA | | | |
| | | RNKQQTTYGKRTTTMAEREEAHPHI | | | |
| | | YGQLELARYLTNKVNFFRERHNASL | | | |
| | | TAPTPPLPSSTSSSSTTSTPPPLPTPRQ | | | |
| | | QPRSYRYALNNYIRTDGHQLQILAY | | | |
| | | DLTKPRQSPNYSEFLSRIEKLYPTRQ | | | |
| | | HLIDAFGDDLDSVIVVGIDPGEVVSG | | | |
| | | AFCLTLPGGKVINLLIKRASLYQPTL | | | |
| | | AFRDWEQHWKRRHPTAGPGDVVD | | | |
| | | SSLWTRITDLDKLTTLPEFSPSTNYD | | | |
| | | TSLDALTAAHKKYYEQEPLIHGIYAS | | | |
| | | REWKVAVHEHRMAKMSELDLAVAG | | | |
| | | VLRMVDEACEGVPSAALGYKAALV | | | |
| | | DEYLTSTMCPTCVVENRATRLAKPS | | | |
| | | MRTCACVECTRWIHRDGVGAHNIA | | | |
| | | LIGEQYLKSLGRPEPLARPPNKPNLY | | | |
| | | R | | | |
| DDE_Tnp_1_7 | KAG9064049.1 | MDSSLEFLGSFDVSDSQGTVVASAE | 1466 | Transposase | Linnemannia |
| | | EVDEAQEEEELLFSVRCRTRPTPGTD | | IS4 | hyalina |
| | | SSGDEEEEKAGDEGVIDASAPPTKKI | | | |
| | | FSDPVLTDLADNTNAYAASKGAGTG | | | |
| | | EGSRQWVKTTPDELRTFLGIIVYMG | | | |
| | | VFRQNSVSEYWSTFPECPQHNITTF | | | |
| | | MSLVRFEQLKRFFHVSNPNEPEQHW | | | |
| | | FSKVEPQASSGPERAADVDGAGMS | | | |
| | | THTTTSTRQASSSPKRAADVDDADT | | | |
| | | ADTASSNKRLRPLQISSGSSTLVEDM | | | |
| | | QRLLATQPSQIRFDESGVLTTICAQE | | | |
| | | KVIDFRSVGAAIEKILSSRLSKDITML | | | |
| | | HMDGLRSMEKEWAHGKRDQALSK | | | |
| | | QLETLERDYTEGKLHNKRQLYKRL | | | |
| | | KASYRAPPEALRAVSEVLRQSGWTI | | | |
| | | CQCLNQSDTCIARTVNNAAVPGDIR | | | |
| | | VITKDSDLMAFESIMSVTMPVKNTW | | | |
| | | TTFHKDELLNEHGLPTPVHLTLAAL | | | |
| | | VSNNDYTNGVFSYGLTSNVDTIRQF | | | |
| | | KMTGLDGTVGQDRVEVVRIYVRRY | | | |
| | | LDIIHQKARTIKDSATQSARRRLRCN | | | |
| | | PNPTVKAHDKDLRRIETADRQLRVD | | | |
| | | VTEFGHALKTFGAATDAEATPPPLPT | | | |
| | | APKAGSAPYPQATSAGSPSIRQTHGP | | | |
| | | AEHPPSHKQKIKKQRRHGSRALQRR | | | |
| | | RQKWRRSRFRSRTDVQDRYVPDTV | | | |
| | | FLEKASPVDVVELSGLKPSTPRPSKP | | | |
| | | KEQSPRIDQVPAPAAKKKKKKLLGE | | | |
| | | PKGIAGPKALKRAFQSVFATVTLTTG | | | |
| | | SLQGCLGRSTNLSKAEVAQLTQHVS | | | |
| | | SAVSTVNSAKHIVYKLIEMRILQPLIE | | | |
| | | TGLNQAEDGPDESFLEKILDSDWAE | | | |
| | | RFVQNLLSFVLRNSIVPQGRPPASDK | | | |
| | | SKDAVAEAISTFNEFKKTLCPGFKAL | | | |
| | | NSTDLALSNIIAELAPKICLDQKLHY | | | |
| | | RRIPETLRTKLSKLSIDCDGLPEIDQD | | | |
| | | GTDAGGDAGAADVNEGVDDDDAL | | | |
| | | KRSKKIIFKPGHIQLCWRYFLLLPSS | | | |
| | | KRPRFCTQAKMSDSFIDINEEALVAL | | | |
| | | LWGEKAVQLDNVWEDTRYTHNWA | | | |
| | | AAKQRSSYGEVIKELFIGDRDVIKEA | | | |
| | | RNKQQTTYGKRTTTMAEREEAHPHI | | | |
| | | YGQLELARYLTNKVNFFRERHNASL | | | |
| | | TAPTPPLPSSTPSSSTTSTPPPLPTPRQ | | | |
| | | QPRSYRYALNNYIRTDGHQLQILAY | | | |
| | | DLTKPRQSPNYSEFLSRIEKLYPTRQ | | | |
| | | HLIDAFGDDLDSVIVVGIDPGEVVSG | | | |
| | | AFCLTLPGGKVINLLIKRASLYQPTL | | | |
| | | AFRDWEQHWKRRHPTAGPGDVVD | | | |
| | | SSLWTRITDLDKLTTLPSVHDLENSL | | | |
| | | PSTNYDTSLDALTAAHKKYYEQEPL | | | |
| | | IHGIYASREWKVAVHEHRMAKMSEL | | | |
| | | DLAVAGVLRMVDEACEGVPSAALG | | | |
| | | YKAALVDEYLTSTMCPTCVVENRAT | | | |
| | | RLAKPSMRTCACVECTRWIHRDGV | | | |
| | | GAHNIALIGEQYLKSLGRPEPLARPP | | | |
| | | KQT | | | |
| DDE_Tnp_1_7 | KAG9061854.1 | MDSSLEFLGSFDVSDSQGTIVASAEE | 1467 | Transposase | Linnemannia |
| | | VDEAQEEELLFSVRCRTRPTPGTDSS | | IS4 | hyalina |
| | | GDEEEEEKKAGDEGVIGAPTPPTKK | | | |
| | | KAAKKAAKKPVRETRELPPVLDFD | | | |
| | | NIFRHYKDGHPAQSNLPRALRLDSE | | | |
| | | LSPLTIFTLFFSDPVLTDLADNTNAYA | | | |
| | | ASKGAGTGEGSRQWVKTTPDELRT | | | |
| | | FLGIIVYMGVFRQNSVSEYWSTFPE | | | |
| | | CPQHNITTFMSLVRFEQLKRFFHVSN | | | |
| | | PNEPEQHWFSKVEPQASSGPERAAD | | | |
| | | VDGAGMSTHTTTSTRQASSSPKRAA | | | |
| | | DVDDVDTADTASSNKRLRPLQISSG | | | |
| | | SSTLVEDMQRLLATQPSQIRFDESGA | | | |
| | | LTTICAQEKVIDFRSVGAAIEKILSSR | | | |
| | | LSKDITMLHMDGLRSMEKEWAHGK | | | |
| | | RDQALSKQLETLERDYTEGKLHNK | | | |
| | | RQLYKRLKASYRAPPEALRAVSEVL | | | |
| | | RQSGWTICQCLNQSDTCIARTVNNA | | | |
| | | AVPGDIRVITKDSDLMAFESIMSVTM | | | |
| | | PVKNTWTTFHKDELLNEHGLPTPVH | | | |
| | | LTLAALVSNNDYTNGVFSYGLTSNV | | | |
| | | DTIRQFKMTGLDGTVGQDRVEVVRI | | | |
| | | YVRRYLDIIHQKARTIKDSATQSARR | | | |
| | | RLRCNPNPTVKAHDKDLRRIETADR | | | |
| | | QLRVDVTEFGHALKTFGAATDAEAT | | | |
| | | PPPLPTAPKAGSAPYPQATSAGSPSIR | | | |
| | | QTHGPAEHPPSHKQKIKKQRRHGSR | | | |
| | | ALQRRRQKWRRSRFRSRTDVQDRY | | | |
| | | VPDTVFLEKASPVDVVELSGLKPSIP | | | |
| | | RPSKPKEQSPRIDQVPAPAAKKKKK | | | |
| | | KLLGEPKGIAGPKALKRAFQSVFAT | | | |
| | | VTLTTGSLQGCLGRSTNLSKAEVAQ | | | |
| | | LTQHVSSAVSTVNSAKHIVYKLIEM | | | |
| | | RILQPLIETGLNQAEDGPDESFLEKIL | | | |
| | | DSDWAERFVQNLLSFVLRNSIVPQG | | | |
| | | RPPASDKSKDAVAEAISTFNEFKKTL | | | |
| | | CPGFKALNSTDLALSNIIAELAPKICL | | | |
| | | DQKLHYRRIPETLRTKLSIDCDGLPE | | | |
| | | IDQDDTDAGGDAGAADVNEGVDD | | | |
| | | DDALKRSKKIIFKPGHIQLCWRYFLL | | | |
| | | LPSSKRPRFCTQAKMSDSFIDINEEA | | | |
| | | LVALLWGEKAVQLDNVWEDTRYTH | | | |
| | | NWAAAKQRSSYGEVIKELFIGDRDV | | | |
| | | IKEARNKQQTTYGKRTTTMAEREEA | | | |
| | | HPHIYGQLELARYLTNKVNFFRERH | | | |
| | | NASLTAPTPPLPSSTPSSSTTSTPPPLP | | | |
| | | TPRQQPRSYRYALNNYIRTDGHQLQI | | | |
| | | LAYDLTKPRQSPNYSEFLSRIEKLYP | | | |
| | | TRQHLIDAFGDDLDSVIVVGIDPGEV | | | |
| | | VSGAFCLTLPGGKVINLLIKRASLYQ | | | |
| | | PTLAFRDWEQHWKRRHPTAGPGDV | | | |
| | | VDSSLWTRITDLDKLTTLPSVHDLEN | | | |
| | | SLPSTNYDTSLDALTAAHKKYYEQE | | | |
| | | PLIHGIYASREWKVAAHEHRMAKM | | | |
| | | SELDLAVAGVLRMVDEACEGVPVH | | | |
| | | QRKSAALGYKAALVDEYLTSTMCP | | | |
| | | TCVVENRATRLAKPSMRTCACVECT | | | |
| | | RWIHRDGVGAHNIALIGEQYLKSLG | | | |
| | | RPEPLARPPKQT | | | |
| DDE_Tnp_1_7 | KAG9064695.1 | MDSSLEFLGSFDVSDSQGTVVASAE | 1468 | Transposase | Linnemannia |
| | | EVDEAQEEEELLFSVRCRTRPTPGTD | | IS4 | hyalina |
| | | SSGDEEEEKAGDEGVIDASAPPTKKI | | | |
| | | FSDPVLTDLADNTNAYAASKGAGTG | | | |
| | | EGSRQWVKTTPDELRTFLGIIVYMG | | | |
| | | VFRQNSVSEYWSTFPECPQHNITTF | | | |
| | | MSLVRFEQLKRFFHVSNPNEPEQHW | | | |
| | | FSKVEPQASSGPERAADVDGAGMS | | | |
| | | THTTTSTRQASSSPKRAADVDDADT | | | |
| | | ADTASSNKRLRPLQISSGSSTLVEDM | | | |
| | | QRLLATQPSQIRFDESGALTTICAQE | | | |
| | | KVIDFRSVGAAIEKILSSRLSKDITML | | | |
| | | HMDGLRSMEKEWAHGKRDQALSK | | | |
| | | QLETLERDYTEGKLHNKRQLYKRL | | | |
| | | KASYRAPPEALRAVSEVLRQSGWTI | | | |
| | | CQCLNQSDTCIARTVNNAAVPGDIR | | | |
| | | VITKDSDLMAFESIMSVTMPVKNTW | | | |
| | | TTFHKDELLNEHGLPTPVHLTLAAL | | | |
| | | VSNNDYTNGVFSYGLTSNVDTIRQF | | | |
| | | KMTGLDGTVGQDRVEVVRIYVRRY | | | |
| | | LDIIHQKARTIKDSATQSARRRLRCN | | | |
| | | PNPTVKAHDKDLRRIETADRQLRVD | | | |
| | | VTEFGHALKTFVLCEETTLDNNRISP | | | |
| | | AADTHTRLMAIIKETEFNKAYNDW | | | |
| | | RRFSASRTGSLPPGLLVDPASQGAAT | | | |
| | | DAEATPPPLPTAPKAGSAPYPQATSA | | | |
| | | GSPSIRQTHGPAEHPPSHKQKIKKQR | | | |
| | | RHGSRALQRRRQKWRRSRFRSRTD | | | |
| | | VQDRYVPNTVFLEKASPVDVVELSG | | | |
| | | LKPSTPRPSKPKEQSPRINQVPAPAA | | | |
| | | KKKKKKLLGEPKGIAGPKALKRAF | | | |
| | | QSVFATVTLTTGSLQGCLGRSTNLSK | | | |
| | | AEVAQLTQHVSSAVSTVNSAKHIVY | | | |
| | | KLIEMRILQPLIETGLNQAEDGPDES | | | |
| | | FLEKILDSDWAERFVQNLLSFVLRNS | | | |
| | | IVPQGRPPASDKSKDAVAEAISTFNE | | | |
| | | FKKTLCPGFKALNSTDLALSNIIAEL | | | |
| | | APKICLDQKLHYRRIPETLRTKLSID | | | |
| | | CDGLPEIDQDDTDAGGDAGAADVN | | | |
| | | EGVDDDDALKRSKKIIFKPGHIQLC | | | |
| | | WRYFLLLSSSKRPRFCTQAKMSDSFI | | | |
| | | DINEEALVALLWGEKAAQLDNVWE | | | |
| | | DTRYTHNWAAAKQRSSYGEVIKELF | | | |
| | | IGDRDVIKEARNKQQTTYGKRTTTM | | | |
| | | AEREEAHPHIYGQLELARYLTNKVN | | | |
| | | FFRERHNASFTAPTPPLPSSTSSSSTT | | | |
| | | STPPPLPTPRQQPRSYRYALNNYIRT | | | |
| | | DGHQLQILAYDLTKPRQSPNYSEFLS | | | |
| | | RIEKLYPTRQHLIDAFGDDLDSVIVV | | | |
| | | GIDPGEVVSGAFCLTLPGGKVINLLI | | | |
| | | KRASLYQPTLAFRDWEQHWKRRHP | | | |
| | | TAGPGDVVDSSLWTRITDLDKLTTL | | | |
| | | PSVHDLENSLPSTNYDTSLDALTAA | | | |
| | | HKKYYEQEPLIHGIYASREWKVAVH | | | |
| | | EHRMAKMSELDLAVAGVLRMVDE | | | |
| | | ACEGVPVHQRKVFFALGNGTFRSGF | | | |
| | | NLSSVHITFLRRLLQQSAALGYKAA | | | |
| | | LVDEYLTSTMCPTCVVENRATRLAK | | | |
| | | PSMRTCACVECTRWIHRDGVGAHNI | | | |
| | | ALIGEQYLKSLGRPEPLARPPKQT | | | |
| DDE_Tnp_1_7 | KAG9068923.1 | MDSSLEFLGSFDVSDSQGTVVASAE | 1469 | Transposase | Linnemannia |
| | | EVDEAQEEEELLFSVRCRTRPTPGTD | | IS4 | hyalina |
| | | SSGDEEEEKAGDEGVIDASAPPTKK | | | |
| | | MKAAKKAAKKPVRETRELPPVPDF | | | |
| | | DNIFRHYKDGHPAQSNLPRALRLDS | | | |
| | | ELSPLTIFTLFFSDPVLTDLADNTNAY | | | |
| | | AASKGAGTGEGSCQWVKTTPYELR | | | |
| | | TFLGIIVYMGVFRQNSVSEYWSTFPE | | | |
| | | CPQHNITTFMSLVRFEQLKRFFHVSN | | | |
| | | PNEPEQHWFSKVEPQTSSGPERAAD | | | |
| | | VDGAGMSTHTTTSTRQASSSPKRAA | | | |
| | | DVDDADTADTASSNKRLRPLQISSG | | | |
| | | SSTLVEDMQRLLSTQPSQIRFDESGA | | | |
| | | LTTICAQEKVIDFRSVGAAIEKILSSR | | | |
| | | LSKDITMLHMDGLRSMEKEWAHGK | | | |
| | | RDQALSKQLETLERDYTEGKLHNK | | | |
| | | RQLYKRLKASYRAPPEALRAVSEVL | | | |
| | | RQSGWTICQCLNQSDTCIARTVNNA | | | |
| | | AVPGDIRVITKDSDLMAFESIMSVTM | | | |
| | | PVKNTWTTFHKDELLNEHGLPTPNN | | | |
| | | DYTNGVFSYGLTSNVDTIRQFKMTG | | | |
| | | LDGTVGQDRVEVVRIYVRRYLDIIH | | | |
| | | QKARTIKDSATQSARRRLRCNPNPT | | | |
| | | VKAHDKDLRRIETADRQLRVDVTEF | | | |
| | | GHALKTFVLCEETTLDNNRISPAAD | | | |
| | | THTRLMAIIKETEFNKAYNDWRRFS | | | |
| | | ASRRGSLPPGLLVDPASQGAATDAE | | | |
| | | ATPPPLPTAPKAGSAPYPQATSAGSP | | | |
| | | SIRQTHGPAEHPPSHKQKIKKQRRH | | | |
| | | GSRALQRRRQKWRRSRFRSRTDVQ | | | |
| | | DRYVPDTVFLEKASPVDVVELSGLK | | | |
| | | PSTPRPSKPKEQSPRIDQVPAPAAKK | | | |
| | | KKKKLLGEPKGIAGPKALKRAFQSV | | | |
| | | FATVTLTTGSLQGCLGRSTNLSKAEV | | | |
| | | AQLTQHVSSAVSTVNSAKHIVYKLIE | | | |
| | | MRILQPLIETGLNQAEDGPDESFLEK | | | |
| | | ILDSDWAERFVQNLLSFVLRNSIVPQ | | | |
| | | GRPPASDKSKDAVAEAISTFNEFKKT | | | |
| | | LCPGFKALNSTDLALSNIIAELAPKIC | | | |
| | | LDQKLHYRRIPETLRTKLSIDCDGLP | | | |
| | | EIDQDDTDADGDAGAADVNEGVDD | | | |
| | | DDALKRSKKIIFKPGHIQLCWRYFLL | | | |
| | | LPSSKRPRFCTQAKMSDSFIDINEEA | | | |
| | | LVALLWGEKAVQLDNVWEDTRYTH | | | |
| | | NWAAAKQRSSYGEVIKELFIGDRDV | | | |
| | | IKEARNKQQTTYGKRTTTMAEREEA | | | |
| | | HPHIYGQLELARYLTNKVNFFRERH | | | |
| | | NASLTAPTPPLPSSTSSSSTTSTPPPLP | | | |
| | | TPRQQPRSYRYALNNYIRTDGHQLQI | | | |
| | | LAYDLTKPRQSPKYSEFLSRIEKLYP | | | |
| | | TRQHLIDAFGDDLDSVIVVGIDPGEV | | | |
| | | VSGAFCLTLPGGKVINLLIKRASLYQ | | | |
| | | PTLAFRDWEQHWKRRHPTAGPGDV | | | |
| | | VDSSLWTRITDLDKLTTLPSVHDLEN | | | |
| | | SLPSTNYDTSLDALTAAHKKYYEQE | | | |
| | | PLIHGIYASREWKVAVHEHRMAKMS | | | |
| | | ELDLAVAGVLRMVDEACEGVPVHQ | | | |
| | | RKSAALGYKAALVDEYLTSTMCPTC | | | |
| | | VVENRATRLAKPSMRTCACVECTR | | | |
| | | WIHRDGVGAHNIALIGEQYLKSLGR | | | |
| | | PEPLARPPKPT | | | |
| DDE_Tnp_1_7 | KAG9069025.1 | MDSSLEFLGSFDVSDSQGTVVASAE | 1470 | Transposase | Linnemannia |
| | | EVDEAQEEEELFSVRCRTRPTPGTDS | | IS4 | hyalina |
| | | SGDEEEEEKAGDEGVIDATAPPTKK | | | |
| | | MKAAKKAAKKPVRETRELPPVLDF | | | |
| | | DNIFRHYKDGHPAQSNLPRALRLDS | | | |
| | | ELSPLTIFTLFFSDPVLTDLADNTNAY | | | |
| | | AASKGAGTGEGSRQWVKTTPDELR | | | |
| | | TFLGIIVYMGVFRQNSVSEYWSTFPE | | | |
| | | CPQHNITTFMSLVRFEQLKRFFHVSN | | | |
| | | PNEPEQHWFSKVEPQTSSGPERAAD | | | |
| | | VDGAGMSTHTTTSTRQASSSPKRAA | | | |
| | | DVDDADTADTASSNKRLRPLQISSG | | | |
| | | SSTLVEDMQRLLATQPSQIRFDESGA | | | |
| | | LTTICAQEKVIDFRSVGAAIEKILSSR | | | |
| | | LSKDITMLHMDGLRSMEKEWAHGK | | | |
| | | RDQALSKQLETLERDYTEGKLHNK | | | |
| | | RQLYKRLKASYRAPPEALRAVSEVL | | | |
| | | RQSGWTICQCLNQSDTCIARTVNNA | | | |
| | | AVPGDIRVITKDSDLMAFESIMSVTM | | | |
| | | PVKNTWTTFHKDELLNEHGLPTPVH | | | |
| | | LTLAALVSNNDYTNGVFSYGLTSNV | | | |
| | | DTIRQFKMTGLDGTVGQDRVEVVRI | | | |
| | | YVRRYLDIIHQKARTIKDSATQSARR | | | |
| | | RLRCNPNPTVKAHDKDLRRIETADR | | | |
| | | QLRVDVTEFGHALKTFVLCEETTLD | | | |
| | | NNRISPAADTHTRLMAIIKETEFNKA | | | |
| | | YNDWRRFSASRTGSLPPGLLVDPAS | | | |
| | | QGAATDAEATPPPLPTAPKAGSAPYP | | | |
| | | QATSAGSPSIRQTHGPAEHPPSHKQK | | | |
| | | IKKQRRHGSRALQRRRQKWRRSRF | | | |
| | | RSRTDVQDRYVPDTVFLEKASPVDV | | | |
| | | VELSGLKPSTPRPSKPKEQSPRIDQV | | | |
| | | PAPAAKKKKKKLLGEPKGIAGPKAL | | | |
| | | KRAFQSVFATVTLTTGSLQGCLGRST | | | |
| | | NLSKAEVAQLTQHVSSAVSTVNSAK | | | |
| | | HIVYKLIEMRILQPLIETGLNQAEDG | | | |
| | | PDESFLEKILDSDWAERFVQNLLSFV | | | |
| | | LRNSIVPQGRPPASDKSKDAVAEAIS | | | |
| | | TFNEFKKTLCPGFKALNSTDLALSNI | | | |
| | | IAELAPKICLDQKLHYRRIPETLRTK | | | |
| | | LSIDCDGLPEIDQDGTDAGGDAGAA | | | |
| | | DVNEGVDDDDALKRSKKIIFKPGHI | | | |
| | | QLCWRYFLLLPSSKRPRFCTQAKMS | | | |
| | | DSFIDINEEALVALLWGEKAVQLDN | | | |
| | | VWEDTRYTHNWAAAKQRSSYGDVI | | | |
| | | KELFIGDRDVIKEARNKQQTTYGKR | | | |
| | | TTTMAEREEAHPHIYGQLELARYLT | | | |
| | | NKVNFFRERHNASLTAPTPPLPSSTS | | | |
| | | SSSTTSTPPPLPTPRQQPRSYRYALN | | | |
| | | NYIRTDGHQLQILAYDLTKPRQSPNY | | | |
| | | SEFLSRIEKRYPTRQHLIDAFGDDLD | | | |
| | | SVIVVGIDPGEVVSGAFCLTLPGGKV | | | |
| | | INLLIKRASLYQPTLAFRDWEQHWK | | | |
| | | RRHPTAGPGDVVDSSLWTRITDLDK | | | |
| | | LTTLPSVHDLENSLPSTNYDTSLDAL | | | |
| | | TAAHKKYYEQEPLIHGIYASREWKV | | | |
| | | AVHEHRMAKMSELDLAVAGVLRMV | | | |
| | | DEACEGVPVHQRKSAALGYKAALV | | | |
| | | DEYLTSTMCPTCVVENRATRLAKPS | | | |
| | | MRTCACVECTRWIHRDGVGAHNIA | | | |
| | | LIGEQYLKSLGRPEPLARPPKQTKPL | | | |
| DDE_Tnp_1_7 | KAG9069522.1 | MVIRHLAVESDRRSLASLLRVNKYV | 1471 | Transposase | Linnemannia |
| | | CSATQPVMYADPFYLRPFSAFSMET | | IS4 | hyalina |
| | | PFSLIRLLSLIKLLLLSLPEGQVVTDL | | | |
| | | LRIAYLSTASASADDKTTEHQEQEAP | | | |
| | | PLISATFEVHSFSAGIFFTPPFPSYSAI | | | |
| | | LDYLENNGLAERYTARDVTSRLKH | | | |
| | | YEQPRIIRQGVKRDLRRDLTWALSIV | | | |
| | | GRLQVLSNVTLLLDSDLEPFLLFGQ | | | |
| | | QFEEGDQEVLELQQREREEHMEEMI | | | |
| | | LFVQEHRQRFPNTLNQGQCVTDTFT | | | |
| | | KEEWPKEVHDRLLQSLPPLYKPRFID | | | |
| | | NTNWVQFFARVEDVDLSAVKFIRTQ | | | |
| | | LIKPEEPVFDQVIEQVGPFLHRCRAL | | | |
| | | EDVQISSSGEEAFRWAVDERKQFER | | | |
| | | DIEDGRTTPRRPLVPLHQLHVSFDDH | | | |
| | | PSSGGLFDDIVFAFQETLEKIFIGICV | | | |
| | | SVEQNSTQSLEFSIGDNNNNNNNNN | | | |
| | | NNYYQSYWELPQLSRLAVATGHIFL | | | |
| | | HVHPKFLQRCTQVMHISLADMRRE | | | |
| | | YSLDQVNHWEPAKMPRLESLTLQG | | | |
| | | TAAISFHPDTPKYALELQKLHLQMV | | | |
| | | QNEDGMTCFIPPAEELDAIIEGESTID | | | |
| | | RGGSDNVDDGMTPSLLAPLARRPV | | | |
| | | WTWDWELPKLTDMTLTGEHAYRFQ | | | |
| | | FRMLDGTPNLINFSLDIVSTTALHQR | | | |
| | | TIHLKDLIKPGSQQQQQQQQKQQQQ | | | |
| | | QQQKQQQQQHQQTQDGEEIYEEQQ | | | |
| | | DLEYILVSTLKRLSLYGSWQMTTHIL | | | |
| | | QTLFSRVAPEISNLTMSSCLGHDFSE | | | |
| | | WVDATKQYLHGLVAAELNMDVSEE | | | |
| | | EEMADAGLVEAMMEEGILEFLGSFD | | | |
| | | VSDSQGTVVASAEEVDEAQEEEELL | | | |
| | | FSVRCRTRPTPGTDSSGDEEEEKAG | | | |
| | | DEGVIDASAPPTKKIFSDPVLTDLAD | | | |
| | | NTNAYAASKGAGTGEGSRQWVKTT | | | |
| | | PDELRTFLGIIVYMGVFRQNSVSEY | | | |
| | | WSTFPECPQHNITTFMSLVRFEQLKR | | | |
| | | FFHVSNPNEPEQHWFSKVEPQASSG | | | |
| | | PERAADVDGAGMSTHTTTSTRQASS | | | |
| | | SPKRAADVDDADTADTASSNKRLRP | | | |
| | | LQISSGSSTLVEDMQRLLATQSSQIR | | | |
| | | FDESGALTTICAQEKVIDFRSVGAAI | | | |
| | | EKILSSRLSKDITMLHMDGLRSMEK | | | |
| | | EWAHGKRDQALSKQLETLERDYTE | | | |
| | | GKLHNKRQLYKRLKASYRAPPEAL | | | |
| | | RAVSEVLRQSGWTICQCLNQSDTCI | | | |
| | | ARTVNNAAVPGDIRVITKDSDLMAF | | | |
| | | ESIMSVTMPVKNTWTTFHKDELLNE | | | |
| | | HGLPTPVHLTLAALVSNNDYTNGVF | | | |
| | | SYGLTSNVDTVRQFKMTGLDGTVG | | | |
| | | QDRVEVVRIYVRRYLDIIHQKARTIK | | | |
| | | DSATQSARRRLRCNPNPTVKAHDK | | | |
| | | DLRRIETADRQLRVDVTEFGHALKT | | | |
| | | FGAATDAEATPPPLPTAPKAGSAPYP | | | |
| | | QATSAGSPSIRQTHGPAEHPPSHKQK | | | |
| | | IKKQRRHGSRALQRRRQKWRRSRF | | | |
| | | RSRTDVQDRYVPDTVFLEKASPVDV | | | |
| | | VELSGLKPSTPRPSKPKEQSPRIDQV | | | |
| | | PAPAAKKKKKKLLGEPKGIAGPKAL | | | |
| | | KRAFQSVFATVTLTTGSLQGCLGRST | | | |
| | | NLSKAEVAQLTQHVSSAVSTVNSAK | | | |
| | | HIVYKLIEMRILQPLIETGLNQAEDG | | | |
| | | PDESFLEKILDSDWAERFVQNLLSFV | | | |
| | | LRNSIVPQGRPPASDKSKDAVAEAIS | | | |
| | | TFNEFKKTLCPGFKALNSTDLALSNI | | | |
| | | IAELAPKICLDQKLHYRRIPETLRTK | | | |
| | | LSKLSIDCDGLPEIDQDGTDAGGDA | | | |
| | | GAADVNEGVDDDDALKRSKKIIFKP | | | |
| | | GHIQLCWRYFLLLPSSKRPRFCTQA | | | |
| | | KMSDSFIDINEEALVALLWGEKAVQ | | | |
| | | LDNVWEDTRYTHNWAAAKQRSSY | | | |
| | | GEVIKELFIGDRDVIKEARNKQQTT | | | |
| | | YGKRTTTMAEREEAHPHIYGQLELA | | | |
| | | RYLTNKVNFFRERHNASLTAPTPPLP | | | |
| | | SSTPSSSTTSTPPPLPTPRQQPRSYRY | | | |
| | | ALNNYIRTDGHQLQILAYDLTKPRQ | | | |
| | | SPNYSEFLSRIEKLYPTRQHLIDAFG | | | |
| | | DDLDSVIVVGIDPGEVVSGAFCLTLP | | | |
| | | GGKVINLLIKRASLYQPTLAFRDWE | | | |
| | | QHWKRRHPTAGPGDVVDSSLWTRI | | | |
| | | TDLDKLTTLPSVHDLENSLPSTNYD | | | |
| | | TSLDALTAAHKKYYEQEPLIHGIYAS | | | |
| | | REWKVAVHEHRMAKMSELDLAVAG | | | |
| | | VLRMVDEACEGVPSAALGYKAALV | | | |
| | | DEYLTSTMCPTCVVENRATRLAKPS | | | |
| | | MRTCACVECTRWIHRDGVGAHNIA | | | |
| | | LIGEQYLKSLGRPEPLARPPKQT | | | |
| DDE_Tnp_4 | MBP2579587.1 | MDENTTTVVVRETLDPTADQRAILQ | 1472 | DDE | Streptomyces sp. |
| | | RYADASRCSFNYALGLKHGAQQLW | | superfamily | PvR006 |
| | | AHGRDQLVAQGQTPAEAARNAPKIE | | endonuclease | |
| | | VPSQFAVQKIFLAQRDQPLPGPQLPG | | | |
| | | QEPRLLFPWWKGVNAIVCQQAFRD | | | |
| | | ADAAFSNWKSAGRRKGVPVGYPRF | | | |
| | | KRRGRRRDSFRMFAVRLVEQDLRH | | | |
| | | VRIGGGGGQPAFSVRLHRPARRLAR | | | |
| | | LLARGGVAKSVTISREGHRWVAAFN | | | |
| | | VRVPVGPVPRPSRRQREAGAVGVDL | | | |
| | | GVKVFVATSDPVVINDHKIQLFENA | | | |
| | | RHLENTRRQLRKWQRRMARRHVR | | | |
| | | GLRSHEQSQGWRDARDQVARLHAL | | | |
| | | VAARRASSQHLVTKRLVTQYAHVAL | | | |
| | | EDLRVKSMTASARGAVESPGRNVRA | | | |
| | | KAGLNRAILDVGFGEIRRQIEYKAVL | | | |
| | | NGTRVTVVDPAYTSQTCNRCGHVD | | | |
| | | AKSRRTAISSPAPTAATPLTPTIPSRSC | | | |
| | | WRRSSPSSPPTSPVSRSRSTRRCTAY | | | |
| | | TSRICVTTLQTSSSPGSPPWTPSGSRS | | | |
| | | PTPTKAGDSAAPFVAFGRLRTFTPKG | | | |
| | | CCRRLSSGHFPCMGGVLRAEPVWV | | | |
| | | ETFTGLRMDRFVKLVKVVRERGGN | | | |
| | | GPGGGRPWCLPLPDRVLLVAVYYRT | | | |
| | | NLTMRQLAPLFGISPATVCRVIQRLR | | | |
| | | PLLALERAPQPVVDTERLWIVDGTLI | | | |
| | | PVRDRKVGASSRNYRFSANVQVIID | | | |
| | | ADTRLVIAAARPAPGNKADAHVWR | | | |
| | | GSDLPALAAGTTVIADGAYLGTGLI | | | |
| | | VPHRKRAGRPLLRGQEEDNAEHRR | | | |
| | | VRARVEHTFARMKNWKILRDCRQK | | | |
| | | GDGLHHAIQAAATMHNLAMTR | | | |
| DDE_Tnp_I | CAG8582489.1 | FWSQKAKEISEKLWLPDKHDLKKS | 1473 | ISXO2-like | Scutellospora |
| S1595 | | NLNSHSWFNIKKLEQVFLKNVEVPII | | transposase | calospora |
| | | SRQQQNIIDSEDDRLKCRKIRIYPNK | | domain | |
| | | KEKQTLKKWIGDARWTYNQCLDSL | | | |
| | | NDIRDMKTKKEKIQYMRQKHIVLET | | | |
| | | PKAIRDAAMMDLFKNIKSNHILKRA | | | |
| | | RFILKKRRKKDVNQSITIQVENIRCK | | | |
| | | TGMYSFVKKIKTKEKIPEIKHALNIV | | | |
| | | MNRLKHFYICISIDIEKHEIVNEDIISL | | | |
| | | DPGVRTFMTGYDPKGNILEFGNKDI | | | |
| | | DKIQEKCQRYDKLQSCMNQELDKR | | | |
| | | LSSQDCEIYLSELPDCVSMLTWSHY | | | |
| | | KFKMFLRHKVREYPDMNMIEYTEE | | | |
| | | YTSKTCTRCGIINEKLGGSKNFNCGS | | | |
| | | CGLKIDRDHNAERITLFLDNITKIIKN | | | |
| | | KSDKENKDMNDDDYLSEGEKRVFL | | | |
| | | KIVEKRDKETIKKIIEDHVEKGSIVH | | | |
| | | TDCWGGYLGIEDLGVAHETVNHSK | | | |
| | | NFTDPETGVNTNMIEGLWNGIKLQI | | | |
| | | APRNRNKNLINDHLLEYIWRRINKD | | | |
| | | KLWEAFIYALRSTAYYDNK | | | |
| DDE_Tnp_I | CAG8447381.1 | MNLYKLLISLLVLQIIFVVLFSNICLA | 1474 | ISXO2-like | Scutellospora |
| S1595 | | DSDEKNDGNKKENKNLSPNFDITKA | | transposase | calospora |
| | | KEISERLWLPEKHDLKISNFISHSWF | | domain | |
| | | NIKRSEQVSIKNVEIPIIPRYQEHIDSE | | | |
| | | NDELKTKKIRIYPTKEEKQKLKSWI | | | |
| | | GTARWTYNQCLDSLDEIRNLKTKKE | | | |
| | | KIQYMRQKHIVASNYKNTELSWVID | | | |
| | | TPSSVRDAAMMDLFKNIKSNHARKI | | | |
| | | ARFTLKKQKKKDKNQSITIEHLWFN | | | |
| | | KSKIFSFLRNIKTKEKIPEIKHAVNIIM | | | |
| | | NRLKYFYICIPIPTNINKHESINEDVL | | | |
| | | TLDPGVRTFMTGYDTKGNISEFGNK | | | |
| | | DIDKIQIRCLRYDKLQSCLNQESDKG | | | |
| | | LSLQDSEISMSELSDCVTARNMLTW | | | |
| | | SHYKFKMFLRHKIREYLDMNLIECT | | | |
| | | EEYTSKTCTRCGMINKLGGSKNFTC | | | |
| | | GSCGLKIDRDHNEKRDSETIRKIIED | | | |
| | | HVEKGSIVHTDRWKGYLGIENLGVT | | | |
| | | HKSVNYSKNFTDPITGVHTNMIEGL | | | |
| | | WNGIKLQIALRNRNKNLIKDHLLEFI | | | |
| | | WRRINKDKLWDAFIYALQSTAYYEN | | | |
| | | K | | | |
| Phage_ | WP_161234386.1 | MARPRAKKKKVSSGTHTRSVFLYG | 1475 | Phage | Blautia wexlerae |
| integrase | | SPNAEKRSTLEKLQADYTDAVNFYI | | integrase | |
| | | SLLSDREECLLQLLQNDKKDPLLRK | | family | |
| | | LEKESRIEGLSSAYSQNAFDEAVTKL | | | |
| | | HNRLDNIRKDVIAATGGSVFAVSILL | | | |
| | | FHAVLSGQSREEMCGMLARIRDSYK | | | |
| | | AKEKIQYYDKLHDTVKTMEEKEFL | | | |
| | | DSVSEVAMFYHIISDEYRIPVVKKAH | | | |
| | | VLSVTIPDRKRERMQVPVQADRDA | | | |
| | | LRRMEQYGVSGSMRYTITDGGSLKL | | | |
| | | TCSFEKKTRTPEEHSAVIGVDVGITD | | | |
| | | AFHTSEGQAIESFQPVIEFYQTEVEP | | | |
| | | AFGKLSTLRNRKQQLRRFLKKHKG | | | |
| | | VLPEKVILNLRKRIDHLEKDIRQAHA | | | |
| | | PYRRKRHYYQLVEYTVRNAVNTYIE | | | |
| | | SLNGDKTVLTAMELLDIKEFNKSRR | | | |
| | | VNGMLSDFSRGKLAEKLMEELSWH | | | |
| | | GFPFVQVEPAYTSQICPVCGCLDKAS | | | |
| | | RIIHKVFINGLVKNAIAELTEHTAELR | | | |
| | | KESGLKELFLCRIKSQNNKIAPYTET | | | |
| | | HWNDKKLRYFIERHDIRDNKGDLYP | | | |
| | | LTSHQFRSTFVRELIKRKVPIAMIMK | | | |
| | | QYSHVSIEMTAHYLTLQEEEVKEIYS | | | |
| | | DMILSPESKIAGLRAKEIKGKLDDLF | | | |
| | | HGKTEDEIDDVISGLAKTMSFNPLPT | | | |
| | | GVCLYDFRRGNCTDGDGCFFYNCP | | | |
| | | NYITEVQFYPILKDELDLLEKEMVR | | | |
| | | LKELGQEPAYQVQAVKYKYLKPLVE | | | |
| | | SLEVQLNGKESVG | | | |
| Phage_ | WP_161234386.1 | MARPRAKKKKVSSGTHTRSVFLYG | 1476 | Phage | Blautia wexlerae |
| integrase | | SPNAEKRSTLEKLQADYTDAVNFYI | | integrase | |
| | | SLLSDREECLLQLLQNDKKDPLLRK | | family | |
| | | LEKESRIEGLSSAYSQNAFDEAVTKL | | | |
| | | HNRLDNIRKDVIAATGGSVFAVSILL | | | |
| | | FHAVLSGQSREEMCGMLARIRDSYK | | | |
| | | AKEKIQYYDKLHDTVKTMEEKEFL | | | |
| | | DSVSEVAMFYHIISDEYRIPVVKKAH | | | |
| | | VLSVTIPDRKRERMQVPVQADRDA | | | |
| | | LRRMEQYGVSGSMRYTITDGGSLKL | | | |
| | | TCSFEKKTRTPEEHSAVIGVDVGITD | | | |
| | | AFHTSEGQAIESFQPVIEFYQTEVEP | | | |
| | | AFGKLSTLRNRKQQLRRFLKKHKG | | | |
| | | VLPEKVILNLRKRIDHLEKDIRQAHA | | | |
| | | PYRRKRHYYQLVEYTVRNAVNTYIE | | | |
| | | SLNGDKTVLTAMELLDIKEFNKSRR | | | |
| | | VNGMLSDFSRGKLAEKLMEELSWH | | | |
| | | GFPFVQVEPAYTSQICPVCGCLDKAS | | | |
| | | RIIHKVFINGLVKNAIAELTEHTAELR | | | |
| | | KESGLKELFLCRIKSQNNKIAPYTET | | | |
| | | HWNDKKLRYFIERHDIRDNKGDLYP | | | |
| | | LTSHQFRSTFVRELIKRKVPIAMIMK | | | |
| | | QYSHVSIEMTAHYLTLQEEEVKEIYS | | | |
| | | DMILSPESKIAGLRAKEIKGKLDDLF | | | |
| | | HGKTEDEIDDVISGLAKTMSFNPLPT | | | |
| | | GVCLYDFRRGNCTDGDGCFFYNCP | | | |
| | | NYITEVQFYPILKDELDLLEKEMVR | | | |
| | | LKELGQEPAYQVQAVKYKYLKPLVE | | | |
| | | SLEVQLNGKESVG | | | |
| Phage_ | WP_161234386.1 | MARPRAKKKKVSSGTHTRSVFLYG | 1477 | Phage | Blautia wexlerae |
| integrase | | SPNAEKRSTLEKLQADYTDAVNFYI | | integrase | |
| | | SLLSDREECLLQLLQNDKKDPLLRK | | family | |
| | | LEKESRIEGLSSAYSQNAFDEAVTKL | | | |
| | | HNRLDNIRKDVIAATGGSVFAVSILL | | | |
| | | FHAVLSGQSREEMCGMLARIRDSYK | | | |
| | | AKEKIQYYDKLHDTVKTMEEKEFL | | | |
| | | DSVSEVAMFYHIISDEYRIPVVKKAH | | | |
| | | VLSVTIPDRKRERMQVPVQADRDA | | | |
| | | LRRMEQYGVSGSMRYTITDGGSLKL | | | |
| | | TCSFEKKTRTPEEHSAVIGVDVGITD | | | |
| | | AFHTSEGQAIESFQPVIEFYQTEVEP | | | |
| | | AFGKLSTLRNRKQQLRRFLKKHKG | | | |
| | | VLPEKVILNLRKRIDHLEKDIRQAHA | | | |
| | | PYRRKRHYYQLVEYTVRNAVNTYIE | | | |
| | | SLNGDKTVLTAMELLDIKEFNKSRR | | | |
| | | VNGMLSDFSRGKLAEKLMEELSWH | | | |
| | | GFPFVQVEPAYTSQICPVCGCLDKAS | | | |
| | | RIIHKVFINGLVKNAIAELTEHTAELR | | | |
| | | KESGLKELFLCRIKSQNNKIAPYTET | | | |
| | | HWNDKKLRYFIERHDIRDNKGDLYP | | | |
| | | LTSHQFRSTFVRELIKRKVPIAMIMK | | | |
| | | QYSHVSIEMTAHYLTLQEEEVKEIYS | | | |
| | | DMILSPESKIAGLRAKEIKGKLDDLF | | | |
| | | HGKTEDEIDDVISGLAKTMSFNPLPT | | | |
| | | GVCLYDFRRGNCTDGDGCFFYNCP | | | |
| | | NYITEVQFYPILKDELDLLEKEMVR | | | |
| | | LKELGQEPAYQVQAVKYKYLKPLVE | | | |
| | | SLEVQLNGKESVG | | | |
| Phage_ | WP_161234386.1 | MARPRAKKKKVSSGTHTRSVFLYG | 1478 | Phage | Blautia wexlerae |
| integrase | | SPNAEKRSTLEKLQADYTDAVNFYI | | integrase | |
| | | SLLSDREECLLQLLQNDKKDPLLRK | | family | |
| | | LEKESRIEGLSSAYSQNAFDEAVTKL | | | |
| | | HNRLDNIRKDVIAATGGSVFAVSILL | | | |
| | | FHAVLSGQSREEMCGMLARIRDSYK | | | |
| | | AKEKIQYYDKLHDTVKTMEEKEFL | | | |
| | | DSVSEVAMFYHIISDEYRIPVVKKAH | | | |
| | | VLSVTIPDRKRERMQVPVQADRDA | | | |
| | | LRRMEQYGVSGSMRYTITDGGSLKL | | | |
| | | TCSFEKKTRTPEEHSAVIGVDVGITD | | | |
| | | AFHTSEGQAIESFQPVIEFYQTEVEP | | | |
| | | AFGKLSTLRNRKQQLRRFLKKHKG | | | |
| | | VLPEKVILNLRKRIDHLEKDIRQAHA | | | |
| | | PYRRKRHYYQLVEYTVRNAVNTYIE | | | |
| | | SLNGDKTVLTAMELLDIKEFNKSRR | | | |
| | | VNGMLSDFSRGKLAEKLMEELSWH | | | |
| | | GFPFVQVEPAYTSQICPVCGCLDKAS | | | |
| | | RIIHKVFINGLVKNAIAELTEHTAELR | | | |
| | | KESGLKELFLCRIKSQNNKIAPYTET | | | |
| | | HWNDKKLRYFIERHDIRDNKGDLYP | | | |
| | | LTSHQFRSTFVRELIKRKVPIAMIMK | | | |
| | | QYSHVSIEMTAHYLTLQEEEVKEIYS | | | |
| | | DMILSPESKIAGLRAKEIKGKLDDLF | | | |
| | | HGKTEDEIDDVISGLAKTMSFNPLPT | | | |
| | | GVCLYDFRRGNCTDGDGCFFYNCP | | | |
| | | NYITEVQFYPILKDELDLLEKEMVR | | | |
| | | LKELGQEPAYQVQAVKYKYLKPLVE | | | |
| | | SLEVQLNGKESVG | | | |
| Phage_ | WP_161234386.1 | MARPRAKKKKVSSGTHTRSVFLYG | 1479 | Phage | Blautia wexlerae |
| integrase | | SPNAEKRSTLEKLQADYTDAVNFYI | | integrase | |
| | | SLLSDREECLLQLLQNDKKDPLLRK | | family | |
| | | LEKESRIEGLSSAYSQNAFDEAVTKL | | | |
| | | HNRLDNIRKDVIAATGGSVFAVSILL | | | |
| | | FHAVLSGQSREEMCGMLARIRDSYK | | | |
| | | AKEKIQYYDKLHDTVKTMEEKEFL | | | |
| | | DSVSEVAMFYHIISDEYRIPVVKKAH | | | |
| | | VLSVTIPDRKRERMQVPVQADRDA | | | |
| | | LRRMEQYGVSGSMRYTITDGGSLKL | | | |
| | | TCSFEKKTRTPEEHSAVIGVDVGITD | | | |
| | | AFHTSEGQAIESFQPVIEFYQTEVEP | | | |
| | | AFGKLSTLRNRKQQLRRFLKKHKG | | | |
| | | VLPEKVILNLRKRIDHLEKDIRQAHA | | | |
| | | PYRRKRHYYQLVEYTVRNAVNTYIE | | | |
| | | SLNGDKTVLTAMELLDIKEFNKSRR | | | |
| | | VNGMLSDFSRGKLAEKLMEELSWH | | | |
| | | GFPFVQVEPAYTSQICPVCGCLDKAS | | | |
| | | RIIHKVFINGLVKNAIAELTEHTAELR | | | |
| | | KESGLKELFLCRIKSQNNKIAPYTET | | | |
| | | HWNDKKLRYFIERHDIRDNKGDLYP | | | |
| | | LTSHQFRSTFVRELIKRKVPIAMIMK | | | |
| | | QYSHVSIEMTAHYLTLQEEEVKEIYS | | | |
| | | DMILSPESKIAGLRAKEIKGKLDDLF | | | |
| | | HGKTEDEIDDVISGLAKTMSFNPLPT | | | |
| | | GVCLYDFRRGNCTDGDGCFFYNCP | | | |
| | | NYITEVQFYPILKDELDLLEKEMVR | | | |
| | | LKELGQEPAYQVQAVKYKYLKPLVE | | | |
| | | SLEVQLNGKESVG | | | |
| Phage_ | WP_161234386.1 | MARPRAKKKKVSSGTHTRSVFLYG | 1480 | Phage | Blautia wexlerae |
| integrase | | SPNAEKRSTLEKLQADYTDAVNFYI | | integrase | |
| | | SLLSDREECLLQLLQNDKKDPLLRK | | family | |
| | | LEKESRIEGLSSAYSQNAFDEAVTKL | | | |
| | | HNRLDNIRKDVIAATGGSVFAVSILL | | | |
| | | FHAVLSGQSREEMCGMLARIRDSYK | | | |
| | | AKEKIQYYDKLHDTVKTMEEKEFL | | | |
| | | DSVSEVAMFYHIISDEYRIPVVKKAH | | | |
| | | VLSVTIPDRKRERMQVPVQADRDA | | | |
| | | LRRMEQYGVSGSMRYTITDGGSLKL | | | |
| | | TCSFEKKTRTPEEHSAVIGVDVGITD | | | |
| | | AFHTSEGQAIESFQPVIEFYQTEVEP | | | |
| | | AFGKLSTLRNRKQQLRRFLKKHKG | | | |
| | | VLPEKVILNLRKRIDHLEKDIRQAHA | | | |
| | | PYRRKRHYYQLVEYTVRNAVNTYIE | | | |
| | | SLNGDKTVLTAMELLDIKEFNKSRR | | | |
| | | VNGMLSDFSRGKLAEKLMEELSWH | | | |
| | | GFPFVQVEPAYTSQICPVCGCLDKAS | | | |
| | | RIIHKVFINGLVKNAIAELTEHTAELR | | | |
| | | KESGLKELFLCRIKSQNNKIAPYTET | | | |
| | | HWNDKKLRYFIERHDIRDNKGDLYP | | | |
| | | LTSHQFRSTFVRELIKRKVPIAMIMK | | | |
| | | QYSHVSIEMTAHYLTLQEEEVKEIYS | | | |
| | | DMILSPESKIAGLRAKEIKGKLDDLF | | | |
| | | HGKTEDEIDDVISGLAKTMSFNPLPT | | | |
| | | GVCLYDFRRGNCTDGDGCFFYNCP | | | |
| | | NYITEVQFYPILKDELDLLEKEMVR | | | |
| | | LKELGQEPAYQVQAVKYKYLKPLVE | | | |
| | | SLEVQLNGKESVG | | | |
| Phage_ | WP_161234386.1 | MARPRAKKKKVSSGTHTRSVFLYG | 1481 | Phage | Blautia wexlerae |
| integrase | | SPNAEKRSTLEKLQADYTDAVNFYI | | integrase | |
| | | SLLSDREECLLQLLQNDKKDPLLRK | | family | |
| | | LEKESRIEGLSSAYSQNAFDEAVTKL | | | |
| | | HNRLDNIRKDVIAATGGSVFAVSILL | | | |
| | | FHAVLSGQSREEMCGMLARIRDSYK | | | |
| | | AKEKIQYYDKLHDTVKTMEEKEFL | | | |
| | | DSVSEVAMFYHIISDEYRIPVVKKAH | | | |
| | | VLSVTIPDRKRERMQVPVQADRDA | | | |
| | | LRRMEQYGVSGSMRYTITDGGSLKL | | | |
| | | TCSFEKKTRTPEEHSAVIGVDVGITD | | | |
| | | AFHTSEGQAIESFQPVIEFYQTEVEP | | | |
| | | AFGKLSTLRNRKQQLRRFLKKHKG | | | |
| | | VLPEKVILNLRKRIDHLEKDIRQAHA | | | |
| | | PYRRKRHYYQLVEYTVRNAVNTYIE | | | |
| | | SLNGDKTVLTAMELLDIKEFNKSRR | | | |
| | | VNGMLSDFSRGKLAEKLMEELSWH | | | |
| | | GFPFVQVEPAYTSQICPVCGCLDKAS | | | |
| | | RIIHKVFINGLVKNAIAELTEHTAELR | | | |
| | | KESGLKELFLCRIKSQNNKIAPYTET | | | |
| | | HWNDKKLRYFIERHDIRDNKGDLYP | | | |
| | | LTSHQFRSTFVRELIKRKVPIAMIMK | | | |
| | | QYSHVSIEMTAHYLTLQEEEVKEIYS | | | |
| | | DMILSPESKIAGLRAKEIKGKLDDLF | | | |
| | | HGKTEDEIDDVISGLAKTMSFNPLPT | | | |
| | | GVCLYDFRRGNCTDGDGCFFYNCP | | | |
| | | NYITEVQFYPILKDELDLLEKEMVR | | | |
| | | LKELGQEPAYQVQAVKYKYLKPLVE | | | |
| | | SLEVQLNGKESVG | | | |
| Phage_ | WP_161234386.1 | MARPRAKKKKVSSGTHTRSVFLYG | 1482 | Phage | Blautia wexlerae |
| integrase | | SPNAEKRSTLEKLQADYTDAVNFYI | | integrase | |
| | | SLLSDREECLLQLLQNDKKDPLLRK | | family | |
| | | LEKESRIEGLSSAYSQNAFDEAVTKL | | | |
| | | HNRLDNIRKDVIAATGGSVFAVSILL | | | |
| | | FHAVLSGQSREEMCGMLARIRDSYK | | | |
| | | AKEKIQYYDKLHDTVKTMEEKEFL | | | |
| | | DSVSEVAMFYHIISDEYRIPVVKKAH | | | |
| | | VLSVTIPDRKRERMQVPVQADRDA | | | |
| | | LRRMEQYGVSGSMRYTITDGGSLKL | | | |
| | | TCSFEKKTRTPEEHSAVIGVDVGITD | | | |
| | | AFHTSEGQAIESFQPVIEFYQTEVEP | | | |
| | | AFGKLSTLRNRKQQLRRFLKKHKG | | | |
| | | VLPEKVILNLRKRIDHLEKDIRQAHA | | | |
| | | PYRRKRHYYQLVEYTVRNAVNTYIE | | | |
| | | SLNGDKTVLTAMELLDIKEFNKSRR | | | |
| | | VNGMLSDFSRGKLAEKLMEELSWH | | | |
| | | GFPFVQVEPAYTSQICPVCGCLDKAS | | | |
| | | RIIHKVFINGLVKNAIAELTEHTAELR | | | |
| | | KESGLKELFLCRIKSQNNKIAPYTET | | | |
| | | HWNDKKLRYFIERHDIRDNKGDLYP | | | |
| | | LTSHQFRSTFVRELIKRKVPIAMIMK | | | |
| | | QYSHVSIEMTAHYLTLQEEEVKEIYS | | | |
| | | DMILSPESKIAGLRAKEIKGKLDDLF | | | |
| | | HGKTEDEIDDVISGLAKTMSFNPLPT | | | |
| | | GVCLYDFRRGNCTDGDGCFFYNCP | | | |
| | | NYITEVQFYPILKDELDLLEKEMVR | | | |
| | | LKELGQEPAYQVQAVKYKYLKPLVE | | | |
| | | SLEVQLNGKESVG | | | |
| Phage_ | WP_161234386.1 | MARPRAKKKKVSSGTHTRSVFLYG | 1483 | Phage | Blautia wexlerae |
| integrase | | SPNAEKRSTLEKLQADYTDAVNFYI | | integrase | |
| | | SLLSDREECLLQLLQNDKKDPLLRK | | family | |
| | | LEKESRIEGLSSAYSQNAFDEAVTKL | | | |
| | | HNRLDNIRKDVIAATGGSVFAVSILL | | | |
| | | FHAVLSGQSREEMCGMLARIRDSYK | | | |
| | | AKEKIQYYDKLHDTVKTMEEKEFL | | | |
| | | DSVSEVAMFYHIISDEYRIPVVKKAH | | | |
| | | VLSVTIPDRKRERMQVPVQADRDA | | | |
| | | LRRMEQYGVSGSMRYTITDGGSLKL | | | |
| | | TCSFEKKTRTPEEHSAVIGVDVGITD | | | |
| | | AFHTSEGQAIESFQPVIEFYQTEVEP | | | |
| | | AFGKLSTLRNRKQQLRRFLKKHKG | | | |
| | | VLPEKVILNLRKRIDHLEKDIRQAHA | | | |
| | | PYRRKRHYYQLVEYTVRNAVNTYIE | | | |
| | | SLNGDKTVLTAMELLDIKEFNKSRR | | | |
| | | VNGMLSDFSRGKLAEKLMEELSWH | | | |
| | | GFPFVQVEPAYTSQICPVCGCLDKAS | | | |
| | | RIIHKVFINGLVKNAIAELTEHTAELR | | | |
| | | KESGLKELFLCRIKSQNNKIAPYTET | | | |
| | | HWNDKKLRYFIERHDIRDNKGDLYP | | | |
| | | LTSHQFRSTFVRELIKRKVPIAMIMK | | | |
| | | QYSHVSIEMTAHYLTLQEEEVKEIYS | | | |
| | | DMILSPESKIAGLRAKEIKGKLDDLF | | | |
| | | HGKTEDEIDDVISGLAKTMSFNPLPT | | | |
| | | GVCLYDFRRGNCTDGDGCFFYNCP | | | |
| | | NYITEVQFYPILKDELDLLEKEMVR | | | |
| | | LKELGQEPAYQVQAVKYKYLKPLVE | | | |
| | | SLEVQLNGKESVG | | | |
| Resolvase | MBX8642660.1 | MKLSDRARKNGIDYRTAYRLYRSGR | 1484 | Resolvase, N | Thermoplasmata |
| | | FPGPTGQLATGTKLVHEPEPGHAPAE | | terminal | archaeon |
| | | RVVLYARVSSADRKSGTGRQMKRL | | domain | |
| | | EDYAAARGSHAGAEISEIGSGLNRL | | | |
| | | KKGSLSWMYEISKCAPQEALRDLDS | | | |
| | | AFTRFFDGNADFPKFKSKKHGCGSF | | | |
| | | RLTGAMKAQGYSIQLPCIGTMSLKE | | | |
| | | NGCLPADGHIPSTTVSERGGRWFVS | | | |
| | | LAVIEEHTVPENSGSICGVDLGVKNL | | | |
| | | ATVSDGTVFENPRSLSTYIRKLKGQ | | | |
| | | QREVSRKVKRSNSRRKAVHRLNRT | | | |
| | | HLKISYMRMDAIHKATTWLAKNKS | | | |
| | | AIVIEDLNAGGMMCNHRLAAAISDA | | | |
| | | SFGEFRRQLEYKAGWYGSRIVVADR | | | |
| | | FYPSSRTCSACGHVKQELKLSERVFE | | | |
| | | CEMCNSMIDRDLNAAINLSGLAASS | | | |
| | | AESLNACLR | | | |
| Resolvase | RHZ50278.1 | MLDPLKSNFNKHGSVSSSHFLTKTT | 1485 | Resolvase, N | Diversispora |
| | | FLTFLTKPPFYNLAQLNTTYQSAHKI | | terminal | epigaea |
| | | QETYDVSVETLRRWADSGRIAIVRTP | | domain | |
| | | GGKRLYSITNIQEIFRDNQQTQITQK | | | |
| | | AKICYAKVSSEHQRDDLERQIANLR | | | |
| | | QYYPEYEIISDIGSGLNWKRRGTDC | | | |
| | | ADLDPSLWNGSLRKMGLSSWYSVR | | | |
| | | ISVLKVVKPENLRKTYSQSSRYLWQ | | | |
| | | DIMECVPPPIVEEDEKLPKPKKNKSS | | | |
| | | KIPAGKTQRIRLFPTQEEKSKLKRW | | | |
| | | MGTARWTYNRCLVAVEKEGIERTKK | | | |
| | | ALRAQCLNAANFNNTELQWVLETP | | | |
| | | YDIRNEAINDLLKSYSSNFAAKRKK | | | |
| | | FKMKFRFKKDQQQSIAILSKHWDKS | | | |
| | | KGVYTFLCKIKSAENLPAELHYDSR | | | |
| | | LVMNQLGEFYLCIPQPLEIWAENQG | | | |
| | | PIQSDAVIALDPGVRTFITIQVDKL | | | |
| Resolvase | MBO5650323.1 | MNTSNITNYKPKEFAELLNVTVKTL | 1486 | Resolvase, N | Selenomonas sp. |
| | | QRWDREKTLVANRTPTNRRYYTYD | | terminal | |
| | | QYLQFKGIGKDADFRKIVIYTRVSTR | | domain | |
| | | NQTDDLENQVDFLQTYVNAKGLIA | | | |
| | | DEIIRDYGSGLNYNRKKWNQLLGE | | | |
| | | VMENKVKMILVSHKDRFVRFGFDW | | | |
| | | FEKFCNKFNVEIVVVKNEKLSPQKE | | | |
| | | LVQDIVSILHVFSCRLYGLRKYKKQI | | | |
| | | EGMRILLKAFRTEIAPTNEQKMKIIR | | | |
| | | SIGVARFLYNQYIAYNRHLYKMYQR | | | |
| | | GILDEKQKHFVTANDFDKYVNHKL | | | |
| | | KKELPWIDQCGSKARKKALVNAEQ | | | |
| | | AFRRFFSGTSGFPNFKKKVNQDVKL | | | |
| | | YFPKNNKGDWTIWRHKLMIPTLKQ | | | |
| | | VRLKEFGYLPVGAKVTNGTVSYMA | | | |
| | | GRFYVSVVVDIDEKSKYNKDLEASY | | | |
| | | HTVTEGVGIDLGVKDLAIVSDGKVF | | | |
| | | KNINKSSKVKRLE | | | |
| Resolvase | EFH82150.1 | MYSAAQFAKQVGVSVKTLQRWDR | 1487 | Resolvase, N | Ktedonobacter |
| | | EGRLKAKRTLSGRRYYDEADLATAL | | terminal | racemifer |
| | | NLPKPPAIRRTVAYCRVSSPAQRPDL | | domain | DSM44963 |
| | | QNQRAALERYAVSKQLVVDEWIVEI | | | |
| | | GGGLNFERKRFLRLVDAIVEGEVSC | | | |
| | | LLIAHQDRLARFGFALIKHLCETHHT | | | |
| | | ELVVMNTQTLSPEQELVVQDLMSII | | | |
| | | HGFSSRLYGLRNYRKALEKALKDEN | | | |
| | | RAQDQDDPTPEQVEYLKRACGTRR | | | |
| | | FIYNWGREQWEKQYQAYKLEQETV | | | |
| | | FEEQRVLTPPNTFALKKQFHQIREQD | | | |
| | | YPWTYQVTKCVVEGAFADLKSAYD | | | |
| | | NFFAGRSNYPQYKKKGKSHESFYLS | | | |
| | | NDKFTVGTHWISIPGLGRFILDQRQT | | | |
| | | KKDRGKLLRRLGAVNVAEKLRFVE | | | |
| | | KGKATTPAKKRNKRKQVVCERVKIL | | | |
| | | GATVSCEAGHWYVSIQVEIKKQRPL | | | |
| | | TPTAVVGWMSD | | | |
| Resolvase | MCL4317383.1 | MKLSDRARKNGIDYRTAYRLYRSGR | 1488 | Resolvase, N | Candidatus |
| | | FPGPTGQLATGTKLVHEPEPGHAPAE | | terminal | Thermoplasmatota |
| | | RVVLYARVSSADRKSGTGRQMKRL | | domain | archaeon |
| | | EDYAAARGSHAGAEISEIGSGLNRL | | | |
| | | KKGSLSWMYEISKCAPQEALRNLDS | | | |
| | | AFTRFFDGNADFPKFKSKKHGCGSF | | | |
| | | RLTGAMKAQGYSIQLPCIGTMSLKE | | | |
| | | NGCLPADGHIPSTTVSERGGRWFVS | | | |
| | | LAVIEEHTVPENSGSICGVDLGVKNL | | | |
| | | ATVSDGTVFENPRSLSTYIRKLKRQQ | | | |
| | | REVSRKVKRSNSRRKAVHRLNRTHL | | | |
| | | KISDMRMDAIHKATTWLAKNKSAIV | | | |
| | | IEDLNAGGMMCNHRLAAAISDASF | | | |
| | | GEFRRQLEYKAGWYGSCIVLADRF | | | |
| | | YPSGRTCSVCGHVRQELKLSERIFEC | | | |
| | | EMCNSMIDSDLNAAINLSGLAASSA | | | |
| | | ESLNACLRLEVAELLAQCPPVIQEM | | | |
| | | NTISLGMSG | | | |
| Resolvase | CKN51115.1 | MNLAAWAERNGVARVTAYRWFHA | 1489 | Resolvase, N | Mycobacterium |
| | | GLLPVPARKVGRLILVDELASEAGA | | terminal | tuberculosis |
| | | QPKTAVYARVSSADQKSDLDRQVAR | | domain | |
| | | VTSWATAEQIPVDKVVTEVGSVLNG | | | |
| | | HRRKFPAVLRDLSVTRIVVEHRDRF | | | |
| | | CRFGSEYVHAALAAQGRELVVVDS | | | |
| | | AEVDDDLVWDMTEILTSMCARLYG | | | |
| | | KRAAQNRASGPSRLPLSMIMRRPEM | | | |
| | | PRLEIPNGWCVQAFRFTLDPTAEQA | | | |
| | | HALARHFGARRKAYNWTVAQLKA | | | |
| | | DIQAWRATGAQTAKPSLRVLRKRW | | | |
| | | NTVKDEVCVNAETGTVWWPECSKE | | | |
| | | AYADGIAGAVDAYWNWQQRRAGK | | | |
| | | RDGKRMGFPRFKKKGRDADRVSFT | | | |
| | | TGAMRVEPDRRHLTLPVIGCVRTHE | | | |
| | | NTRRIERLIAKDRARVLAITVRRNGT | | | |
| | | RLDASVRVLVQRPQQPNVELPESRIG | | | |
| | | VDVGVRRLATVATADGACCPVLVPD | | | |
| | | G | | | |
| Resolvase | COW46299.1 | MNLAAWAERNGVARVTAYRWFHA | 1490 | Resolvase, N | Mycobacterium |
| | | GLLPVPARKVGRLILVDELASEAGA | | terminal | tuberculosis |
| | | QPKTAVYARVSSADQKSDLDRQVAR | | domain | |
| | | VTSWATAEQIPVDKVVTEVGSVLNG | | | |
| | | HRRKFPAVLRDLSVTRIVVEHRDRF | | | |
| | | CRFGSEYVHAALAAQGRELVVVDS | | | |
| | | AEVDDDLVWDMTEILTSMCARLYG | | | |
| | | KRAAQNRAKRAVAAXXXXXXXXX | | | |
| | | XLPLSMIMRRPEMPRLEIPNGWCVQ | | | |
| | | AFRFTLDPTAEQAHALARHFGARRK | | | |
| | | AYNWTVAQLKADIQAWRATGAQTA | | | |
| | | KPSLRVLRKRWNTVKDEVCVNAET | | | |
| | | GTVWWPECSKEAYADGIAGAVDAY | | | |
| | | WNWQQRRAGKRDGKRMGFPRFKK | | | |
| | | KGRDADRVSFTTGAMRVEPDRRHL | | | |
| | | TLPVIGCVRTHENTRRIERLIAKDRA | | | |
| | | RVLAITVRRNGTRLDASVRVLVQRP | | | |
| | | QQPNVELPESRIGVDVGVRRLATVA | | | |
| | | TADGACCPVLVPDG | | | |
| Resolvase | MCS5695294.1 | MKGVSELLNMTRQPLSSSSRNTSAR | 1491 | Resolvase, N | Desulfofundulus |
| | | RRWSYSGHDQKADLQRQVEVLKG | | terminal | thermocisternus |
| | | AYGSKFSDVVVLTDVGSGLSTNRRS | | domain | |
| | | LRKAMQMARERKIRAVAVTYPDRLT | | | |
| | | RFCFEYLKEYFNSFGVEVLVLNREE | | | |
| | | DRSPQQELVEDLLTIVTSFAGKLYGH | | | |
| | | RSHAELQEKLAAGGTLCAPDLRLK | | | |
| | | VKPGGELVALLDVKVDVPEEKPSGD | | | |
| | | PGRALSVDWGLRKLVTCTVVSRKG | | | |
| | | QLTPPFFVFWSGLKARLFRIREDIKK | | | |
| | | LQKERDRYEKGTPDWKKYNRKIAA | | | |
| | | AWQKYHRVQHTLAHAVSTLLVLLA | | | |
| | | RAFGCRHIFIEWLVTLHGKKGRNRD | | | |
| | | LNWWVSTVVRGLLFRLLRYKAKLA | | | |
| | | GIRVFMVPPGGTSRVCPRCLGAGKH | | | |
| | | VISPGNKAEKDSGSWFVCPSCGWQ | | | |
| | | ADRDYAGSLNIARVGFNLARPLSYK | | | |
| | | VGGAAMPFPSRVASAEVLREAMTFT | | | |
| | | TTLGYTCSVFPGNIGCLVKLLDLQC | | | |
| | | RT | | | |
| Resolvase | WP_235657201.1 | MAYVPLREAVKRLGLHPNTLRKYA | 1492 | Resolvase, N | Fischerella |
| | | DNGKIESIKNEAGQRLFNVESYLRG | | terminal | thermalis WC439 |
| | | ATRASIVCYCRVSSTKQRDDLDRQI | | domain | |
| | | AYMQSLYPEAEIIKDIGSGINFKRKG | | | |
| | | LQTLLDRLMRGDKLTLVVACRDRLC | | | |
| | | RFGFELPRSTWSSKTVDKSWFSKTL | | | |
| | | YTVPNQNLPRIFSPSSTSSLVECTDSG | | | |
| | | NTVKKSRKIRIFLKATQKQIIKQWFG | | | |
| | | VSRFVYNTTVKLLQDSTIKANWKA | | | |
| | | VKTDILNGLPDFCKSVPYQIKSIAIK | | | |
| | | DACKAVSNAKKKFKNGGGISKVKF | | | |
| | | RSRKDPIQSCYIPKSAVSDKGIYHTIL | | | |
| | | GEVTFKEALPQSFGDCRLVKAYGDY | | | |
| | | YLTVPEEVSRQQSENQGRVVALDPG | | | |
| | | IRTFITFFSESSFGEIGISANIQIQKLCF | | | |
| | | RLDKVISKIAKAKCKSKRRLKLAAT | | | |
| | | RLRGKIKNLVDELHKKTARFLVDNF | | | |
| | | DVILLPTFETSRMSKKAKRRIRSKSV | | | |
| | | RQMLTLSHYRFKQFLKHKAFETSKV | | | |
| | | VMDVNE | | | |
| Resolvase | RKU31134.1 | MKHYKIPRETSAILGISIDRLRRLAE | 1493 | Resolvase, N | Candidatus |
| | | NGTISTIGTPGGQKHYDVQGYLDEQ | | terminal | Poribacteria |
| | | TGTDITTIGYCRVSGKGQAEDLASQ | | domain | bacterium |
| | | VAYLQKHYPEAEIIKDFGSGINFKRK | | | |
| | | GLRTLLERLLRGDKLRVVVAHRDRL | | | |
| | | ARFGGEAKDTPKNFKGLVPIVFDQL | | | |
| | | PEWHVETPRQIKAGAVIDACQAIKN | | | |
| | | AKVKCKETDKFQKVSFRSRKNPRQ | | | |
| | | TLYLRADSLKKNGFYVRLLGQMKM | | | |
| | | SEPLPAKPQGTGKVSERDTNAEVKD | | | |
| | | SQLIMENGRYFLCVSYVEKKKTREP | | | |
| | | SGRIVALDPGVRDFMTFFSEDRFGW | | | |
| | | LGQQCINRIQRLCQHCDNLLSRATQ | | | |
| | | EQRPLRRALRKAANRIKVKIRNLIDE | | | |
| | | LHKKIAHFLVTNFDIILLPTFETKQM | | | |
| | | TKRGARKLRKKSVRQMLTLSHYRF | | | |
| | | KVFLKHKAKEYGAQVIDVCEAYTS | | | |
| | | KTVSWTGELITNLGGSRVIKSSEGHR | | | |
| | | MDRDLNGARGIFIKNVARALTVRPC | | | |
| | | TANLGASKSLIPSAT | | | |
| Resolvase | CAG8682803.1 | DLERQIANLRQYYPEYEIISDIGSGL | 1494 | Resolvase, N | Ambispora |
| | | NWKRRGFVALLERIHTEGIEEVVVT | | terminal | gerdemannii |
| | | RKDRLCRLGSELVEWIFEKNGTRLV | | domain | |
| | | VLGMDVSAESSEAGELAEDLLSIVT | | | |
| | | VFVARHNGMRSAANRRRRREVAKA | | | |
| | | QEEQELQDSSRQDTTYPSLSYARGE | | | |
| | | VETQTLDGNSAMDLQSGIERTKKAL | | | |
| | | RAQCLNAANFNNTELQWVLETPYD | | | |
| | | IRDEAMNDLLKSYSSNFAAKRKKFK | | | |
| | | MKFRSKKDQQQSIAILSKHWGKSK | | | |
| | | GVYTFLCKMKSAENLPAELHYDAR | | | |
| | | LVMNRLGEFYLCIPQPLEIWAENQG | | | |
| | | PTQSDAVIALDPGVRTFITGYDPSGQ | | | |
| | | AVEWGKNDISRIYRLSHIYDKIQSTH | | | |
| | | DSIHGKVHKRKRYKLRRVMLRIHK | | | |
| | | KIRCLINDCHHKLAKWLCQSYRIILL | | | |
| | | PEFKTQGMVRRGKRRIRSKTARMM | | | |
| | | LTWSHFRFRQYLLHKVREYPWCRVI | | | |
| | | ICTEGYTSKTCGCCGHIHRKLGGSK | | | |
| | | VFRCPSCTAELDRDINGARNILLRYL | | | |
| | | TVTSKEP | | | |
| Resolvase | CAG8436474.1 | MTSKYKPAEKIKKIYGVSTSTLRRW | 1495 | Resolvase, N | Scutellospora |
| | | NDKGDVAYITMPGGKRLYSTDDIDN | | terminal | calospora |
| | | IFGRESTQKKKICYARVSSEKQKDDL | | domain | |
| | | GRQRAYLVSEFPDHEIITDIGSGLNW | | | |
| | | KRRGFTSLLERVYARDIEEVVVTRK | | | |
| | | DRLCRFAYELVEWIFSKHDVKLVVL | | | |
| | | GSDVGSNDPDTGELAEDLLSIVTER | | | |
| | | EKLKKWMGTAKWTYNRALDLIKN | | | |
| | | GESRTKKNLRQKCIKVENFRHENTW | | | |
| | | VLETPYGVRDEVLIELLEAGEYAFL | | | |
| | | KNIRTSEKLPDINHAVNIIRDSFKRFY | | | |
| | | VCVPVPIKEQYRENDDFISIDPGVRT | | | |
| | | FMTGYDPKGKIFEYGKGDISRVYRL | | | |
| | | CKRHDEYQSQRSVLKGGSNKRERY | | | |
| | | KLKRKMLKIHDKIKNLIRDCHHKIV | | | |
| | | KELCENYNTILLPRFETKNMVRKKD | | | |
| | | KELDNQESKSIKNHKKKFKRKIKSK | | | |
| | | TARMMLTWSHHRFQQHLVHKIREY | | | |
| | | PGRLLILCDEHYTSKTCGNCGYIKH | | | |
| | | NLGGAKIYRCNRCGFEIDRDHNGAR | | | |
| | | NILLKHLSQRDLTLGPTPFE | | | |
| Resolvase | WP_102164839.1 | MTYVPLREAVKRLGLHPNTLRKYA | 1496 | Resolvase, N | Fischerella |
| | | DNGKIESIKNEAGQRLFNVESYLRG | | terminal | thermalis WC441 |
| | | ATRASIVCYCRVSSTKQRDDLDRQI | | domain | |
| | | AYMQSLYPEAEIIKDIGSGINFKRKG | | | |
| | | LQTLLGRLMRGDKLTLVVACRDRLC | | | |
| | | RFGFELPRSIWSNKTVDKSWFSKTL | | | |
| | | YTVPNQNLPRIFSPSSTSSLVECTDSG | | | |
| | | NTVKKSRKIRIFLKATQKQIIKQWFG | | | |
| | | VSRFVYNTTVKLLQDSTIKANWKA | | | |
| | | VKTDILNGLPDFCKSVPYQIKSIAIK | | | |
| | | DACKAVSNAKKKFKNGGGISKVKF | | | |
| | | RSRKDPIQSCYIPKSAVSDKGIYHTIL | | | |
| | | GEVIFKEALPQSFGDCRLVKAYGDY | | | |
| | | YLTVPEEVSRQQSENQGRVVALDPG | | | |
| | | IRTFITFFSESSFGEIGISANIQIQKLCF | | | |
| | | RLDKVISKIAKAKCKSKRRLKLAAT | | | |
| | | RLRGKIKNLVDELHKKTARFLVDNF | | | |
| | | DVILLPTFETSRMSKKAKRRIRSKSV | | | |
| | | RQMLTLSHYRFKQFLKHKAFETSKV | | | |
| | | VMDVNEAYTSKTVSWTGEIIHNLGG | | | |
| | | AKFIKSPTDGRVMPRDLNGARGIFL | | | |
| | | RALVDTPSLRECIC | | | |
| Resolvase | GHD59043.1 | MPVPVVQTPSVIWPVEEPTPEVVGR | 1497 | Resolvase, N | Streptomyces |
| | | TVAYCRFSSGDQKAELDRQVSRVVQ | | terminal | mirabilis |
| | | GAIGLGLAVAEVVTEAGSGLNGNRR | | domain | |
| | | KLHRVLSDPAVAVIVVEHRDRPARFG | | | |
| | | VEQLESALSASGRRLVFEARPGFHIV | | | |
| | | GHRLALDPNASALQALASHCGAAR | | | |
| | | VAYNWAVRHVPANWSQRAAEETYG | | | |
| | | VPEAERVAWRSWSLPSLRKAFNEAE | | | |
| | | HNDPCLREWWAQNSKEAYNTGLAN | | | |
| | | AAAAFDNYAKSRRGERKGTRMGRP | | | |
| | | RFKSKRKARPACKFTTGTIRLDDRR | | | |
| | | HIVLPRLGRIRLHEDVQPLVDAIAEG | | | |
| | | GTRILSVTVRFERGRWFAVLQTEERP | | | |
| | | TIAPATRPYTAVGIDLGVKTLLVMAD | | | |
| | | SAGEVREVANPKDYDQTLTQLRKAS | | | |
| | | RTVSRRRGPNRRTGQAPSRRWEKA | | | |
| | | NAVRNRVHHRVANLRENHLHQATA | | | |
| | | RIPAEYGTVVVEDLNVKGMVRNRR | | | |
| | | LSRRISDAAFGELRRRLTYKTQRHG | | | |
| | | GCLIVADRWMPSSKTCSRCGVVKA | | | |
| | | KLSLGVRVFERAVGAAPRQGTELDR | | | |
| | | TPSASNSRSGDTVTNLPGGNTRNAE | | | |
| | | SR | | | |
| Resolvase | GAQ87932.1 | MGYVSLSSARHHFGVSGKTLYRWE | 1498 | Resolvase, N | Klebsormidium |
| | | ASGKVTVKRSPGNRRLFLVDDPQPQ | | terminal | nitens |
| | | YEPTRESVVYVRVSSSKQQDDMRR | | domain | |
| | | QEKYLLDQHPGSRVVRDIGSGLNFK | | | |
| | | RKGLLSLLERSEEGLLRRVVVASED | | | |
| | | RLCRFGFDLLAWQFKRHGVELLVC | | | |
| | | DKADKSPEAELAEDVLAVIQVFGCR | | | |
| | | WNGKRSYNRAVSLMHETSVYNKM | | | |
| | | RLRNMITPAEVNQDNLWLLETPKDI | | | |
| | | RAGAVFEAAKNIKAAFTNKARGNIE | | | |
| | | NFKMGYRSRKKEDSCGWTINVPKT | | | |
| | | ALKVKGERCLQVYRDSCPWLFQTL | | | |
| | | GRIGPLSMDCKIQFDGMRYFLIVPYE | | | |
| | | RHVVSPRREGVIALDPGVRTFQTAY | | | |
| | | SPDGHCYELGRSCCRRLEALCVHLD | | | |
| | | RLISLASVTPKTLRRTKWAMGLRIK | | | |
| | | KLRRRLQSLRDEMHYKAADYLTRT | | | |
| | | AHIILLPTFETKDMTRRTTRRLRSRT | | | |
| | | VRNLSLLSHYKFKQRLIAKAAVRGV | | | |
| | | KVLQVSEHYTSKTCGRCGSIHETLG | | | |
| | | GRRVFKCPRCGVVLDRDCNGARNV | | | |
| | | LLRAMREEPPSRGAMQDGATVDMP | | | |
| | | CLAWTNE | | | |
| Resolvase | KAJ3080465.1 | MTVVAVVEFFLHIQPFSKPATARVAL | 1499 | Resolvase, N | Quaeritorhiza |
| | | SAATLPPSNPKQSQVEKEPDGTDQD | | terminal | haematococci |
| | | TDQGTEQGTAKQPHPVLPRRVHIHL | | domain | |
| | | GAVERLPVHRLGDYFEDVVRWACR | | | |
| | | VHLNLNVENIQWTIPAEIRSVCATID | | | |
| | | HWGLGQPVHVQPSRDMQYRYKLTP | | | |
| | | LNATRTLFDASVQYSRPMDIGSGLN | | | |
| | | FKRKGLKRLLERVMSGTVEEIVVTH | | | |
| | | KDRLCRFGFELIEFMVNKFGGRILV | | | |
| | | QNHAVRTPEEELTQDLLTIIHRKVCS | | | |
| | | ATDCDEPIDPATNGYLCEAHYDPGA | | | |
| | | SQCQGVAMTGRNKGQRCSYASSAG | | | |
| | | FCSHHAKKATKEKVKENENVTCRL | | | |
| | | YRLRPNKTQVKLLRQWFGVAREYY | | | |
| | | NATIEYLVKEKAKACFQDIRPIIKDK | | | |
| | | LDNAKPYRLQVPDKIRQGAIQDACQ | | | |
| | | AMNNAKLKYQQNQVFSKLSFRTRR | | | |
| | | DPSQSIYLDKSAIKVEAEAVVFYPEI | | | |
| | | TKAYLEEARSKDDKSEIDSEIRTTEA | | | |
| | | VEINRACRIVLKHNKYFQLASPRSQ | | | |
| | | AVQQGPTYGECVALDPGGRSFLTLY | | | |
| | | SPDLCGHLSYEPRKRIEATYNEYDK | | | |
| | | V | | | |
| Resolvase | GAQ92077.1 | MTNEQRYLGTHAAKQVLGVCGATL | 1500 | Resolvase, N | Klebsormidium |
| | | RQWADSGLITSFKTPGGKYRYLIDN | | terminal | nitens |
| | | VISGGSADTRAEELQRPATEKQKVC | | domain | |
| | | YCRVSSLGQKADLDRQAQYMQSRY | | | |
| | | PEHTIIRDIGSGINFKRKGLQTILELA | | | |
| | | FRGRLEEVVVAYRDRLCRFAYELVA | | | |
| | | WIFHQHGVRLVVLNEEEGRTILKRW | | | |
| | | FGCARKTYNMALEALKKRTAHKRT | | | |
| | | EAWLKNRFTRASNVSKANSFLLDTP | | | |
| | | THVRDGAIADLMKGLRNEVAKKRK | | | |
| | | NGSHAFEMRYRSKKEVQSLYLEKTA | | | |
| | | IKKLIHADSHSDFLSMYPTHVTNAIF | | | |
| | | LISKKASLLNCRGKVSFDARLVMDK | | | |
| | | LGHFHIHATVEKDEIPSENQGRGIVA | | | |
| | | LDPGVRTFMTAYSPSDNVAFQIAPGC | | | |
| | | IQRMVRLEHHIDRLRSEISLLPPQCK | | | |
| | | GRARRMRKAALRLHKRVSNLTSEV | | | |
| | | HWKVAQFLTDRFQTIVLPPFATQEM | | | |
| | | CSRTGDRQRRIGKSTSRKMHLWGH | | | |
| | | YTFRTRLAMKCKERGCDLKVLDEV | | | |
| | | YTTKTCTGCGWVHDTIGGSKVFLC | | | |
| | | QGCGLETDRDINGARNIFLKHHKRL | | | |
| | | MGGSLPS | | | |
| Resolvase | MCI8748163.1 | MKYYSIGEFANKIGKTIQTLRNWDK | 1501 | Resolvase, N | Lachnospiraceae |
| | | SCSLKPHHITKAGTRYYSQEQLNHF | | terminal | bacterium |
| | | LGLKPQDKLNKKTIGYCRVSSYKQK | | domain | |
| | | DGLERQIENVKTYMYAKGYQFEIIS | | | |
| | | DIGSGINYNKKGLNKLLDMVTNSEV | | | |
| | | DKIVVLYKDRLIRFGYELIENLCEKY | | | |
| | | GTAIEIIDNTEKTEDQELVEDLIQIVT | | | |
| | | VFSCRLQGRRAEKARLYPSELQEQK | | | |
| | | LWQSVGTARFIYNWTLARQEENYK | | | |
| | | NGGKFISDKVLRKELTQLKKSELSW | | | |
| | | LNEVSNNVSKQAVKDACNAYKRFF | | | |
| | | KGLSGKPKFKSKRKGKKSFYNDNIK | | | |
| | | LKVKESKLVSIEKIGWIKTNEQLPAG | | | |
| | | VKYSNPRINYDNKYWYISVGAEQEE | | | |
| | | IKEDLTDISLGVDLGLKNLAICSSGT | | | |
| | | VYKNINKTYTVRKIEKRLKKLQRQV | | | |
| | | SRKYEQNKKGKEYVKTKNIIKLEKQ | | | |
| | | IQQVDRRLANIRNNYLHQTTTSIVKT | | | |
| | | KPYRVVIEDLNVKGMMKNKHLSDA | | | |
| | | IRKQGFYEFRRQLGYKCKFRGIELV | | | |
| | | VADRFYPSSKTCSQCGKINKDLKLK | | | |
| | | DRVYSCSCGLSIDRDLNACINLSRYK | | | |
| | | LA | | | |
| Resolvase | RHZ85702.1 | MYMLKSNFNKHGSVSSSHFLTKTTF | 1502 | Resolvase, N | Diversispora |
| | | LTFLTKPPFYNLAQLNTTYQSAHKIQ | | terminal | epigaea |
| | | ETYDVSVETLRRWADSRRIAIVRTPG | | domain | |
| | | GKRLYSITDIQEIFRDNQQTQITQKA | | | |
| | | KICYARVSSKHQRDDLERQIANLRQ | | | |
| | | YYPEYEIISDIGSGLNWKRRGTDCA | | | |
| | | DLDPSLWNGSLRKMGLSSWYSVRM | | | |
| | | SVLKVVKPENLRKTYSQSSRYLWQ | | | |
| | | DIMECVPPPIVEEDEKLPKPKKNKSS | | | |
| | | KIPAGKTQRIRLFPTQEEKSKLKRW | | | |
| | | MGTARWTYNRCLVAVEKEGIEQTKK | | | |
| | | ALRAQCLNAANFNNTELQWVLETP | | | |
| | | YDIRDEAMNDLLKSYSSNFAAKRK | | | |
| | | KFKMKFRSKKDQQQSIAILSKHWG | | | |
| | | KSKGVYTFLSLRAQCLNAANFNNTE | | | |
| | | LQWVLETPYDIRDEAMNDLLKSYSS | | | |
| | | NFAAKRKKFKMKFRSKKDQQQSIAI | | | |
| | | LSKHWGKSKGVYTFLCKMKSAENL | | | |
| | | PAKLHYDSRLVMNRLGEFYLCIPQP | | | |
| | | LKIWAKNQGLTQSDAVIALDPGVRT | | | |
| | | FITGYDPSGQAVEWDKNDISRIYRLS | | | |
| | | HIYDKIQSTHDSIHGKVHKQKRYKL | | | |
| | | RKVMLIHVPKIDFGFLRYFDFLRFM | | | |
| | | QNLFYIWK | | | |
| Resolvase | KAJ3080568.1 | MRRGKQFYNVEDIERILGTKTKSEQ | 1503 | Resolvase, N | Rhizoclosmatium |
| | | LRGGQRPVCYACVSSSHQRKDLERQ | | terminal | hyalinum |
| | | IEDLKSRYPDAIVITDIASGLNWKRP | | domain | |
| | | GLNSLLELVHARSVSEIVVTHRDRL | | | |
| | | ARFGVNLLDWIFAKAGVKLVVLCG | | | |
| | | SADHQPTQYLELDNNGDRDGSTEN | | | |
| | | SGPTAAPGNAFNELAEDLLAITNFFV | | | |
| | | ARNNGLRAQAPTSDPEPSGSSSTTNP | | | |
| | | QKPKKAAPDRETHKQILVKWFGVT | | | |
| | | RFVYNQCVALSSSSNRVKPKRDSLR | | | |
| | | AAIINDEDYKSLMSKQNRKWLKEY | | | |
| | | HYDLKDEAICTYLKNLKSNFAKLAK | | | |
| | | GGQNKFCIKFKLRKDPVASILVLAK | | | |
| | | HYNKANNFFSPILNVRKMKSAEPLP | | | |
| | | VKLNWDSKLIRNQLGEYYLVFPQAI | | | |
| | | KKKSDSEEKEPRVVALDPGFKNFMI | | | |
| | | GYDPSGTVFSWGKQDIVRIGRLLHH | | | |
| | | KRNLHAKLSEVKDAKRNKRMKKA | | | |
| | | WLRMSKRIQDLVSEMHKKLALFLV | | | |
| | | QSYTHIYIPRLDFRHFKRIGKQYREK | | | |
| | | MATFSHCKFVDRLKDKVREYLNTK | | | |
| | | VFDKITEEYTSKTCTNCGCLDLNLR | | | |
| | | NKEVYSCIHCGTVIGRDFNGARNILL | | | |
| | | KTMKEVSALQIN | | | |
| Resolvase | GHO46160.1 | MCIENIYTPKEFGQLIGRTTNTLQKW | 1504 | Resolvase, N | Ktedonospora |
| | | DRKGLPKAHRSPTNRRYYTHDQYL | | terminal | formicarum |
| | | KYRGLKAAKQGLTMVYARVSSAAQ | | domain | |
| | | KPDLRNQVNALEAYCKQHSIAVDE | | | |
| | | WMFDIGSRLNYKRKHFNRLMEMVA | | | |
| | | LGQVRRLIIAHRDRLVCFGFEYFEAF | | | |
| | | CERHHTQILVINGDSLSPEQDLVQDL | | | |
| | | IAIVTIFSARLHGLRSYKKVLKDAAQ | | | |
| | | QKEEERMNRSHVIRLNPTPEQEVYF | | | |
| | | RKACGVARHAYNWALDHWKQARS | | | |
| | | EGKRVKMRELKAEYNRVKHEQFPW | | | |
| | | CADVTKCAPEQEFRHLGQAFDNYW | | | |
| | | RMKKDGTQPKLKHPRKDGEEAGFP | | | |
| | | HFKNKKRDRLSFYLNNDKFSVEGN | | | |
| | | WIRIPKLGKVNMTEQLRFSGKTLSA | | | |
| | | VVSERAGWWFVSIAVEVEHQAPTH | | | |
| | | QGDAVGIDLGIKTLVTLSDGEVFEN | | | |
| | | QKHYRQNLGRIKGLSKGLARKKEG | | | |
| | | SQNWWKNKKKLAKAHYRVANQRS | | | |
| | | DKLHKMTTRIALTYALIGLEDLNAK | | | |
| | | GMLANSCLAQAVNDASFFEVKRQL | | | |
| | | LYKAEQHGGYVQLVSRWYPSSKTC | | | |
| | | SSCGYVKPELLLSERVFICEDCGYVS | | | |
| | | DRDYNASLNIRNEASRLRTSVPVVA | | | |
| | | SSAR | | | |
| Resolvase | OGW52772.1 | MKIYRLNEFAKLIGKSVQTLQRWDR | 1505 | Resolvase, N | Nitrospirae |
| | | EGIFKAYRNKLNRRYYIHDQYLEYI | | terminal | bacterium |
| | | GQKASPEKKNIVYYRVSSSGQKGDL | | domain | RIFCSPLOWO2_ |
| | | ENQKKAIEQFCIAQGIAVSEWLSDIG | | | 02_42_7 |
| | | SGLNYTRKNFLSLMEMVERGEVAQI | | | |
| | | IIAHKGRVVRFGYMKKTIKNYCFNA | | | |
| | | TQSKLNELYEIALRYTSVKNEIFQRY | | | |
| | | GSISGLNYLSYPRQIRNEWVKTNYA | | | |
| | | NKFGLQARYWKQAVDEVFSNIKSN | | | |
| | | WSNGFRKIKNNIYKNKNYTEVEKH | | | |
| | | YAFYLLKASILLYKAITFQSFDLPEIF | | | |
| | | KDKDIRRDKIHKYLKSRLRKYLRTK | | | |
| | | SYQNKNRSFQIDRNMYDIHKDNKG | | | |
| | | RTWIGIMGLTPRKRVRLQMTSSTEST | | | |
| | | GNLRIVLKGKHIEIHQAEDIQVNPIE | | | |
| | | GKDKRAIDKGFSEVITSSSGRKYGE | | | |
| | | QFNQLLKKESDRLSEKNKKRNKIRA | | | |
| | | LTDKYEKKGDIVKSEIIKKNNLGKR | | | |
| | | KYFYQKEINLNEIKQFINLSLNRFITE | | | |
| | | ERPAVMVTEDLRFTNWNKKLSKNV | | | |
| | | KRYFSSWLKGYLQERIDYKVMLNG | | | |
| | | VQQVVVNSAYGSQICHLCGRFGVR | | | |
| | | NGDKFYCEIHGVLDADHNAALNYL | | | |
| | | ARMSDPDITIYTPYRKVKDILQERLR | | | |
| | | LSNQDSRYSVIKTGQWESERTDYV | | | |
| Resolvase | GAQ93499.1 | MFLGFKAAKAHFGVSSCTLRRWAN | 1506 | Resolvase, N | Klebsormidium |
| | | EAKVVSKRTAGNHRVFLAATSQAEE | | terminal | nitens |
| | | GRERLAYCRVSSSKQRDDLQRQKDF | | domain | |
| | | LAHQYPGHRIVTDVGSGINFKRPGL | | | |
| | | LSLLERVLQGRVSQVVVTSKDRLCR | | | |
| | | FAFELLQWICLRQGTQILVLDSGDKS | | | |
| | | PNEEKIRAFPTAQQRNILRRLVGGCR | | | |
| | | KLYNEAVSMIRDRRLPFASEAEFREA | | | |
| | | ERERGLRLAERKRKARSGQEEESGR | | | |
| | | GEGAGAYKGTKHPWLDKVYVKNF | | | |
| | | LVPEKSAFVRANPYLKDVPKETRQQ | | | |
| | | AVEDAIEACKAALSNVRAGNIEHFS | | | |
| | | LGFRKKKDPRWSLAVAFNAVSGSRF | | | |
| | | WPRKIKEFGQLRVAEPGHLRPHYDR | | | |
| | | ELKVSKDELGRYWMLVLSAKGPAR | | | |
| | | GTNEAAARVEALAESTRENQAGDR | | | |
| | | PVAAIDPGVRTRHSIYMTDGRVVDV | | | |
| | | GGGDIARVVRLCRHVDRCISALKKG | | | |
| | | EFCVSRKHVRREPGASTMRLFDHYR | | | |
| | | PAKKEQGAHVVPLDGRSREHIRAK | | | |
| | | MHRLRAKVQALKDEVDNQTVAYLV | | | |
| | | RECKAVLLPPFDTHRMATRLNHKTA | | | |
| | | RAMMQWRHGAFKAKLLERAARMG | | | |
| | | VQVMVVPEAYTSKTCGACGWLHPS | | | |
| | | LGGAKTFQCRSCGVELDRDHNGAR | | | |
| | | NIFLRAIRSWGVDSPE | | | |
| Resolvase | RAO55469.1 | MLIRVLGAGVNLKEWAAATGVSYA | 1507 | Resolvase, N | Micromonospora |
| | | TARRRYEAGALPVPTYRLGRLMVG | | terminal | saelicesensis |
| | | EPGTGTLAEVGRVVVYARVSSADQK | | domain | |
| | | TDLDRQVARVTVWATGQRLAVDSV | | | |
| | | VTEVGSALNGHREKFLALLRDPAVT | | | |
| | | TIVVEHRYRFARFGAEYVEAALSAQ | | | |
| | | RRRLLVVDPAEVDDDLVRDPHLAVR | | | |
| | | TPIRSPCRGEPSSERGRSGYRGTVVK | | | |
| | | TLQAYRFALDLSPRQERAVLAHAGA | | | |
| | | ARVAHNWALARVKAVMSQRAAERT | | | |
| | | YGVPDELLSPPISWSLPSLRKAWNA | | | |
| | | AKDEVAPWWAECSKEAFNTGLDAL | | | |
| | | ARALKNWSDSRKGARKGRAVGFPR | | | |
| | | FKSRRRSTPTVRFTTGVMRIEADRG | | | |
| | | HVVLPRLGALRLHESARKLARRLEA | | | |
| | | GTARIMSATVRREGGRWFVSFTCEV | | | |
| | | ERAVRAPARPGSMVGVDLGVKHLA | | | |
| | | VLSTGERVANPRHLVVAARRMRRLA | | | |
| | | RAVSRCVTPDRRVRRVGSNRWARA | | | |
| | | QQELSRAHARVVGLRRDGLHQFTT | | | |
| | | RLTREHGTVVVEDLNVAGMLRNRR | | | |
| | | LARHVADASFAEVRRQLTYKSEWN | | | |
| | | GGRLVTAGRWYPSSKTCSGCGAVKT | | | |
| | | KLTLAERTYTCTACGLSLDRDLNAA | | | |
| | | LNLAALAREVTDDRSGRESLNGRG | | | |
| | | ADQKTRSRGQVAVKRLPGTARAGQ | | | |
| | | AGTVPPQGGTTAQRSLLSTRR | | | |
| Resolvase | RAO04710.1 | MLIRVLGAGVNLKEWAAATGVSYA | 1508 | Resolvase, N | Micromonospora |
| | | TARRRYEAGALPVPTYRLGRLMVG | | terminal | saelicesensis |
| | | EPGTGTLAEVGRVVVYARVSSADQK | | domain | |
| | | TDLDRQVARVTVWATGQRLAVDSV | | | |
| | | VTEVGSALNGHREKFLALLRDPAVT | | | |
| | | TIVVEHRYRFARFGAEYVEAALSAQ | | | |
| | | RRRLLVVDPAEVDDDLVRDPHLAVR | | | |
| | | TPIRSPCRGEPSSARGRSGYRGTVVK | | | |
| | | TLQAYRFALDLSPRQERAVLAHAGA | | | |
| | | ARVAHNWALARVKAVMSQRAAERT | | | |
| | | YGVPDELLSPPISWSLPSLRKAWNA | | | |
| | | AKDEVAPWWAECSKEAFNTGLDAL | | | |
| | | ARALKNWSDSRKGARKGRAVGFPR | | | |
| | | FKSRRRSTPTVRFTTGVMRIEADRG | | | |
| | | HVVLPRLGALRLHESARKLARRLEA | | | |
| | | GTARIMSATVRREGGRWFVSFTCEV | | | |
| | | ERAVRAPARPGSMVGVDLGVKHLA | | | |
| | | VLSTGERVANPRHLVVAARRMRRLA | | | |
| | | RAVSRCVTPDRRVRRVGSNRWARA | | | |
| | | QQELSRAHARVVGLRRDGLHQFTT | | | |
| | | RLTREHGTVVVEDLNVAGMLRNRR | | | |
| | | LARHVADASFAEVRRQLTYKSEWN | | | |
| | | GGRLVTAGRWYPSSKTCSGCGAVKT | | | |
| | | KLTLAERTYTCTACGLSLDRDLNAA | | | |
| | | LNLAALAREVTDDRSGRESLNGRG | | | |
| | | ADQKTRSRGQVAVKRLPGTARAGQ | | | |
| | | AGTVPPQGGTTAQRSLLSTRR | | | |
| Resolvase | COW23552.1 | MNLAVWAERNGVARVTAYRWFHAG | 1509 | Resolvase, N | Mycobacterium |
| | | LLPVPARKAGRLILVDDQPADRSRR | | terminal | tuberculosis |
| | | ARTAVYARVSSADQKPDLDRQVARV | | domain | |
| | | TAWATTEQIAVDKVVTEVGSALNGH | | | |
| | | RRKFLALLRDPSVKRIVVEHRDRFC | | | |
| | | RFGSEYVEAALAAQGRELVVVDSA | | | |
| | | EVDDDLVRDMTEILTSMCARLYGKR | | | |
| | | AAQNRAKRALAAXXXXXXGARRR | | | |
| | | RVGGCLMAKFEIPEGWMVQAFRFT | | | |
| | | LDPTAEQARALARHFGARRKAYNW | | | |
| | | TVATLKADIDAWQATGIQTAKPSLRV | | | |
| | | LRKRWNTVKNDVCVNIETGVVWW | | | |
| | | PECSKEAYADGIDGAVDAYWNWQN | | | |
| | | SRSGKRDGKRMGFPRFKKKGRDPD | | | |
| | | RVTFTTGAMRVEPDRSHLTLPVIGTV | | | |
| | | RTHENTRRVERLIAKGRSRVLAITVR | | | |
| | | RNGTRIDASVRVLVQRPQQPKVTDP | | | |
| | | GSRVGVDVGVRRLATVATADGAVLE | | | |
| | | RVPNPRPLDAALNELRHVCRARSRC | | | |
| | | TKGSRRYRERTTEISRLHRRVNDVRT | | | |
| | | HHLHCLTTHLAKTHGRIVVEGLDAA | | | |
| | | GMLRQQGLSGARARRRGLSDAALG | | | |
| | | TPRRHLSYKTGWYGSQLVVADRWF | | | |
| | | PSSKTCHVCGHVQEIGWAEHWQCD | | | |
| | | SCSASHQRDDCAAINLARYEDTSSV | | | |
| | | VGPVGAAVKRGADRKTRPGRAGGR | | | |
| | | EARKGSSRKAAEQPRDGVQVA | | | |
| Resolvase | XP_004367500.1 | MQGPLADLPTNSTSRPWLVGPRNTT | 1510 | Resolvase, N | Acanthamoeba |
| | | KLNHRTRQILESGEDAFVPSNEVTK | | terminal | castellanii |
| | | YYNVTAACLRQWANKGEVRVLRIG | | domain | str. Neff |
| | | ELGKRLYNAKDLKSKLVGRDGGAQ | | | |
| | | QQRQQQRKRFAYAQVSSEHQRGDL | | | |
| | | ERQVGELRRLCPNHKIVTNVASGLN | | | |
| | | WKRKGVRAILDQCLEGMVEEVAVL | | | |
| | | HRDRLARFGVELMEYLFAKNDVRL | | | |
| | | VVVGEGATADAETHAVLEAVVDPA | | | |
| | | QELADDLIAQPWRKQQAANLKTAQ | | | |
| | | KKANRKKASAAKTKVMEASGDGD | | | |
| | | TNQPGGKRKRKGKERAPISEEGEEE | | | |
| | | EEPAPYDGKCRKIRVFPNRWQKDLL | | | |
| | | KSWMGTVRWTFNACNAAVRAGLS | | | |
| | | GHSEAELRSRFVDNEAFGKPHLPGP | | | |
| | | STLWVLDTPRDIRDQAAKELSAAYK | | | |
| | | NGTKAHGKGKFEVKFKSPKKMAQQ | | | |
| | | CITSNARDWGRGRTSVFHGLFDSGR | | | |
| | | ALRASEPLPREMKHEFKIVRTRLGR | | | |
| | | YYLCVPMDLETRGESQAPSSSDDVG | | | |
| | | AECVFIDPGVRTFVTTFDLSGRIHEF | | | |
| | | GTGSIGRIEKLCRRLDDLISRTYAKK | | | |
| | | PDDRQRFLRGKKKRWRMRRAALR | | | |
| | | MRRRIRDLIDEAHRKIALWLCENHR | | | |
| | | VILWPLSGVSNMVVAKEDLKQRKR | | | |
| | | RIGAKSVRAMLTWSWYRFQEWLKH | | | |
| | | KVREFPWCRLVLTSEAHTTKTCTHC | | | |
| | | GTPNHDVGRSEVFRCADAACPNRS | | | |
| | | AHRDHHGARNNGLRFLTEWANLPT | | | |
| | | TTTTTTMTQRLPTRVIDLTTSGLND | | | |
| Resolvase | XP_004367500.1 | MQGPLADLPTNSTSRPWLVGPRNTT | 1511 | Resolvase, N | Acanthamoeba |
| | | KLNHRTRQILESGEDAFVPSNEVTK | | terminal | castellanii |
| | | YYNVTAACLRQWANKGEVRVLRIG | | domain | str. Neff |
| | | ELGKRLYNAKDLKSKLVGRDGGAQ | | | |
| | | QQRQQQRKRFAYAQVSSEHQRGDL | | | |
| | | ERQVGELRRLCPNHKIVTNVASGLN | | | |
| | | WKRKGVRAILDQCLEGMVEEVAVL | | | |
| | | HRDRLARFGVELMEYLFAKNDVRL | | | |
| | | VVVGEGATADAETHAVLEAVVDPA | | | |
| | | QELADDLIAQPWRKQQAANLKTAQ | | | |
| | | KKANRKKASAAKTKVMEASGDGD | | | |
| | | TNQPGGKRKRKGKERAPISEEGEEE | | | |
| | | EEPAPYDGKCRKIRVFPNRWQKDLL | | | |
| | | KSWMGTVRWTFNACNAAVRAGLS | | | |
| | | GHSEAELRSRFVDNEAFGKPHLPGP | | | |
| | | STLWVLDTPRDIRDQAAKELSAAYK | | | |
| | | NGTKAHGKGKFEVKFKSPKKMAQQ | | | |
| | | CITSNARDWGRGRTSVFHGLFDSGR | | | |
| | | ALRASEPLPREMKHEFKIVRTRLGR | | | |
| | | YYLCVPMDLETRGESQAPSSSDDVG | | | |
| | | AECVFIDPGVRTFVTTFDLSGRIHEF | | | |
| | | GTGSIGRIEKLCRRLDDLISRTYAKK | | | |
| | | PDDRQRFLRGKKKRWRMRRAALR | | | |
| | | MRRRIRDLIDEAHRKIALWLCENHR | | | |
| | | VILWPLSGVSNMVVAKEDLKQRKR | | | |
| | | RIGAKSVRAMLTWSWYRFQEWLKH | | | |
| | | KVREFPWCRLVLTSEAHTTKTCTHC | | | |
| | | GTPNHDVGRSEVFRCADAACPNRS | | | |
| | | AHRDHHGARNNGLRFLTEWANLPT | | | |
| | | TTTTTTMTQRLPTRVIDLTTSGLND | | | |
| Resolvase | XP_004344636.1 | MQGPLGETNERPWLHNPRNTAIVR | 1512 | Resolvase, N | Acanthamoeba |
| | | HRTRQLIEAGGDTYVPSSEATKYFG | | terminal | castellanii |
| | | VTAACLRKLADRGNLRTRRIGDKG | | domain | str. Neff |
| | | KRLYHCGDLLSQFPAVTRSEDGRTIQ | | | |
| | | TTTRPPRKRIAYARVSSEKQRPDLER | | | |
| | | QIAELRRLCPDHEIVSEVASGLNFRR | | | |
| | | KGLCAILDRCFAGLVDEVAVLHRDR | | | |
| | | LARFATELLEHVFKRHDVRLVVVGQ | | | |
| | | GDPAAAATLDALDPQRELADDLIAV | | | |
| | | TTFFVARQNGLRSAAHRRARRDRA | | | |
| | | ALEEGRGSTTSEPSEEESEERGGSEE | | | |
| | | SERDETDGSSSSSSSDDGGGRRKRQ | | | |
| | | RTSRRRRRRREAEAEGTAGAEGGG | | | |
| | | DGEGGMVAFDGKTRKICVFPTAQQ | | | |
| | | KTLLKRWIGTVRWTYNQCVAAVRG | | | |
| | | RQCAPTKKALRARFVTEFGLREAER | | | |
| | | IKRAKSGVGGGGDDDDVGISWVFE | | | |
| | | TPHDLRDQAVGQFVTAYKNAVQAH | | | |
| | | GRGKFDIAFRSAKRLQQETVVIRSR | | | |
| | | DWNRTRGEYAPIFGNTVLRSSESLPA | | | |
| | | KMDHEFRVMRTKLGRYYISIPVPLD | | | |
| | | VKHPIQQQQPDAVGGGDNQAPAVAP | | | |
| | | HAAAAIDPGVRTPFTVYSPDEARVY | | | |
| | | ELGANDFGRIRRLCHHLDDLVSRTT | | | |
| | | DRDVRKKRRRRMRRAAARMRRRIR | | | |
| | | DLVDDLHRRAAKWLCETFETIIYPH | | | |
| | | YETSNMVVGKSKRRGLHSKTVRAM | | | |
| | | LTWSHFRFKQHLLHKIREYPSGCRV | | | |
| | | VLVDESYTSKTCGGCGRINHGLGKS | | | |
| | | KLFWCEQCGFRTDRDWNGARNIWL | | | |
| | | KFLTEWCNGSSRGNDDDDKEQQQQ | | | |
| | | QQQ | | | |
| Resolvase | XP_004344636.1 | MQGPLGETNERPWLHNPRNTAIVR | 1513 | Resolvase, N | Acanthamoeba |
| | | HRTRQLIEAGGDTYVPSSEATKYFG | | terminal | castellanii |
| | | VTAACLRKLADRGNLRTRRIGDKG | | domain | str. Neff |
| | | KRLYHCGDLLSQFPAVTRSEDGRTIQ | | | |
| | | TTTRPPRKRIAYARVSSEKQRPDLER | | | |
| | | QIAELRRLCPDHEIVSEVASGLNFRR | | | |
| | | KGLCAILDRCFAGLVDEVAVLHRDR | | | |
| | | LARFATELLEHVFKRHDVRLVVVGQ | | | |
| | | GDPAAAATLDALDPQRELADDLIAV | | | |
| | | TTFFVARQNGLRSAAHRRARRDRA | | | |
| | | ALEEGRGSTTSEPSEEESEERGGSEE | | | |
| | | SERDETDGSSSSSSSDDGGGRRKRQ | | | |
| | | RTSRRRRRRREAEAEGTAGAEGGG | | | |
| | | DGEGGMVAFDGKTRKICVFPTAQQ | | | |
| | | KTLLKRWIGTVRWTYNQCVAAVRG | | | |
| | | RQCAPTKKALRARFVTEFGLREAER | | | |
| | | IKRAKSGVGGGGDDDDVGISWVFE | | | |
| | | TPHDLRDQAVGQFVTAYKNAVQAH | | | |
| | | GRGKFDIAFRSAKRLQQETVVIRSR | | | |
| | | DWNRTRGEYAPIFGNTVLRSSESLPA | | | |
| | | KMDHEFRVMRTKLGRYYISIPVPLD | | | |
| | | VKHPIQQQQPDAVGGGDNQAPAVAP | | | |
| | | HAAAAIDPGVRTPFTVYSPDEARVY | | | |
| | | ELGANDFGRIRRLCHHLDDLVSRTT | | | |
| | | DRDVRKKRRRRMRRAAARMRRRIR | | | |
| | | DLVDDLHRRAAKWLCETFETIIYPH | | | |
| | | YETSNMVVGKSKRRGLHSKTVRAM | | | |
| | | LTWSHFRFKQHLLHKIREYPSGCRV | | | |
| | | VLVDESYTSKTCGGCGRINHGLGKS | | | |
| | | KLFWCEQCGFRTDRDWNGARNIWL | | | |
| | | KFLTEWCNGSSRGNDDDDKEQQQQ | | | |
| | | QQQ | | | |
| Resolvase | RHZ49948.1 | MCIVIRDQLTFLNKNHLFNFLTKPPF | 1514 | Resolvase, N | Diversispora |
| | | YNLAQLNTTYQSAHKIQETYDVSVE | | terminal | epigaea |
| | | TLRRWADSGRIAIVRTPGGKRLYSIT | | domain | |
| | | DIQEIFRDNQQTQITQKAKICYARVS | | | |
| | | SEHQRDDLERQIANLRQYYPEYKIIS | | | |
| | | DIRLGLNWKRKGFVALLERIHTEGIE | | | |
| | | EVVVTRKDRLCRFGSELVEWIFEKN | | | |
| | | GTRLVVLGTDVSAESSEAGELAEDL | | | |
| | | LSIVTVFVARHNGMQTYDVSVETLR | | | |
| | | RWADSGRIAIVRTPGGKRLYSITDIQ | | | |
| | | EIFRDNQQTQITQKAKICYARVSSEH | | | |
| | | QRDDLERQIANLRQYYPEYKIISDIR | | | |
| | | LGLNWKRKGFVALLERIHTEGIEEV | | | |
| | | VVTRKDRLCRFGSELVEWIFEKNGT | | | |
| | | RLVVLGTDVSAESSEAGELAEDLLSI | | | |
| | | VTVFVARHNGMRSAANRRRRREVV | | | |
| | | KAQEEQELQNSSRQDTTYLSLSYAR | | | |
| | | GEVKTQTLDGNTVEKKGIEQTKKA | | | |
| | | LRAQCLNAANFNNTELQWVLETPY | | | |
| | | DIRDEAMNDLLKSYSSNFAAKRKKF | | | |
| | | KMKFCSKKNQQQSITILSKHWGKSK | | | |
| | | GVYTFLCKMKSAENLPAELHYDSRL | | | |
| | | VMNRLGEFYLCIPQPLEIWAENQDP | | | |
| | | TQSDAVIALDPAVEWGKNDISRIYQL | | | |
| | | SHIYDKIQSTHDSIHGKVHKRKRYK | | | |
| | | LRRVMLRIHKKICCLINDCYHKLAK | | | |
| | | WLCQSYRIILLSKFQTQGMVRREKW | | | |
| | | RIRSKTARMMLTWSHFRFRQYLLHK | | | |
| | | VREYPWCRVIICTEEYTSKTCGCCG | | | |
| | | HIHRKLGGSKVFRCPSCTAELDWDI | | | |
| | | NSARNILLRYLTITSKEPVYAGAGIY | | | |
| | | PLEPS | | | |
| Resolvase | RHZ49948.1 | MCIVIRDQLTFLNKNHLFNFLTKPPF | 1515 | Resolvase, N | Diversispora |
| | | YNLAQLNTTYQSAHKIQETYDVSVE | | terminal | epigaea |
| | | TLRRWADSGRIAIVRTPGGKRLYSIT | | domain | |
| | | DIQEIFRDNQQTQITQKAKICYARVS | | | |
| | | SEHQRDDLERQIANLRQYYPEYKIIS | | | |
| | | DIRLGLNWKRKGFVALLERIHTEGIE | | | |
| | | EVVVTRKDRLCRFGSELVEWIFEKN | | | |
| | | GTRLVVLGTDVSAESSEAGELAEDL | | | |
| | | LSIVTVFVARHNGMQTYDVSVETLR | | | |
| | | RWADSGRIAIVRTPGGKRLYSITDIQ | | | |
| | | EIFRDNQQTQITQKAKICYARVSSEH | | | |
| | | QRDDLERQIANLRQYYPEYKIISDIR | | | |
| | | LGLNWKRKGFVALLERIHTEGIEEV | | | |
| | | VVTRKDRLCRFGSELVEWIFEKNGT | | | |
| | | RLVVLGTDVSAESSEAGELAEDLLSI | | | |
| | | VTVFVARHNGMRSAANRRRRREVV | | | |
| | | KAQEEQELQNSSRQDTTYLSLSYAR | | | |
| | | GEVKTQTLDGNTVEKKGIEQTKKA | | | |
| | | LRAQCLNAANFNNTELQWVLETPY | | | |
| | | DIRDEAMNDLLKSYSSNFAAKRKKF | | | |
| | | KMKFCSKKNQQQSITILSKHWGKSK | | | |
| | | GVYTFLCKMKSAENLPAELHYDSRL | | | |
| | | VMNRLGEFYLCIPQPLEIWAENQDP | | | |
| | | TQSDAVIALDPAVEWGKNDISRIYQL | | | |
| | | SHIYDKIQSTHDSIHGKVHKRKRYK | | | |
| | | LRRVMLRIHKKICCLINDCYHKLAK | | | |
| | | WLCQSYRIILLSKFQTQGMVRREKW | | | |
| | | RIRSKTARMMLTWSHFRFRQYLLHK | | | |
| | | VREYPWCRVIICTEEYTSKTCGCCG | | | |
| | | HIHRKLGGSKVFRCPSCTAELDWDI | | | |
| | | NSARNILLRYLTITSKEPVYAGAGIY | | | |
| | | PLEPS | | | |
| Resolvase | GAQ92436.1 | MWWFYLKEEKRTKRPVGVVGSCD | 1516 | Resolvase, N | Klebsormidium |
| | | TERVVQPQESEKTPELQDIPPGHEKY | | terminal | nitens |
| | | ANVFEKHAERFDDAYDKIREETLCL | | domain | |
| | | AKRRRQYSIMLDASSSSFRRAKDHF | | | |
| | | GVSSSTPRRWANEGKIATKRTAGNH | | | |
| | | RVFSIPSLEEKETRACIAYCRVSSSKQ | | | |
| | | RDDLQRQRRFLSDQLPRHESVSDVG | | | |
| | | SGINFERPGLLSILERVLQGRVSEVV | | | |
| | | VASKDRLCRVHKSGGAIKEAEVALA | | | |
| | | FPSRCRKIRAFPTGHQRLILRKMVG | | | |
| | | GCRKLYNETVAMIRDRRLPFANVEA | | | |
| | | FEEAERRRKTRLEDRKRKKAEDDGS | | | |
| | | EFEEVHYKGTSHPWMDKVYVKNFL | | | |
| | | VPEDSDFMKANPYLKEIPKETRQQA | | | |
| | | VEDAIEAYKAAFSNMAVGNISNFEV | | | |
| | | GFRKKKDPRWSIAVAFNAVSGSRFW | | | |
| | | PRKVKDFGELVVAEPRHLRKRYGRE | | | |
| | | LKISKDQLGRYWMVIMNDKGPKAT | | | |
| | | TEEAAKGVEELRESTRENQAGDKPV | | | |
| | | AAIDPGIRTRHTIYMTDGRLVEVENQ | | | |
| | | DIQRIVRLCRHVDRCISALSKGELAV | | | |
| | | SKKHLKRNPKASVMALFDHYRPSK | | | |
| | | KVQGQHVVRLSGEDKNRIRQKMHQ | | | |
| | | LKAKIESLKNEIDDQTVAYLLRECKT | | | |
| | | VLLPPFDMHSMSTRLHHKTARAMM | | | |
| | | QWRHGTFKTKLVERAPGRGVRVMI | | | |
| | | VSEAYTSKTCGACGWLHPSLGHKV | | | |
| | | FCTADWTAAAPVFKPLQGDGMLRN | | | |
| | | LSLSGTSLCGADARPGVDNIFCSNDF | | | |
| | | ISKPLTQVQGSGNVTAQGKGRLCVV | | | |
| | | AKDQRVFCTDSIVQNPVWTKRGDL | | | |
| | | AIDLAMNESGGICALNPDGTIFCQPD | | | |
| | | LTSGKWVATNVAEKKNVNLATNIHG | | | |
| | | TKLCIFNSDKAPAYCHDNVFAGDKA | | | |
| | | GWYGLAAAGQRFGLEKV | | | |
| Resolvase | CAB1120549.1 | MAFVNTKTAIERLGVSNVTLRKWD | 1517 | Resolvase, N | Ectocarpus sp. |
| | | KLEAIPTIRTPGGQRVYDIETFQKTQ | | terminal | CCAP 1310/34 |
| | | ALRSEEARLCARRMAKDKKNASRI | | domain | |
| | | DIGYARVSFSKQKEDLGRQEQFIRDS | | | |
| | | CPGISILSDIGSGLNFKRKGFKKLLR | | | |
| | | CIMQGQIDRVLVAYKDRLCRFAFEII | | | |
| | | QFICDENNTELVVLNQNENGSAEAE | | | |
| | | LMEDLMAVVHVFSSRLYGKRSTGK | | | |
| | | RKRYTEGGAEDGALVETIREKLSDIE | | | |
| | | PHSTRAKKVRMYPTRKQKKILTKY | | | |
| | | MSDGRRVYNECVRKLIDGVSTSKIR | | | |
| | | DKAIRAPCMDKTMEKTLRTPEHVR | | | |
| | | QKAVDQFVAAQKGVETRETGSLHF | | | |
| | | RSKFNQKQRIGLQKKDSRIHGSSVH | | | |
| | | LTFKEFDENILLGEELVSDDGILTEIV | | | |
| | | RDRGVYYATVTKTRPVTPKSDGLRV | | | |
| | | VSLDMGSRKFGSFYSSDGSIGFIGEE | | | |
| | | AGEKLSRLIKKREYLKKLKESKSKL | | | |
| | | TKGWRKVSKRIANLVNEMHNKVAL | | | |
| | | YLVRNYDIIMVGRLSNGVMKTKSH | | | |
| | | RNQKLLHASLKHYQFRQRLINNGN | | | |
| | | DHGKKVAIVPEQLTTKLCDRCGFIN | | | |
| | | WKMKAEEVFTCPKCKHSCDRDIHS | | | |
| | | VDPGARPVAAIGGRNDVGGGGATG | | | |
| | | ERSGGAVDAPVSGKGVAKATQRKN | | | |
| | | KTKPKQVSPDESDGVRAVVAALRK | | | |
| | | AFAQAKLRNNDAKAAGKQEDDVH | | | |
| | | KYNGSFRACNLLRSRRSSTIGAGPNS | | | |
| | | GEICDAKVHSRPPRENVQVQRVLQG | | | |
| | | LQPPEVKKVFYDRCWAAINIRISGK | | | |
| | | NTRNDFSDLLDEIIDQSGFDTSLFPP | | | |
| | | KVPCRLQETVTREKEVSAKNSIVVH | | | |
| | | LEAKIKGFLRFRLMNDSQLAFQHLP | | | |
| | | AKDRSRIIVSLSNDCLEREMRGDLD | | | |
| | | PGYVPHVLQVRDPLAQVYATEPDVP | | | |
| | | VLKILKKKTHLFVELISMISNVAEEA | | | |
| | | SDNNRALREETKTRSDEEKVRKAFY | | | |
| | | MSERIKRGLVDRPKTCTVLPVWKLA | | | |
| | | PCFPHYSSSVVGSIFHKEGHDFSSVS | | | |
| | | RFISEHFDLRRVNRKGYKPSGFRSD | | | |
| | | GYQVQVTFMALVSKKPHVPGTTDL | | | |
| | | AKSGYQIAKKVVSLETQERGLFVLS | | | |
| | | QARKDSRKIVADRVHANNLTVVDP | | | |
| | | GCASVVSVRSCPLEFCRCCRERSRES | | | |
| | | TDWEMKGTEYSVKSGRTMLEGREK | | | |
| | | KRRSNDEYGRCFPRFSAVKKKTARK | | | |
| | | SSFLAYCRVAAETFKVMFAEKMKRA | | | |
| | | RKRSRFHSSRLVQKTVDKLASNIAA | | | |
| | | CPSDRKNIVLFGNGSFRAMKGHASA | | | |
| | | PRKKLVRAICSRVNVGMLDEFRTSK | | | |
| | | MCPGGCGGEMTDVQGGQRVRQCT | | | |
| | | TVCVGVENPCPLFENGVAFRCDRDA | | | |
| | | SATLNFCLAGYCGLVX | | | |
| Resolvase | CAG8449366.1 | MKTREFFTGDIYPNDNVYSMQIVED | 1518 | Resolvase, N | Cetraspora |
| | | HEDYYTKEYYMKIKCVATNSLDAYI | | terminal | pellucida |
| | | FLSGFPVYCEFKINNGFDDGIDEKIV | | domain | |
| | | KEILNYISLTNYKDYRSVKREDILGN | | | |
| | | EFYFLRVFFKNHNIRKKIIKKVRDCI | | | |
| | | KNKEDNYQIFDLYEDDISTPYSMFIA | | | |
| | | PRIKIKINGFEQGFPLSKTFKLNRTLS | | | |
| | | RKIYENKFHYSNLRFIDDIDTYISMF | | | |
| | | FDFETVDIENMKKGILGRVSIGCEID | | | |
| | | QAFMGVFLFFKGRDIIPFHTVAVLLQ | | | |
| | | NEEFPVEYERIDEKLDLIYVKNQKEF | | | |
| | | FLTKALLYYNFRPEKTGGWNNLGY | | | |
| | | DWKFTIRKLYELGIFEEFIQIATGKTK | | | |
| | | SIENIIKFDYRNEYNTVNANEKACH | | | |
| | | YFLKILGTEEYDQSTMFRQHYQTLS | | | |
| | | KWSLNTILGKLGLKLKLEFSIKEMY | | | |
| | | EILYNVYKGNFDEKTKKEKCTLILD | | | |
| | | YCIRDCIAPKEAIEFINKITEYRIISNL | | | |
| | | TYIPMYEYSYGNKTKMINNLIVYFA | | | |
| | | NREGFDISIKYDKKNVKEEYEGGLV | | | |
| | | KDPLKEFSVVSDGCLDFNSLYPSVM | | | |
| | | MQHNICFLTKLKKNEKEEGCHEISY | | | |
| | | KNSKGITKIIRFSKKRKGLIPTILELL | | | |
| | | VKRRKEAKKDRDRHEKSNPMYNY | | | |
| | | YNILQDTLKKIANSIYGQFGNQYSII | | | |
| | | CDYEVSASVTGAYARKYIKMASEY | | | |
| | | MQTKEISETNKEKKFIWKYTDTDSIF | | | |
| | | FRLSPILINEIIKRYENHLLDKNINEK | | | |
| | | DFIDVIYNIQKEMVFVTYNESMKLQ | | | |
| | | DEINEWMANENQAPRIIMEMEKIVS | | | |
| | | PNLYISKKKYNGLIFENSNYFFDDE | | | |
| | | WKDLEKHIKEEYKIDNVTKEIVNDF | | | |
| | | VKKNDEYKLLANGKKFSNLLAKGT | | | |
| | | DLVRRNSTLICRVILKKLLYTLFDYR | | | |
| | | EYGRYLYNMKFTKIEEYQDFINGVN | | | |
| | | KNDFAKETSKRVVEDFIKYLYSKET | | | |
| | | ELNLELFEQNARNNEEEEDMMTFTE | | | |
| | | TKDPLSITKYTMTSKYKPAEKIKKT | | | |
| | | YGVSTSTLRRWGDKGDVSCITMPG | | | |
| | | GKRMYSTEDIDNMFGRESKEKKKIC | | | |
| | | YARVSSEKQKEDLERQCNHLRSEYP | | | |
| | | EHEIITDIGSGLNWKRKGFTSLLERI | | | |
| | | YQGDIEEVVVTRKDRLCRFAYELVE | | | |
| | | WIFKKHEVKLMVLGTDVGSNEPET | | | |
| | | GELAEDLLSIVTVFTARHNGLRSAA | | | |
| | | NKRKRKEIENSKDTDILRQKCIKIEN | | | |
| | | FQNENKWVLETPYGIRDEALIDLLD | | | |
| | | AHKSNFKLKRQKFNIRYKKKKDKQ | | | |
| | | HSITIQARDWKRKRGEYAFLKNIRM | | | |
| | | SEELPNIEHAFNIILDKLGKFYICIPISI | | | |
| | | EEYYREDNEIISLDPGIRTFMTGYDPI | | | |
| | | DDCHMKLAKFLCDNYNTILLPKFET | | | |
| | | QEMVKRIKRKIRNKTARMMITWSH | | | |
| | | YRFRRFLEHKISEYPGRLLILCNEHY | | | |
| | | TSKTCGNCGYIKRNFGGSKIYKCDE | | | |
| | | CGFVIDRDYNENQTDWERSEKKDK | | | |
| | | EYTETILKQENDETTSMVKKFVRDM | | | |
| | | KMINVEVPKPRFNYYVIYKHGVKE | | | |
| | | VYKRMVLVDRFDPKKQRIDKYHYL | | | |
| | | KGIKSFLSVCIEETEKETDEWIKSIID | | | |
| | | KNTNKSIDEYSLKEDEQKGGKKRK | | | |
| | | KKEYDILIPKKQMKISSFFKKQNND | | | |
| | | NDDNDFFI | | | |
| Transposase_ | QIY66925.1 | MSGAEPAGSGKKKRRGFEARPGFH | 1519 | Transposase, | Streptomyces sp. |
| mut | | VVGHRLALDPSASALQALASHCGA | | Mutator | RPA4-2 |
| | | ARVAYNWAVRHVLASWSQRAAEET | | family | |
| | | YGVPEAERVAWRSWSLPSLRKAFNE | | | |
| | | AKHNDPFLREWWAQNSKEAYNTGL | | | |
| | | ANAAAAFDNYVKSRRGERKGARM | | | |
| | | GRPRFKPKRKTRPACKFTTGTIRLDD | | | |
| | | RRHIVLPRLGRIRLHEDVQPLVDAIA | | | |
| | | EGCRSNQGSKVHEQAVSSAQQASD | | | |
| | | VGRPLKGSAPIAEGGTRILSVTVRSE | | | |
| | | RGRWFAVLQTEERHTIAPAGRPGTA | | | |
| | | VGIDLGVKALLVMADSAGEVREVA | | | |
| | | NPKHYDQALTQLRKASRTVSRRRGP | | | |
| | | NRRTGQAPSRRWEKANAVPRSSSAE | | | |
| | | TSRTGTLCCVLWESAWAEFVPFLSF | | | |
| | | DVEIRKVICSTNAIESVNARIRKAVL | | | |
| | | EFQWLSQHRSTTMVPSRPARRAADT | | | |
| | | QRQPSSGATWVRMLSSTWAL | | | |
| Y1_Tnp | SFU97206.1 | MEADPTLAVAEIVNRFKSRSSRLMR | 1520 | Transposase | Methylobacterium |
| | | QEFPALRSRLPTLWSRSYYPGSVGH | | IS200 like | sp. UNCCL125 |
| | | VSAKVVEAYIAAQKGTGAVAVRSYK | | | |
| | | YRLRPNRAQTAALDAMLRDFCGLY | | | |
| | | NACLQQRVEAYRRRGLNLRYGPQA | | | |
| | | SELKACRACDPDGLGRWSFSALQQ | | | |
| | | VLRRLDQTYAAFFKRGHGFPRFRAS | | | |
| | | ARYHAATFRIGDGLTVKKDRRIGVV | | | |
| | | GVVGVPGGLKVAWHRDLPDEAKLG | | | |
| | | TAILTRQQGKWFMVLSVEAEFAETC | | | |
| | | GTGTVGIDLGLNSLIATSDGETVEMP | | | |
| | | RFARKAQKAQRWRQRALARCKRGS | | | |
| | | KRRLKAKARLAAGSAKIARQRRDH | | | |
| | | LHKLSRSLVSRYWGIAFEDLTMTGL | | | |
| | | NLSRVWDSQSQDTRDPNPRLQMWR | | | |
| | | GSGPGCCCGDRRASAGFRAGTRPSG | | | |
| | | HKPAGCRIAVPRSRLLQRAELSRLGS | | | |
| Y1_Tnp | MBV8270253.1 | MEYRRDEHRIHLVVYHLIWCPRRRK | 1521 | Transposase | Planctomycetaceae |
| | | PVLMGDVARDCRSLIEAKCAEHGW | | IS200 like | bacterium |
| | | TIETLAIRPDHVHLFVRAWPKDSAA | | | |
| | | DVLKAVKGVTAHALRKKYPHLRKT | | | |
| | | PSLWTRSYFASTAGNVSQETIRRSIE | | | |
| | | AQKGLEMIRTHILPCTIPRARADELN | | | |
| | | RASGAIYTGILVAHWRLVRKKGLWL | | | |
| | | SEASGTRWSDTRTDARMHAHSIDA | | | |
| | | AQQGFYKACETARGLRQAGIAEAK | | | |
| | | FPYHRKKFRTTIWKATGIKREGNILR | | | |
| | | LSGGGRTKKERDERAVEVPIPEQLR | | | |
| | | DCLKFLEVRLVYDKYARRYTWHVV | | | |
| | | VENGLKPKPAPGRNVVSVDLGEIHP | | | |
| | | AVVGDRTHAIVITCRERRSRSQGHA | | | |
| | | KRLATISRAIARKAKTSRRRRRLIRA | | | |
| | | KVRMKAKHARILRDIEHKVSHEVV | | | |
| | | AFAAERQAGTIVIGDIRDIADGIACG | | | |
| | | T | | | |
| Y1_Tnp | MCL9760917.1 | MSGWAGGVYDLGYHVVWCPKYRR | 1522 | Transposase | Frankia sp. AiPa1 |
| | | AVLVGQVRDRLDTLIQQKCAEHGW | | IS200 like | |
| | | PIVALEIEPDQVHNAALQERRDAYA | | | |
| | | HPSKTKVRYGDQSAQLKEIRAYDPD | | | |
| | | LARWSFSSQQATLRRLNLAFEAFFR | | | |
| | | RVKAGETPGYPRFKGAGWFDTVTW | | | |
| | | PVDNDGCRWDSQPEHPTRTFVRLQ | | | |
| | | GVRHVRVHQHRPVRGRVKTLSVKR | | | |
| | | ESARWYLILSCDDVPSKPLPPTGAVV | | | |
| | | GIDLGVASLVTDSNGEHYGNPRFLR | | | |
| | | RSADRLADAQRDLSRKRRGSKRRR | | | |
| | | MAVQRVAVLSRQVARQRVDLANKT | | | |
| | | VNEIVADHDLIVVEKLNIKGMVKRA | | | |
| | | RPRPDPDSAGGFLPNGQAAKSGLNK | | | |
| | | SIHDAGWGVFLNVLRAKAESAGRL | | | |
| | | VVEVNPRHTSQRCPGCGHVAAENR | | | |
| | | LTQATFLCVRCGHAAHADVNAAVNI | | | |
| | | LRAGLALQAATPSS | | | |
| Y1_Tnp | EDT84099.1 | MRALKGVSARLLMKEYGDELKKKL | 1523 | Transposase | Clostridium |
| | | WGGHLWNPSYFIATVSENTEEQIRDI | | IS200 like | botulinum Bf |
| | | FKVKNKNRRVVDLFMKIIIKGFKYRI | | | |
| | | YPTKEQEIQLNKTFGCVRFVYNQIL | | | |
| | | AKKIDLYKNESKSISKTICNNYCNRE | | | |
| | | LKKEYPWLKEVDKFALTNSIYNLDS | | | |
| | | AYQKFFKEHTGFPKFKSKKNHYYSY | | | |
| | | TTNFTNNNIKVDFENNKIQLPKLKW | | | |
| | | IKAKLHKEFQGRILFATVSKTPSNKY | | | |
| | | FVSLNIECEHQELKQNNNKIAMDLG | | | |
| | | IKDLLITSNGTKIDNKKLSYKYEQKL | | | |
| | | AKLQRQIAKKKIGSNNWRKQRIKIA | | | |
| | | RLHEKIANIRKDNLHKISHKIVKENQ | | | |
| | | LIFSENLNIKGMVKNHNLAKSIHDC | | | |
| | | GWYELTRQLTYKSEWNNRIYHKVD | | | |
| | | RFHPSSQLCNVCGYKNEDTKNLNIR | | | |
| | | FWECLQCHTKHDRDENASINILNQG | | | |
| | | LKELKLEKVS | | | |
| Y1_Tnp | TCS68577.1 | MTEVMFTFYSRLIPIQKYPKFINAYK | 1524 | Transposase | Effusibacillus |
| | | SASSRLVKKEFPVIRKSLWKEYFWS | | IS200 like | lacus |
| | | RSYCLLSTEVPPLKLSKSTLKHKVN | | | |
| | | ESDFRMDSVLHFEIRPTAEQEKQLFH | | | |
| | | TFDLCRKLYNYALDQRIRSYKETGK | | | |
| | | GLTYRDQQNMLPAFKEANPEYKAV | | | |
| | | QSQVLQDVLRRLDRAFVNFFEKRA | | | |
| | | GYPRFKDKLRFRSITIPQSDVRRNFG | | | |
| | | KEGYIYIPKIGHIKLNAHQAFDPSKV | | | |
| | | KIINVKFQNGKWYTNLTVETDSKPP | | | |
| | | VSDIQLAVGIDMGLFQIAVTSDGEQY | | | |
| | | ENPRWITKSEKRLKKLQRRLSQKHK | | | |
| | | GSQNRQKAKHQLQKLHDHISNQRK | | | |
| | | DYLHKISHRLVQKYVLICIEDLQVK | | | |
| | | GMMKNHRLAKSIANASWNRLANY | | | |
| | | LEYKSRRFGKTLVKVNPKNTSQKCS | | | |
| | | NCRQIVKKNLSERIHQCPYCHVVLD | | | |
| | | RDLNAAINILQAGLNMIA | | | |
| Y1_Tnp | MBW8381061.1 | MYHVVWCSKYRRTVLTDQVELRLK | 1525 | Transposase | Youngiibacter sp. |
| | | EIIASVCKEKEVELFEMEVMPEHIHL | | IS200 like | |
| | | LLEVDPQFGIHRVVKALKGQSSREL | | | |
| | | REEQNMQLTVQMKLIPDNEQKALIE | | | |
| | | YILNSYIATVNDIVADFVSMGQIDKR | | | |
| | | TSADISTSMPSALKNQAIQDAMSVF | | | |
| | | KKYTKDLKSAIRFNESNPSKKHKTV | | | |
| | | IVPVLKKPVAIWNNQNYSIGEDVISF | | | |
| | | PVWKDGKSKKLSFRIVATEYQKTLL | | | |
| | | QNKLGTLRITRKSGKYIAQIAVDIPC | | | |
| | | ESYHGSSMMGIDLGLKVPAVAVTDT | | | |
| | | GKIQFFGNGRENKYKKRMARAKRK | | | |
| | | ALGKAKKIKALKKLDNKEQRWMK | | | |
| | | DKDHKLSKEIVNFAKTNKVKTIQLE | | | |
| | | ELAGIRQTARTSRKNAKNLHTWSFY | | | |
| | | RLAQFIQYKANLVGIEVVYVNPKYT | | | |
| | | SQTCPVCGTKNHANDRKYKCPCGF | | | |
| | | KTHRDILGAMNIITAPVIDGNSLSA | | | |
| Y1_Tnp | MBA9002912.1 | MVRVKLVKPIKGRSSRVLREEFPHL | 1526 | Transposase | Thermomonospora |
| | | KSQLPTLWTNSSFVATVGGAPLSEV | | IS200 like | cellulosilytica |
| | | KRYVEQQKSWQMLTGRRYLLAFTP | | | |
| | | GQETFAELVGDACRMVWNTGLEQR | | | |
| | | RAYRRRGAFIGYVEQARQMAEAKK | | | |
| | | DFPWLAEAPSHTLQQTLRDLEKACK | | | |
| | | THGTFKVRWRSKRKNAPSFRFPDPK | | | |
| | | HIAVERVSRRWGRVRLPKLGWVRFR | | | |
| | | WTRPLGGMVRNVTVLKDGGRWYIS | | | |
| | | FCVEDGLAESTPNGKPPVGVDRGVA | | | |
| | | VAVATSDGWMRDREFVTLGEAVRL | | | |
| | | KRLQQQLARQRKGSARRSATKAKIG | | | |
| | | RLNARVRARRTDFVAWTANRLTRD | | | |
| | | HGLVVVEDLKVKNMTASAKGTLEQ | | | |
| | | PGSRVRQKAGLNRSILAKGWGGLL | | | |
| | | AALEHKARCNGSRIVRVPPAYTSQT | | | |
| | | CAACGHCAPDNRESQAVFRCRACG | | | |
| | | HQANADVNAAKNILAAGLAVTGRG | | | |
| | | DLAAGRSAKRQPPETEAV | | | |
| Y1_Tnp | SCI79596.1 | MKLDNNAHSVFSLNYHLVLVVKYR | 1527 | Transposase | uncultured |
| | | RQIFNDDISDRAKEIFEYIAPNYNIIL | | IS200 like | Eubacterium sp. |
| | | EEWNHDKDHVQILFRAHPNTEISKFI | | | |
| | | NAYKSASSRLLKKEFPQIRKKLWKE | | | |
| | | HFWSQSFCLLAKTFGCVRMVYNHW | | | |
| | | LDRKIRQYEENKTNVTYTACAKEM | | | |
| | | AEMKKTEEYAFLREVDSISLQQSLR | | | |
| | | HLDTAFQNFFKQPKTGFPRFKSKKR | | | |
| | | NKNSYSTVCINSNITISNGYLKLPKIG | | | |
| | | QVRLKQHRDVPKEYRLRSVTVSQTS | | | |
| | | SGKYYASILFEYEDQVQEKEIETFLG | | | |
| | | LDFSMHGLYRDSNGNEPAYPRYYRK | | | |
| | | AEKKLAREQRRLSKMQKGSNNRRK | | | |
| | | QRMKVAKLHEKVCNQRKDFLHKQS | | | |
| | | RQIANAYDCVCVEDLDMKAMSQSL | | | |
| | | KFGKSVSDNGWGMFTTFLKYKLKE | | | |
| | | QGKKLVKVDRFFASSQICSACGYKN | | | |
| | | MKTKDLALRQWDCPQCGTHHDRDI | | | |
| | | NAAINIRNEGMRLVMA | | | |
| Y1_Tnp | WP_138373607.1 | MDKNYIFAEHTNVTHGSGYVYLLQ | 1528 | Transposase | Drancourtella sp. |
| | | YHIVWVTKYRKPVLVGMVAAETKR | | IS200 like | BSD2780061688b_ |
| | | HLLETMEQLQMECLAMEVMPDHIH | | | 171218_E11 |
| | | LLVMELIPDDSQRAGFAQQIGNARF | | | |
| | | MRNQYLNDRIAYYKETRKTLPVDV | | | |
| | | YKKKYFPKLKEQYSFLTLSDKFALE | | | |
| | | SAIEHVDTAYKNFFEGRAAFPKFASK | | | |
| | | WKPSGNTYTTKWTGNNIRLEEHDG | | | |
| | | LPYIKLPKVGLVRFILPKKQTIQTLVP | | | |
| | | HGTSILSVAVKKKGDRYTASLQLET | | | |
| | | VVESPVQLNQMSVRDIMAADMGIK | | | |
| | | LFAIIGGEDWEKEIPNPRWIRIHEKRL | | | |
| | | RRLQKSLSRKKYDKETHTGSKNWE | | | |
| | | KAKQKVAAEHRKIANQRKDFQHKL | | | |
| | | SRRIVDRCSVFCCEDLNIRGMVKNR | | | |
| | | RLAKEISSASWGQFLTMVKYKMER | | | |
| | | QGKHFIQVSRWFPSSQTCSRCGFQN | | | |
| | | TVVKDLVIRSWKCPKCGTYHNRDV | | | |
| | | NAKNNILAEGIRLLQKNGIIVTV | | | |
| Y1_Tnp | WP_138373607.1 | MDKNYIFAEHTNVTHGSGYVYLLQ | 1529 | Transposase | Drancourtella sp. |
| | | YHIVWVTKYRKPVLVGMVAAETKR | | IS200 like | BSD2780061688b_ |
| | | HLLETMEQLQMECLAMEVMPDHIH | | | 171218_E11 |
| | | LLVMELIPDDSQRAGFAQQIGNARF | | | |
| | | MRNQYLNDRIAYYKETRKTLPVDV | | | |
| | | YKKKYFPKLKEQYSFLTLSDKFALE | | | |
| | | SAIEHVDTAYKNFFEGRAAFPKFASK | | | |
| | | WKPSGNTYTTKWTGNNIRLEEHDG | | | |
| | | LPYIKLPKVGLVRFILPKKQTIQTLVP | | | |
| | | HGTSILSVAVKKKGDRYTASLQLET | | | |
| | | VVESPVQLNQMSVRDIMAADMGIK | | | |
| | | LFAIIGGEDWEKEIPNPRWIRIHEKRL | | | |
| | | RRLQKSLSRKKYDKETHTGSKNWE | | | |
| | | KAKQKVAAEHRKIANQRKDFQHKL | | | |
| | | SRRIVDRCSVFCCEDLNIRGMVKNR | | | |
| | | RLAKEISSASWGQFLTMVKYKMER | | | |
| | | QGKHFIQVSRWFPSSQTCSRCGFQN | | | |
| | | TVVKDLVIRSWKCPKCGTYHNRDV | | | |
| | | NAKNNILAEGIRLLQKNGIIVTV | | | |
| Y1_Tnp | TLY96581.1 | MVDLVTNRNCLYQTAYHVIWCPQY | 1530 | Transposase | Gammaproteobacteria |
| | | RRAALTGPIAAEVGTLLEAICGERG | | IS200 like | bacterium |
| | | WPVISKEIQPDHIHLVVSIPPAIAVAN | | | |
| | | AVKVLKGVSARHLLQRFPALKKRL | | | |
| | | WGGHLWSPSYYVGTAGTLSAADAC | | | |
| | | NRLVPLVQAARCWNRVALHQLGYR | | | |
| | | ALRQQTSLGAQMVCNAIFSVCKAY | | | |
| | | RSQGALGRIPQDTPVPPLSFHRTSVH | | | |
| | | FDHRTYTLKDETVSLNTLQGRMRVP | | | |
| | | MILGDHQRKILTSGLPKEAELVFRAG | | | |
| | | QWFFNLAVESADGERVASGPVMGV | | | |
| | | DVGENTLAATSTGRVWGGETLRHR | | | |
| | | RDQHLALRRRLQSNGSQSATQRLRQ | | | |
| | | VSGKERRRVRHVNHETSKAILEEAR | | | |
| | | RIGAATIVMEDLTHIRDRLRAGRRM | | | |
| | | RARLHRWAFRQLQGFLEYKARAIGI | | | |
| | | SVVYVNPAYSSQTCSACGQLGTRRK | | | |
| | | HRFECSCGLRAHADLNASRNLARIG | | | |
| | | ETAVSPRAVVNTPDVGCVACHASP | | | |
| Y1_Tnp | EEM92921.1 | MMNDYRRTKTTISLINYHFVFYPRYI | 1531 | Transposase | Bacillus |
| | | RKIFLNTKVEERFKELVQEICNELDI | | IS200 like | thuringiensis IBL |
| | | VIVAMECDTDHVHLFLNTLPTLSPA | | | 200 |
| | | DTMAKIKGVTSKKLREEFPHLQHLP | | | |
| | | SLWTRSYFVSTAGNVSSETIKHYVES | | | |
| | | QKTRGVKFVTQTITVKAKLLPTKEQ | | | |
| | | IRLLKQSSSDYIKLINTLVFEMVESK | | | |
| | | QSTKKSTKDIEANLPSAVKNQAIKD | | | |
| | | AKSVFSTKVKKNKYKIVPILKRSVC | | | |
| | | VWNNQNYSFDYTHISIPFMVNGKPT | | | |
| | | RLKVRTLLIDKHNRNFDLLKHKLGT | | | |
| | | LRITKKSGKWIAQISVTVPTIEKTGT | | | |
| | | KILGVDLGLKVPAVAITDDDKVRFF | | | |
| | | GNGRKNKYMKRKFRSVRKKLGKA | | | |
| | | KKLNALRQLDDKEQRWMQDQDHK | | | |
| | | VSREIVDFVTNNTISVIRLKQLTNIRQ | | | |
| | | TARTSRKNEKNLHTWSFFRLAQFIE | | | |
| | | YKAKLVGIKVEYVTPSYTSQTCPKC | | | |
| | | TKKNKAQDRKYKCQCGFEKHRDIV | | | |
| | | GAMNIRYATVVDGNSQSA | | | |
| Y1_Tnp | EEM92921.1 | MMNDYRRTKTTISLINYHFVFYPRYI | 1532 | Transposase | Bacillus |
| | | RKIFLNTKVEERFKELVQEICNELDI | | IS200 like | thuringiensis IBL |
| | | VIVAMECDTDHVHLFLNTLPTLSPA | | | 200 |
| | | DTMAKIKGVTSKKLREEFPHLQHLP | | | |
| | | SLWTRSYFVSTAGNVSSETIKHYVES | | | |
| | | QKTRGVKFVTQTITVKAKLLPTKEQ | | | |
| | | IRLLKQSSSDYIKLINTLVFEMVESK | | | |
| | | QSTKKSTKDIEANLPSAVKNQAIKD | | | |
| | | AKSVFSTKVKKNKYKIVPILKRSVC | | | |
| | | VWNNQNYSFDYTHISIPFMVNGKPT | | | |
| | | RLKVRTLLIDKHNRNFDLLKHKLGT | | | |
| | | LRITKKSGKWIAQISVTVPTIEKTGT | | | |
| | | KILGVDLGLKVPAVAITDDDKVRFF | | | |
| | | GNGRKNKYMKRKFRSVRKKLGKA | | | |
| | | KKLNALRQLDDKEQRWMQDQDHK | | | |
| | | VSREIVDFVTNNTISVIRLKQLTNIRQ | | | |
| | | TARTSRKNEKNLHTWSFFRLAQFIE | | | |
| | | YKAKLVGIKVEYVTPSYTSQTCPKC | | | |
| | | TKKNKAQDRKYKCQCGFEKHRDIV | | | |
| | | GAMNIRYATVVDGNSQSA | | | |
| Y1_Tnp | ACV62680.1 | MERKTNHCVYNINYHIVFCPKYRRK | 1533 | Transposase | Desulfofarcimen |
| | | AITGKVEDAVKQIIQEICNTYGYLRA | | IS200 like | acetoxidans DSM |
| | | LPPTEYLSLPWLKKKYFWGSGLWS | | | 771 |
| | | RGYYIGTAGNVSTETFANILKPRNIP | | | |
| | | GGGEIVSKCKNNQSKKSKGIDILVN | | | |
| | | KFPVYLTPEQTSLARTLQREAAKVW | | | |
| | | NTTCIVHRTIYIKHHCWLDEGAMKA | | | |
| | | FVKGKYGVHSQSAQAIVETYFECCE | | | |
| | | RTGKLREQGVTDWRYPHRRKRFFT | | | |
| | | VTWKPLGINYEGKMLTLSNGRGRES | | | |
| | | LILNLPKRLSGAVIKLVQLVWHRNLY | | | |
| | | WLHVTVEKPALKKVQGGVTAAIDP | | | |
| | | GEVHAVAITDGKKSLVVSGRLLRSLS | | | |
| | | RLRNKVLRRLQKAISKTKKGSKQH | | | |
| | | NKLLAAKYRFLNNIERRIEHVIHTIS | | | |
| | | AIVSKWCFEHNVNTVYIGNPEGVRK | | | |
| | | KDCGKKHNQRMSQWTFGELRRML | | | |
| | | EYKLKRHGIKLISVDERGTSGTCPAC | | | |
| | | AEYTKQTGRIYKCGNCGFAGPHRD | | | |
| | | MVGASGILDKSVNGKFTKGRKLPE | | | |
| | | KVEYARLKVKTA | | | |
| Y1_Tnp | MBV8268687.1 | MGSRRDEHRIHLVVDHLLGCPKRR | 1534 | Transposase | Planctomycetaceae |
| | | KPVLVGDVARDCRSLIEAECHDHG | | IS200 like | bacterium |
| | | WTIEDLAIQPDHVHLFIRVWPMDSA | | | |
| | | ADVLKAVQGVPAHAPRKRYPHLRK | | | |
| | | TPSLWTRSSFASTAGNVSQETIRRSIG | | | |
| | | AQKGMEMFKAFVFRLYPSASHRRR | | | |
| | | LEAVRETCRRFYNTLLRQRKDASEL | | | |
| | | RGVSITKTEQLRLVKVEKDTSPYAS | | | |
| | | GIHSPILQAVVADLDKAFQAFFRRVQ | | | |
| | | AGEEPGYPRFKGRDRFAGFGFKEYG | | | |
| | | NGFKIDGRRLKLSGIDRIAVRWHRA | | | |
| | | LEGTIKTARISCRAGKGFVSFACAVE | | | |
| | | RPEPLPKTGKDIGVDVGLLRLATLSD | | | |
| | | GEPVENPRWYRTLLRELRVLGRKIS | | | |
| | | RAVLGGRNRRKLVRRLQRLLAKVA | | | |
| | | NSRKDFLNKFADTLIKRFDRIVLEDL | | | |
| | | RVAALACGRFALSILDAGRSYLVARL | | | |
| | | AHKAESAGREVVLVDPAYTSKTCSG | | | |
| | | CGTVFEHLSLSDRWISCACGVSLDR | | | |
| | | DHNAAINILRRGRNRPLGAKLLAGG | | | |
| | | VRPEAAPL | | | |
| Y1_Tnp | MBV8078224.1 | MRRVPRLRVSTRPFSSGALVPRVECP | 1535 | Transposase | Planctomycetaceae |
| | | DPLDRESRRDERRIHLVVDHLIGCPT | | IS200 like | bacterium |
| | | RRKPVLVGDGARDCRALSEAGCHD | | | |
| | | HGWTIEDSAIQPDHVHLFIRAWPKD | | | |
| | | SAADVLEAVQGVPAHELRAKSPHLR | | | |
| | | ETPSLWTRPSFASTAGNVSQGTIRRS | | | |
| | | VEAQEGMEMFQAFVSRLDPGASHR | | | |
| | | RRPEAVRETCRRFYNTPLRRRKDAS | | | |
| | | ELRGVSITKTEQPRPVEVEKDTSPYA | | | |
| | | SGIHSHILRAVVADLDDAPRASFRRV | | | |
| | | EAGEEPGYPRFKGRDRFAGFGFKEY | | | |
| | | GDGFTIDGRRPKLSGIGRIAVRWHR | | | |
| | | ALEGTIETARISCRAGKWSVSLACAV | | | |
| | | EGPGPLPETGKEIGVDVGLLRLATLS | | | |
| | | DGAPVEGPRWYRTIPRELRVPRRKIS | | | |
| | | RAVLGGRDRRELVRRLRRSPAEVAN | | | |
| | | ARKDFLNKFADELIKRLDRIALEDLR | | | |
| | | VAAPACGRFALSILDAGRSYLVSRLA | | | |
| | | HKAESAGREVVLVDPASTSKTCSGC | | | |
| | | GRVFEHLSPSDRWISCACGVSLDRD | | | |
| | | HNAAINILQRGRNRPMGAKLSAGRV | | | |
| | | CPEAAPL | | | |
| Y1_Tnp | MBV8077914.1 | MEYRRDEHRLHLVVYHHIWCPKRR | 1536 | Transposase | Planctomycetaceae |
| | | KPVLVGDLARDCRALIEAKCNDLG | | IS200 like | bacterium |
| | | WTIEDLAIQPDHVHLFIRVWPKDSA | | | |
| | | ADVLKAVKGVPAHAPRKRYPHLRK | | | |
| | | TPSLWTRSDFASTAGNVSRETIRRSIE | | | |
| | | AQKGLEMIRTHILPCTIPRARADELN | | | |
| | | RASGAIYTGILVAHWRLVRKKGLWL | | | |
| | | SEASGTRWSDTRTDARMHAHAIDA | | | |
| | | AQQGFYKACETARGLRQAGSAEAK | | | |
| | | FPYHRKKFRTTVWKNSGIKRAGDIL | | | |
| | | RLSGGGRTKEEREKRAVKVAIPPPLR | | | |
| | | DCLRFLEVRLVYDQRARRYTWHVV | | | |
| | | VENGLKPKPAPGRNVVSVDLGEIHP | | | |
| | | AVVGDKEHAIVITCRERRHQSQGHA | | | |
| | | KRLAKIQRAISRKKKDSRRRQRLVR | | | |
| | | AKARMNAKHRQVLRDIEHKVSREI | | | |
| | | VKCAAERQAGTIVIGDIRDIADGIDC | | | |
| | | GAVHNGRMSRWNHGKIRTYVAYKA | | | |
| | | AAEGIKLPPPVDEAYTTQTCPSCGH | | | |
| | | RHKPRGRTFRCPSCGLQAHRDIVGQ | | | |
| | | INILSRFLEGDVGKLPAPAEIKHRIPH | | | |
| | | NLRVMRRCRDTGQGGAL | | | |
| Y1_Tnp | MBV8558358.1 | MEYRRDEHRLHLVVYHHIWCPKRR | 1537 | Transposase | Planctomycetaceae |
| | | KPVLVGDLARDCRALIEAKCNDLG | | IS200 like | bacterium |
| | | WAIENLAIQPDHAHLFIRVWPKDSA | | | |
| | | ADVLKAVKGVPAHAPRKRYPHLRK | | | |
| | | TPSLWTRSDFASTAGNVSRETIRRSIE | | | |
| | | AQKGLEMIRTHILPCTIPRARADELN | | | |
| | | RASGAIYTGILVAHWRLVRKKGLWL | | | |
| | | SEASGTRWSDTRTDARMHAHAIDA | | | |
| | | AQQGFYKACETARGLRQAGIAEAK | | | |
| | | FPYHRKKFRTTVWKNSGIKRAGDIL | | | |
| | | RLSGGGRTKEEREKRAVKVAIPPPLR | | | |
| | | DCLRFLEVRLVYDQRARRYTWHVV | | | |
| | | VENGLKPKPAPGRNVVSVDLGEIHP | | | |
| | | AVVGDKEHAIVITCRERRHQSQGHA | | | |
| | | KRLAKIQRAISRKKKDSRRRQRLVR | | | |
| | | AKARMNAKHRQVLRDIEHKVSREI | | | |
| | | VKCAAERQAGTIVIGDIRDIADGIDC | | | |
| | | GAVHNGRMSRWNHGKIRTYVAYKA | | | |
| | | AAEGIKLPPPVDEAYTTQTCPSCGH | | | |
| | | RHKPRGRTFRCPSCGLQAHRDIVGQ | | | |
| | | INILSRFLEGDVGKLPAPAEIKHRIPH | | | |
| | | NLRVMRRCRDTGQGGAL | | | |
| Y1_Tnp | MBV8610280.1 | MEHRRDEHRIHLVVDHLIGCPTRRK | 1538 | Transposase | Singulisphaera sp. |
| | | PVLVGDVARGCRALSEAKGNELGWI | | IS200 like | |
| | | IENLAIQPDHVHPVVRVWPKDSAAD | | | |
| | | VPKAVKGVTAHELRAKSPHLRKTPS | | | |
| | | LWTRSSFASTAGNVSQETIRRSIEAQ | | | |
| | | KGMEMIRTHILPCTIPRARADELNRA | | | |
| | | SGEIYTGILVAHWRLVRKKRLWLSE | | | |
| | | GAGRRWSDTRTDARMHAHSIDAAQ | | | |
| | | EGFYKACDVTRALRRAGSAEAKFP | | | |
| | | YRRKKFRTTVWKTSGIQREGDILRL | | | |
| | | SGGGRTKKERDERAVVVPIPERLRD | | | |
| | | CLRFLEVRLVYDKYARRYTWHVVV | | | |
| | | ENGLKPKPAPGANVVSVDLGEIHPA | | | |
| | | VVGDTERAIVVTCRERRSRSQGHAK | | | |
| | | RLATISRAIARKAKTSRRRRRLVRAR | | | |
| | | VRMKAKHARILRDIEHKVSREVVAF | | | |
| | | AAERQAGTIVIGDVRDIADGVDCGA | | | |
| | | EHNGRMSRLNHGKIRAYIEYKAAAE | | | |
| | | GIKVELVDEHHTTKTCPGCGQRHKP | | | |
| | | RGRTYRCPSCRFQAHRDVVGQVNIL | | | |
| | | SRFLEGDVGRIPAPADVKYRIPRNVR | | | |
| | | VMRRRCGHQPGSNPRSPGATPWNL | | | |
| | | G | | | |
| Y1_Tnp | MBV8318640.1 | MRRVPRLRVSTRPFSSGALVPRVECP | 1539 | Transposase | Planctomycetaceae |
| | | DPLDRESRRDERRIHLVVDHLIGCPT | | IS200 like | bacterium |
| | | RRKPVLVGDGARDCRALSEAGCHD | | | |
| | | HGWTIEDSAIQPDHVHLFIRAWPKD | | | |
| | | SAADVLKAVQGVPAHELRAKSPHLR | | | |
| | | ETPSLWTRPSFASTAGNVSQGTIRRS | | | |
| | | VEAQEGMEMFQAFVSRLDPGASHR | | | |
| | | RRPEAVRETCRRFYNTPLRRRKDAS | | | |
| | | ELRGVSITKTEQPRPVEVEKDTSPYA | | | |
| | | SGIHSHILRAVVADLDDAPRASFRRV | | | |
| | | EAGEEPGYPRFKGRDRFAGFGFKEY | | | |
| | | GDGFTIDGRRPKLSGIGRIAVRWHR | | | |
| | | ALEGTIETARISCRAGKWSVSLACAV | | | |
| | | EGPGPLPETGKEIGVDVGLLRLATLS | | | |
| | | DGAPVEGPRWYRTIPRELRVPRRKIS | | | |
| | | RAVLGGRDRRELVRRLRRSPAEVAN | | | |
| | | ARKDFLNKFADELIKRLDRIALEDLR | | | |
| | | VAAPACGRFALSILDAGRSYLVSRLA | | | |
| | | HKAESAGREVVLVDPASTSKTCSGC | | | |
| | | GRVFEHLSPSDRWISCACGVSLDRD | | | |
| | | HNAAINILQRGRNRPLGAKPLAGGV | | | |
| | | RPEAAPLEWVRSVTGRLSRRRGSRR | | | |
| | | GCGRRSY | | | |

TABLE 1
Strains

| Strain ID | Description | NCBI accession (and/or description) |
|---|---|---|
| sSL0026 | E. coli BL21(DE3) | CP001509.3 |
| sSL0810 | E. coli MG1655 | U00096.3 |
| sSL0410 | E. coli NEB Turbo | Escherichia coli strain from New England Biolabs (catalogue |
| | | #C2984) |
| sSL3690 | Enterobacter sp. BIDMC93 | KQ089962.1 |
| sSL3710 | Enterobacter cloacae AR_136 | CP021902.1 |
| sSL3711 | Enterobacter cloacae AR_154 | CP029716.1 |
| sSL3712 | Enterobacter cloacae AR_163 | CP021749.1 |
| sSL3860 | Enterobacter sp. BIDMC93 knockout of | KQ089962.1 (replacement of 1,706,193-1,709,444 with cmR |
| | fliC, tldR, and guide | under cat promoter) |
| sSL3864 | Enterobacter sp. BIDMC93 knockout of | KQ089962.1 (replacement of tldR plus its promoter, and guide |
| | tldR plus its promoter, and guide | with cmR under cat promoter) |
| sSL3866 | Enterobacter sp. BIDMC93, non- | KQ089962.1 (replacement of 1,709,375-1,709,394 with |
| | targeting guide mutant (NT-guide) | GstTnpB2 (ISGst3) guide and cmR under cat promoter) |
| sSL3868 | Enterobacter sp. BIDMC93 cmR knock | KQ089962.1 (knock in of cmR downstream of tldR under cat |
| | in downstream of tldR | promoter) |
| sSL3870 | Enterobacter sp. BIDMC93 knockout | KQ089962.1 (replacement of tldR with cmR under cat |
| | tldR | promoter) |
| sSL3872 | Enterobacter sp. BIDMC93 knockout | KQ089962.1 (replacement of prophage encoding tldR with |
| | the whole prophage | cmR under cat promoter) |
| sSL3876 | Enterobacter sp. BIDMC93 knockout of | KQ089962.1 (replacement of FliC with cmR under cat |
| | fliC | promoter) |
| sSL3902 | Enterobacter sp. BIDMC93 knockout of | KQ089962.1 (replacement of tldR plus its promoter, and guide |
| | tldR plus its promoter, and guide, with | with cmR under cat promoter), transformed with pSL6208 |
| | rescue plasmid | |
| sSL3580 | E. coli K-12 MG1655, Stanley Qi strain, | Derivative of strain NC_000913.3 |
| | mRFP-sfGFP integrated into genome + | |
| | fSL0213 (CmR_TldR-targets-F-strand) | |
| | recombineered in between mRFP and | |
| | sfGFP | |
| sSL3761 | E. coli K-12 MG1655, GFP integrated | Derivative of strain NC_000913.3 |
| | into genome, derived from Stanley Qi | |
| | strain sSL0677. Recombineered mRFP | |
| | and the KanR marker out of this strain, | |
| | replacing them with CmR | |

TABLE 2
Description and sequence of plasmids

| | | | Plasmid |
|---|---|---|---|
| | | | Sequence |
| ID | Plasmid Name | Description | SEQ ID NO |
| pSL0007 | pCDFDuet-1 | Empty Vector | 1385 |
| pSL0008 | pCOLADuet-1 | Empty Vector | 1386 |
| pSL0001 | pUC57 | Empty Vector | 1387 |
| pSL5555 | pCDF_Ecl_ωRNA(tSL0620)_FLAG-TldR | 3xFLAG-tag TnpB pEffector plasmid ChIP-seq; TnpB pEffector | 1388 |
| | | plasmid for plasmid cleavage assay, targeting ωRNA | |
| pSL5556 | pCDF_Lec_ωRNA(tSL0620)_FLAG-TldR | 3xFLAG-tag TnpB pEffector plasmid ChIP-seq; TnpB pEffector | 1389 |
| | | plasmid for plasmid cleavage assay, targeting ωRNA | |
| pSL5557 | pCDF_Eko2_ωRNA(tSL0620)_FLAG-TldR | 3xFLAG-tag TnpB pEffector plasmid ChIP-seq; TnpB pEffector | 1390 |
| | | plasmid for plasmid cleavage assay, targeting ωRNA | |
| pSL5558 | pCDF_Eho_ωRNA(tSL0620)_FLAG-TldR | 3xFLAG-tag TnpB pEffector plasmid ChIP-seq and RIP-seq; | 1391 |
| | | TnpB pEffector plasmid for plasmid cleavage assay, targeting | |
| | | ωRNA | |
| pSL4618 | pCDF_Gst3_ωRNA(tSL0530)_FLAG- | 3xFLAG-tag TnpB pEffector plasmid ChIP-seq; TnpB pEffector | 1392 |
| | TnpB2(D196A) | plasmid for plasmid cleavage assay, targeting ωRNA | |
| pSL5552 | pCDF_Kpi_ωRNA(tSL0620)_FLAG-TldR | 3xFLAG-tag TnpB pEffector plasmid ChIP-seq; TnpB pEffector | 1393 |
| | | plasmid for plasmid cleavage assay, targeting ωRNA | |
| pSL5553 | pCDF_Eco_ωRNA(tSL0620)_FLAG-TldR | 3xFLAG-tag TnpB pEffector plasmid ChIP-seq; TnpB pEffector | 1394 |
| | | plasmid for plasmid cleavage assay, targeting ωRNA | |
| pSL5554 | pCDF_Eko1_ωRNA(tSL0620)_FLAG-TldR | 3xFLAG-tag TnpB pEffector plasmid ChIP-seq; TnpB pEffector | 1395 |
| | | plasmid for plasmid cleavage assay, targeting ωRNA | |
| pSL5570 | pCDF_Efal_ωRNA(tSL0634)_FLAG-TldR | 3xFLAG-tag TnpB pEffector plasmid ChIP-seq and RIP-seq; | 1396 |
| | | TnpB pEffector plasmid for plasmid cleavage and RFP repression | |
| | | assay, targeting ωRNA | |
| pSL5571 | pCDF_Ero_ωRNA(tSL0634)_FLAG-TldR | 3xFLAG-tag TnpB pEffector plasmid ChIP-seq; TnpB pEffector | 1397 |
| | | plasmid for plasmid cleavage and RFP repression assay, targeting | |
| | | ωRNA | |
| pSL5572 | pCDF_Eca_ωRNA(tSL0634)_FLAG-TldR | 3xFLAG-tag TnpB pEffector plasmid ChIP-seq and RIP-seq; | 1398 |
| | | TnpB pEffector plasmid for plasmid cleavage and RFP repression | |
| | | assay, targeting ωRNA | |
| pSL5573 | pCDF_Emu_ωRNA(tSL0634)_FLAG-TldR | 3xFLAG-tag TnpB pEffector plasmid ChIP-seq and RIP-seq; | 1399 |
| | | TnpB pEffector plasmid for plasmid cleavage and RFP repression | |
| | | assay, targeting ωRNA | |
| pSL5574 | pCDF_Efa2_ωRNA(tSL0634)_FLAG-TldR | 3xFLAG-tag TnpB pEffector plasmid ChIP-seq and RIP-seq; | 1400 |
| | | TnpB pEffector plasmid for plasmid cleavage and RFP repression | |
| | | assay, targeting ωRNA | |
| pSL5575 | pCDF_Tos_ωRNA(tSL0634)_FLAG-TldR | 3xFLAG-tag TnpB pEffector plasmid ChIP-seq; TnpB pEffector | 1401 |
| | | plasmid for plasmid cleavage and RFP repression assay, targeting | |
| | | ωRNA | |
| pSL5576 | pCDF_Ece_ωRNA(tSL0634)_FLAG-TldR | 3xFLAG-tag TnpB pEffector plasmid ChIP-seq and RIP-seq; | 1402 |
| | | TnpB pEffector plasmid for plasmid cleavage and RFP repression | |
| | | assay, targeting ωRNA | |
| pSL5577 | pCDF_Esa_ωRNA(tSL0634)_FLAG-TldR | 3xFLAG-tag TnpB pEffector plasmid ChIP-seq and RIP-seq; | 1403 |
| | | TnpB pEffector plasmid for plasmid cleavage and RFP repression | |
| | | assay, targeting ωRNA | |
| pSL4369 | pCDF_Gst3_ωRNA(tSL0496)_TnpB2 | TnpB pEffector plasmid for plasmid cleavage assay, targeting | 1404 |
| | | ωRNA | |
| pSL4740 | pCDF_Gst3_ωRNA(tSL0496)_dTnpB2(D196A) | nuclease-dead TnpB mutant pEffector plasmid for plasmid | 1405 |
| | | cleavage assay, targeting ωRNA | |
| pSL5578 | pCDF_Eco2_ωRNA(tSL0496)_FLAG-TnpB | TnpB pEffector plasmid for plasmid cleavage assay, targeting | 1406 |
| | | ωRNA | |
| pSL6087 | pCDF_Eco2_ωRNA(tSL0638)_FLAG-TnpB | TnpB pEffector plasmid for plasmid cleavage assay, non-targeting | 1407 |
| | | ωRNA | |
| pSL5582 | pCDF_Ece_ωRNA(tSL0496)_FLAG-TnpB | TnpB pEffector plasmid for plasmid cleavage assay, targeting | 1408 |
| | | ωRNA | |
| pSL6089 | pCDF_Ece_ωRNA(tSL0638)_FLAG-TnpB | TnpB pEffector plasmid for plasmid cleavage assay, non-targeting | 1409 |
| | | ωRNA | |
| pSL6037 | pCDF_Eho_ωRNA(tSL0496)_FLAG-TldR | TnpB pEffector plasmid for plasmid cleavage assay, targeting | 1410 |
| | | ωRNA | |
| pSL6017 | pCDF_Eho_ωRNA(tSL0638)_FLAG-TldR | TnpB pEffector plasmid for plasmid cleavage and RFP repression | 1411 |
| | | assay, non-targeting ωRNA | |
| pSL6018 | pCDF_Efal_ωRNA(tSL0638)_FLAG-TldR | TnpB pEffector plasmid for plasmid cleavage and RFP repression | 1412 |
| | | assay, non-targeting ωRNA | |
| pSL5579 | pCDF_Pmi_ωRNA(tSL0496)_FLAG-TnpB | TnpB pEffector plasmid for plasmid cleavage assay, targeting | 1413 |
| | | ωRNA | |
| pSL5580 | pCDF_Sen_ωRNA(tSL0496)_FLAG-TnpB | TnpB pEffector plasmid for plasmid cleavage assay, targeting | 1414 |
| | | ωRNA | |
| pSL5581 | pCDF_Bub_ωRNA(tSL0496)_FLAG-TnpB | TnpB pEffector plasmid for plasmid cleavage assay, targeting | 1415 |
| | | ωRNA | |
| pSL5583 | pCDF_Lac_ωRNA(tSL0496)_FLAG-TnpB | TnpB pEffector plasmid for plasmid cleavage assay, targeting | 1416 |
| | | ωRNA | |
| pSL5584 | pCDF_Ste_ωRNA(tSL0496)_FLAG-TnpB | TnpB pEffector plasmid for plasmid cleavage assay, targeting | 1417 |
| | | ωRNA | |
| pSL5585 | pCDF_Shy_ωRNA(tSL0496)_FLAG-TnpB | TnpB pEffector plasmid for plasmid cleavage assay, targeting | 1418 |
| | | ωRNA | |
| pSL4128 | pCOLA_tSL0496- | pTarget plasmid for plasmid cleavage assay | 1419 |
| | target_TTTAT-TAM | | |
| pSL5888 | pCOLA_tSL0496- | pTarget plasmid for plasmid cleavage assay | 1420 |
| | target_CTTAT-TAM | | |
| pSL5891 | pCOLA_tSL0496- | pTarget plasmid for plasmid cleavage assay | 1421 |
| | target_TTTAA-TAM | | |
| pSL6086 | pCOLA_tSL0620- | pTarget plasmid for plasmid cleavage assay | 1422 |
| | target_GTTAT-TAM | | |
| pSL5889 | pCOLA_tSL0620- | pTarget plasmid for plasmid cleavage assay | 1423 |
| | target_TCCAT-TAM | | |
| pSL5890 | pCOLA_tSL0620- | pTarget plasmid for plasmid cleavage assay | 1424 |
| | target TTGAT-TAM | | |
| pSL6052 | pCOLA_tSL0496- | pTarget plasmid for plasmid cleavage assay | 1425 |
| | target_GTTAT-TAM | | |
| pSL6216 | pCDF_Eho_ωRNA(tSL0642)_FLAG-TldR | TnpB pEffector plasmid for RFP repression assay, targeting | 1426 |
| | | ωRNA, promoter-targeting (forward strand) | |
| pSL6218 | pCDF_Eho_ωRNA(tSL0644)_FLAG-TldR | TnpB pEffector plasmid for RFP repression assay, targeting | 1427 |
| | | ωRNA, promoter-targeting (reverse strand) | |
| pLS6217 | pCDF_Efal_ωRNA(tSL0643)_FLAG-TldR | TnpB pEffector plasmid for RFP repression assay, targeting | 1428 |
| | | ωRNA, promoter-targeting (forward strand) | |
| pSL6219 | pCDF_Efal_ωRNA(tSL0645)_FLAG-TldR | TnpB pEffector plasmid for RFP repression assay, targeting | 1429 |
| | | ωRNA, promoter-targeting (reverse strand) | |
| pSL6220 | pSC101_tSL0642_GTTAT- | pTarget plasmid for RFP repression assay, target on promoter | 1430 |
| | TAM_mRFP | (forward strand) | |
| pSL6222 | pSC101_GTTAT- | pTarget plasmid for RFP repression assay, target on promoter | 1431 |
| | TAM_tSL0644_mRFP | (reverse strand) | |
| pSL6221 | pSC101_tSL0643_TTTAA- | pTarget plasmid for RFP repression assay, target on promoter | 1432 |
| | TAM_mRFP | (forward strand) | |
| pSL6223 | pSC101_TTTAA- | pTarget plasmid for RFP repression assay, target on promoter | 1433 |
| | TAM_tSL0644_mRFP | (reverse strand) | |
| pSL6069 | pCDF_Kpi_ωRNA(tSL0496)_FLAG-TldR | TnpB pEffector plasmid for RFP repression assay, targeting | 1434 |
| | | ωRNA, 5′ UTR-targeting (forward and reverse strand) | |
| pSL6070 | pCDF_Eco_ωRNA(tSL0496)_FLAG-TldR | TnpB pEffector plasmid for RFP repression assay, targeting | 1435 |
| | | ωRNA, 5′ UTR-targeting (forward and reverse strand) | |
| pSL6071 | pCDF_Ekol_ωRNA(tSL0496)_FLAG-TldR | TnpB pEffector plasmid for RFP repression assay, targeting | 1436 |
| | | ωRNA, 5′ UTR-targeting (forward and reverse strand) | |
| pSL6072 | pCDF_Ecl_ωRNA(tSL0496)_FLAG-TldR | TnpB pEffector plasmid for RFP repression assay, targeting | 1437 |
| | | ωRNA, 5′ UTR-targeting (forward and reverse strand) | |
| pSL6073 | pCDF_Lec_ωRNA(tSL0496)_FLAG-TldR | TnpB pEffector plasmid for RFP repression assay, targeting | 1438 |
| | | ωRNA, 5′ UTR-targeting (forward and reverse strand) | |
| pSL6074 | pCDF_Eko2_ωRNA(tSL0496)_FLAG-TldR | TnpB pEffector plasmid for RFP repression assay, targeting | 1439 |
| | | ωRNA, 5′ UTR-targeting (forward and reverse strand) | |
| pSL6075 | pCDF_Eho_ωRNA(tSL0496)_FLAG-TldR | TnpB pEffector plasmid for RFP repression assay, targeting | 1440 |
| | | ωRNA, 5′ UTR-targeting (forward and reverse strand) | |
| pSL6093 | pSC101_tSL0496_GTTAT- | pTarget plasmid for RFP repression assay, target in 5′ UTR | 1441 |
| | TAM_mRFP | (forward strand) | |
| pSL6092 | pSC101_GTTAT- | pTarget plasmid for RFP repression assay, target in 5′ UTR | 1442 |
| | TAM_tSL0496_mRFP | (reverse strand) | |
| pSL5908 | pSC101_tSL0496_TTTAA- | pTarget plasmid for RFP repression assay, target in 5′ UTR | 1443 |
| | TAM_mRFP | (forward strand) | |
| pSL5907 | pSC101_TTTAA- | pTarget plasmid for RFP repression assay, target in 5′ UTR | 1444 |
| | TAM_tSL0496_mRFP | (reverse strand) | |
| pSL6207 | pCDF_Spy_sgRNA(tSL0496)_FLAG- | nuclease-dead SpyCas9 mutant pEffector plasmid for RFP | 1445 |
| | dCas9(D10A, H840A) | repression assay, 5′ UTR-targeting sgRNA (forward and reverse | |
| | | strand) | |
| pSL6046 | pSC101_tSL0496_GGG- | pTarget plasmid for RFP repression assay, target in 5′ UTR | 1446 |
| | PAM_mRFP | (forward strand) | |
| pSL5930 | pSC101_GGG- | pTarget plasmid for RFP repression assay, target in 5′ UTR | 1447 |
| | PAM_tSL0496_mRFP | (reverse strand) | |
| pSL6206 | pCDF_As_crRNA(tSL0586)_dCas12a(D908A) | nuclease-dead AsCas12a mutant pEffector plasmid for RFP | 1448 |
| | | repression assay, 5′ UTR-targeting sgRNA (forward and reverse | |
| | | strand) | |
| pSL5928 | pSC101_tSL0496_TTTA- | pTarget plasmid for RFP repression assay, target in 5′ UTR | 1449 |
| | PAM_mRFP | (forward strand) | |
| pSL5927 | pSC101_TTTA- | pTarget plasmid for RFP repression assay, target in 5′ UTR | 1450 |
| | PAM_tSL0496_mRFP | (reverse strand) | |
| pSL2684 | pSIM6_pSC101_GamBetaExo | pSim temp-inducible lambda red, for recombineering in sSL3690 | 1451 |
| pSL6208 | pCDF_BIDMC93_dFliC_TldR + guide | TldR + guide under native promoter for rescue in sSL3864 | 1452 |
| pSL6724 | | pCDF_Ebr_gRNA-region(native)_conserved-region_FLAG- | 5928 |
| | | dCas12f_RpoE_HTH | |
| pSL6725 | | pCDF_Pum_gRNA-region(native)_conserved-region_FLAG- | 5929 |
| | | dCas12f_RpoE_HTH | |
| pSL6726 | | pCDF_Ata_gRNA-region(native)_conserved-region_FLAG- | 5930 |
| | | dCas12f_RpoE_HTH | |
| pSL6727 | | pCDF_Aru_gRNA-region(native)_conserved-region_FLAG- | 5931 |
| | | dCas12f_RpoE_HTH | |
| pSL6728 | | pCDF_Smi_gRNA-region(native)_conserved-region_FLAG- | 5932 |
| | | dCas12f_RpoE_HTH | |
| pSL6729 | | pCDF_Lpa_gRNA-region(native)_conserved-region_FLAG- | 5933 |
| | | dCas12f_RpoE_HTH | |
| pSL6730 | | pCDF_Sda_gRNA-region(native)_conserved-region_FLAG- | 5934 |
| | | dCas12f_RpoE_HTH1_HTH2 | |
| pSL6731 | | pCDF_Lby_gRNA-region(native)_conserved-region_FLAG- | 5935 |
| | | dCas12f_RpoE_HTH1_HTH2 | |
| pSL6732 | | pCDF_Mri_gRNA-region(native)_conserved-region_FLAG- | 5936 |
| | | dCas12f_RpoE_HTH | |
| pSL6733 | | pCDF_Pdi_gRNA-region(native)_conserved-region_FLAG- | 5937 |
| | | dCas12f_RpoE_HTH1_HTH2 | |
| pSL6734 | | pCDF_Psu_gRNA-region(native)_conserved-region_FLAG- | 5938 |
| | | dCas12f_RpoE_HTH | |
| pSL6735 | | pCDF_Cgl_gRNA-region(native)_conserved-region_FLAG- | 5939 |
| | | dCas12f_RpoE_HTH | |
| pSL6736 | | pCDF_Zpr_gRNA-region(native)_conserved-region_FLAG- | 5940 |
| | | dCas12f_RpoE_HTH | |
| pSL6737 | | pCDF_Cba_gRNA-region(native)_conserved-region_FLAG- | 5941 |
| | | dCas12f_RpoE_HTH | |
| pSL6738 | | pCDF_Pba_gRNA-region(native)_conserved-region_FLAG- | 5942 |
| | | dCas12f_RpoE_HTH | |
| pSL7082 | | pCDF_Ata_wRNA-region(native)_conserved- | 5943 |
| | | region_dCas12f_FLAG-RpoE_HTH | |
| pSL7083 | | pCDF_Aru_wRNA-region(native)_conserved- | 5944 |
| | | region_dCas12f_FLAG-RpoE_HTH | |
| pSL7085 | | pCDF_Lpa_wRNA-region(native)_conserved- | 5945 |
| | | region_dCas12f_FLAG-RpoE_HTH | |
| pSL7087 | | pCDF_Lby_wRNA-region(native)_conserved- | 5946 |
| | | region_dCas12f_FLAG-RpoE_HTH1_HTH2 | |
| pSL7088 | | pCDF_Mri_wRNA-region(native)_conserved- | 5947 |
| | | region_dCas12f_FLAG-RpoE_HTH | |
| pSL7089 | | pCDF_Pdi_wRNA-region(native)_conserved- | 5948 |
| | | region_dCas12f_FLAG-RpoE_HTH1_HTH2 | |
| pSL7092 | | pCDF_Zpr_wRNA-region(native)_conserved- | 5949 |
| | | region_dCas12f_FLAG-RpoE_HTH | |
| pSL7093 | | pCDF_Cba_wRNA-region(native)_conserved- | 5950 |
| | | region_dCas12f_FLAG-RpoE_HTH | |
| pSL7182 | | pCDF_Ata_wRNA-region(tSL0675)_conserved-region_FLAG- | 5951 |
| | | dCas12f_RpoE_HTH | |
| pSL7183 | | pCDF_Ata_wRNA-region(tSL0676)_conserved-region_FLAG- | 5952 |
| | | dCas12f_RpoE_HTH | |
| pSL7184 | | pCDF_Ata_wRNA-region(tSL0677)_conserved-region_FLAG- | 5953 |
| | | dCas12f_RpoE_HTH | |
| pSL7185 | | pCDF_Ata_wRNA-region(tSL0678)_conserved-region_FLAG- | 5954 |
| | | dCas12f_RpoE_HTH | |
| pSL7186 | | pCDF_Ata_wRNA-region(tSL0679)_conserved-region_FLAG- | 5955 |
| | | dCas12f_RpoE_HTH | |
| pSL7187 | | pCDF_Ata_wRNA-region(tSL0675)_conserved- | 5956 |
| | | region_dCas12f_FLAG-RpoE_HTH | |
| pSL7188 | | pCDF_Ata_wRNA-region(tSL0676)_conserved- | 5957 |
| | | region_dCas12f_FLAG-RpoE_HTH | |
| pSL7189 | | pCDF_Ata_wRNA-region(tSL0677)_conserved- | 5958 |
| | | region_dCas12f_FLAG-RpoE_HTH | |
| pSL7190 | | pCDF_Ata_wRNA-region(tSL0678)_conserved- | 5959 |
| | | region_dCas12f_FLAG-RpoE_HTH | |
| pSL7191 | | pCDF_Ata_wRNA-region(tSL0679)_conserved- | 5960 |
| | | region_dCas12f_FLAG-RpoE_HTH | |
| pSL7142 | | pCDF_Ata_ΔgRNA-region_conserved-region_FLAG- | 5961 |
| | | dCas12f_RpoE_HTH | |
| pSL7465 | | pCDF_Ata_gRNA-region(tSL0679)_Δconserved-region FLAG- | 5962 |
| | | dCas12f_RpoE_HTH | |
| pSL7466 | | pCDF_Ata_AJ23119_AgRNA-region_Δconserved- | 5963 |
| | | region_FLAG-dCas12f_RpoE_HTH | |
| pSL7467 | | pCDF_Ata_gRNA-region(tSL0679)_conserved- | 5964 |
| | | region_ΔdCas12f_FLAG-RpoE_HTH | |
| pSL7468 | | pCDF_Ata_gRNA-region(tSL0679)_conserved-region_FLAG- | 5965 |
| | | dCas12f_ΔRpoE_HTH | |
| pSL7469 | | pCDF_Ata_gRNA-region(tSL0679)_conserved-region_FLAG- | 5966 |
| | | dCas12f_RpoE_ΔHTH | |
| pSL7475 | | pCDF_Ata_gRNA-region(tSL0679)_conserved- | 5967 |
| | | region_dCas12f_RpoE_HTH-FLAG | |
| pSL7476 | | pCDF_Ata_gRNA-region(tSL0679)_conserved- | 5968 |
| | | region_ΔdCas12f_ΔRpoE_HTH-FLAG | |
| pSL7472 | | pCDF_Ata_20nt-guide(tSL0679)_Δconserved-region_FLAG- | 5969 |
| | | dCas12f_RpoE_HTH | |
| pSL7473 | | pCDF_Ata_14nt-guide(tSL0679)_Δconserved-region_FLAG- | 5970 |
| | | dCas12f_RpoE_HTH | |
| pSL7477 | | pCDF_Smi_gRNA-region(tSL0679)_conserved- | 5971 |
| | | region_dCas12f_RpoE_HTH | |
| pSL7478 | | pCDF_Lby_gRNA-region(tSL0690)_conserved- | 5972 |
| | | region_dCas12f_RpoE_HTH | |
| pSL7479 | | pCDF_Mri_gRNA-region(tSL0690)_conserved- | 5973 |
| | | region_dCas12f_RpoE_HTH | |
| pSL7480 | | pCDF_Zpr_gRNA-region(tSL0679)_conserved- | 5974 |
| | | region_dCas12f_RpoE_HTH | |
| pSL7474 | | pCDF_Ata_gRNA(tSL0689)_conserved-region_FLAG- | 5975 |
| | | dCas12f_RpoE_HTH | |
| pSL7456 | | pCOLADuet_Ata_T7_RpoA_RpoB_T7 | 5976 |
| pSL7457 | | pACYCDuet_Ata_T7_T7_RpoC_RpoZ | 5977 |
| pSL7770 | | pSC101_Ata-dCas12f_native_target_strong-RBS_mRFP | 5978 |
| pSL7771 | | pUC19_Ata-dCas12f_native_target_strong-RBS_mRFP | 5979 |
| pSL6740 | | pCDF_Fpl_wRNA-region_FLAG-dTnpB_CsrA | 5980 |
| pSL6741 | | pCDF_Osp_wRNA-region_FLAG-dTnpB_CsrA | 5981 |
| pSL6742 | | pCDF_Fba_wRNA-region_FLAG-dTnpB_CsrA | 5982 |
| pSL6743 | | pCDF_Fpl2_wRNA-region_FLAG-dTnpB_CsrA | 5983 |
| pSL6746 | | pCDF_Psp_wRNA-region_FLAG-dTnpB_CsrA | 5984 |
| pSL6747 | | pCDF_Fpl3_wRNA-region_FLAG-dTnpB_CsrA | 5985 |
| pSL6748 | | pCDF_Isp_wRNA-region_FLAG-dTnpB_CsrA | 5986 |
| pSL6749 | | pCDF_Las_wRNA-region_FLAG-dTnpB | 5987 |
| pSL7312 | | pCDF_Osp_AgRNA_FLAG-TldR_CsrA | 5988 |
| pSL7313 | | pCDF_Osp_AgRNA-downstream_FLAG-TldR_CsrA | 5989 |
| pSL7314 | | pCDF_Osp_AgRNA-upstream_FLAG-TldR_CsrA | 5990 |
| pSL7315 | | pCDF_Osp_gRNA-HDV-downstream_FLAG-TldR_CsrA | 5991 |
| pSL7316 | | pCDF_Osp_wRNA-upstream-and-HDV-downstream_FLAG- | 5992 |
| | | TldR_CsrA | |
| pSL7317 | | pCDF_Osp_wRNA-region_FLAG-TldR_ACsrA | 5993 |
| pSL7318 | | pCDF_Osp_wRNA-region_TldR_FLAG-CsrA | 5994 |
| pSL7319 | | pCDF_Osp_wRNA-region_ΔTIdR_FLAG-CsrA | 5995 |
| pSL7320 | | pCDF_Osp_wRNA-region_TldR_V5-CsrA | 5996 |
| pSL7321 | | pCDF_Osp_wRNA-region_TldR_CsrA-HA | 5997 |

TABLE 3
Genes

| Gene (IS Element) | Protein | NCBI Accession |
|---|---|---|
| tnpB (ISGst3) | GstTnpB2 | WP_047817673.1 |
| cas9 (Spy) | Cas9 | WP_136301537.1 |
| cas12 (As) | Cas12 | WP_021736722.1 |
| tldR (Kpi) | Kpi-TldR | WBG92703.1 |
| tldR (Eco) | Eco-TldR | WP_064735610.1 |
| tldR (Eko1) | Eko1-TldR | WP_193971683.1 |
| tldR (Ecl) | Ecl-TldR | WP_110870855.1 |
| tldR (Lec) | Lec-TldR | AXF62639.1 |
| tldR (Eko2) | Eko2-TldR | WP_023337454.1 |
| tldR (Eho) | Eho-TldR | WP_017692904.1 |
| tldR (Efa1) | Efa1-TldR | WP_002406890.1 |
| tldR (Ero) | Ero-TldR | WP_208930379.1 |
| tldR (Eca) | Eca-TldR | WP_121260685.1 |
| tldR (Emu) | Emu-TldR | WP_034688898.1 |
| tldR (Efa2) | Efa2-TldR | WP_002289328.1 |
| tldR (Tos) | Tos-TldR | WP_123935583.1 |
| tldR (Ece) | Ece-TldR | WP_016251060.1 |
| tldR (Esa) | Esa-TldR | WP_232061298.1 |
| tnpB (Eco2) | Eco2-TnpB | WP_098717298.1 |
| tnpB (Pmi) | Pmi-TnpB | WP_269608765.1 |
| tnpB (Sen) | Sen-TnpB | WP_024186316.1 |
| tnpB (Bub) | Bub-TnpB | WP_059759460.1 |
| tnpB (Ece) | Ece-TnpB | WP_113843517.1 |
| tnpB (Lac) | Lac-TnpB | WP_242450195.1 |
| tnpB (Ste) | Ste-TnpB | WP_028983493.1 |
| tnpB (Shy) | Shy-TnpB | WP_277281207.1 |

TABLE 4
TldRs Referred to herein

| Alias | SEQ ID NO | Organism |
|---|---|---|
| Kpi | 372 | Kalamiella piersonii |
| Eco | 285 | Escherichia coli |
| Eko1 | 62 | Enterobacter kobei |
| Ecl | 86 | Enterobacter cloacae complex sp. |
| Lec | 87 | Leclercia sp. W6 |
| Eko2 | 20 | Enterobacter kobei |
| Eho | 8 | Enterobacter hormaechei |
| Efa1 | 399 | Enterococcus faecalis |
| Ero | 457 | Enterococcus rotai |
| Eca | 442 | Enterococcus casseliflavus |
| Emu | 177 | Enterococcus mundtii |
| Efa2 | 392 | Enterococcus faecium |
| Tos | 443 | Tetragenococcus osmophilus |
| Ece | 121 | Enterococcus cecorum DSM 20682 = ATCC 43198 |
| Esa | 468 | Enterococcus saigonensis |

TABLE 5

| | Species 3- | Protein | | SEQ ID |
|---|---|---|---|---|
| Species name | letter code | name | Protein amino acid sequence | NO |
| Flavonifractor plautii | Fpl | TldR | MASREKQYNVLKLRLYPTSEQAELFEKTFGCCRYL | 497 |
| | | | WNQMLADQQRFYLETGVHFIPTPAKYKKGAPFLKE | |
| | | | VDNQALIQEHNQLSRAFRLFFQNPEAFGHPNFKRK | |
| | | | KDDRDSFTACNHVFTSGPTIYTTRDGIRMTKAGMIR | |
| | | | AVFPRRPQNGWKLKRVTVEKARTGRYYAYVLYESL | |
| | | | VQPPEPVLPVPERTLGLKYSLRHFYVDDQGNRADP | |
| | | | PRWLKQSQEKLVHLQRRLNRMQPGSKNYEEAVLK | |
| | | | YRLLHEHIANQRRDFLHKESRRIANAWDAVCVRGD | |
| | | | DLGAMTDTLIQAGSTVKEAGFGMFREMLCYKLAR | |
| | | | QGKAFIQVDRYLPTTRSCSACGLTRDALHARDYRR | |
| | | | SGWVCPECGAVHDREVNAAKNIKARGLEQFFDLQ | |
| | | | GQDRSA | |
| | | CsrA | MLQLSLRPGEYLTIHGDIVVQLAQLSGSRAFLRVEA | 5998 |
| | | | DRSIPIVRGKVLERSGAPRPECLASLPRSRARKGRD | |
| | | | AVYHWSAERERAVRTMEQLLERMEAGDSREEAQA | |
| | | | LRAQLEHLLPTVWEEELSGQIQALFRSKTAQDV | |
| Oscillibacter sp. 1-3 | Osp | TldR | MAAKRSKSETLRYTTLKVRLYPSAEQAALFEKTFG | 500 |
| | | | CCRYIWNQMLADQQRFYIETDKFFIPTPAKYKAGAP | |
| | | | FLKEVDNQALIQEHNKLGQAFRVFFKSPENFGYPKF | |
| | | | KRKKDDRDSFTVCNHVMGNSETVYTTRDGLRMTK | |
| | | | AGIVRAKFPRRPQGWWKLKRVTVDRTRSGKYYGY | |
| | | | ILYECPEKKPEVVVPTPETTVGLKYSMARFYVADTG | |
| | | | ETADPPHWLKQSQEKLARIQQRLNRMRPGSKNYQE | |
| | | | TVQKYRLLHEHIANQRRDFIHKESRRIANAWDAVC | |
| | | | VRGDDMEQISRITNRGNALEAGFGMFRECLRYKLA | |
| | | | RQGKELLVVDRYFPSTRTCSACGRVMPEEISMKRRT | |
| | | | WTCPQCGAVLKREANAARNIKDQGLAQYFSTRERR | |
| | | | ESA | |
| | | CsrA | MLCLNLTPGEYMTIGDSVVVQLDRISGDRCKLMID | 5999 |
| | | | APREIPVLRGEVLERTGGERPSCVVEGPRWHRREIP | |
| | | | WNRSKAQALAAMRMLLSEMDGRDSNVQALRRQL | |
| | | | DHMFPPEPGREKTELPARASNN | |
| Firmicutes bacterium | Fba | TldR | MARKSRAAEGQVIQYTTLKVRLYPTPAQAELFEKT | 473 |
| | | | FGCCRYIWNQMLSDQQMFYAETGAHFIPTPAKYKK | |
| | | | GAPFLTEVDNQALIQEHNKLSQAFRVFFKRPEAFGH | |
| | | | PNFKKKKTDRDSFTACNHVFESGPTIYTTRDGIRMT | |
| | | | KAGVVKARFSRRAQAWWRLKRITVEKTKTQKYYC | |
| | | | YILYEHSGKQPEPVIPTPETTVGLKYSMRHFYVADD | |
| | | | GTTADPPRWLKQSQEKLVRVQQKLARMEPGSRNYE | |
| | | | EAVQKYRLLHERIANQRRDFLHKESSRIANGWDAV | |
| | | | CMRDDALAEMSKGPLRKDAASSGFRMLRELLQYK | |
| | | | LERQGKRLILLDRYAPTTRVCSVCGQLQDSVDYGA | |
| | | | RTWTCPKCGTVHDREVNAAKNIKLEGLAQFLPTAS | |
| | | | PA | |
| | | CsrA | MLCLSLNQGEYMTIGENVVVQLDHVTGDRCRLVIH | 6000 |
| | | | APKEVPILRGEVLERNGGQRPECVYDGHRYHKKEL | |
| | | | IWNRSKAQALAAMRRLLEEMDGANSDVQALRRQL | |
| | | | NHMFPPADGGAGDSPQTTQFSNG | |
| Flavonifractor plautii | Fp12 | TldR | MKQEKQDGHAEGNRVIQYNTIKVRLCPTPEQEELF | 55 |
| | | | QKTFGCCRYIWNQMLSDHERFYEETDAHFIPTPAK | |
| | | | YKKGAPFLKEVDNQALTQEYNRLSQAFRNFFRDPK | |
| | | | TFGYPKFKRKKDDRDSFTACNQFFGSSATIYATRDA | |
| | | | VRMTKAGLVKAKFSRRPRSGWKLTRLTVERTKTGK | |
| | | | YYGYLLYTCPTYQPEPVEATAERTIGLKYSVSHFYV | |
| | | | ADNGNSADPPRWLRQSQEKLAVVQRKLSRSQPGSQ | |
| | | | NYQELVQKYRLLHEHIANQRRDFLHKESRRIANAW | |
| | | | DAVCIREDSLRAISGKLGGSAVHDTGFGMFRELLRY | |
| | | | KLERQGKQLLEVDRLVPTTKVCSACGAVNETLSIRA | |
| | | | RRWVCPVCGAEHRRGMNAAINIKASGLVKGQSQQ | |
| | | | AAAALPLL | |
| | | CsrA | MLQLSLRPGEYLTIHGDIVVQLAQLSGSRAFLRVEA | 6001 |
| | | | DRSIPIVRGKVLERSGAPRPECLASLPRSRARKGRD | |
| | | | AVYHWNGARKRAIRAMEQILDQMESDGPREEVQA | |
| | | | LRVQLEQLLPTQQEEELSGQIQALFRDQAARNT | |
| Pseudoflavonifractor | Psp | TldR | MKMNDNRRPSAPKRTTQYNTIKIRLYPNQEQEELFQ | 487 |
| sp. | | | RTFGCCRYIWNRMLADHERFYYETDAHFIPTPAKY | |
| | | | KTEAPFLKEVDHQALTQEYNKLSQAFRNFFRNPASF | |
| | | | GYPKFKRKKDDRDSFSACNQVMGNSATIYITQDAV | |
| | | | RMTKAGLVRAKFPRRPRSGWKLTRITVERTKTGKY | |
| | | | YGYLLFACPVHAPEPVKPTADTTIGLKYSLTHFYVR | |
| | | | DDGITADPPRWLRQSQDKVSSIQEKLNRMQPGSRN | |
| | | | YREMVQKYRLLHEHIANQRRDFLHKESRRIANDW | |
| | | | DAVCIRDDSLKAISEELGGSDIHDTGFGMFREMLRY | |
| | | | KLDRQGKQLLEVGRFDPTTKVCSVCGAINETLSPK | |
| | | | ARHWVCPVCGAEHKRGKNAAVNIKAHGLACYQN | |
| | | | KQVAEAVS | |
| | | CsrA | MLSLSLLPDEYLSINNGQIIVHLIRVAGGRAHLRIEA | 6002 |
| | | | DRSVPIVRGALLEREGAARPECLTPPPRRNPGHRRD | |
| | | | HLYLWNDDRERAVRAIQQSIDRLEQTGETAEADILR | |
| | | | TQLNRLIPTFWEEEKLPRRLREQTADSV | |
| Flavonifractor plautii | Fp13 | TldR | MGHRETVGQAIQYNTIKVRLYPSVNQKELFQKTFG | 496 |
| | | | CCRYIWNQMLSDHERFYLETDVHFIPTPAKYKKSAP | |
| | | | FLSKVDNQALIQEHNKLSQAFRNFFRNPGAFGYPRF | |
| | | | KRKKDDRDTFTACNQFFGRSATIYITQNAVRMTKV | |
| | | | GLVRAVFPRRPRSGWRLTRITVERTRTDKYYGYLLY | |
| | | | ACPVRPPQPVTPTEETTVGLNYSVSRFYVADDGTAA | |
| | | | DPPRWLRQSQDQLCQIQRQLCRMQKGSKNYQEMV | |
| | | | QKYRLLHEHIANQRRDFLHKESRRIANEWDAVCVR | |
| | | | SDSLTALAAKTGGGCILDTGFGMFREMLRYKLERQ | |
| | | | GKSLLLVDRFRPTTKVCSVCGYVNEDLPAEALRWR | |
| | | | CPVCGTEHRRERNAAANVKAIGLGRYRTETAAGGI | |
| | | | G | |
| | | CsrA | MLSLQLKSGEYVTIGEEIAVQVFKQSGDSFHVAVKA | 6003 |
| | | | PREVPILRGKVLERTERRPDGLYRRPPQSPSEQRHN | |
| | | | AKRLEAWTLKKAMREQIRAAAMEDLLEVAQYIEDL | |
| | | | AVDRSCCVERQRLSVLGVRITKAVSVLNSTGGGM | |
| Intestinibacillus sp. | Isp | TldR | MAQTKTWNTTIKVRLDPTPAQAAFFDENFNCCRYL | 39 |
| | | | WNQMLSDQIRFYTETDAHFIPTPAKYKKDAPFLKE | |
| | | | ADSNALVSVHQNLHKAFQRFFSNPSRYRHPTFKSK | |
| | | | KRCKNSYTTYCQYYRSGKGTSIYLTKDGIRLPKAGL | |
| | | | VKARLHRRPLHWWTLKTATISKTSSGKYYCSLVFA | |
| | | | YTTKPSRQIPPTPETTLGLNYSLSHFYIDSNGHAADP | |
| | | | PHWLARSQDKLRYMQQQLARMQPGSRNYEQQLY | |
| | | | KIQRLHEHISNQRKDFLHKESRRIANAWDAVCVKD | |
| | | | TNLVKMSQAIKLGHVMDAGYGRFRSYLQYKLERL | |
| | | | GKPYIVVEKYFPSTKTCHHCGSVNEALPAGAKRWT | |
| | | | CPICGTTLDRAKNAAQNLRDQGLVQYSASQRQRAS | |
| | | | A | |
| | | CsrA | MLSLQIKSGEYITIGENVVIQVFQRSGSQFRLAIQAP | 6004 |
| | | | RELSIVRGEVRERQGNARPESVCDPSNGPMVRQQA | |
| | | | RRMQRLEARQKAAAIRADAVQQLRTLLHQSDAGA | |
| | | | AIELAVALQLERLEQSEILATEGGATRDGTNKNLEH | |
| | | | DHQSAP | |

TABLE 6

| | | | | TAM |
|---|---|---|---|---|
| | gRNA sequence: | | | flanking |
| | scaffold + native | | | putative |
| | guide (RIP-seq footprint | 20 nt native | | native |
| gRNA | or inferred from MSA) | guide sequence | Original gRNA region | target |
| Fpl_ | ATATGCCGGCCGGGACACCGGTG | AATATTATGA | GTGCGGCGCGGTTCATGACCG | AGCAC |
| TldR | AACGCCCATGATTCCGGCTGGAG | CGATGTTTTT | TGAGGTCAACGCGGCAAAAAA | |
| native | AGCGTGGATGGAACGCCGGTGGG | (SEQ ID NO: | CATCAAAGCCCGTGGGCTGGA | |
| | GAGCCTCCGCCCTTCCATCCACAT | 6012) | ACAGTTTTTTGATTTACAGGGG | |
| | TCTCCGGACCGCCGAGTGGGAAA | | CAGGACAGGAGCGCCTGACCC | |
| | CGAGAGGCCGCATCCGTGCGGCT | | TTTCCAGGCGTCCTGTGCTCCG | |
| | GAAGCCTGTAAGCAGGCGTCCAC | | CCTTGACAATATGCCGGCCGGG | |
| | AATATTATGACGATGTTTTT (SEQ | | ACACCGGTGAACGCCCATGAT | |
| | ID NO: 6005) | | TCCGGCTGGAGAGCGTGGATG | |
| | | | GAACGCCGGTGGGGAGCCTCC | |
| | | | GCCCTTCCATCCACATTCTCCG | |
| | | | GACCGCCGAGTGGGAAACGAG | |
| | | | AGGCCGCATCCGTGCGGCTGA | |
| | | | AGCCTGTAAGCAGGCGTCCAC | |
| | | | AATATTATGACGATGTTTTTGCA | |
| | | | CGCGGCGCATGGATGCGCGCC | |
| | | | GCTGGCCACAGGAAGGAGATC | |
| | | | CCCC (SEQ ID NO: 6019) | |
| Osp_ | CTATACCGGTCGGAACGCCGGAG | AACATTATG | ATGCGGCGCGGTCCTGAAACG | AACAC |
| TldR | AAGGCCCATGCTTGCGGGAAACG | ACGATGAAA | GGAGGCAAATGCCGCCAGGAA | |
| native | TTGAGCGAAGCACAATTGAAAAA | GA (SEQ ID | CATCAAGGACCAGGGGCTGGC | |
| | GTTGCGTTTCGTTCAGCGTTTCCA | NO: 6013) | CCAATATTTCAGTACGCGGGAG | |
| | TAACCAGGATGTTGGGAAACGAG | | CGGCGCGAAAGCGCGTGAAGC | |
| | AAGATGTGTTCGCACATCCAAAG | | TCTTTGTATTGTCTCAGCTATAC | |
| | CCCTGCGGGGCGTTCCAAACATTA | | CGGTCGGAACGCCGGAGAAGG | |
| | TGACGATGAAAGA (SEQ ID NO: | | CCCATGCTTGCGGGAAACGTT | |
| | 6006) | | GAGCGAAGCACAATTGAAAAA | |
| | | | GTTGCGTTTCGTTCAGCGTTTC | |
| | | | CATAACCAGGATGTTGGGAAA | |
| | | | CGAGAAGATGTGTTCGCACAT | |
| | | | CCAAAGCCCTGCGGGGCGTTC | |
| | | | CAAACATTATGACGATGAAAG | |
| | | | ATCGTCGATGCCGTGAAGCGC | |
| | | | GGCTTGAAGGGCGGACGGAAG | |
| | | | GATGATCGTGCCGCCAGACAA | |
| | | | AAAAGGAGGAATCCTC (SEQ | |
| | | | ID NO: 6020) | |
| Fba | CGATGCCGGTCGGGACGCCGGGG | AATATTATGA | CTGCCCAAAGTGCGGGACGGT | AGCAC |
| TldR | AATGCCCGCGATTCGGCTGGAGG | CGATGAAAA | CCACGACCGGGAGGTCAACGC | |
| native | GCGTTGAGCGAAGCTCAAAAGAA | A (SEQ ID NO: | AGCAAAAAACATCAAGCTGGA | |
| | TTTGTGTTTCGCTCAGCGTTTTCC | 6014) | AGGTTTGGCGCAGTTTTTACCA | |
| | AGGCCGGAGGGTGGGAAACGAG | | ACCGCGAGCCCAGCGTAAGCG | |
| | AGGGCGCGTGCGCGCGCCTGAAA | | GGTCGCGGTTGGAGAGGAGGA | |
| | GCCTGTGACAGGGCTGTCCAAAA | | GCAAGGGAGTGAAGTGAGGA | |
| | TATTATGACGATGAAAAA (SEQ ID | | ATGCCCGGCAGGGTGTTCCGA | |
| | NO: 6007) | | ACGAAATGGACTTTGCTCCGA | |
| | | | CGATGCCGGTCGGGACGCCGG | |
| | | | GGAATGCCCGCGATTCGGCTG | |
| | | | GAGGGCGTTGAGCGAAGCTCA | |
| | | | AAAGAATTTGTGTTTCGCTCAG | |
| | | | CGTTTTCCAGGCCGGAGGGTG | |
| | | | GGAAACGAGAGGGCGCGTGC | |
| | | | GCGCGCCTGAAAGCCTGTGAC | |
| | | | AGGGCTGTCCAAAATATTATGA | |
| | | | CGATGAAAAATGGCGGAAGGA | |
| | | | TGGAGTGCCGGACCGCCTTGT | |
| | | | GAAAAAGGAGTTGAAAAA | |
| | | | (SEQ ID NO: 6021) | |
| Fp12 | ATCTGCCGGCTGGAACACCGGTG | AATATTATGA | AGCGGAGCACCGGCGGGGGAT | AGCAC |
| TldR | AAGGCCCATGCTCCCGGTCTGGG | CGATGTTTAC | GAACGCTGCCATCAACATCAA | |
| native | AGCGTTGAGCGAAGCGGCATACA | (SEQ ID NO: | GGCCAGCGGACTGGTAAAAGG | |
| | GGAAGATGCCGTTTCCCTCAGCGT | 6015) | CCAGAGCCAGCAGGCTGCGGC | |
| | TCTCCGGGCGGGGGACGTTGGGA | | GGCCCTTCCACTCCTCTGATAC | |
| | AACGAGAGGGCGCCTCTCCCAAC | | AACAACATCTGCCGGCTGGAA | |
| | CGGGAGCCGCGCCGGAAGCCCGG | | CACCGGTGAAGGCCCATGCTC | |
| | TCAGACGGGCGTTCCCAATATTAT | | CCGGTCTGGGAGCGTTGAGCG | |
| | GACGATGTTTAC (SEQ ID NO: | | AAGCGGCATACAGGAAGATGC | |
| | 6008) | | CGTTTCCCTCAGCGTTCTCCGG | |
| | | | GCGGGGGACGTTGGGAAACGA | |
| | | | GAGGGCGCCTCTCCCAACCGG | |
| | | | GAGCCGCGCCGGAAGCCCGGT | |
| | | | CAGACGGGCGTTCCCAATATTA | |
| | | | TGACGATGTTTACACACAAGG | |
| | | | AGATCCCC (SEQ ID NO: 6022) | |
| Psp | TGTTGCCGGCCGGAACACCGGAG | AACATTATG | GTGCGGCGCGGAGCACAAACG | Unknown |
| TldR | AAGGCCCATGCTTCCCGTTGGGG | ACGATGATC | AGGGAAAAACGCCGCCGTCAA | |
| native | AGCGTTGAGCGAAGCGGCGGACA | AT (SEQ ID | TATCAAAGCCCATGGGCTGGC | |
| | GTACGCTGCCGTTTCCCTCAGCGT | NO: 6016) | GTGTTACCAGAATAAACAGGTT | |
| | TCTCCAATCCGCGGGAGATCGTTG | | GCGGAGGCAGTTTCATAACCTT | |
| | GGAAACGAGAAGATGCCTCCCCT | | CCTGCAAAAAGTGATGTTGCC | |
| | CTGGGGCCGCATCCGAAGCCCGG | | GGCCGGAACACCGGAGAAGG | |
| | CAGGGCGTTCCAAACATTATGACG | | CCCATGCTTCCCGTTGGGGAGC | |
| | ATGATCAT (SEQ ID NO: 6009) | | GTTGAGCGAAGCGGCGGACAG | |
| | | | TACGCTGCCGTTTCCCTCAGCG | |
| | | | TTCTCCAATCCGCGGGAGATCG | |
| | | | TTGGGAAACGAGAAGATGCCT | |
| | | | CCCCTCTGGGGCCGCATCCGA | |
| | | | AGCCCGGCAGGGCGTTCCAAA | |
| | | | CATTATGACGATGATCATCCAA | |
| | | | GATGATCGTACCAGCGCAAAG | |
| | | | GAGTGCGCTGTCTCATCAGAC | |
| | | | ACAGGAGGTCTTTTTGT (SEQ | |
| | | | ID NO: 6023) | |
| Fp13 | TATGGCCGGTCGGGACGCCGGTG | AATATTATGA | CTGCGGGACGGAGCACAGGCG | AGCAC |
| TldR | AACGCCCGCATACCCTCCAATAGG | CGATGATAA | CGAACGCAACGCAGCGGCGAA | |
| native | CGGGGCCGCGGGAAACGAGAGG | C (SEQ ID NO: | TGTCAAAGCCATCGGCCTGGG | |
| | CCGCCTCCCCCTTACCGGGGCCGC | 6017) | CCGGTACCGCACGGAGACGGC | |
| | GGCGGAAGCCCGGACAGCCGGGC | | AGCCGGCGGAATTGGGTAGCA | |
| | GTCCAAAATATTATGACGATGATA | | CGAAGTGCCCCGCAGGTAGCG | |
| | AC (SEQ ID NO: 6010) | | GGGGTACTCCATATGGCCGGTC | |
| | | | GGGACGCCGGTGAACGCCCGC | |
| | | | ATACCCTCCAATAGGCGGGGCC | |
| | | | GCGGGAAACGAGAGGCCGCCT | |
| | | | CCCCCTTACCGGGGCCGCGGC | |
| | | | GGAAGCCCGGACAGCCGGGCG | |
| | | | TCCAAAATATTATGACGATGAT | |
| | | | AACCCTTAATCTGGTTTCATCC | |
| | | | GGCCTAGCGCAGCCGGTTGAA | |
| | | | ATATAGGAAGCGTGCGGAGAG | |
| | | | AGCAGGTGCCAAAGGCCACGG | |
| | | | AGCCTGCCGAACCGCACTAAA | |
| | | | CAACCAACCGCACAAGAAGGA | |
| | | | TACTGTGCGGCGACCAGCAAA | |
| | | | GTCCCTTATCATTTCATATTGAA | |
| | | | AGGAAGCAATTTGA (SEQ ID | |
| | | | NO: 6024) | |
| Isp | TAGGACCGGTTGGGACACCGGTG | GAGAATCCA | CTGTGGTACAACGCTTGACCG | ATCAT |
| TldR | TCTGCCCATGACACAAGGATGCG | ACATTATATT | TGCCAAAAATGCGGCGCAAAA | |
| native | GAAGCGTTGATTGGGTCGAAAGA | T (SEQ ID NO: | CCTGCGCGATCAGGGCCTTGTA | |
| | ACGGGTTTCTTTCGACGCGATCAG | 6018) | CAATATTCCGCTTCCCAGAGGC | |
| | CGTTTCCGTTCGGATGTGAAGTGG | | AGCGCGCTTCGGCCTGACTCT | |
| | GAACAAAAGACGGCAACCTCCGC | | GTCATAGGACCGGTTGGGACA | |
| | CATCCCCAGGAGCGCGCCCGAAG | | CCGGTGTCTGCCCATGACACA | |
| | CCCGGCATGCCGGGCAGTCCCCG | | AGGATGCGGAAGCGTTGATTG | |
| | AGAATCCAACATTATATTT (SEQ ID | | GGTCGAAAGAACGGGTTTCTT | |
| | NO: 6011) | | TCGACGCGATCAGCGTTTCCGT | |
| | | | TCGGATGTGAAGTGGGAACAA | |
| | | | AAGACGGCAACCTCCGCCATC | |
| | | | CCCAGGAGCGCGCCCGAAGCC | |
| | | | CGGCATGCCGGGCAGTCCCCG | |
| | | | AGAATCCAACATTATATTTGTTT | |
| | | | TCATCCGGCCGACGGGTCGGT | |
| | | | TGAAATAGAGTTCATGCGTCCC | |
| | | | ATGATTTTGGGCAGTTCGGCCG | |
| | | | AATGTCCGAAGTTCCATGACGC | |
| | | | TTCCACGACCTGTGCTGGGGT | |
| | | | AAATTGGATGGCCCCGTCACA | |
| | | | CTAATCAGATTTAGGAGGAACC | |
| | | | TAATT (SEQ ID NO: 6025) | |

TABLE 7

| | Species | | | |
|---|---|---|---|---|
| | 3-letter | Protein | | SEQ ID |
| Species name | code | name | Protein amino acid sequence | NO |
| Empedobacter | Ebr | dCas12f | MMEKSTLILTRKIQLIVDLPTQEERQEVLEILYKWRNRCYR | 6026 |
| brevis | | | AANLIVSHLYIQAMVKEFLYLSEGVIHKLVDEKKDEAGILQ | |
| | | | RSRINTTYRVISDRFKGEIPMNILSCLNSRLQSTFNKDYQEY | |
| | | | WRGEASLKNFKRDMAFPFGLEGISKLSYHPEKKSFCFRLF | |
| | | | QLPFKTYLGRDFTGNKKLLEQVINDEVKLCTSQIKIEKGKI | |
| | | | FWLAVVEIEKENHQLQPEKIAEASLSLEYPLVVKVGKSRLS | |
| | | | IGTKEEFLYRRLAIQASRKRMQAGVSYAKSGKGRTRKLKA | |
| | | | LEKMSELERNYVHNRLHVYSRRLIDFCINNKAGTLILLDQ | |
| | | | EEKMELAKEEEFVLRNWSYYELMTKIKYKADKAGIELIIA | |
| | | RpoE | MLEKEFELLKKGNSTALERIYVRYNKRIFWFGKQLIKDEF | 6043 |
| | | | VVECLLQDVFLKLWEYREKIESPDHIFFFLRFVMKYSCYS | |
| | | | HYAKPKNKFFRNVNSIENYENYQSYLAGYDPADVIENLNE | |
| | | | QERQQHYFNEIIKVLPLLSTERKHLIELCLKYGFQYKAIAH | |
| | | | VMGRGITETSNEIKSAIEDLKKILSHQDKLIIKTKTISTEEKQ | |
| | | | EKMTKTQSLILKLRCEHKQSFANIAEELQLSQKEVHNEFIA | |
| | | | AYKFTQQNKVQSLNY | |
| | | HTH | MEKNNYKSNLNKKLCEYITIRFLSNFDNISNNNSQNKYAK | 6060 |
| | | | AVGVTSSTISKISKGDGYNIPLSTIALILKYEKISLEDFFKDF | |
| | | | NKYVNE | |
| Paenimyroides | Pum | dCas12f | MSKTTIKLTRKIELNIDLPTKEQRKEVWEKLYRWQNIYCR | 6027 |
| ummariense | | | AANLTMSHLYVQAMIKDFLYLTEGIKYKLADEKKDPNGM | |
| | | | LQCSHSSSIYRMLSQRFKGEVPTKILNHANYELMNKFKKN | |
| | | | YMDYVNGKRSLDNFKSNTVFPFGIEGFKRFKYNEEIKAFS | |
| | | | FRLYSVPFKTFLGRGFTEKYKLLQQLLSGEVKLCRSRIKLE | |
| | | | KGKIYWLAVFEIPIEVHCLKPDVVAEASLSLEYPISVKVGR | |
| | | | KRLDIGNKEEFLHRRLAIQAAYTRTRESVKYCRGGHGKKR | |
| | | | KLKALDRFKNLEANYVSNRLHEYSRRLIDFCIKHQAGTLV | |
| | | | LLDMQENTDIAKEEQFVLRNWSYYELINKIKYKAEKAGIE | |
| | | | LITT | |
| | | RpoE | MVQDTFLKLWDCREKIQDPMHILFFLQYVIKKSCLSHYNK | 6044 |
| | | | PRNKFFRKVGSLESYENFQNYLAGYDPADVVENLKDQES | |
| | | | QQKMFDLVTSVLPLIKPERKHLINLCLKYGFRYKHIAQVM | |
| | | | GKSTKQTVDEVNRAIEDIKKIVAVRNRNEKKFKPELEQKA | |
| | | | VSERQSQVLKLRCEKKFSFAAIAEQLNLSQKQVHEEFMAA | |
| | | | YKFAQQHKLQSL | |
| | | HTH | MDITKDLQILIGKQLHDIRIKNKQTQNDIAFLTGIDTADVSK | 6061 |
| | | | HEKGKKNLTLKTLMKFATALNIHPKELFNFDFDINRYKTE | |
| | | | Y | |
| Allomuricauda | Ata | dCas12f | MGKSTLKHTRKIQILIDLPTKDEKKEVMDMMYQWRDRCF | 6028 |
| taeanensis* | | | RAANIIVTHLYVQEMIKDFFYLSEGIKYKLADEKKDEKGIL | |
| strain JCM 17757 | | | QRSRMNTTYRVVSDRFKGEMPTNILSTLNHGLISSFNKNR | |
| | | | VQYWKGERSLPNFKKDMAFPFGLQGISRLVYDEEKKAFC | |
| | | | FRLYRVPFKTYLGKDFTDKRMLLERLVKGDVKLCASNIQL | |
| | | | NGGKIFWLAVFEIEKEKHSLKPEVIAEASLSLEYPIVVKTG | |
| | | | KNRLTIGTKEEFLYRRLAIQAARRRTQVGATYSRSGKGKK | |
| | | | RKLKAVDKYHKTESNYVAHRIHVYSRKLIDFCIKHQAGTL | |
| | | | ILMNQEDKVGIAKEEEFVLRNWSYYELMTKIKYKAEKAG | |
| | | | IELIIG | |
| | | RpoE | MLYSDFELLKIGDTSALDHIHAKYFRSILWIGRQWLNDDF | 6045 |
| | | | LIESLVQDTFLKLWVNRDKLESPEHIFYFLRFVMKRECISY | |
| | | | YRKPKYKFHKKVNSLEDYDNYQDYMVGYDPVNDSENLD | |
| | | | EQESTQKSFDHIKSILPLLNADKRHLIELCLKYGFQYKAIS | |
| | | | KVMGKGIHETSREIKEAIEDIKTIVHKGNELGSNDTMTNEI | |
| | | | KFSGELSEEQAKVLKMRCDLKYSFSEIAKELELSEKEVHQ | |
| | | | EFMKAYKLMKANHQLQLQSA | |
| | | HTH | MLMADKNTNKSKVYFSDKYVCKFISEEWLTSKDTSARKY | 6062 |
| | | | GKIYGVNYHVIEKIQQENGYNIPLSTLSTICFNHGIKLSDFF | |
| | | | KLVEKKYGEFLNDSYEYK | |
| | | RpoA | MALLNFQKPDKVIMIDSTDFEGKFEFRPLEPGYGLTVGNA | 6080 |
| | | (RNAP) | LRRVLLSSLEGFAITSVRIDGVEHEFSVVPGVVEDVTEIILN | |
| | | | LKQVRFKRQIDDVESETVSISVSGKEQLTAGDFQKFISGYQ | |
| | | | VLNPDLVICNMGPKVSINMEIVIEKGRGYVPAEENKKSNA | |
| | | | PLGSIAVDSVYTPVKNVKYSIENYRVEQKTDYEKLVFEIIT | |
| | | | DGSIHPKDALTEAAKVLIHHFMLFSDERITLEADEIAQTET | |
| | | | YDEESLHMRQLLKTKLVDMDLSVRALNCLKAAEVDTLG | |
| | | | DLVSFNKNDLMKFRNFGKKSLTELEELVINKGLQFGMDLS | |
| | | | KYKLDKD | |
| | | RpoB | MFTNTIERVNFASAKNIPEYPDFLDIQIKSFQDFFQLETKSD | 6081 |
| | | (RNAP) | ERGNEGLYNTFMENFPITDTRNQFVLEFLDYFIDPPRYSIQE | |
| | | | CIERGLTYSVPLKARLKLYCTDPEHEDFETIVQDVYLGTIP | |
| | | | YMTPSGTFVINGAERVVVSQLHRSPGVFFGQSFHANGTKL | |
| | | | YSARVIPFKGSWIEFATDINGVMYAYIDRKKKLPVTTLFRAI | |
| | | | GFERDKDILEIFDLSEEVKVSKAGLKKVLGRKLAARVLNT | |
| | | | WHEDFVDEDTGEVVSIERNEIILDRDTILEKEHIDEIIDADV | |
| | | | KTILLHKENNAQSDYAIIHNTLQKDPTNSEKEAVEHIYRQL | |
| | | | RNAEPPDEETARGIIEKLFFSDQRYSLGEVGRYRMNKKLG | |
| | | | LDIGMDKEVLTKEDIITIIKYLIELINSKAEIDDIDHLSNRRV | |
| | | | RTVGEQLSQQFGVGLARMARTIRERMNVRDNEVFTPIDLI | |
| | | | NAKTLSSVINSFFGTNQLSQFMDQTNPLAEITHKRRLSALG | |
| | | | PGGLSRERAGFEVRDVHYTHYGRLCPIETPEGPNIGLISSLS | |
| | | | VFAKVNSMGFLETPYRKVVDGKVDVKEHIYLSAEEEEGM | |
| | | | KIAQANIPLKDDGTIDREKVIARDEGDFPVVDPVEINYTDV | |
| | | | APNQIASISASLIPFLEHDDANRALMGSNMMRQAVPLLRP | |
| | | | ESPIVGTGLERQVATDSRVLINAEGDGVVEYVDAQKITIKY | |
| | | | DRTEEERLVSFEEDSKTYELVKFRKTNQGTSINLKPIVRKG | |
| | | | DKVKKGQVLCEGYATEKGELALGRNMKVAFMPWKGYNF | |
| | | | EDAIVISEKVVREDIFTSVHIDEYALEVRDTKLGAEELTNDI | |
| | | | PNVSEEATRDLDEYGMIRIGAEVKPGDILIGKITPKGESDPT | |
| | | | PEEKLLRAIFGDKAGDVKDASLKASPSLRGVVIDKKLFSR | |
| | | | SIKDKRKRSEDKEAISRLEMDYEVKFQQLKDVLIEKLFGL | |
| | | | VNGKTSQGVINDLGEEVLPKGKKYTIKMLNAVDDFAHLV | |
| | | | GGSWTTDEDTNALVADLLHNYKIKLNDIQGNLRRDKFTIS | |
| | | | VGDELPAGIMKLAKVYIAKKRKLKVGDKMAGRHGNKGI | |
| | | | VARIVRQEDMPFLEDGTPVDIVLNPLGVPSRMNIGQIYETV | |
| | | | LGWAGLKLGQKYGTPIFDGATLDDINELTDKAGVPRFGHT | |
| | | | YLYDGGTGQRFDQAATVGVIYMLKLGHMVDDKMHARSI | |
| | | | GPYSLITQQPLGGKAQFGGQRFGEMEVWALEAYGASATL | |
| | | | REILTVKSDD VIGRAKTYESIVKGETMPEPGLPESFNVLMH | |
| | | | ELKGLGLDIRLEE | |
| | | RpoC | MARIKDNNAPKRFNKISIGLASPESILAESRGEVLKPETINY | 6082 |
| | | (RNAP) | RTHKPERDGLFCERIFGPVKDYECACGKYKRIRYRGIVCD | |
| | | | RCGVEVTEKKVRRDRVGHINLVVPVAHIWYFRSLPNKIGY | |
| | | | LLGLPSKKLDMIIYYERYVVIQPGIAKGPEGEEIHKLDFLTE | |
| | | | EEYLNILESLPSENQYLEENDPNKFIAKMGAECLIDLLARI | |
| | | | DLEQLSYELRHKANTETSKQRKTEALKRLQVVEALRESQ | |
| | | | DNRENNPEWMIMKVIPVIPPELRPLVPLDGGRFATSDLNDL | |
| | | | YRRVIIRNNRLKRLMEIKAPEVILRNEKRMLQEAVDSLFDN | |
| | | | TRKASAVKTESNRPLKSLSDSLKGKQGRFRQNLLGKRVD | |
| | | | YSARSVIVVGPEMKLYECGLPKDMAAELYKPFIIRKLIERG | |
| | | | IVKTVKSAKKIIDKKEPVVWDILENVLKGHPVLLNRAPTL | |
| | | | HRLGIQAFQPKLIEGKAIRLHPLACTAFNADFDGDQMAVH | |
| | | | LPLGPEAILEAQLLMLASQNILNPANGSPITVPSQDMVLGL | |
| | | | YYMTKEKRSTPEEPVIGEGLTFYSSEEVEIAFNERKVALNA | |
| | | | IIKVRTKDFNEAGELVNKIIETTVGRVLFNTVVPEQAGYINT | |
| | | | VLNKKSLRNIIGDILAVTDVPTTADFLDKIKTMGYEFAFKG | |
| | | | GLSFSLGDIIIPKEKHEMIAEANEQVDGIMMNYNMGLITFN | |
| | | | ERYNQVIDVWTSTNAMLTELAMKRIREDKQGFNSVYMM | |
| | | | LDSGARGSKEQIRQLTGMRGLMAKPKKSTAGGGEIIENPIL | |
| | | | SNFKEGLSILEYFISTHGARKGLADTALKTADAGYLTRRLV | |
| | | | DVSQDVIINTEDCGTLRGIEVEALKKNEEVVETLGERILGR | |
| | | | VSLHDVYNPLTEELILKAGQEISEADVKKVEAAPIEKVEVR | |
| | | | SPLTCEAAQGICAKCYGRNLATNKMVQRGEAVGVVAAQS | |
| | | | IGEPGTQLTLRTFHVGGIAGNISEDSKLEAKFDGIAEIEDLR | |
| | | | VVEGVDNGGGKSDIVISRTSEIKIVDAKTGITLSTNNIPYGS | |
| | | | QLFVKNGEKITKGTVICQWDPYNGVIVSEFTGQIAYENIEQ | |
| | | | GMTYQVEIDEQTGFQEKVISESRNKRLIPTLLIKDGKGETI | |
| | | | RSYNLPVGSHLMVDNGEKIKEGKILVKIPRKSAKAGDITG | |
| | | | GLPRVTELFEARNPSNPAVVTEIDGVVSFGKIKRGNREIIIES | |
| | | | KAGEVKKYLVKLSNQILVQENDYVRAGMALSDGSITPEDI | |
| | | | LAIKGPSAVQQYLVNEVQEVYRLQGVKINDKHFEVVVRQ | |
| | | | MMRKVQIQDSGDTTFLENQLVHKDDFINENDEIFGKKVV | |
| | | | EDAGDSERLKPGQIVTARQLRDENSILRREDKTLVTARDA | |
| | | | VAATATPILQGITRASLQTKSFISAASFQETTKVLNEAAVNG | |
| | | | KVDTLEGLKENVIVGHKIPAGTGMRDYDSIIVGSKEEYDEI | |
| | | | MARKEEFKF | |
| | | RpoZ | MQDLKNTKAPVSTATLNRNEFDSKTGNIYEAISIASKRAVQ | 6083 |
| | | (RNAP) | INSDIKKELLEKLEEFATYSDSLEEVFENKEQIEVSKFYEKL | |
| | | | PKPHALAVQEWLEDKIYYRNTEKDA | |
| Allomuricauda | Ata2 | dCas12f1 | MGKSTLKHTRKIQLLIDLPTKDEKKEVMDIMYQWRDRCF | 6029 |
| taeanensis* | | | RAANLIVTHLYVQEMIKEFSYLSEGIKYKLADEKKDEKGIL | |
| strain MCCC | | | NRSRINTTYRLVSDRFKGEVPTNILSTLNHGLISSFNKNRIQ | |
| 1K06752 and | | | YWKGERSLPNFKKDMAFPFGLQGISRIVYDEEKKAFCFRL | |
| Allomuricauda | | | YRVPFKTYLGKDFTDKRMLLERLVKGDVKLCASNIKLNG | |
| taeanensis* | | | GKIFWLAVFEIEKEKHSLKPEVIAEASLSLEYPIVVKTGKN | |
| strain MCCC | | | RLTIGTKEEFLYRRLAIQAARRRTQVGATYSRSGKGKKRK | |
| 1K06699 | | | LKAVDKYHKTESNYVAHRIHVYSRKLIDFCIKHQAGTLIL | |
| | | | MNQEDKVGIAKEEEFVLRNWSYYELMTKIKYKAKKAGIE | |
| | | | LITG | |
| | | RpoEl | MSYSDFELLKIGDSSALDHIHAKYFRSIFWIGKQWLNDEFL | 6046 |
| | | | IESLVQDTFLKLWVNRDKLESPEHIFYFLRFVMKRECISYY | |
| | | | RKPKYKFYKKVNSLEDYENYQDYMAGYDPVNDSKNLDD | |
| | | | QESTQKSFDHIKSIFPLLNADKRHLIELCLKYGFQYKAISK | |
| | | | VMGKGIIETSREIKEAIEHIKTIVHQGNKLDSSDTMTNQIKF | |
| | | | SKELSEEQAKVLKMRCELNYTFSEIAKELELSQKEVHQEF | |
| | | | MKAYRLMKANHQLQLQSA | |
| | | HTH1 | MAKKNTNKSKVYFSDKYVCRFISEEWLTSKDTSARKYGK | 6063 |
| | | | IYGVNYHVIEKIQQENGYNIPLSTLSTICFNHGIKLSDFFKL | |
| | | | VEKKYGEFLNDSYEYK | |
| Allomuricauda | Ata3 | dCas12f2 | MEKSTLKLTRKIQILIDLLTKEEKKEALDKLYQWQNRCFR | 6030 |
| taeanensis* | | | AANLIVTHLYVQEMIKEFFYLSEGIKYKLADEKKDEQGIL | |
| strain MCCC | | | NRSRINTTYRVVSDRFKGEIPTNILSNLNQALISSFKKNRSE | |
| 1K06752 and | | | YWNGERSLKNFRRDMAFPFDLEGMSGLAYNEEKKAFCFR | |
| Allomuricauda | | | LFRIPFKTYLGKDFTDKRTLLERVVQGKTKLCTSHIKLKDG | |
| taeanensis* | | | KIFLLAVFEIEKERNDLRPEIIAEASLSLEYPIVVKVGKARLT | |
| strain MCCC | | | IGTKEEFLYRRLAIQSAHRRAKIGATYSKSGKGIKRKLKAV | |
| 1K06699 | | | DRLGQAERKYVHNRLHVYSRRLIDFCVKHRAGTLILLNQ | |
| | | | EEKTGIAKEEGFVLRNWSYNDLMTKIKYKANKAGLEVIID | |
| | | RpoE2 | MENQNSLEECYERLKKGCAISFTEIYTKYHRQIFWLGKSF | 6047 |
| | | | LDDGFVVETLVQDVFLKLWVNRDSLESPKHIYFFLRFVMK | |
| | | | RECITYYTRPRNKFFRKVHSLESFENYQDYMVGYDPAVDN | |
| | | | NNVKLQEGEQEKFESIKRVLPLLDDSKRHIINLCLKYGFQY | |
| | | | KAISKVMGKGINETCREIKEVIEDIKTILHRGNKLDSSNNN | |
| | | | MDEIKFTGEMTEEQTKVLKMRCELRYSFSEIANELNLSQK | |
| | | | EVHQEFMIAYRLMEAKHQLQSA | |
| | | HTH2 | MPTDTKANHIGKKIARIRELRGMKQETLAEELGISQQSVST | 6064 |
| | | | LEKSETLEDKKLEEIAKALGVTKEGIENFSEESVLNIISNSF | |
| | | | HDQSALNAILNQPTFNPIDKVVELYERLVQAEKDKVTYLE | |
| | | | KLLDKK | |
| Allomuricauda | Aru | dCas12f | MEKTTLKLTRKIQLLIDLSTKEEKKEALDKLYQWQNRCFR | 6031 |
| ruestringensis | | | AANLIVTHLYVQEMIREFFYLSEGKKYKLADEKKDEQGIL | |
| | | | NRSRINTTYRVVSDRFKGEIPTNILSNLNQALISSFKKNRPE | |
| | | | YWNGERSLKNFRRDMAFPFDLEGMSGLHYNEEKKAFCFR | |
| | | | LFRIPFKTYLGKDFTDKRTLLERVVEGKTKLCTSHIKLKEG | |
| | | | KIFLLAVFEIEKENHDLRPEIIAEASLSLEYPIVVKVGKARLT | |
| | | | IGTKEEFLYRRLAIQSAHRRAKIGATYSKSGKGIKRKLKAV | |
| | | | DRLGQTERKYVHHRLHVYSRRLIDFCVKHRAGTLILLNQE | |
| | | | EKTEIAKEEGFVLRNWSYCDLMTKIEYKAKKAGLELIID | |
| | | RpoE | MENHHTLEECYKGLKKGCSNSFTEIHTKYNRQIFWLGKSF | 6048 |
| | | | LDDGFVVETLVQDVFLKLWVHRDTLESPKHIYFFLRFVMK | |
| | | | RECISYYTRPKNRFFRKVHSLESFENYQDYMVGYDPAEDN | |
| | | | NNVKLQEGEQEKFESIKSVLPLLDDSKRHVINLCLKYGFQ | |
| | | | YKAISKAMGKGINETCREIKEAIEDIKTILHQGNKLDFGDN | |
| | | | NTDEIKFTGEMTEEQTKVLKMRCELRYSFSEIADELNISQK | |
| | | | EVHQEFMIAYRLMEAKHQLQSA | |
| | | HTH | MTTDTKTNHIGRKIARIRELRGMKQETLAEELGISQQSVSS | 6065 |
| | | | LEKSETLEDKKLEEIAKALGVTKEGIENFSEESVLNIISNSF | |
| | | | HDQSALNAILHQPTFNPIDKVVELYERLVQAEKDKVSYLE | |
| | | | ELLKKK | |
| Salegentibacter | Smi | dCas12f | MGKDTITLTRSIRLEIDLPTQEERQEAKSKLYQWRYRCHK | 6032 |
| mishustinae | | | AANLIVSHLYVQEMIQEFFYLSEGVKYKLVDEKKDELGIF | |
| | | | NRSRMNTTYRLVSDRYKGKMPTNILSQLNSIIQSSFKKNRE | |
| | | | EYWKGERSLQNFKKEMAFPFTMEGVCGLEFNPEKSAFCF | |
| | | | RFFSIPVKTYIGRAFNDKWKLMHQLTKGEIKMRTSYLKLK | |
| | | | DGKIFMMAAFEMEKEKHQLRPEVFAEARLSLEYPIIVKIG | |
| | | | KAKLSIGSREEFLYRRLAIQAARRRTREGVKYARSGNGHK | |
| | | | RKTKAAARFKDKERNYVNQRLHVYSRELIDFCVKHQAGT | |
| | | | LILVDQEQKIELAKEEAFVLRNWGYYDLMTKIKYKAEKA | |
| | | | GIELIIG | |
| | | RpoE | MLQRIFELLQQGHPDALEFIHTKYHRNIFWVGKQILDDDF | 6049 |
| | | | AVETLVQDTFLILWEKRDRIERPEHIYYFLRMVMKRECYT | |
| | | | YYVRPKNKFFKTVNSLESFENYQEYLHGYDPEKDDLHLL | |
| | | | NHEIQQKAFDRISRVLPLLSPERRRLIELCLKYDFRYKAIGQ | |
| | | | LMGTSITHTSNEVKKAIVDIKNIICQRSIQETKPKPVLAVKI | |
| | | | QREMTQEQEKVLQLRTERQYSFAAIAKELNLSEKEVHQEF | |
| | | | MSAYKLMQLKHEQQQSA | |
| | | HTH | MIILVVDRATMQNKNYKEDFLLKFGENFGKIRRSKSLSFRS | 6066 |
| | | | LSQKCDIDYADLNKIERGKRNITLTTIIELARGLDIHARELF | |
| | | | DFSFTLKDLEK | |
| Leeuwenhoekiella | Lpa | dCas12f | MMKNKTLSLTRKIQLKVDLPTYEERKEAIGKLYQWQNRC | 6033 |
| palythoae | | | FKAANIIVTHLYCQEMIKEFFYLTEDIQYKLADQKKDENGI | |
| | | | LNRSRINTTYRVIADRFKGEIPMEILSNLNRNLESSFNKNKP | |
| | | | KYWKGERSLKNFRRDIGFPFPARCMWGFKHDPERNAFCF | |
| | | | RLFQIPFCTYLGRDFSDKRSLLHRAVKGEVRLRTSEIKLTD | |
| | | | TKIFWLAVFDIEQEQHALKPEVIAEASLSLEHPISVKVGGN | |
| | | | RLNIGNKEEFLYRRLAIQAARKRALAGTVNSRGGHGRTRK | |
| | | | LKAVEKYKDKETKYVNQRLHVYSRRLIDFCVKHQAGTLI | |
| | | | LLHQEDKIEAAKENQFVLRNWNYYELTKKIEYKAKKAGI | |
| | | | ELVID | |
| | | RpoE | MKRTAADKHYTGFKHGCPVALKAIYTQYHRQIYWMGRS | 6050 |
| | | | LIKDVFVVETLVQDTFLTLWEKRESIESPQHLVNFLYTVISN | |
| | | | ECKWYYARPKNQFNRECYALEKMENYQSFMLGYDPTAV | |
| | | | DIHLEDQQQQQREYEQVIKVLPLLGGQRQRLIELCLQHGF | |
| | | | KYKIISEQLGISIKEASTTLKLTIDEIKNILHQGYVLQPQETE | |
| | | | PMQNGEGQMTEQEARVLALRCEQQYSFAQIANELQISQK | |
| | | | EVHRAFTAAYKLLQQHEHLQSA | |
| | | HTH | MLRFFTFIANYQFDMNEDQKRRLLIEFGKIVKFHRTEKLKI | 6067 |
| | | | SLRDLAKKCDVEHSAIGKIEKGEIKIQLPTVFELAKGLEIHP | |
| | | | RDLFDFDFPLEETGN | |
| Sphingobacterium | Sda | dCas12f | MEKESIILTRKVQIYLDCDDKGQRSAYFKQLFEWQDMVY | 6034 |
| daejeonense | | | RGANMVMTHQFVQEQIKDLIYLRDDVKVKLADFKKDPE | |
| | | | GIFNSSKMNTTYRILSLYFKGKLPSKIISAMNMTLNRAYST | |
| | | | DRSSYWKGEKSLRNYRKDMPIPFGGDQLKLGNDEKGRDF | |
| | | | RFTLFKIPFRTYLGKDRSDKRILLQRCLVGQIKICTSSIKMV | |
| | | | KGKIFLLLALELPKKQHDLKEHIIAEASLSVEHPITVSIDRD | |
| | | | NFQIGNKEEFLYRRLAIQAARHRIQKAVAFNRGGHGRRKK | |
| | | | LKSLEHFTEREKRYVDSKLHLYSRRLIDVCVNSGAGTLLL | |
| | | | VNQSNKEEAAKEDRFLLRNWGYYGLIEKIRYKANMAGIN | |
| | | | VIVE | |
| | | RpoE | MNETLRQQETDRHIALLRKGDEKGLNFFYRRFYGYIFARA | 6051 |
| | | | FRATQDDCAAKSIAQEALLRLWLFRKQLKDAEDIQAFLKA | |
| | | | QVRSSINAYYNKTRNRFHRSLLRLDSIEDYQEFLLGHEME | |
| | | | EEEEMDIVYLERLDQEKQQRLIQLDNLMPSLNGQQQMFIK | |
| | | | LCLKYSFNYERIAYYLGGISDYQVSLQVEKNDRYPTFYIQ | |
| | | HTH1 | MNAIFREKNENMHIGHNIKRIREIQGIKQEAFGQLCRNRYS | 6068 |
| | | | QQRISDFENMVALDEPLLNELASALGVTPEFVKSFKEENVI | |
| | | | YNIQHSHTFNDHSTNSSQHTQPTFNSDGSDKLVALLERFIE | |
| | | | EDRAKTRSIAELSKAVLDLTNEVKKIKEGK | |
| | | HTH2 | MEQMNRSSKIVAQGELDEQQAEIFHMRYQLQLSFDQISEA | 6069 |
| | | | LHLDPSTVRKIFVQAHTKIRTAQRT | |
| Leadbetterella | Lby | dCas12f | MEKIILTRKIQLVIPCKDREILKSYYDRLYEFQRHTCKAANL | 6035 |
| byssophila | | | IHTHLFIQDRWKEMVYLAEDAKISLADHKKKEGGVLNTS | |
| | | | RMNSTYRQLSAHFLKVLPSNTMSNLNQAVYRTYQANRDL | |
| | | | YWRGEKSLPNYRRDIPIPFSSREMRWEEAGDGKNFLLYLF | |
| | | | RIPFKTYLGRDRSELKSLLKKIVKGEIALRQSALQIKNNKIY | |
| | | | LLASVEVEKAKHSLDKTLIAEVALSLEYPLVIKIGKDEFQIG | |
| | | | SKEEFLYRRLSIQAARRRLQQACAYRSGGKGKEERYKCLK | |
| | | | HYKEKEKNYIEEKLHLYSRRLIDYCVKAGAGTILLVNQSY | |
| | | | KEELAKEDPMLLRNWSYYGLKEKIAYKAKMAGIHVLVE | |
| | | RpoE | MNIENINLIKLKNGNEAGLSYFYRRFFPWYTFRAFRYMRD | 6052 |
| | | | DLDAQCAVQEAFLRLWLNRAQVDSVESMHEFLKRQVQE | |
| | | | AAKAFHRKRSNEFRKSMLYYFDYDDPDILIGHRAVEEEVT | |
| | | | EELQPDASDQEKLDSIHRLLPHLGREQELFIRLCLRFNFNY | |
| | | | ERIAFYLGGIRDYEVANKVNKCIVQLKTLVADSSKLSSASK | |
| | | | METIRVDERLTPEQAEVLKLRYELGASFDDIGQALQMPVS | |
| | | | RVREIFIQAFTVFKHGKNHSYSKNTVSYSL | |
| | | HTH1 | MTKKKTPFGKYLESKSINQAALARTTGIRPNRISEFATQDC | 6070 |
| | | | LKMRADEIYLLAKALGERPGTLLDYLLAEIKS | |
| | | HTH2 | MEPKIHEGKNVKRFREMLGIKQEALAQELGEDWTQKKVS | 6071 |
| | | | LMEQKAVLEPEVLYKVSKALNIPDMAIKNFDEEKAITIIAN | |
| | | | TVNNNDHATGNSLFNYQPIFNPIDKIVQLHEEKIQLYERML | |
| | | | REKEDMINKLEKLLPQN | |
| Mucilaginibacter | Mri | dCas12f | MADNMYITRKIQIIVNSPDKDVVYDAIGKLMQWQQACYK | 6036 |
| rigui | | | CANLIYTHQFLQEQIAEMVYLADGVKLKISDHHKDADGM | |
| | | | LVSSRTNSTYKVLTEKFKGVLPSSIYNNLNSQLVSTFLKER | |
| | | | GLYVNGERSIRNFKRSIAMPFSAENIRRLTAGDHGNFTFILF | |
| | | | GIPFRTYLGRGYDEKRELLRQVVNGKIKLASSFLKVEQKK | |
| | | | VFLLATFEQEKQFHLLGGAIIAEASLSLEYPLTVKVGKARM | |
| | | | TIGSKEEFLHRRMAIQAARSRVQASVDGNKAGHGKVRKR | |
| | | | KPLAHYQSLEKDYIKHKLNVYSKRLIDFCLQHRAATLILTG | |
| | | | QQEKEEIAMAEPFLLRNWNFAGLKEMIAFKAAKVGIDLIV | |
| | | | E | |
| | | RpoE | MVGKLCEISSFDDKVFEKILKQYRLTIYSFGKRMLNDSYIV | 6053 |
| | | | ENIVQDAFLKLWNFRQTITSDEHARRFLMQSVKWACYSY | |
| | | | FRNSDSRFHRNMIRLNDYDNPADLFGEHPDVQTYNDHTE | |
| | | | ALNESRLNEVKEAIDKVCYGREKEVMELHFIKGLSHSQIA | |
| | | | ERYHLSIRTVTVIIEKGTVRLKTILVTVKTPVHDIQLSPAPGF | |
| | | | VDSFNHIEGLNEEQNKIYHLRLTGRYDFEQIASFLQLPLAF | |
| | | | VQTEYLKAWKIAACLKKKNGKPAGRANKGISGRYGLLSA | |
| | | HTH | MTNLGLFLAKKSVNKAEISRKTGISKSRLSELSMNNSTKL | 6072 |
| | | | RADELYLIALAIDVDPKELLNHLFMDLKLKD | |
| Puia dinghuensis | Pdi | dCas12f | MNAETMILTRKVQLIIDSNDKAFIGEVYRTLYRWQYICFRA | 6037 |
| | | | ANYIFTHLFIQEQLKELFYLKDEVKVKLADCCKNPDGILTC | |
| | | | SQLGTTYRVLNKHFKGDIPMNIISSLNMTLAKHENNEKEG | |
| | | | YLKGEKSVRNYKRDIPIPFQRRNITRLQLAENAKEYKFNLF | |
| | | | KIPFHTYLGRDKFDKRLLFDRLLKGEVQLKNSSLQLCNGK | |
| | | | IYLLAAFETRKEKHELDASIVAEAHLSIDYPIVVRIGKFQAT | |
| | | | IGSKEEFLYRRLAIQAARSRAQKDASYNRGQHGRRRKLK | |
| | | | ALEHFRDRERDYVQQRLHVYSRQLIDLCVKHRAASLILVG | |
| | | | QTEKEAAAAGEEFVFRNWSYYALKEKIQYKANKAGIMLI | |
| | | | TE | |
| | | RpoE | MSYELPTPTEQAYFLRYKNGEEEGFTQLYRMMFNSLLRYG | 6054 |
| | | | MRILPNEFAVTTIVQDALLKAWDFRERMTCLQHTFRFMC | |
| | | | MNVKWACYDYYRQPEIRQVVYLDHDTYPDVSFLPGSEEA | |
| | | | GPVCNEEALLKSIYDVMPYLPMNKQTILQLYFKYGFSYKQ | |
| | | | IAKRYGANIQTISKNLHEALAYLKKVIHSKKQLTKPISFPVT | |
| | | | NDKYQAEEYLTGEMLQLFKLRYESKLPFDVIAAKLNLPQP | |
| | | | YIQQQYAAAHAKLQQLKISRRP | |
| | | HTH1 | MKTKIDLYVITRVKEKRLEKNISQAELANELGMSVGFIGK | 6073 |
| | | | VESPKYPSHYNIKHLNQLAKILDCSPQEFLPKKPLP | |
| | | HTH2 | MKSKIDIYVIDKVREMRIAHNMSQEELSIKAGFRSNGFVG | 6074 |
| | | | QAESFKYNKRYNVHHINRFAQIFNCSPQDFLPETYLY | |
| Pedobacter | Psu | dCas12f | MESNKMVITRKIQLLIDSEDKEEVKKMKDQLYNWQWITY | 6038 |
| suwonensis | | | RSANMIMSHHFVQEQVKDFFYLTEDIKLKIADEKKEENGI | |
| | | | LKSSCQNTTYRLLSNHFKGQIPTNILSNLNNTLISYFNKEKS | |
| | | | AYWKGEKSLRNYKKNIPMPFEASVISKFVYTPDRRNFSFK | |
| | | | LFKIPFRTYLGKDRSDKKIMLEKIMNGTLKLCVSNIQLDKG | |
| | | | KIFLLAAIQVDKEQHTLDTSIIAEASLSIEHPITVKIGKYEHT | |
| | | | IGTKEEFLHRRLAIQAAIYRVQKAVKFNRGGHGSKRKRRS | |
| | | | LVDYQHQEKRYVEYKLHLYSRMLINLCLKYQAATLLLLN | |
| | | | QEEKEEIAKDDVFLLQNWSYYSLKEKIAYKAARAGIQMIV | |
| | | | E | |
| | | RpoE | MNNNYKIAMQTIIKKQNQDVNFARFKEGDEKGLEFFYKR | 6055 |
| | | | LYPALYFYSFRYIKDDINADCIVNEAFLRLWLVRRSIQDPD | |
| | | | HIEPFIKKLTTQACKAYYRTSNKRFQRNMLRLDEIENYDEF | |
| | | | IFGHDPEIEEDTEVICQEELENELKEKWIRLKTLIPNLTQDQ | |
| | | | QLIVRLCLKYSFNYDRIAWHIGGISDYQVARKVEKTLESLK | |
| | | | AIFTNSQKLEIVGNNNRFRFEGDLNEEQSSILHMRYQLQYS | |
| | | | FEEISSALNLDQGYIKKVFVGASIKIKKVKM | |
| | | HTH | METKEQFKKTHLGRKISRIREIRGIKQDALAMELGLSQQTI | 6075 |
| | | | SKIEQSEDVDDETLNKISKALGVSSDAIKNFNEEAVVNIIA | |
| | | | NTVNNHDQSASVFISPNFNPIDKIVELYERLLKSEQEKNEL | |
| | | | LNKK | |
| Chryseobacterium | Cgl | dCas12f | MEKSTMTLTRKIQLMIDLPSDKKNEMWEKLYRYQNLCFR | 6039 |
| gleum | | | AANLIASHLYVQEMIKDFFYLTEEIQYKLADEKKDEMGMF | |
| | | | NRSKTGTTARMVFDRFKGEIPTDILGSLNNTIQSTFSKNKA | |
| | | | DYWQGTKSVRNYKRDIPIPLPVKCISKMKYDPDKKAFCFN | |
| | | | MFAIPVKTYLGKDYTDKRVTMERLLKGDIKLCTSQIQLKD | |
| | | | RKIFWLAVFEFKKEENHLKPEIIAEASLSLEHPIVAKANNLR | |
| | | | INIGSKEEFLYRRLAIQASQKRIQDGIAYARSGNGSKRKQK | |
| | | | ALYKTENLESRYVTHRLHMYSRKLIDFCVQQQAGTLILKN | |
| | | | QEDKIGIAKEQEFVLRNWNYYELQTKIKYKAEKAGIELIIG | |
| | | RpoE | MKRTNSPPLKLTDFQLYKLLKKGNPSSLEHIHLRYKRLLF | 6056 |
| | | | WIGKQMLEDDFAVETLVQDTFLKLWLHRDSIETPNHILGF | |
| | | | LRFVLKRDCITYFNTPKNKFARLTASLESFENYQDYIVGYD | |
| | | | PVQDKEHLLRQESDQKNFDEVNKVLKVISPKRKYLIELCL | |
| | | | QYGFQYKPIAEAMGSSVKDISNEVTRAINDLRKILRENSN | |
| | | | DEPPIKSKKNEVKQNELSGQQIEIIKRRFREKSSFAIIARELK | |
| | | | LSEKEVHQDFLYAYQYLQNQNNSEITI | |
| | | HTH | MNESLEEIERYVIKRVKEIRESKNVTQEELSLSIGKNIGFISQ | 6076 |
| | | | IEAPSKKAKYNLIHLNLIAIALGCSIKDFLPDEPIRDKKYDI | |
| | | | KEIQNKKS | |
| Zunongwangia | Zpr | dCas12f | MGKETIKLTRKIQLLVDAPNKEERKEALDTLYRWQNRSYR | 6040 |
| profunda | | | AGNLIVTHQYIQEMIKDFFYLSEGIRYRLVDEKKAEDGILN | |
| | | | RSKSNCTYRVVSDRFKGEVPTNILANMNYNIMNNFSKNLV | |
| | | | QYRRGERSLANFRRDIPFPFGTIGIHGLSYKKEKKAFCFRL | |
| | | | FSIPFKTYLGKDYTDKRSLLEQVVAGNIKLCTSKIQLNKGK | |
| | | | IYWLAVFEVAKEKHNLKPEVIAEASLSLEHPIIVKSRKATLS | |
| | | | IGSREEFLYRRLAIQAALKRAQNATAYCRSGKGRKRKTKA | |
| | | | VERFHEKEKNYVSNRLHVYSRKLIDFCIKHEAGTLILLNQE | |
| | | | DKMEIAKEDGFVLRNWNYYELMTKIKYKAEKAGIELIVD | |
| | | RpoE | MEREFKLLKEGHPDAMEFIYARYQHKLFWMGKQLIKDEF | 6057 |
| | | | VIESILQDTFLKLWEKRDHIEDPKHMLYFLLHVMKRDCSY | |
| | | | YYIRPRNNFHRNINSLDNYENYQEYIHGYDPESEDEHLKD | |
| | | | QEANQKALDRIKCVFPLLRPERRYLIELCLKYGFQYKNIAE | |
| | | | LMGTSTTYTSNEVKRAIDDIKKIIHQGSNLGSKPDQIQVKK | |
| | | | NTRITREQEKVLQLRNEMHYSFAAIAEELQLSQKEVHKEF | |
| | | | MTAYKLLQSKHKQQQSA | |
| | | HTH | MQNEKDKVDFLIQFGSNFGKIRKMKNLSFRALSQKCDLD | 6077 |
| | | | YADLNKIEKGKRNITLTTIAELARGLNVHPKELFDFDFTP | |
| Chryseobacterium | Cba | dCas12f | MEKSTMTLTRRIQLLIDLPANEQKEMWEKLYRYQNRCFRA | 6041 |
| balustinum | | | ANFIVSHLYVQEMIKDFFYLTEDIQYKLADENKDKMGIFT | |
| | | | RSKTHTTARMVFDRFKGEIPTDILGSLNNTIQSTFSKTKAD | |
| | | | YWQGTKSLRNFKKDIPIPLPVKCISKMKYDPEKKAYSFNM | |
| | | | FAIPVKTYLGNDYSDKRVIMERLLREEIKLCTSQIQLKAGK | |
| | | | IYWLAVFEFEKEEHKLKPEIIAEASLSLEHPIVVKANNVRIN | |
| | | | IGSKEEFLYRRLAIQASQKRIQDGIAYTRSGNGVKRKQKAL | |
| | | | YKTENLESRYVSHRLHLYSRKLIDFCIQQQAGTLILKNQED | |
| | | | KIGIAREQEFVLRNWSYYELQTKIKYKAEKAGIELIIG | |
| | | RpoE | MKRTNSLPRKLTNLQLYELLKKSNPTALEHLHLRYKRLLF | 6058 |
| | | | WVGWQVLKDDFVVDTIVQDTFLKLWLHRDTIETPDHITG | |
| | | | FLRFVMKRDCISYVTAPRNKFNRLMASLDSFENYQDYLA | |
| | | | GYDPLKDKEYLLSQESDQKNFDEVKKVLPVLDPKRKHLIE | |
| | | | LCLEYGFQHKPIAEAMGSSVKDISNEVSRAINDLRKILNRS | |
| | | | SSEQPKGKALDNKKQSEKLSSQQLDILKRRFEQKSSFAVIA | |
| | | | QELKLPEKEVHREFLYAYQHLQNQNTSEIPL | |
| | | HTH | MDVLKDEILKKFGEHVKDLRIKSGLTQDEVVLNSSKITKG | 6078 |
| | | | TVSDIENGKRNFAFTTLIDLAKGLNVSPKDLLNFKID | |
| Paenimyroides | Pba | dCas12f | MEKTTMKLTHKFRIVVDLPTYAERKEAMDKLYRWRNRC | 6042 |
| baculatum | | | YRAANLIVSHLYVQEMLKEFFYLTEGVQYKLADEKKHEA | |
| | | | GMLTRSRINTTYRALSDRFKGEMPMNILSCLNNSIISSFRK | |
| | | | ESEAYCKGERSIKNFKKTMAFPFGLEGIGGFCYNEEKRTFY | |
| | | | FRLFSIPFRIYLGKGRTEKTKVLQQVISGEIKMCSSHIKIND | |
| | | | GKVFWLPVFEIKKEEPTLKPEIIAEASMSFEYPLIVKIGRAR | |
| | | | YTIGTQEEFLYRRLAIQASLERLRVGAQYCRSDKGTRRKL | |
| | | | KATEKLKKAESNYVNNRLHVYSKRLIDLCVEHKAGTLILA | |
| | | | DQQEKMEVAKTEEFVLRNWSYYNLMTKIKYKANKAGIEL | |
| | | | IM | |
| | | RpoE | MPERNFELLKNSDPAALEKIHAQYRRLIFWVGRRWIDDDF | 6059 |
| | | | VVENLVQDTFLKLWECRETIKDPLHILFFLKFVMKRNCYA | |
| | | | HHAKPRNKFFKTNVHSFESYENYENSVTGYDPADAVQDL | |
| | | | KGQEEDQQFFDHLNTVLPLIRPERRHLINLCLKYGFRYKAI | |
| | | | AQVMGKGIMETVNEVKRAIEDIKVIVDRRKVLEKKDTGM | |
| | | | VETVPQTISERQSQVLMLRCEKKFSFAAIAQELNLSQKEV | |
| | | | HAEFMAAYKFRQQNMKELL | |
| | | HTH | MKKIIDFETTQFDYDLINHIKGLRKIHSITKEELSVKMGVA | 6079 |
| | | | KSFVGNVESATQRHKYATRHLTLLAKALGFKNISDLLKFPT | |
| | | | PEYDKIKVTVEQTYNEAGTK VIKSEVVKIEPIE | |

*also described as Flagellimonas taeanensis or Muricauda taeanensis

TABLE 8

| | | | | TAM |
|---|---|---|---|---|
| | gRNA sequence: | | | determined |
| gRNA | scaffold + native guide | 20 nt native guide | | by MEME- |
| Description | (RIP-seq footprint) | sequence | Original gRNA region | ChIP (5′-3′) |
| Pum_ | CAATTAAAAACTCA | CAATTAAAAACTCAC | TAAACAATATATTAAGGATAC | GGTT |
| dCas12f | CCCTAAAGCAAAGG | CCTAAAGCAAAGGA | ATTTACACCCGTAAGGTGAGG | |
| native | AAGTACAATTAATA | AGTACAATTAATAGCT | TTGTTGGTACATACTCACGGA | |
| | GCTAGTTTAATTGTA | AGTTTAATTGTAATCA | ATGCACAAAGCATATACAGCT | |
| | ATCAATAACAAAGC | ATAACAAAGCACAGC | AGAAATATTAATTAAAAAAAA | |
| | ACAGCAGATTACTG | AGATTACTGATATGAT | GGCTAACCTTAAAGAAAAAG | |
| | ATATGATTATTGGAA | TATTGGAAAAATGAA | AAGTACAATTAATAACTAGTT | |
| | AAATGAAACTGTTG | ACTGTTGTGAATAAT | TAATCGTGATCAATAACAAAG | |
| | TGAATAATAATATTT | AATATTTGAGGGTGC | CACAGCAGATTACTGATATGA | |
| | GAGGGTGCCTGTAC | CTGTACACCCGTAAG | TAATTGGAAAAATGAAACTGT | |
| | ACCCGTAAGGTGAG | GTGAGGTGGTTGATA | TGTGAATAATAATATTTGAGG | |
| | GTGGTTGATACATA | CATACTCACTGAATG | GTGCCTGTACACCCGTAAGGT | |
| | CTCACTGAATGCAT | CATAAGGCATATACA | GAGGTGGTTGATACATACTCA | |
| | AAGGCATATACAGC | GCAAAGATAACAATT | CTGAATGCATAAGGCATATAC | |
| | AAAGATAACAATT | AAAAACT (SEQ ID | AACAAATATAACAATTAAAAA | |
| | (SEQ ID NO: 6084) | NO: 6094) | CTCACCCTAAAGCAAAGGAA | |
| | | | GTACAATTAATAGCTAGTTTA | |
| | | | ATTGTAATCAATAACAAAGCA | |
| | | | CAGCAGATTACTGATATGATT | |
| | | | ATTGGAAAAATGAAACTGTT | |
| | | | GTGAATAATAATATTTGAGGG | |
| | | | TGCCTGTACACCCGTAAGGTG | |
| | | | AGGTGGTTGATACATACTCAC | |
| | | | TGAATGCATAAGGCATATACA | |
| | | | ACAAATATAACAATTAAAAAC | |
| | | | TCACCCTAAAGCAAAGGAAG | |
| | | | TACAATTAATAGCTAGTTTAAT | |
| | | | TGTAATCAATAACAAAGCACA | |
| | | | GCAGATTACTGATATGATTATT | |
| | | | GGAAAAATGAAACTGTTGTG | |
| | | | AATAATAATATTTGAGGGTGC | |
| | | | CTGTACACCCGTAAGGTGAG | |
| | | | GTGGTTGATACATACTCACTG | |
| | | | AATGCATAAGGCATATACAGC | |
| | | | AAAGATAACAATTAAAAACTC | |
| | | | ACCCTAAAGCGAAGGAAGTA | |
| | | | CAATTAATAGCTAGTTTAATTG | |
| | | | TAATCAATAACAAAGCACAGC | |
| | | | AGATTACTGAAGTGATTCTTG | |
| | | | GACAAAAGCAGAACCTGTTG | |
| | | | TGAGTAATAATATTAGAGGGT | |
| | | | GCCTATACACCCGTAAGGTGA | |
| | | | GGTTGTTGGCAAACAATCAAT | |
| | | | GAATGCGTACGGCAGATATAA | |
| | | | CAGAGAATATTTAGAGTTTAT | |
| | | | TAATGGAAAGCTTTTGTCAAG | |
| | | | TATATGTAGCTCCGTAGTGGTT | |
| | | | CAAAACAACAATAGTTAGTGT | |
| | | | ATACTTAATTACGAAGCTATAT | |
| | | | TGAAATACAGTATGTATAGGG | |
| | | | ATATAATATTTTGAGAGTGGTT | |
| | | | GTACACCTATATAGTGAGGTT | |
| | | | GCGGGTAAAAAGTCACTGAA | |
| | | | TGCAGTAAGAATATAAAACTC | |
| | | | TGAAAAAACTTATAAAAATAA | |
| | | | ATAAGAACCTTTAAAAGCCTT | |
| | | | ACAAATACATTTTTCACAGAA | |
| | | | ATAGTTAAAGTGTTTAAAAAT | |
| | | | AGTTAATTATAACGTTCTGCG | |
| | | | TTTTCTAAATTAATAATTATTAT | |
| | | | TATTTTTGAAATAACTTACCA | |
| | | | ACATAATTATTAA (SEQ ID NO: | |
| | | | 6104) | |
| Ata_ | ATTTTGAGGGTGCT | CAATTAGATTTTGAG | CAATTAGATTTTGAGGGTGCT | G |
| dCas12f | TGTACACCCATAGG | GGTGCTTGTACACCC | TGTACACCCATAGGGTGAGGT | |
| native | GTGAGGTTAAGAAT | ATAGGGTGAGGTTAA | TAAGAATTACACTCACTAAGT | |
| | TACACTCACTAAGT | GAATTACACTCACTA | GTGAACAACACATACAACTT | |
| | GTGAACAACACATA | AGTGTGAACAACAC | GTGGGATATACGCTAACAATA | |
| | CAACTTGTGGGATA | ATACAACTTGTGGGA | GCAATCAATAAGCCTAAATAC | |
| | TACG (SEQ ID NO: | TATACGCTAACA (SEQ | GGGCACCTAAATACAATATGG | |
| | 6085) | ID NO: 6095) | GACAAACACCGATAAAGTTT | |
| | | | TTTTGAACGATTGAAAATGGA | |
| | | | TACTTTTAATGAAGTGTCCAG | |
| | | | AAATCGTCAAATATTAGATAG | |
| | | | AACCCTTGGGATATTGCTTCT | |
| | | | CCTTATAGGTATCGCAATTGG | |
| | | | GATTTTCCTTATTCCTGATTTT | |
| | | | TTACCACTACTTAAAAGGACT | |
| | | | CCTTATTTATTGCTCGAACCC | |
| | | | GATGCAGGTGTAAGACATGA | |
| | | | GCTTGGATACGCTTGGTTTAT | |
| | | | GCAATCAATTGGTTGGATCAT | |
| | | | TGCTTTTTTCGCATTTAGGAG | |
| | | | CAGTAGGGCATTTTTAAGGGA | |
| | | | TAGCAAGAAACCAACTAGTA | |
| | | | CCAGTAATTAAATCAAAGGTG | |
| | | | AAAGAGGTATATAGTTGCCTA | |
| | | | AACACCATATACAACTCACTG | |
| | | | AAAAACCGCTCCGAAACGCA | |
| | | | ATATTCTGTGATGACAGCCAT | |
| | | | TCATCCGGTAGGCTAAAGTAT | |
| | | | GTAAAAAGAAGCTAATGTCAT | |
| | | | CTTCCCTTTT (SEQ ID NO: | |
| | | | 6105) | |
| Smi_ | TTTTCGAGGGTGCT | AATATTTTCGAGGGT | AATATTTTCGAGGGTGCTTGT | G |
| dCas12f | TGTACACCCGCAAG | GCTTGTACACCCGCA | ACACCCGCAAGGTGAGCTGA | |
| native | GTGAGCTGAACATT | AGGTGAGCTGAACAT | ACATTTCACTCACTAAATGCG | |
| | TCACTCACTAAATG | TTCACTCACTAAATG | CTTAGCATATACAACGCGTGG | |
| | CGCTTAGCATATACA | CGCTTAGCATATACAA | GTATCTCTTAATTTCATTAGAA | |
| | ACGCGTGGGTATCT | CGCGTGGGTATCTCT | AAAGATCTTAAGCCGAGCATA | |
| | CTT (SEQ ID NO: | TAATTT (SEQ ID NO: | GTTGAAAACTTAAAAATCTAT | |
| | 6086) | 6096) | CAGCACTTACTATTGCTAGTA | |
| | | | AGGAATTGCCTAATTTAATGC | |
| | | | CTTCCTTCGACGAAAATTTGA | |
| | | | TATTTTTAAATAAGGTTATCCA | |
| | | | ATTTCATTTTTTAAGAACAGT | |
| | | | AAATTTTACAAAGTCGAATGC | |
| | | | AATTAAAATTACCTTTAAGAA | |
| | | | ACTTGATAAGGAGTTCATAAC | |
| | | | CAAATTTCTTACTTATTTTAAA | |
| | | | AAAACAGACTA (SEQ ID NO: | |
| | | | 6106) | |
| Lpa_ | ATCAGAGGGTGCTT | TGACTTTATGATCAG | ACCTATTGATTGACTTTATGAT | (CCN)G |
| dCas12f | GTACACCCGTAAAG | AGGGTGCTTGTACAC | CAGAGGGTGCTTGTACACCC | |
| native | TGAGGTCGCGGGC | CCGTAAAGTGAGGTC | GTAAAGTGAGGTCGCGGGCA | |
| | ACTCACCAAATGCA | GCGGGCACTCACCAA | CTCACCAAATGCAGGAAGCA | |
| | GGAAGCATATACAA | ATGCAGGAAGCATAT | TATACAACGGCGTGTTCATCT | |
| | CGGCGTGTTCATCT | ACAACGGCGTGTTCA | ACACTTAGAAAACAAGAGCT | |
| | ACA (SEQ ID NO: | TCTACACTTA (SEQ ID | TTTTTGTGAGGCATATAAAAT | |
| | 6087) | NO: 6097) | AAACAATGTTGAATTTTCAAT | |
| | | | CTAGAATTTTAAATAGAATCT | |
| | | | GAGGGTACTTGTATACCCGTA | |
| | | | GGGTGAGGCTTTGGCACTCA | |
| | | | CTAAGTAGCATACAGCTTATAT | |
| | | | ACAATGGCGTGAGTTAATTAT | |
| | | | CTTTAAACCGTTTTAAAATGA | |
| | | | TTGTACACAAAAGGTCCTAGT | |
| | | | TTTATCCAGCCTTAATACTATT | |
| | | | AAAAATTATCCCTTGATAAAC | |
| | | | TACACGTTGGGTTAATTGTAA | |
| | | | AAGTTGGTTTAGGTTCCGAAT | |
| | | | GAAGTGTAATCAACAGCTTAT | |
| | | | TTTTAAAGAAAAC (SEQ ID | |
| | | | NO: 6107) | |
| Lby_ | TTTTTTTAGGGGCT | AAAGATTTTTTTAGG | AAAGATTTTTTTAGGGGCTGT | (T)TG |
| dCas12f | GTCCGCACAGCCTT | GGCTGTCCGCACAGC | CCGCACAGCCTTAGGTTGGG | |
| native | AGGTTGGGGCTATT | CATAGGTTGGGGCTA | GCTATTCGCACTCAATAAGTG | |
| | CGCACTCAATAAGT | TTCGCACTCAATAAG | AAAGCATGCGGTTAAGGCGT | |
| | GAAAGCATGCGGTT | TGAAAGCATGCGGTT | GAGAAACCTACATCTAAGCTT | |
| | AAGGCGTGAGAAA | AAGGCGTGAGAAAC | GTAATTCCAGTTTTTGTGGCG | |
| | CC (SEQ ID NO: 6088) | CTACA (SEQ ID NO: | TTTAACTGGACTTTTGGGATT | |
| | | 6098) | ATTTCGGGGATTTATTTTCTTT | |
| | | | TTCAAATGAATTTTCATTTTCC | |
| | | | ATTTGCGCTGATAAAAGTACA | |
| | | | CGTCTACATTTGAAACTATAG | |
| | | | TTAACCTATAGAATAAATATAT | |
| | | | TAAAT (SEQ ID NO: 6108) | |
| Mri_ | CTGTCAATAAAATAT | CTGTCAATAAAATATG | CTGTCAATAAAATATGAGGCT | (G)TG |
| dCas12f | GAGGCTGCTTGTAC | AGGCTGCTTGTACAG | GCTTGTACAGCCGTAGGGTGT | |
| native | AGCCGTAGGGTGTG | CCGTAGGGTGTGGCC | GGCCTTGTTGCCTCACTGAAT | |
| | GCCTTGTTGCCTCA | TTGTTGCCTCACTGA | ATGGATTGAACCTGAGATCAC | |
| | CTGAATATGGATTG | ATATGGATTGAACCT | ATCTGTATATACAACGGCTCG | |
| | AACCTGAGATCACA | GAGATCACATCTGTAT | CTTATCGTGTAAAAATAAGCT | |
| | TCTGTATATACAACG | ATACAACGGCTCGCT | TTCTATAAGTTGTACGGTTAA | |
| | GCTCGCTTATCGTG | TATCGTGTAAAA (SEQ | GTTATAAGCAGAACTTATAGT | |
| | T (SEQ ID NO: 6089) | ID NO: 6099) | (SEQ ID NO: 6109) | |
| Cgl_dCas12f | ATATCGAGGGTGCT | CTGAAAAATATCGAG | CTGAAAAATATCGAGGGTGCT | (A)CCCT |
| native | TGTACACCCGTAGG | GGTGCTTGTACACCC | TGTACACCCGTAGGGTGAGG | |
| | GTGAGGTCTTGGAC | GTAGGGTGAGGTCTT | TCTTGGACACTCACTAAATAC | |
| | ACTCACTAAATACT | GGACACTCACTAAAT | TCTTGTAGCATATACAACGGC | |
| | CTTGTAGCATATACA | ACTCTTGTAGCATATA | GTGGGCTCTTTTACAAAGAA | |
| | ACGGCGTGGGCTCT | CAACGGCGTGGGCTC | AATATGAATTGGCGACTTCAT | |
| | TTT (SEQ ID NO: | TTTTACAAA (SEQ ID | TAAATAGACCCCTTTAATTTT | |
| | 6090) | NO: 6100) | GAGGATCTTGAAAAACACAA | |
| | | | CTTCTCAATTAATTATAAGAA | |
| | | | AGAGGCGGTATTATTTTGTAG | |
| | | | CATAGAATATTTTAGCAGAAA | |
| | | | TCTTTA (SEQ ID NO: 6110) | |
| Zpr_dCas12f | TTAAAAATGAGGGT | AATTAAAAATGAGGG | AATTAAAAATGAGGGTGCTTG | TGA |
| native | GCTTGTACACCCGT | TGCTTGTACACCCGT | TACACCCGTAAGGTGAGGTCT | |
| | AAGGTGAGGTCTCA | AAGGTGAGGTCTCAA | CAATGGCACTCACTAAATGCA | |
| | ATGGCACTCACTAA | TGGCACTCACTAAAT | GGCAGCATATACAACAAAAA | |
| | ATGCAGGCAGCATA | GCAGGCAGCATATAC | CCTTCCCTTTTTTTAGGCATTG | |
| | TACAACAAAAACCT | AACAAAAACCTTCCC | AGGTATGAAGGATGAAGACA | |
| | TCCCT (SEQ ID NO: | TTTTTTTA (SEQ ID | ACTGGAATTATGATGAACAGA | |
| | 6091) | NO: 6101) | AATATTTAGGCTTGGTCATTG | |
| | | | AAAATCAA (SEQ ID NO: 6111) | |
| Cba_dCas12f | ATAACGAGGGTGCT | AAAAAATAACGAGG | AAAAAATAACGAGGGTGCTT | CCN |
| native | TGTACACCCGCAGG | GTGCTTGTACACCCG | GTACACCCGCAGGGTGAGGT | |
| | GTGAGGTGTTGAAC | CAGGGTGAGGTGTTG | GTTGAACACTCACTAAATACT | |
| | ACTCACTAAATACT | AACACTCACTAAATA | CAGTGAGTATATACAACGGCG | |
| | CAGTGAGTATATAC | CTCAGTGAGTATATAC | TGGGCTCTTTTTTTACTTATGT | |
| | AACGGCGTGGGCTC | AACGGCGTGGGCTCT | TTTAAAATACTTCAAACGCTC | |
| | T (SEQ ID NO: 6092) | TTTTTTA (SEQ ID NO: | ATTAATAAATTAAAGGATTACT | |
| | | 6102) | TCAGGGTAATAACTTTTATATT | |
| | | | TAAGGCTCAACCATCTAGTTG | |
| | | | AGCCTTAAATATGAATTACAA | |
| | | | ATGTACTTTTACAGCATCTCT | |
| | | | GTTTTTTAAATACTTATAAATA | |
| | | | GCATTA (SEQ ID NO: 6112) | |
| Pba_dCas12f | TAAAAATACAATTAT | TAAAAATACAATTATG | TAAAAATACAATTATGAGGGT | (CT)TG |
| native | GAGGGTGATTGTAC | AGGGTGATTGTACAC | GATTGTACACCCGTAGGGTGA | |
| | ACCCGTAGGGTGAG | CCGTAGGGTGAGTTT | GTTTGGTTGGCAACACTCACT | |
| | TTTGGTTGGCAACA | GGTTGGCAACACTCA | AAATGCACAGGCATATACAAC | |
| | CTCACTAAATGCAC | CTAAATGCACAGGCA | GCGTGGCTTACTTGTTTTTAA | |
| | AGGCATATACAACG | TATACAACGCGTGGC | TAAGCGTATCAGCAAAAATTG | |
| | CGTGGCTTACTTGT | TTACTTGTTTTTA | CACGAAAAATTTCAGGATTAT | |
| | T (SEQ ID NO: 6093) | (SEQ ID NO: 6103) | TTTTTTGACGATTTATAATCTA | |
| | | | ACGATAAGGAAACTCAATA | |
| | | | (SEQ ID NO: 6113) | |

[0287] The scope of the present disclosure is not limited by what has been specifically shown and described hereinabove. Those skilled in the art will recognize that there are suitable alternatives to the depicted examples of materials, configurations, constructions, and dimensions. Variations, modifications, and other implementations of what is described herein will occur to those of ordinary skill in the art without departing from the spirit and scope of the invention.

[0288] Numerous references, including patents and various publications, are cited and discussed in the description. The citation and discussion of such references is provided merely to clarify the description and is not an admission that any reference is prior art to the embodiments described herein. All references cited and discussed in this specification are incorporated herein by reference in their entirety.

1. An engineered system comprising:
a polypeptide comprising a TldR protein, a dCas12f or dCas12f-like protein, and/or a TnpB-transposase fusion protein, or one or more nucleic acids encoding thereof; and
at least one guide RNA, or one or more nucleic acids encoding thereof, wherein the at least one guide RNA is complementary to at least a portion of a target nucleic acid.

2. The engineered system of claim 1, wherein the TldR protein comprises an amino acid sequence having at least 70% identity to any of SEQ ID NOs: 1-508 and 1768-5926, wherein the dCas12f or dCas12f-like protein comprises an amino acid sequence having at least 70% identity to any of SEQ ID NOs: 6026-6042, and/or wherein the TnpB-transposase fusion protein comprises an amino acid sequence having at least 70% identity to any of SEQ ID NOs: 1453-1539.

3. The engineered system of claim 1, wherein the TldR protein and/or the dCas12f or dCas12f-like protein is linked or fused to one or more effector polypeptides.

4. The engineered system of claim 1, wherein the at least one guide RNA is provided on an omega RNA.

5. The engineered system of claim 1, further comprising a donor nucleic acid, wherein the donor nucleic acid is optionally flanked by at least one transposon end sequence.

6. The engineered system of claim 1, further comprising a target nucleic acid.

7. The engineered system of claim 1, wherein the system is a cell-free system.

8. A protein conjugate comprising:
a TldR protein or a dCas12f or dCas12f-like protein; and
one or more effector polypeptides.

9. The protein conjugate of claim 8, wherein the TldR protein comprises an amino acid sequence having at least 70% identity to any of SEQ ID NOs: 1-508 and 1768-5926, or Docket No. COLUM-42528.303 wherein the dCas12f or dCas12f-like protein comprises an amino acid sequence having at least 70% identity to any of SEQ ID NOs: 6026-6042.

10. A composition comprising a system of claim 1.

11. A cell comprising athe system of claim 1.

12. A method for DNA modification comprising contacting a target nucleic acid sequence with a system of claim 1.

13. The method of claim 12, wherein the target nucleic acid sequence is flanked by on the 5′ end by a transposon-adjacent motif (TAM) sequence.

14. The method of claim 12, wherein the target nucleic acid sequence is in a cell and the contacting a target nucleic acid sequence comprises introducing the system into the cell.

15. The method of claim 14, wherein the introducing the system into the cell comprises administering the system to a subject.

16. A composition comprising a protein conjugate of claim 8.

17. A cell comprising a protein conjugate of claim 8.

18. A method for DNA modification comprising contacting a target nucleic acid sequence with a protein conjugate of claim 8.

19. The method of claim 18, wherein the target nucleic acid sequence is in a cell and the contacting a target nucleic acid sequence comprises introducing the system into the cell.

20. The method of claim 19, wherein the introducing the system into the cell comprises administering the system to a subject.

The application's sequence listing, which the Patent Office published only in electronic form, follows.

SEQUENCE LISTING (6168 sequences)

SEQ ID NO: 1 - protein, 310 aa, unidentified
MIKKQAFKFLLEPNKGQLSDFLAFAGSCRFVYNKGLALLNENYRSGKKFIGYIQLASELVEWKNEESLSWLKEAPSQCLQQSLRDLDRAFRNFFTGKSQYPKFKKKGRHDSFRIPCQRVRVDQEKKLVSLPKVGWVKYRKSREIIGDLKNATISLNQGKWYISFNTEQTVPDPIHPSDIKSTIVLNNVDSVHLSSGGGGDNTYQAEEKKKLIRLNKTLTRRKKHSQNWLKTKGKIDRVKSKAARIRLDNIHKATTAICKNHAVVEVVNLMDSVSDKNDNTLSMRYEFVRQLIYKQEWLGGEVIRRESKPL

SEQ ID NO: 2 - protein, 285 aa, unidentified
KDKHGWYVKFPKAVLQAGCVRDRYDLGKMDLHEQKLKEVRLIPNGDTIKLEIVCEIEIKEPTITIHEATRVTGIDIGVDNLMAIAFTSGHHPVLIKGNEIKAVNQYYNKQIAHYRSLLRTGKKDSKGIHQTKRMKRISEKRNRRVKDILHKASRKIINLCVEEGIEVIVVGNNAGWKKRIHMGKKNNQTFVQIPFRTLIEMIKYKGEAAGIRVVVCEEAIQSKASSIDEDQIPVYGNDVAHTFTGKRIKRGLYRSKWHSNECRYQWSKQYHTKSISMYARARAME

SEQ ID NO: 3 - protein, 337 aa, unidentified
MLLFAGACRFVYNKGLALLKESYESGQKHMHYNQLAPLLVEWKSDPALSWLKQAPSQSLQQSLRDLDKAFSNFFYGKAEHPRFKKKGQHDAFRFPSQRVKVDQEKQLVLLPKLGWVKYRKSRNITGAIKNVSISGKLGNWYISFNTQTDIAEPIHPAISKIGVYVDTKKNITLSDGTQYIPPQSLITLPKQIQRLTNCLRKKNRYSNNWLKSKHRINRLSSRLNQVKVDYLHKASTAISKNHAMIVIADFEKKSFSADKQQKNLTTCEKSTSIHYELIRQLTYKQEWHGGLVIKLSAEKNVDAESAWTKACNLLAAGLAVTACGGEVSKDSPMKQEP

SEQ ID NO: 4 - protein, 257 aa, unidentified
MVLKHKAYKFRIYPTKEQEILIAKTIRCSRFVFNHFLSKWDETYKTTGKGLSYGSCSKEIPLLKQEFDWLKEVDSTSVQMSVKHLADAFDRFFNKQNKRPRFKSKRHPVQSYKTNVQGKNQLPEVSIFGNKLKLPKLKWVRFAHSKQITGRILNATIRRNASGKYFVSLLVEHAILSDGTVYKNDRYFRLLEKKLVREQRKLSRRQRIALNKKVKLSEARNYQKQKQRVARIHEKIANGYRPRSSKTTTSSGLRPCR

SEQ ID NO: 5 - protein, 503 aa, unidentified
MRTVEFKLSLNRYQQAKVDSWLAIQRWIWNQGLHLLEEFNSFSTWDKVSQTWVPCCPIPWTYYRDSVGQLIAFTRIAKKKPYRMSCPIPQVYPKPVLESPTFFGLLYYFAQKNHSDKPWFCDVPCRFVAGTLKSLADAWTAYKSGKRQRPRYKQYKDKFRTLINNNAKPIKISGKRITLPKLGKVTVKTLDRRWLKSVPIVTLKIVKEPSGYYLQLSGCFPVNKEKPTNKAVGVSLGYSHLTTDGEKVVEPPNFYRKMEKQLVQLQRQLCRQQKTCPISTYNPSLGEHFLSCPIDPGKGANRAKTQRKISRLYEKIRRSRLATNHKISTYLVREYDAIAIVKPEIKRITRKPIAIVNKLGEFEHNGANHKAEFSKGLLDNSLGQLAGLIKQKASVQGRELISVSPKDLPDELKQCTEKRREQLQWSRAVYSTNFSRRYRAWEWELTPGESTETLNQEPPQGGLSCDAGTTSNFILESIGLCGVGDIPETIPLLQNQSEANSSY

SEQ ID NO: 6 - protein, 251 aa, unidentified
MLLFAGACRFVYNKGLALLKESYESGQKHMHYNQLAPLLVEWKSDPALSWLKQAPSQSLQQSLRDLDKAFSNFFYGNAEHPRFKKKGQHDAFRFPSQRVKVDQEKQLVLLPKLGWVKYRKSRDITGDIKNVSISGKLGKWYISFNTQTDIEEPVHPAISKIGVYVDAKKNITLSDGTQYIPPQSLITLPKQIQRLTNCLRKKNRYSNNWLKSKHRINRLSSRLNQVKVDYLHKASTAISKNHAGDAANLLI

SEQ ID NO: 7 - protein, 372 aa, unidentified
MAIKATRTYVGSIKNHQQVCDGLDSLGDSASKIWNVARWTADRIWDATGEIPDSGALKSYMKNQPCWKDLNAQSSQKVIEELSDAFQSWFDLRHKFDEANPPGYRKHGNTRPRSTVTFKEDGFKHDPENDRVRLSKGSNLKKHFSDFLLCEYQTRPDVDLSEVNSVQNVRAVWNGDEWELHFVCDVELESADTAGDGIAGIDLGITNIATVAFPDEYVLYPGNSLKEDKHYFTRAEYDTEGESGPSEQSMWARRKLSKRETHYYHTLTDAIIAECVERGVGTLAVSWPEDVRASDXVRLGQDREQEAPLVGVRPHLPVPRIQRRDAGCRGTERERVEHLENVFTMWRRHEIEPCRTWPVRLFVVRVGSQRRL

SEQ ID NO: 8 - protein, 310 aa, unidentified
MIKKQAFKFLLEPNKGQLSDFLAFAGSCRFVYNKGLALLNENYRAGKKFIGYNKLASELVEWKNEESLSWLKEAPSQCLQQSLRDLDRAFRNFFTGKSQYPKFKKKGRHDSFRIPCQRVRVDQEKKLVSLPKVGWVKYRKSREIIGDLKNATISLNQGKWYISFNTEQTVPEPIHPSDIKTTIILNNVNSVHLSSGVGGDNTYQAEEKKKLVRLNKTLTRRKRYSKNWLKTKGKIDRVKSKAARIRLDNIHKATTAICKNHAVVEVVNLMDSVFDKNDNTLSMRYEFVRQLIYKQEWLGGEIIRRESKLL

SEQ ID NO: 9 - protein, 277 aa, unidentified
MQHLDGFFKLRDQIDYRALPAQANQNVLHMLYRDWKSFFAALADYKAHPDKYEAIPHIPRYADKDGCKPLIFTNQICKLRKDKHGWYVKFPKAVLQAGCVRDRYDLGKMDLHEQKLKEVRLIPNGDTIKLEIVCEIEIKEPTITIHEATRVAGIDIGVDNLTAIAFTSGHHPVLIKGNEIKAVNQFYNKQIAHYRSLLRTGKKDSKGIHQTKRMKRISEKRNRRVKDILHKASRKIIDLCVEEGIEVIVVGNNAGWKKRIHMGKKNNQTFVQIPFHT

SEQ ID NO: 10 - protein, 365 aa, unidentified
MAIQVTRTYVGHITNQQRVRDDLDLLGDAASKLWNVARWTVDRVWDAIGEIPDEGSLKAYMKTRECWKNLNAFSSQKVIEELSDAFQSWFDVRHKDETANPPGYRKEYDTRPRSTVTFKANGFKHDPDHDQVRLSKGANLKDGRSDFVLCEYDTRNDVDLGTVDTVQNVRAVWNGDEWEIHFVVKETIETPEPPGDGVAGVDLGVSNIAAVAFPDKYVLYPGNTIKQDNHYFQQEEYDTEGENGPSKQAQRLRQKRKRRETHFYHTLTKTIIEKCVDRGIGTLVVGWPEDVRSDDLGKTANKWLHTRAFDRLYQYLNYKGKEHDVEVLKENEWNTSKTCCECGDIADSNRVERGLYVCDSCGLVA

SEQ ID NO: 11 - protein, 308 aa, unidentified
MIKKQAFKFLLEPNKTHMNDFLVFAGSCRFVYNKGLALINENYDSGKKFLNYNQLASELVNWKNEECLAWLKMAPSQCLQQSLRDLDRAFKNFFSGKSQYPRFKKKGRNDSFRVPCQRVRLDQEKHLVSLPKLGWVKYRKSREITGVLKNVTISRKLDKWYISFNTEEVVPEPLHPSFSKTKILLNNEWLMQLTACESLVEQFANMEGNKKLRNLNNILGRKVKYSSNWLKTKKKIDGVKARSSRRRLDALHKITTAICKKHAIVELVNLTDSLPDKNNGSVSMTYEFVRQLMYKQEWLGGKVIRLGD

SEQ ID NO: 12 - protein, 257 aa, unidentified
MHRAYKFRLYPNKKQVMLINKTIGCTRFVFNHFLAKRKNVYEQEKKTLNYHECPAMLTQLKKEIEWLKEVDSTALQSTLKDLDSSYKKFFKEKKGYPKFKSKKNPKQSYTCKMNIKVEGNRIKLPKLGWVEFAKSREVEGRIRSATIRRNPSGKYFVSVLCETDIQPHPQIEQTVGVDLGIKDFAILSTGEKVANPKYYRKYEKQLAKWQRIQSRRQKGGKNRNKARIKVARLHEKIANTRNDFLHKLSTESVKYFV

SEQ ID NO: 13 - protein, 310 aa, unidentified
MIKKQAFKFLLEPNKGQLSDFLAFAGSCRFVYNKGLALLNENYRSGKKFIGYNQLASELVEWKNEESLSWLKEAPSQCLQQSLRDLDRAFRNFFTGKSQYPKFKKKGRHDSFRIPCQRVRVDQEKKLVSLPKVGWVKYRKSREIIGDLKNATISLNQGKWYISFNTEQTVPDPIHPSDIKTTIVLNNVNSVHLSSGVGGDNTYQAEEKKKLIRLNKTLARRKKYSKNWLKTKGKIDRVRSKAARIRLDNIHKATTAICKNHAVVEVVNLMDSVSAKNDKTLSMRYEFVRQLIYKQEWLGGEIIRRESKLL

SEQ ID NO: 14 - protein, 358 aa, unidentified
MADYEAVKVPLDPTPAQERMFRMYAGAARFAYNAALAHMKEQLDERKAQIEAGVAKKDLVKIDNNVVKFGYWWRANRDTLAPWWPEVASQVFNCAFDNLGHASANFLKSLSGKRQGGPVGFPKFKPRAAAKAFAFSTITIPDAHGVKLPRIGRVHTLRNVERLVAGRATKTTTIRCEAGRWYASILCETPTPTPPVNTKPEVWVVFGLDEYIALSDGTRLTNPRPYRHALADLRKASRDLSRKTHGSARYMDQQRKVARIHKRVKALRDNALHAASKQLAEHYGVIHVQRIHLARGMRHHVLAQSLADAAFAEFTRQLTYKTARTGASMHMHEPMTVEQHVDAMALAQRLATGPLPDA

SEQ ID NO: 15 - protein, 310 aa, unidentified
MIKKQAFKFLLEPNKGQLSDFLAFAGSCRFVYNKGLALLNENYRSGKKFIGYNQLASELVEWKNEESLSWLKEAPSQCLQQSLRDLDRAFRNFFTGKSQYPKFKKKGRHDSFRIPCQRVRVDQEKKLVSLPKVGWVKYRKSREIIGDLKNATISLNQGKWYISFNTEQTVPDPIHPSDIKSTIVLNNVDSVHLSSVVGGDNTYQAEEKKKLILLNKTLTRRKKHSKNWLKTKGKIDRLKSKAARVRLDNIHKATTAICKNHAVVEVVNLMDSVSDKNNNTLSMRYEFVRQLIYKQEWLGGEVICRESKPL

SEQ ID NO: 16 - protein, 310 aa, unidentified
MIKKQAFKFLLEPNKGQLSDFLAFAGSCRFVYNKGLALLNENYRAGKKFIGYNKLASELVEWKNEESLSWLKEAPSQCLQQSLRDLDRAFRNFFTGKSQYPKFKKKGRHDSFRIPCQRVRVDQEKKLVSLPKVGWVKYRKSREIIGDLKNATISLNQGKWYISFNTEQTVPEPIHPSDIKTTIVLNNVNSVHLSSGVGGDNTYQAEEKKKLVRLNKTLARRKRYSKNWLKTKGKIDRVKSKAARIRLDNIHKATTAICKNHAVVEVVNLMDSVFDKNDNTLSMRYEFVRQLIYKQEWLGGEIIRRESKLL

SEQ ID NO: 17 - protein, 310 aa, unidentified
MIKKQAFKFLLEPNKGQLSDFLAFAGSCRFVYNKGLALLNESYRSGKKFIGYNQLASELVQWKNEESLSWLKEAPSQCLQQSLRDLDRAFRNFFTGKSQYPKFKKKGRHDSFRIPCQRVRVDQEKKLVSLPKVGWVKYRKSREIIGDLKNATISLNQGKWYISFNTDQTVPDPIHPSDIKTTIVLNNVNSVHLSSGVGGDNTYQAEERKKLIRLNKTLARRKKYSKNWLKTKGKIDRVRSKAARIRLDNIHKATTAICKNHAVVEVVNLMDSVSAKNDKTLSMRYEFVRQLIYKQEWLGGEIIRRESKLL

SEQ ID NO: 18 - protein, 358 aa, unidentified
MSDYEAVRIPLDPTPAQERMFRMYAGAARFAYNAALQHMKEQLEQRKAQVDAGVDRKDLVKVDNTVITLGYWWRANRDMLAPWWPEIASQVYNCAFDNLGKAAGNFLKSLSGKRQGGLVGFPRFKPRGAAKTFAYSTVTIPDAHGVKLPRIGRVHTLRNVERLVAGRTVKTTTVRCEAGRWYASILCETPRPSPAVNTSPEVWCVFGLDDYIALSDGTRIDNPRPYRQALDRLRKVSRDLSRKTHGSGRYMEQQRKVARIHARVKALRNTMLHEASKRLAEQYGTIHIQQVNLARGMKHHVLAQSLADAAFAEFTRQLEYKTVKTGASVHVHEPMIVERHVDGMVLARQLASGPSSDA

SEQ ID NO: 19 - protein, 507 aa, unidentified
MPNEKKNDEEHGVRLSYKFRIYPTPSQCEAIKANIDASRFVYNHYLRARMDAYERTQQEVRRPKPACDEQGNVQYDQDGKEIWERTEGGKVVFHTVPNPTYDPAAKAMSMFDTSKDLTRLKKELVDEDGKPWLKEADATALIYALRNLDTAYQNFFRGIKKGQDVGFPKFKSRKNPVQTYKSGNVKLAGCDLDDGKAEAAVAEIPSPIPADWDLAGISWNGIVLPKIGKVRARIHRIPEGKFVSCTVERKASGAYYASINVKERELPAYPAATGEVGITFGASHWAVTSDGQVMDLPERIGRLQRRLAIAQRDLARKEPGSQNYLKQKRKVARVNERIADVRKAATHNATRELVNGYGTIAARQMNSKDMQQHGSAATKDLPRKVKKMLNRKMIDGNFAEFNRQLAYKSAWANRSFVEVPGDTPTAQVCSRCGHEELVLARDLRPAWTCSECGAKHDRKANGAQNVLEAGKDILAKQERSFVTKAKKSREKKRATKPISTAREGASR

SEQ ID NO: 20 - protein, 308 aa, unidentified
MIKKQAFKFRLEPNKSQSSDFFMFAGSCRFVYNKALALLNDNYHSGKKFMGYNQLATELVEWKSEESLSWLKASPSQCLQQSLRDLDRAFRNFFSGKAQYPKFKKKGRHDSFRIPCQRVRVDQDKKMVSLPKVGWVKYRKSREIIGELKNVTISMKQDKWYISFNTESMVPDPMHPSDIKTKIVLSDQCEFPIRLDSSMDSSHQLDEVKKLARLNRILIRRIKYSSNWLKTKGKIDRIKARLARCRLDNIHKVTTAICKKHAVVEVLSLMDSVSDKNDITLSMRYEFVRQLIYKQEWLGGEVIRRELA

SEQ ID NO: 21 - protein, 310 aa, unidentified
MIKKQAFKFLLEPNKGQLSDFLAFAGSCRFVYNKGLALLNENYRSGKKFIGYNQLASELVEWKNEESLSWLKEAPSQCLQQSLRDLDKAFRNFFTGKSQYPKFKKKGRHDSFRTPSQRVRVDQEKKLVSLPKVGWVKYRKSREIIGELKNVTISMKQGKWYISFNTEHTVPDPIHPSDIKTKIVLNNVNSVHLSSGIGGDNTSQAEEKKKLIRLNKRLARRKKHSKNWLKTKGKIDRVKSKAARLRLDNIHKATTAICKNHAVIEVVNLMGSVSDKNDNTLSMRYEFVRQLIYKQEWLGGEVIRRESKPL

SEQ ID NO: 22 - protein, 305 aa, unidentified
MIKKQAFKFLLEPNKSQSSDFLAFAGSCRFVYNKGLALLNENYRSGKKFIGYNQLASELVEWKNEESLSWLKEAPSQCLQQSLRDLDKAFRNFFTGKAQYPNFKKKGRHDSFRIPCQRVRVDQEKKLVSLPKVGWVKYRKSREIIGDLKNVTISMKHGKWYISFNTEHTVPDPIHPSDIKTTIVLNNENSVHLSTRVGGANTYQAEEKKKLVRLNKILARRKKHSNNWLKTKGKIDSVISKSARIRLDNIHKATTAICKNHAVVEVVNLMDSVSDKNDNTLSMRYEFIRQLIYKQEWLGGEIIRR

SEQ ID NO: 23 - protein, 308 aa, unidentified
MIKKKAFKFLLEPSKSQISDVLVFAGACRFVYNKGLALLSENYNNGKPFLNYNKLAPLLVEWKNDNKLEWLKLCPSQCLQQSLRDLDRAFQNFFSGRSQYPRFKKKGRSDSFRVPCQRVRLDQEKGLVSLPKLGWVKYRKSRAITGDLKNVTVSRKFDKWYISFNTEEVVSNPVHPSVDKTRILLNDGYVTLCTGGDLSVKKFTSLVDEKKIKRLNKELSRKVKNSNNWLKNKKKIDKIRLKSGIFRLDAIHKITTTICKKHAVVEVVNVKNFVSDKNNIATSMRNELVRQLLYKQEWLGGKIIHLDA

SEQ ID NO: 24 - protein, 334 aa, unidentified
MIKQQAFKFALKLNEQQKANMLLFAGACRFVYNKGLALLKESYESGQKHMHYNQLAPLLVEWKSDPALSWLKQAPSQSLQQSLRDLDKAFSNFFYGNAEHPRFKKKGQHDAFRFPSQRVKVDQEKQLVLLPKLGWVKYRKSRDITGDIKNVSISGKLGKWYISFNTQTDIEEPVHPAISKIGVYVDAKKNITLSDGTQYIPPQSLITLPKQIQRLTNCLRKKNRYSNNWLKSKHRINRLSSRLNQVKVDYLHKASTAISKNHAMIVIADIEKKSFSADKQQKNITTCEKSTSIHYELIRQLTYKQEWLGGLVIKLPAEEQKLQRKTRHHEQNVR

SEQ ID NO: 25 - protein, 604 aa, unidentified
MAAKSNPAGPGHGPAAVTMPKTEVLRAYRFALDPSGAERAALSRYAGACRWAYNYALARKTRAHQAWADRRSAYLEAGLSEAEAKERIRADGAELTDRIKVWDHHRKTLTLTVADKPPLPAMQSPAGQEALVRRLAAARADAAGTSSERELLAEGRAMVNALKAQAFTAGFRTPTAIDTSALWRMDRDLPQQEGGSPWWREVNVYCFTSGFDRAQAAWKNWQDSLAGRRAGQRHGYPRFKKKGHTESFTLFHDVKRPIIRLESYRRLVMPGLGSIRIHDSGKRLARLVERGQAVIQSVTVTRGGHRWYASVLAKVQQDVPVLWEHVHDDGTRTSYLSRTQAEKAADNGGHVEQIGRPTARQRAGGLVGVGLGSHYLAALSSPLDPADPATALVQHPRLLADSLAKLSKAQRAMSRCQQGSGRWSKATAGVCRIHQQITVRRASFLHGLSKKLATGFTHVAIEDLDITALTTSAKGTRDKPGKNVKAQARFNRHLLDAGLGSLRKKLAYKTAWYGSQLVVLDQGEPVTATCAKCKERNPSSDPSCSTFHCPSCGAAVHRHENSTANIVDAAHRKLTTVASDRGETQNARRATASPAARKAPGKGQ

SEQ ID NO: 26 - protein, 604 aa, unidentified
MAAKSHPAGRGHGPAAVTMPRAEVLRAYRFALDPSGAERAALSRYAGACRWAYNYALARKMRAHQAWADRRSAYLAGGLSEAEAKERIRADGAELTDRIKVWDHHRKTLTLTVAGKPPLPAMQCPAGQEALVRRLAAARADAAGTGSERELLAEGRAMVNALKAQAFTAGFRTPTAIDTSALWRMDRDLPQQEGGSPWWREVNVYCFTSGFDRAQAAWKNWQESLAGRRAGRHHGYPRFKKKGHTESFTLFHDVKRPIIRLESYRRLVMPGLGSIRIHDSGKRLARLVERGQAVIQSVTVTRGGHRWYASVLAKVQQDVPVLWEHVHDDGTRTSYLSRTQAEEAAGSGGHVEQIGRPTARQRAGGLVGVGLGSHYLAALSSPLDPADPATALVQHPRLLADSLAKLSKAQRAMSRCQQGSRRWSKATAGVSRIHQQITVRRASFLHGLSKKLATGFTHVAIEDLDITALTTSAKGTRDEPGKNVKAQARFNRHLLDAGLGSLRKKLAYKTAWYGSQLVVLDQGEPVTATCAKCKERNPSSDPSCSTFHCPSCGAAVHRHENSTANIVDAAHRKLTTVASDRGETQNARRATASPGARKAPGKGH

SEQ ID NO: 27 - protein, 437 aa, unidentified
MSIYKNFEYRVYPTDEQKKWFEEHFEVNRFLYNHLLSMSIKKYNTEVDERFLRLIKDIDFYSEKIQQWTQIDYEKLYKKAKKGVKIYSKNEFSKLITKAVNNPDFPWVNKSYDGRAMREVATSVDTAYKNFFKGKDFPRFKKKYSVRTLRFPVSKQGEWYSIRFESDKILVLPKKIKLRIVQHRPFEGEVIAATIKKAQSGKWFVTILSRVDPPTQLIKTGDIIALNRGVREYMIGYDSNHKLINYAPFVKDPTLISKINKLHKKLSQKYKSAKQESRSLRDSKNYQKNKESLARLYEKLKFQKEYYLQQLSRKIIEDYDLIILESLSIKELASSNIGEKVKSGERIVQRRFSKKIMGMSHYRLETLLKEKAELYGKRVVMLPKGFNSNGVCSECGTIFEESIPLNNKEFICPNCNIKITRGENSVKNILREGMKYL

SEQ ID NO: 28 - protein, 266 aa, unidentified
MQLRYSFRLYPRPGQRAALARAFGCARVVFNDAVRAREDARRQGVPFPKAADLSRTLITQAKQTAERSWLGEVSAVVLQQSLRDAESAYRNFFASLKGERKGPKLGAPRMKSRKDARQSIRFTTNARWSLTPAGRLNLPKIGEVRVRWSRTLPAVPSSVTVIKDAAGRYFASFVIDTDPAADAARVPKADQSIGIDLGLTHFAVLSDGTKIDSPRFLRRAEKKLKKAQRELSRKQKGSKNREKARWKVARAHAKVTDARRDFHHQL

SEQ ID NO: 29 - protein, 256 aa, unidentified
MQLRYSFRLYPQPGQRTALAKAFGCARVVFNDAVRAREDARRQGLPFPKAADLSRTLITQAKQTAERSWLGDVSAVVLQQSLRDAESAYRNFFASLKGERKGPKLGAPRMKSRKDARQSIRFTTNARWSITPGGRLNLPKIGEVRVKWSRTLPAVPSSVTVIKDAAGRYFASFVIDTDPAADLEQMPDAETSIGIDLGLTHFAVLSDGTKIDSPRFLRRAEKKLKKAQRDLSRKQKGSKNREKARWKVARAHAKVT

SEQ ID NO: 30 - protein, 256 aa, unidentified
MQLRYSFRLYPQPGQRTALARAFGCARVVFNDAVRAREDARRQGLPFPKAADLSRTLITQAKHTAERSWLGEVSAVVLQQSLRDAESAYRNFFASLKGERKGPKLGAPRMKSRKDARQSIRFTTNARWSLTPAGRLNLPKIGEVRVKWSRTLPAVPSSVTVIKDAAGRYFASFVIDTDPAADAARMPKADQSIGIDLGLTHFAVLSDGTKIDSPRFLRRAEKKLKKAQRDLSRKQKGSKNREKARLKVARAHAKVT

SEQ ID NO: 31 - protein, 267 aa, unidentified
MEIKRAYKFRFYPTFEQATMLAQTFGCAGFVYNRMLLVRSDAGYTEKKRIGCHATSSLLTKLKKEPEFEWLNKAPSVPVQQSLRHLQTAFGNFFAKRAKYPSFKRKYGRHSAEYTSSAFKWDGKSLKLEKMKDPLNIRWSCTLPKAAKLTTAMISKDLTGRYRVSMLCDDSVALKPKVSGKVGIGLGLTHFAILSTGEIVGIERWYPSSKRCLGCGHTVNKMPLNAREWTCPECGSIHDRDINAARNVLAAGLAVPVLGESISPVCI

SEQ ID NO: 32 - protein, 314 aa, unidentified
MLLFAGACRFVYNKGLALLKESYESGQKHMHYNQLAPLLVEWKSDPALSWLKQAPSQSLQQSLRDLDKAFSNFFYGNAEHPRFKKKGQHDAFRFPSQRVKVDQEKQLVLLPKLGWVKYRKSRDITGDIKNVSISGKLGKWYISFNTQTDIEEPVHPAISKIGVYVDAKKNITLSDGTQYIPPQSLITLPKQIQRLTNCLRKKNRYSNNWLKSKHRINRLSSRLNQVKVDYLHKASTAISKNHAMIVIADIEKKSFSADKQQKNITTCEKSTSIHYELIRQLTYKQEWLGGLVIKLPAEEQKLQRKTRHHEQNVR

SEQ ID NO: 33 - protein, 340 aa, unidentified
MNQSVSNPTHLRTLRLRVKDKHAAELARQARAVNYVWNYINELSERSIRERGVFLSAFDLHRYTTGASKALGLHSHTVQKTSASYVQARIQFRKRKLAWRKSGGVRRSLGWVPFNTGHARWRNGQVHFNGTAYGVWDSYGLAGFTLRSGSFSEDSRGRWYFNVAVETETKLSAGKSVIGIDLGCKEAATASNAEKLRGRWYRDDEKALATAQRAGKKRQVKKIHARIKNRRKEDTHQFTTGLVEKSGAIFVGNVSSKAMVKTNMAKSALDAGWYSLKKTLEYKCASAGVLYQEVNEAYSTRTCSECGALSGPKGLKELGISGPRRGNGAVLSVEARTTAM

SEQ ID NO: 34 - protein, 310 aa, unidentified
MIKKQAFKFLLEPNKGQLSDFLAFAGSCRFVYNKGLALLNENYRSGKKFIGYNQLASELVEWKNEESLSWLKEAPSQCLQQSLRDLDRAFRNFFTGKSQYPKFKKKGRHDSFRIPCQRVRVDQEKKLVSLPKVGWVKYRKSREIIGDLKNATISFNQGKWYISFNTEQTVPDPIHPSEIKTTIALNNVYSVHLSSGVGGDNTYQAEEKKKLIRLNKTLTRRKKYSKNWLKTKGKIDRVRSKAARIRLDNIHKATTAICKNHAVVEVVNLMDSVSAKNDNTLSMRYEFVRQLIYKQEWLGGEIIRRESKLL

SEQ ID NO: 35 - protein, 310 aa, unidentified
MIKKQAFKFLLELNKSQSSDFLAFAGSCRFVYNKGLALLNENYRSGKKFIGYNQLASELVEWKNEESLSWLKEAPSQCLQQSLRDLDKAFRNFFTGKAQYPKFKKKGRHDSFRIPCQRVRVDQEKKLVSLPKVGWVKYRKSREIIGDLKNITISMKHGKWYISFNTEHTVPDPIHPSDIKTTIVLNNENSVHLSTRVGGANTYQAEEKKKLVRLNKILARRKKHSNNWLKTKGKIDSVISKSARIRLDNIHKATTAICKNHAVVEVVNLMDSVSDKNNNTLSMRYEFVRQLIYKQEWLGGEVIRRESKPL

SEQ ID NO: 36 - protein, 310 aa, unidentified
MIKKQAFKFLLEPNKGQLSDFLAFAGSCRFVYNKGLALLNENYRAGKKFIGYNKLASELVEWKNEESLSWLKEAPSQCLQQSLRDLDRAFRNFFTGKSQYPKFKKKGRHDSFRIPCQRVRVDQEKKLVSLPKVGWVKYRKSREIIGDLKNATISLNQGKWYISFNTEQTVPEPIHPSDIKTTIVLNNVNSVHLSSGVGGDNTYQAEEKKKLVRLNKTLTRRKRYSKNWLKTKGKIDRVKSKAARIRLDNIHKATTAICKNHAVVEVVNLMDSVFDKNDNTLSMRYEFVRQLIYKQEWLGGEIIRQESKLL

SEQ ID NO: 37 - protein, 317 aa, unidentified
GFVVLIGFIVIKKKAFKFLLEPSKSQISDVLVFAGACRFVYNKGLALLSENYNNGKPFLNYNKLAPLLVEWKSDHKFEWLKLCPSQCLQQSLRDLDRAFQNFFSGRALYPRFKKKGRSDSFRVPCQRVRLNQEKGLVSLPKLGWVKYRKSREVTGNLKNVTISKKLDKWYISFNTEEFVSEPVHPSINKTKVLLNDGYVTLCAGNEVSVESFTGIVDEKKIKRLNKELSRKVKHSNNWLKSKKKIDRIRTRSGNFRLDALHKITTAICKKHAVVEVVDVKNFVSDKNNIAKNMRYEFVRQLLYKQEWLGGKIVQLDA

SEQ ID NO: 38 - protein, 392 aa, unidentified
MNDNRRPSAPKRTTQYNTIKIRLYPNQEQEELFQRTFGCCRYIWNRMLADHERFYYETDAHFIPTPAKYKTEAPFLKEVDHQALTQEYNKLSQAFRNFFRNPASFGYPKFKRKKDDRDSFSACNQVMGNSATIYITQDAVRMTKAGLVRAKFPRRPRSGWKLTRITVERTKTGKYYGYLLFACPVHAPEPVKPTADTTIGLKYSLTHFYVRDDGITADPPRWLRQSQDKVSSIQEKLNRMQPGSRNYREMVQKYRLLHEHIANQRRDFLHKESRRIANDWDAVCIRDDSLKAISEELGGSDIHDTGFGMFREMLRYKLDRQGKQLLEVGRFDPTTKVCSVCGAINETLSPKARHWVCPVCGAEHKRGKNAAVNIKAHGLACYQNKQVAEAVS

SEQ ID NO: 39 - protein, 386 aa, unidentified
MAQTKTWNTTIKVRLDPTPAQAAFFDENFNCCRYLWNQMLSDQIRFYTETDAHFIPTPAKYKKDAPFLKEADSNALVSVHQNLHKAFQRFFSNPSRYRHPTFKSKKRCKNSYTTYCQYYRSGKGTSIYLTKDGIRLPKAGLVKARLHRRPLHWWTLKTATISKTSSGKYYCSLVFAYTTKPSRQIPPTPETTLGLNYSLSHFYIDSNGHAADPPHWLARSQDKLRYMQQQLARMQPGSRNYEQQLYKIQRLHEHISNQRKDFLHKESRRIANAWDAVCVKDTNLVKMSQAIKLGHVMDAGYGRFRSYLQYKLERLGKPYIVVEKYFPSTKTCHHCGSVNEALPAGAKRWTCPICGTTLDRAKNAAQNLRDQGLVQYSASQRQRASA

SEQ ID NO: 40 - protein, 358 aa, unidentified
MADYEAVKVPLDPTPAQERMFRMYAGAARFAYNAALAHMKEQLDERKAQIEAGVAKKDLVKIDNNVVKFGYWWRANRDTLAPWWPEVASQVFNCAFDNLGHASANFLKSLSGKRQGGPVGFPKFKPRAAAKAFAFSTITIPDAHGVKLPRIGRVHTLRNVERLVAGRATKTTTIRCEAGRWYASILCETPTPTPPVNTKPEVWVVFGLDEYIALSDGTRLTNPRPYRHALADLRKASRDLSRKTPGSARYMDQQRKVARIHKRVKALRDNALHAASKRLAEHYGVIHVQRIHLARGMRHHVLAQPLADAAFAEFTRQLAYKTARTGASVHMHEPMTVEQHVDAMALAQRLANGPSPDA

SEQ ID NO: 41 - protein, 711 aa, unidentified
MAKREKKDDVVLRGTKMRIYPTDRQVTLMDMWRRRCISLWNLLLNLETAAYGAKNTRSKLGWRSIWARVVEENHAKALIVYQHGKCKKDGSFVLKRDGTVKHPPRERFPGDRKILLGLFDALRHTLDKGAKCKCNVNQPYALTRAWLDETGHGARTADIIAWLKDFKGECDCTAISTAAKYCPAPPTAELLTKIKRAAPADDLPVDQAILLDLFGALRGGLKQKECDHTHARTVAYFEKHELAGRAEDILAWLIAHGGTCDCKIVEEAANHCPGPRLFIWEHELAMIMARLKAEPRTEWIGDLPSHAAQTVVKDLVKALQTMLKERAKAAAGDESARKTGFPKFKKQAYAAGSVYFPNTTMFFDVAAGRVQLPNGCGSMRCEIPRQLVAELLERNLKPGLVIGAQLGLLGGRIWRQGDRWYLSCQWERPQPTLLPKTGRTAGVKIAASIVFTTYDNRGQTKEYPMPPADKKLTAVHLVAGKQNSRALEAQKEKEKKLKARKERLRLGKLEKGHDPNALKPLKRPRVRRSKLFYKSAARLAACEAIERDRRDGFLHRVTNEIVHKFDAVSVQKMSVAPMMRRQKQKEKQIESKKNEAKKEDNGAAKKPRNLKPVRKLLRHVAMARGRQFLEYKYNDLRGPGSVLIADRLEPEVQECSRCGTKNPQMKDGRRLLRCIGVLPDGTDCDAVLPRNRNAARNAEKRLRKHREAHNA

SEQ ID NO: 42 - protein, 272 aa, unidentified
MNRGYKYRIYPNKEQEILIQKTFGCARFIYNKMLENRITTYEKYKENKTELKKQKYRTPASYKGEFPWLKEVDSLALANVQMDLDKAYKNFFRDSKVGYPKYKSKHKDRKSYTTNNQKGSIRIIDENHIRIPILKDLKIKMHRPLKENSSIKAATISQTPTGKYFISILVEYPEDKITPIKAMQERVLGLDYSSTSLYIDDKGLESEYPKYYRQAEMKLKKEQRKLSKKKEDSKNREKQRQKVAKLHEKVANQRKDFLHKKSRQIANVYDAV

SEQ ID NO: 43 - protein, 380 aa, unidentified
MLRAAKFRIYPTAAQEAFLWAQWGAVRKCWNMALFLKKHYYRTRGVSLDLIHEIKPLIARAKKSKKYTWLKEYDSMALQESVRNLNKGYRAFFEGRAGYPHYKSRRGPQSSYHCTNVSVGPNYVRVPKMEPIKARIHREVVGKVKSITLEADAAGDYYAAVLWEDGLAEKDPLKEIYEDQVIGIDVGIKDLLTESNGRKEPNPKHLKRARKVLRRRCRQFSRTQKGSRRREKARRRLARAHKRVANARTDNLHKVSSRLVNDLWTTHVCQAPSTVTRELRSEAAGSELVERLIAAAGGIAGLVPSGTEPIPVKRSWNSEHGLQAERSICRVSRFTGPPPIQCRYVRMRQAKRSPHSDLATLHRLIRVMSFWLLPAVFQSQ

SEQ ID NO: 44 - protein, 394 aa, unidentified
MKQKKQDGHAEPGRVVQYNTIKVRLYPTPEQEELFQKTFGCCRYIWNQMLSDHERFYLETDAHFLPTPAKYKKGAPFLKEVDNQALTQEYNKLSQAFRNFFRNPAAFGYPKFKRKKDDRDTFSACNHVMGNSATIYTTRDAVRMTKAGLIRAKFPRRPRSGWRLVRVTVERTKTGKYYGYLLYACPARQPEPVAPVEERTVGLKYSLSHFYVADDGTAADPPRWLRQSQDKLVAVQRKLSRSQPGSQNYQELVQKYRLLHEHITNQRRDFLHKESRRIANAWDAVCIREDSLKAISETLGGSAVRDTGFGMFRELLRYKLERQGKQLLEVDRLFPTTKVCSACGAVNETLAPRARRWVCPVCGAEHRRGVNAAVNIKARGLVRHQHQQTAAAAS

SEQ ID NO: 45 - protein, 376 aa, unidentified
MIKQQAFKFALKPNKQQKNDMLLFAGACRFVYNKSLSLLKDNYQSGGKHMHYNQLAPKLVEWKSESDLSWLKEAPSQSLQQSLRDLDKAFSNFFGGKAEHPRFKKKGQHDAFRFPSQRVKVDQEKQLVLLPKLGWVKYRKSRDITGDIKNVTISGKLGKWYISFNTQTDIVEPEHPTTSNVGLYIDNNRQITLSDGTQYFPPEDLRTLPKKIQKFKLRLRKKTHHSNNWLKSKRKINLLRSRLSQIKNDYLHKTSTAISKNHAMIVIADVEKKSFSGDKQQKNVESYETLTSVQYELIRQLTYKQEWCGGIVIKLPDNTSISSIDNHASKNEYIAEKLNLNADSLRTKACNLLAAGLAVTACGGDVVKRSPVKQEP

SEQ ID NO: 46 - protein, 301 aa, unidentified
MLDPNQEQLSMMTVISGACRYVFNKALEIAVQNHIAGEKYVPYNKTAPLLVQWKSQESLSWLKLAPSQSLQQSLKDLDRAFHGYISRKSGFPKFRKKGTDESFRFPQQRVKVDEVNKKVYLPKIGWVRYRKSRDVIGEIKNITISQTANKWYVSFQTQIEIPDPVHTSSLTAKVTLSDEGTILLSDGKKYALPETYSRHFNQLNKLIRQKNRKIKSSQSWLAMHHSIILKKAKLRNILMDFLHKTSTLICNNHAKISVDTEKGNSARKTSPLPVNFKPYEFLRQLKYKQSWNGGSVCVEQT

SEQ ID NO: 47 - protein, 384 aa, unidentified
MITTYHYRIKDSGKSGRALKKMSSSVNFVWNYCKNTQKEALKNRTVKKIIDPLSGKTIFVPYFFTKFEMNSLVSGSSKELGIHSQTIQAISEEYTTRRKQFKNILRWRGKNSLGWIPFKATAIKINQDKVSYHKNTFRFWNTREIPDDAIIKSGSFAQDSRGRWYLNITFETKTSQYSNENLIENGVFIDSNHLAKCSNGIKFDRPKISIKYVRKIKISNKIKKNILMKKSKLKLIKRKAPKIKQEKNLRAKLENIKLDHFHKQSTKIINFSSAIITNQITAKRKKSYKNNHFISFGAISKPFQNMLCYKAIRAGRTFKVIPEKDLIWAFSKCCSSQPRTNLRIRVWKCRECGKINHFSTKADKNLLSVYKNPLRIGHDTPRSI

SEQ ID NO: 48 - protein, 392 aa, unidentified
MKQKKQDGHAEPSRVVQYNTIKVRLYPTPEQEELFQKTFGCCRYIWNQMLSDHERFYLETDAHFIPTPAKYKKGAPFLKEVDNQALTQEYNKLSQAFRNFFRNPSAFGYPKFKRKKDDRDTFSACNHVMRNSVTIYTTRDAVRMTKAGLIRAKFPRRPRSGWRLVRVTVERTKTGKYYGYLLYACPMRQPEPVAPVEERTVGLKYSIAHFYVTDDGTSADPPRWLRQSQDKLSAVQRKLSRSQPGSQNYQELVQKYRLLHEHIANQRRDFLHKESRRIANAWDAVCIREDSLKAISEKLGGSAVRDTGFGMFRELLRYKLERQGKQLLEVDRLVPTTKVCSACGAVNETLAPRARRWVCPVCGAEHRRGVNAAVNIKARGLIQHQQTAEAVS

SEQ ID NO: 49 - protein, 308 aa, unidentified
MIKKKAFKFLLEPSKSQISDVLVFAGACRFVYNKGLALLSENYNNGKPFLNYNKLAPLLVEWKSDHKFEWLKLCPSQCLQQSLRDLDRAFQNFFSGRALYPRFKKKGRSDSFRVPCQRVRLNQEKGLVSLPKLGWVKYRKSREVTGNLKNVTISKKLDKWYISFNTEEFVSEPVHPSINKTKVLLNDGYVTLCAGNEVSVESFTGIVDEKKIKRLNKELSRKVKHSNNWLKSKKKIDRIRTRSGNFRLDALHKITTAICKKHAVVEVVDVKNFVSDKNNIAKNMRYEFVRQLLYKQEWLGGKIVQLDA

SEQ ID NO: 50 - protein, 381 aa, unidentified
MITTYRYRIKDSGSTKKKLLKMANGVNFIWNFCKETQSNALKNKPVKVITDPKTKKIYYTPYFFTQYEMNELVAGSSKELGLHSQTVQAVAEEYITRRKQFKKLLRWRGRNSLGWIPFKSSGIKIVKDVVQYNKLKFRFWNSRNLPSDAHIKSGSFAQDNCGRWYINITIETKNNLYNKNSTSESAIFLSNYKGIIYQNESDSVKPNFSSKLIAKIKKLNIAKKKRVIQRKKDKLKEKPKPIGRKEKKILNKVANIKQDLFHKESTKIINNNRLVITNEIIAAKKRIQSRNSFISTRLNVKHFQNMLCYKALRAGKVVSIVSNKNLSLVPFQCCSLQSQFILRKRTFVCKICHKRTSFMTSARNNLLLAAKHLLRIGHDTP

SEQ ID NO: 51 - protein, 270 aa, unidentified
MQLRYNFRLYPTPGRRQALARAFGCARAVFNDALRMRRDAHAGGLPYLSDGELSKRVITVAKKTPERAWLAEVSAVVLQQALADLSTAYRNFFNSVSGKRKGPKVAPPRFRSRKDSRQSIRFTRNARFQITAGGGLHLPKIGAMRVRWSRDLPSEPSSVTVIKDASGRYFASFVVETGEEPLPETGGEVGIDLGLTHFAVLSNGRKIDNPRFLRRYERRLKKAQRALSRKEKGSANRSKAVARAARAHARVADARRDHHHRLSTAIIRDN

SEQ ID NO: 52 - protein, 508 aa, unidentified
MPNEKKGDEEHGVRLSYKFCIYPTPSQCEAIKANIDASRFVYNHYLRARMDAYERTQQEVRRPKPACDEQGNVQYDQDGKEIWERTEGGKVVFHTIPNPTYDPAAKVMSMFDTSKDLTRLKKELVDEDGKPWLKEADATALIYALRNLDTAYQNFFRGIKKGQDVGFPKFKSRKNPVQTYKSGNVKLAGCDLDDGKAEAAVAEIPSPIPADWDLAGISWNGIVLPKIGKVRARIHRIPEGKFVSCTVERKASGAYYASTNVKERELPAYPAATGEVGITFGASHWAVTSDGQVMDLPERIERLQRRLAIAQRDLARKEPGSQNYLKQKRKVARINERIADVRKAATHNATRELINGYGTIAARQMGSKEMQQHDGAATKDLPRKVKKMLNRKMIDGNFAEFNRQLAYKSAWANRTFVEVPGDTPTAQVCSRCGHEELVLARDLRPAWTCPECGAKHDRKANGAQNVLEAGKDILAKQEQSFVTKAKRSREKKRAAKPKNSEKQNDWQL

SEQ ID NO: 53 - protein, 358 aa, unidentified
MADYEAVKVPLDPTPAQERMFRMYAGAARFAYNAALAHMKEQLDERKAQIEAGVAKKDLVKIDNNVVKFGYWWRANRDTLAPWWPEVSSQVYNCAFDNLGKASSNFLKSLSGKRKGGPVGFPKFKPRGATKAFAFSTITIPDAHGVKFPRIGRVHTLRNVERLVAGRATKTTTIRCEAGRWYASILCENPSATPPVNTKPEVWVVFGLDEYIALSDGTRIDKTAPYRQALDRLRKASRDLSRKTHGSGRYMEQQRKVARIHARVKALRNTMLHEASKRLAERYGIIHIQQINIARGMKHHVLAQSLMDAAFAEFTRQLEYKAAGTGASVHVHEPMTVERHVDGMVLARHLADDSSSDA

SEQ ID NO: 54 - protein, 299 aa, unidentified
MLEPSKSQISDVLVFAGACRFVYNKGLALLSENYNNGKPFLNYNKLAPLLVEWKSDHKFEWLKLCPSQCLQQSLRDLDRAFQNFFSGRALYPRFKKKGRSDSFRVPCQRVRLNQEKGLVSLPKLGWVKYRKSREVTGNLKNVTISKKLDKWYISFNTEEFVSEPVHPSINKTKVLLNDGYVTLCAGNEVSVESFTGIVDEKKIKRLNKELSRKVKHSNNWLKSKKKIDRIRTRSGNFRLDALHKITTAICKKHAVVEVVDVKNFVSDKNNIAKNMRYEFVRQLLYKQEWLGGKIVQLDA

SEQ ID NO: 55 - protein, 396 aa, unidentified
MKQEKQDGHAEGNRVIQYNTIKVRLCPTPEQEELFQKTFGCCRYIWNQMLSDHERFYEETDAHFIPTPAKYKKGAPFLKEVDNQALTQEYNRLSQAFRNFFRDPKTFGYPKFKRKKDDRDSFTACNQFFGSSATIYATRDAVRMTKAGLVKAKFSRRPRSGWKLTRLTVERTKTGKYYGYLLYTCPTYQPEPVEATAERTIGLKYSVSHFYVADNGNSADPPRWLRQSQEKLAVVQRKLSRSQPGSQNYQELVQKYRLLHEHIANQRRDFLHKESRRIANAWDAVCIREDSLRAISGKLGGSAVHDTGFGMFRELLRYKLERQGKQLLEVDRLVPTTKVCSACGAVNETLSIRARRWVCPVCGAEHRRGMNAAINIKASGLVKGQSQQAAAALPLL

SEQ ID NO: 56 - protein, 308 aa, unidentified
VIKKKAFKFLLEPSKSQISDVLVFAGACRFVYNKGLALLSENYNNGKPFLNYNKLAPLLVEWKSDHKFEWLKLCPSQCLQQSLRDLDRAFQNFFSGRALYPRFKKKGRSDSFRVPCQRVRLNQEKGLVSLPKLGWVKYRKSREVTGNLKNVTISKKLDKWYISFNTEEFVSEPVHPSINKTKVLLNDGYVTLCAGNEVSVESFTGIVDEKKIKRLNKELSRKVKHSNNWLKSKKKIDRIRTRSGNFRLDALHKITTAICKKHAVVEVVDVKNFVSDKNNIAKNMRYEFVRQLLYKQEWLGGKIVQLDA

SEQ ID NO: 57 - protein, 310 aa, unidentified
VIKKQAFKFLLEPNKGQLSDFLAFAGSCRFVYNKGLALLNENYRAGKKFIGYNKLASELVEWKNEESLSWLKEAPSQCLQQSLRDLDRAFRNFFTGKSQYPKFKKKGRHDSFRIPCQRVRVDQEKKLVSLPKVGWVKYRKSREIIGDLKNATISLNQGKWYISFNTEQTVPEPIHPSDIKTTIILNNVNSVHLSSGVGGDNTYQAEEKKKLVRLNKTLTRRKRYSKNWLKTKGKIDRVKSKAARIRLDNIHKATTAICKNHAVVEVVNLMDSVFDKNDNTLSMRYEFVRQLIYKQEWLGGEIIRRESKLL

SEQ ID NO: 58 - protein, 312 aa, unidentified
MGSLVIKKQAFKFLLEPNKNHINEFLVFAGSCRFVYNKGLALINENYDSGKKFLNYNQLASELVNWKNEECLAWLKMAPSQCLQQSLRDLDKAFKNFFSGKSQYPRFKKKGRNDSFRVPCQRVRLDQEKNLVSLPKLGWVKYRKSREITGVLKNVTISRKLDKWYISFNTEAVVPEPVHPSFSKTKILLNNECIMQLTSNESLVEQFTSMEGNKKLRNLNNILGRKVKYSSNWLKTKKKIDSVKARSSRRRLDALHKITTAICKKHAIVELVNLTDSLPDKSNGFVSMGYEFVRQLMYKQEWLGGQVIRLGD

SEQ ID NO: 59 - protein, 334 aa, unidentified
MIKQQAFKFALKLNEQQKANMLLFAGACRFVYNKGLALLKESYESGQKHMHYNQLAPLLVEWKSDPALSWLKQAPSQSLQQSLRDLDKAFSNFFYGNAEHPRFKKKGQHDAFRFPSQRVKVDQEKQLVLLPKLGWVKYRKSRDITGDIKNVSISGKLGKWYISFNTQTDIEEPVHPAISKIGVYVDAKKNITLSDGTQYIPPQSLITLPKQIRRLTNCLRKKNRYSNNWLKSKHRINRLSSRLNQVKVDYLHKASTAISKNHAMIVIADIEKKSFSADKQQKNITTCEKSTSIHYELIRQLTYKQEWLGGLVIKLPAEEQKLQRKTRHHEQNVR

SEQ ID NO: 60 - protein, 299 aa, unidentified
MLEPSKSQISDFVVFAGACRFVYNKGLALLSENYNNGKPFLNYNKLAPLLVEWKSDNKLEWLKLCPSQCLQQSLRDLDRAFQNFFSGRSQYPRFKKKGRSDSFRVPYQRIRLNQDKGLVSLPKLGWVKYRKSREVTGDLKNVTVSKKFDKWYISFNTEEIVSDPVHPSVNKTKILLNDGYVTMCTGSELSVKKFTSQIDEKKIKRLNKELSRKVKHSNNWLKSKKKIDRLRSKSGNFRLDALHKITTTICKKHAVVEVINVKNFVSDKNNIATSMRYEFVRQLLYKQEWLGGEIIQLNA

SEQ ID NO: 61 - protein, 301 aa, unidentified
MLEPNKGQLSDFLAFAGSCRFVYNKGLALLNESYRSGKKFIGYNQLASELVQWKNEESLSWLKEAPSQCLQQSLRDLDRAFRNFFTGKSQYPKFKKKGRHDSFRIPCQRVRVDQEKKLVSLPKVGWVKYRKSREIIGDLKNATISLNQGKWYISFNTDQTVPDPIHPSDIKTTIVLNNVNSVHLSSGVGGDNTYQAEERKKLIRLNKTLARRKKYSKNWLKTKGKIDRVRSKAARIRLDNIHKATTAICKNHAVVEVVNLMDSVSAKNDKTLSIRYEFVRQLIYKQEWLGGEIIRRESKLL

SEQ ID NO: 62 - protein, 357 aa, unidentified
MIKQQAFKFALKLNDQQKANMLLFAGACRFVYNKGLALLKESYESGQKHMHYNQLAPLLVEWKSDPALSWLKQAPSQSLQQSLRDLDKAFSNFFYGKAEHPRFKKKGQHDAFRFPSQRVKVDQEKQLVLLPKLGWVKYRKSRNITGAIKNVSISGKLGNWYISFNTQTDIAEPIHPAISKIGVYVGTKKNITLSDGTQYIPPQSLITLPKQIQRLTNCLRKKNRYSNNWLKSKHRINRLSSRLNQVKVDYLHKASTAISKNHAMIVIADFEKKSFSADKQQKNLTTCEKSTSIHYELIRQLTYKQEWHGGLVIKLSAEKNVDAESAWTKACNLLAAGLAVTACGGEVSKDSPMKQEP

SEQ ID NO: 63 - protein, 271 aa, unidentified
MLRATKVRIYPTSEQAEFLDRQFDAVRFVWNKALAIKVHYYKVRGQSLSPKKHLKPLLAKAKKSRKYSWLKNADSIALQQVTINLDTAFQNFFNPKLQARFPRFKKKHGKQSSYHCTSVSVGDNWIKIPKCKPIRAKVHREIVGKVKSITLRRTLTGKYFASILADDTQEQPKQIDNLEANQVVGVDMGITDLAITSTGHKTGNPRFLKKAQRNLKRKQQALSRCKKGSKGRHKARLLVAKAHERVAFARNDFQHKGRSIQCLTGLLAVGY

SEQ ID NO: 64 - protein, 437 aa, unidentified
MSIYKNFEYRVYPTDEHKKWFEEHFEVNRFLYNHLLSMSIKKYNTEVDERFLRLIKDIDFYSEKIQQWTQIDYEKLYKKAKKGVKIYSKNEFSKLITKAVNNPDFPWVNKSYDGRAMREVATSVDTAYKNFFKGKGFPRFKKKYSVRTLRFPVSKQGEWYSIRFESDKILVLPKKIKLRIVQHRPFEGEVIAATIKKAQSGKWFVTILSRVDPPTQLIKTGDIIALNRGVREYMIGYDSNHKLINYAPFVKDPTLISKINKLHKKLSQKYKSAKQESRSLRDSKNYQKNKESLARLYEKLKFQKEYYLQQLSRKIIEDYDLIILESLSIKELASSNIGEKVKSGERIVQRRFSKKIMGMSHYRLETLLKEKAELYGKRVVMLPKGFNSNGVCSECGTIFEESIPLNNKEFICPNCNIKITRGENSVKNILREGMKYL

SEQ ID NO: 65 - protein, 437 aa, unidentified
MSIYKNFEYRVYPTDEQKKWFEEHFEVNRFLYNHLLSMSIKKYNTEVDERFLRLIKDIDFYSEKIQQWTQIDYEKLYKKAKKGVKIYSKNEFSKLITKAVNNPDFPWVNKSYDGRAMREVATSVDTAYKNFFKGKDFPRFKKKYSVRTLRFPVSKQGEWYSIRFESDKILVLPKKIKLRIVQHRPFEGEVIAATIKKAQSGKWFVTILSRVDPPTQLIKTGDIIVLNRGVREYMIGYDSNHKLINYAPFVKDPTLISKINKLHKKLSQKYKSAKQESRSLRDSKNYQKNKESLARLYEKLKFQKEYYLQQLSRKIIEDYDLIILESLSIKELASSNIGEKVKSGERIVQRRFSKKIMGMSHYRLETLLKEKAELYGKRVVMLPKGFNSNGVCSECGTIFEESIPLNNKEFICPNCNIKITRGENSVKNILREGMKYL

SEQ ID NO: 66 - protein, 250 aa, unidentified
MAIEVTRTYVGSIQNNRQVCDGLDSLGDSASKIWNVARWTVDRIWNQTGEIPDEGSIKSYMKNQSCWKDLNAQSSQKVIEELSDAFQSWFDLRHKDDKANPPSYRKHGDERPRSTVTFKEDGFKHDPENNRVRLSKGSNLKEHFSDFLLCEYRIRPDVDLSEVNKVQNVRAVWSGDEWELHLVCKVSLETNDSAGDEVAGIDLGIKNIATVAFPDEYVLYPGNSLKQDKHYFKRSEYDTEGENGPSEKSI

SEQ ID NO: 67 - protein, 253 aa, unidentified
KAYKFRMYPNKKQQELINKTFGCCRFVYNKYLAKRIEVYKNDKETFTYKQCSSDLTNLKKELKWLKEPDKFSLQNALKDLDNAYKKFFKEKAGFPKFKSKKINRFSYKTNFTNGNIMYCGQHIKLPKLGMVKIRDKQVPKGRILNATISKEPSGRYYVSLCCTDVDIEVFENTNNQIGLDLGIKEFCISSCGEFIENPKYLKKSLNKLAKLQRELSRKTIGSLNRNKARLKVARLQEHIANQRNDFLQKLSTK

SEQ ID NO: 68 - protein, 261 aa, unidentified
MKQKRAFKYRVYPTPEQQQILAQTFGCCRFVYNWALRKKTDAYYNDHQRLYYKELSLLLTDLKKQEETHWLNEVSSVPLQQALRHLDKAFLNFFEGRAKYPTFHKKRNTQSATYTANAFTWRNGSLTLAKMSEPLQIVWSRPLPNEAIPSSVTITKDCADRYFISLLVEEEIAHLPCNEKAIGADLGLKSFVVLSTGEVVGNPRFFHKDEKKLAKAQRRHAKKKKGSKNRDKARLKVARIHARIADRRRDAPAQALYPPDS

SEQ ID NO: 69 - protein, 302 aa, unidentified
MEPTREQGEALERMAGARRWVWNWGLARRKEAYAATGKGLTYNQQAALLTALKQQPETAWLKEADSQLLQQALKDLDRAFKAFFEKRAGFPQFKSKKRDTPRFRIPQRVKVEGSKVYIPKVGRVKIRQSQPIDCAIKGATFKRDTQGHWYVTLTAEFEMPEVPLPPANPERVVGIDLGLKDFAVLSDGTRIAPPKFYRKGLSKLRRAQRELSRKQKGGKNRDKARHRLSKVHARVRNQRQDWLHKLTTGLVQKYDGAVHRRPEPEGDGENQAVHIGAGRGVGRVPQATGVQNGLAPQTSRRD

SEQ ID NO: 70 - protein, 255 aa, unidentified
MEPTQAQSDALLRMAGARRFVWNWGLARRKEAYAATGKGLTYNQQAAELTTLKQQPETVWLKEADSQLLQQALKDLDRAFKAFFERRAGFPQFKSRKRDEPRFRIPQRVKVENSKVYVPKVGWVRIRQSQPIDCPIKGATFKREADGHWYVTLTAEFEMPDVPLPPANPERVVGVDLGLKDFAVLSDGTRIAPPRFYRKGLAKLRRAQRELSRKRRGSKNREKARHRLSKVHARVRNQRQDWLHKLTTGLVQKYD

SEQ ID NO: 71 - protein, 540 aa, unidentified
MQLNKTAKRILSIRISGKQRKEKISNLLYSLAQFRNLLIIFNKIYQQNYGRWILNESYLYALVNNKGYKPRESKENFIEKLKEFKTITDNIEKVNQLKDFQDKLIKQKQKIKNNYTVQTLIRQLIKDYKSFFKSIQKYKENSNSFNAIPRPPKAKKLKDIPSFTAELNVNTFKVLEEEKGKHLLITLTNNKEEKQYLKVKLPKDFNYEIKSARIKFIASDIYVDIVYTIPETQINSNQEKTHIAGIDLGLDNLITLFSTNKELQTIIVSGKEIKSINQWYNKEKAKLQSKIDNIQNQINKLQKDNLDTTALEKEKKLLIKKQKELSAYRNRWITDTFHKITRKITDFLNETGHKEVYIGKGATESKNGINLSTKTNQNFVNIPFRKLINQLKYKLEEYGVKLTEVAEEFTSKTSPFADLHKVLETGKEYLKAKTEGNEGILKQLKEKLNQLYNGIRIKRGLYKDNITNKVFNANAVGSYNILRKEAKPLIDEETLIDKLSRPIRLTLNLISKVTCESLLEIAGRRPLRVHCKRTLVNNFL

SEQ ID NO: 72 - protein, 308 aa, unidentified
MIKKKAFKFLLEPSKSQISDVLVFAGACRFVYNKGLALLSENYNNGKPFLNYNKLAPLLVEWKNDNKLEWLKFCPSQCLQQSLRDLDRAFQNFFSGRSQYPRFKKKGRSDSFRVPCQRVRLDQEKGLVSLPKLGWVKYRKSRAITGDLKNVTVSRKFDKWYISFNTEEVVSNPVHPSVDKTRILLNDGYVTLCTGGDLSVKKFTSLVDEKKIKRLNKELSRKVKNSNNWLKNKKKIDKIRLKSGSFRLDAIHKITTTICKKHAVVEVVNVKNFVSDKNNIATSMRYELVRQLLYKQEWLGGKIIHLDA

SEQ ID NO: 73 - protein, 310 aa, unidentified
MIKKQAFKFLLEPNKGQLSDFLAFAGSCRFVYNKGLALLNENYRSGKKFIGYNQLASELVEWKNEESLSWLKEAPSQCLQQSLRDLDRAFRNFFTGKSQYPKFKKKGRHDSFRIPCQRVRVDQEKKLVSLPKVGWVKYRKSREIIGDLKNATISFNQGKWYISFNTEQTVPDPIHPSEIKTTIVLNNVNSVHLSSGVGGDNTYQAEEKKKLIRLNKTLTRRKKYSKNWLKTKGKIDRVRSKAARIRLDNIHKATTAICKNHAVVEVVNLMDSVSAKNDNTLSMRYEFVRQLIYKQEWLGGEIIRRESKLL

SEQ ID NO: 74 - protein, 310 aa, unidentified
MIKKQAFKFLLEPNKGQLSDFLAFAGSCRFVYNKGLALLNENYRSGKKFIGYNQLASELVEWKNEESLSWLKEAPSQCLQQSLRDLDRAFRNFFTGKSQYPKFKKKGRHDSFRIPCQRVRVDQEKKLVSLPKVGWVKYRKSREIIGDLKNATISLNQGKWYISFNTEQTVPDPIHPSDIKTTIVLNNVNSVHLSSGVGGDNTYQAEEKKKLIRLNKTLTRRKKYSKNWLKTKGKIDRVRSKAARIRLDNIHKATTAICKNHAVVEVVNLMDSVSAKNDNTLSMRYEFVRQLIYKQEWLGGEIIRRESKLL

SEQ ID NO: 75 - protein, 310 aa, unidentified
MIKKQAFKFLLEPNKGQLSDFLAFAGSCRFVYNKGLALLNENYRSGKKFIGYNQLASELVEWKNEESLSWLKEAPSQCLQQSLRDLDRAFRNFFTGKSQYPKFKKKGRHDSFRIPCQRVRVDQEKKLVSLPKVGWVKYRKSREIIGDLKNATISLNQGKWYISFNTEQTVPDPIHPSDIKTTIVLNNVNSVHLSSGVGGDNTYQAEEKKKLIRLNKTLARRKKYSKNWLKTKGKIDRVRSKASRIRLDNIHKATTAICKNHAVVEVVNLMDSVSAKNDNTPSTRYEFVRQLIYKQEWLGGEIIRRESKLL

SEQ ID NO: 76 - protein, 253 aa, unidentified
MEVKKAYKFRIYPNQTQTQLFEQTFGCSRFLYNRALYETKTAGTKFRKTPAIKEIGKLKKAFTWLKAVDSIALQAAIENLDDAFIRFYRKQTKFPRFKSKKNLVKSYTTKAVNGNIQLEDNKIKLPKVGWIRYAKSREVKGTIKRVTVRKNAAGKYFVSILAVVEHNYNRNNTNETVGLDLGLTDFLITNEGSKIKNPRHLKKYEQKLQHAQRTMSRRTIGSSNWHKQKIKWFASTKRSLMPAGIFSINYLAN

SEQ ID NO: 77 - protein, 274 aa, unidentified
MEKAYKFRMYPNKKQQELINKTFGCCRFVYNKYLAKRIDVYKNNKETFTYKQCSSDLTNLKKELKWLKEPDKFSLQNALKDLDNAYKKFFKEKTGFPKFKSKKINRFSYKTNFTNGNIMYCGQHIKLPKLGMVKIRDKQVPQGRILNATISKEPSGRYYVSLCCTDVDIEAFENTNNHIGLDLGIKEFCISSCGEFIENPKYLKKSLNKLAKLQRELSRKTIGSLNRNKARLKVARLQEHIANQRKDFLQKLSTKLIKENDXKLSILQEMTTFY

SEQ ID NO: 78 - protein, 269 aa, unidentified
MEKAYKFRMYPNKKQQELINKTFGCCRFVYNKYLAKRIEVYKNNKETFTYKQCSSDLTNLKKELKWLKEPDKFSLQNALKDLDNAYKKFFKEKVGFPKFKSKKINRFSYKTNFTNGNIMYCGQHIKLPKLGMIKIRDKQVPQGRILNATISKEPSGRYYVSLCCTDVDIEAFENTNNQIGLDLGIKEFCISSYGEFIENPKYLKKSLNKLAKLQRELSRKTIGSLNRNKARLKVARLQEHIANQRNDFLQKLSTKLIKETILFAYKIYK

SEQ ID NO: 79 - protein, 310 aa, unidentified
MIKKQAFKFLLEPNKGQLSDFLAFAGSCRFVYNKGLALLNENYRSGKKFIGYIQLASELVEWKNEESLSWLKEAPSQCLQQSLRDLDRAFRNFFTGKSQYPKFKKKGRHDSFRIPCQRVRVDQEKKLVSLPKVGWVKYRKSREIIGDLKNATISLNQGKWYVSFNTEQTVPDPIHPSDIKSTIVLNNVDSVHLSSGGGGDNTYQAEEKKKLIRLNKTLTRRKKHSQNWLKTKGKIDRVKSKAARIRLDNIHKATTAICKNHAVVEVVNLMDSVSDKNDNTLSMRYEFVRQLIYKQEWLGGEVIRRESKPL

SEQ ID NO: 80 - protein, 242 aa, unidentified
MLKATKIRIYPTTEQAAFLNYQFGAVRFVYNTGLRIISHRYQHHGQSLSAKHDIKKLLPVAKKSRKYSWLKDADSMALQQACLNLDHAFQCFFDPQQKAGYPSFKSKRGKQSSYHCVGVKAGDDWIKVPKLGPIRARVHRKVEGTLKSITLTRTVTGKHYASLLFETEQAAPAPLKDVDAAKIVGLDMGLSHLAIDSNGRKIENPRFLKRAQQNLKRKQKALSRCQKGSANRAKARLLVAKA

SEQ ID NO: 81 - protein, 256 aa, unidentified
MSLSNGFCTRTSLNVIKNMLKNHKLAKAISEVSWSQFRTMLEYKAKWYGKQIIVVSKTFASSQLCSCCGYQNKDVKNLKLRKWDCPSCRTHHDRDINASINLKNEANTSTDIVPMGQVHGWYSLRWQIEILFKTWKSFFQIHHCKKIKPERLECHLYGQLIAILLCSSIMFQMRQLLLMKKKRELSEYKAIYMIKDYFLLLFQSIQKNTQELSKVLLRLFNLLQQNGRKSHRYEKKTVFDILGVVYNCTLSDNQAA

SEQ ID NO: 82 - protein, 301 aa, unidentified
MNVIRQKHHSTPIHIIDHEHRFVSMQHLDGFFKLRDQIDYRALPAQANQNVLHMLYRDWKSFFAALADYKAHPDKYEAIPHIPRYADKDGCKPLIFTNQICKLRKDKHGWYVKFPKAVLQAGCVRDRYDLGKMDLHEQKLKEVRLIPNGDTIKLEIVCEIEIKEPTITIHEATRVAGIDIGVDNLTAIAFTSGHHPVLIKGNEIKAVNQFYNKQIAHYRSLLRTGKKDSKGIHQTKRMKRISEKRNRRVKDILHKASRKIIDLCVEEGIEVIVVGNNAGWKKRIHMGKKNNQTFVQIPFHT

SEQ ID NO: 83 - protein, 572 aa, unidentified
MKTVEFKLNLNQTQQAKVDGWLSVLRWVWNRGLHLLEEFDNNTRWDKSSKSWVPCCPLPWQYYKDDDGRLIPFTRLAQTKPYRMSCPIPQTYRQPEIESPNHFGILYYFAQKNHLDKPWFCAVPSKSVSGTLKALTDAWWEYKSGKRSSPRYKRYKDKIKSLVNNNSKSIKISGRQITLPKLGKVTVKTLDKRWDASVAIATLKIIKQPSGYYLQLIGELPTKKFKPSNKAVGISLGYKDLFTTDGGKVVKSPLYYQKMEKKLQRLQRKLCRQQNLCPIDTYNPSLREHFLSCPINPYKGANKAKTTQKISGLHEKIRRARRAFNHKLSTLLVQEYGGIATAKSDMRRITRRPKPIVNKEGTGYDRNGAERKSQFNKLILANGLGQLATLIEQKAVANGREYIEVVPKDIPDEPRQRTEHESKRLRLPRAVHLSSFQSGRYRAWSWKSKPGESQWTQNQEAAQVATLRDTETTILTSSNLALEREGMDVPPTSSPKNNANQHSCRLVTTSGEKSTRATSTGQSVTEPAKTRLDEKEMPDQPEKAQRQSEVLLTAKTQVRRRKRRTAGENDSS

SEQ ID NO: 84 - protein, 503 aa, unidentified
MRTVEFKLSLNRYQQAKVDSWLTIQRWVWNQGLHLLEESNSFSTWDKVSQSWVPCCSIPWTYYRDSVGQLIPFTRIAKKKPYRMSCPIPQAYRKPLLETPTFFGLLYYFAQKNHSDKPWFCDVPCRFVAGTLKSLADAWTAYKSGKRKRPRYKQYKDKFRTLTNNNAKPVKISGKRITLPKLGKVTVKTLDRRWLKSVPIVTLKIVKEPSGYYLQLTGCFPVNKVKPTNKAVGVSLGYSHLTTDGEKVVEPPNFYHKMEKQLAQLQRQLCRQQKTCPIFSYNPSLGEHFLSCSINPSKGANRAKTQRKISRLHEKIRRSRRATNHKISTYLVREYDAIAMVKPEIRKIARKPIAIVNKLGEFEHNGANHKAEFNKGLLDNSLGQLTSLINQKASVQGRELISVSPKDLPDELKQRTEKCCEQLQWSRAVYLTSFSRRYRAWAWELTPGESTGTLNQEPPQGGLSCDAGTTSNFISESIGLYGVGDIPEIIPLLQNQSEANSSY

SEQ ID NO: 85 - protein, 551 aa, unidentified
MRTVEFKLDLNQTQQAKVDDWLNVLRWVWNRGLHLLTEFDSFTSWDKVSKTWTPSCPIQWEYYRDDDGHLVPFTRLAQTKPYRMSCPISQAYRQPELESPNHFGLLYYFAQKNHEDKPWFCEVPAKVVAGTLKSLSDAWSEYKAGKHKRPRYKRYKDKLKTLVNNNSKSVKISGKQITLPKLGKVTVKTLDKRWDAKVPIATLKIVKEPSGYYLQLTGELPLKRFKPSNKAVGISLGYKDLFTTDSGKVVKPPAYYQKMEKNLQRLQRKLSRQQNICPISTYNPELAEHFLSCPINPHKGANKAKTQQKISQQHEKIRRARRAFNHKLSTKLVQEYGGIATAKSEVRKITRRPKPIVNKEGTGYDPNSAERKSQFNKQILANGLGQLTTLIEQKAVVNGREFIEIAPKEIPDEPRQRAERYSKRLRLPRAVHLSSFFGRYRAWSWESKPGESQRTLNQEASQEAALRDAGTTSKSSSANTNLTESSNFNGDRASRATSQSSLETRSELANPCKSESFKQLPKAKKHSSAPPTSEKQLGRKKRRSTRENDSS

SEQ ID NO: 86 - protein, 308 aa, unidentified
MIKKKAFKFLLEPSKSQISDVLVFAGACRFVYNKGLALLSENYNNGKPFLNYNKLAPLLVEWKNDNKLEWLKLCPSQCLQQSLRDLDRAFQNFFSGRSQYPRFKKKGRSDSFRVPCQRVRLDQEKGLVSLPKLGWVKYRKSRAITGDLKNVTVSRKFDKWYISFNTEEVVSNPVHPSVDKTRILLNDGYVTLCTGGDLSVKKFTSLVDEKKIKRLNKELSRKVKNSNNWLKNKKKIDKIRLKSGSFRLDAIHKITTTICKKHAVVEVVNVKNFVSDKNNIATSMRYELVRQLLYKQEWLGGKIIHLDA

SEQ ID NO: 87 - protein, 308 aa, unidentified
MIKKQAFKFLLEPNKNHINEFLVFAGSCRFVYNKGLALINENYDSGKKFLNYNQLASELVNWKNEECLAWLKMAPSQCLQQSLRDLDKAFKNFFSGKSQYPRFKKKGRNDSFRVPCQRVRLDQEKHLVSLPKLGWVKYRKSREITGVLKNVTISRKLDKWYISFNTEVVVPEPVHPSFSKAKVLLNNECIVQLTSNESLVEQFTSMEGNKKLRNLNNILGRKVKYSSNWLKTKKKIDSVKARSSRRRLDALHKITTAICKKHAIVELVNLTDSLPDKNNGFVSMGYEFVRQLMYKQEWLGGQVIRLGD

SEQ ID NO: 88 - protein, 271 aa, unidentified
MIKQQAFKFALKLNEQQKANMLLFAGACRFVYNKGLALLKESYESGQKHMHYNQLAPLLVEWKSDPALSWLKQAPSQSLQQSLRDLDKAFSNFFYGNAEHPRFKKKGQHDAFRFPSQRVKVDQEKQLVLLPKLGWVKYRKSRDITGDIKNVSISGKLGKWYISFNTQTDIEEPVHPAISKIGVYVDAKKNITLSDGTQYIPPQSLITLPKQIQRLTNCLRKKNRYSNNWLKSKHRINRLSSRLNQVKVDYLHKASTAISKNHAGDAANLLI

SEQ ID NO: 89 - protein, 275 aa, unidentified
MKKAYKFRMYPNKKQQELINKTFGCCRFVYNKYLAKRIEVYKNNKETFTYKQCSSDLTNLKKELNWLKEPDKFSLQNALKDLENAYEKFFKEKTGFPKFKSKKTNRFSYKTNFTNGNIMYCGQHIKLPKLGMVKISDKQVPKGRILNATISKEPSGRYYVSLCCTDVDIEAFENTNNQIGLDLGIKEFCISSYGDFIENPKYLKKSLNKLAKLQRELSRKTIGSLNRNKARLKVARLQEHIANQRKDFLQKLSTKLIKENELIKETILFAYKIYK

SEQ ID NO: 90 - protein, 275 aa, unidentified
MEKAYKFRMYPNKKQQELINKTFGCCRFVYNKYLAKRIDVYKNDKETFTYKQCSSDLTNLKKELKWLKEPDKFSLQNALKDLDNAYKKFFKEKAVFPKFKSKKINRFSYKTNFTNGNIMYCGQHIKLPKLGMVKIRDKQVPKDRILNATISKEPSGRYYVSLCCTDVDIEAFENTNNQIGLDLGIKEFCISSYGDFIENPKYLKKSLNKLAKLQRELSRKTIGSLNRNKARLKVARLQEHIANQRKDFLQKLSTKLIKENELIKETILFAYKIYK

SEQ ID NO: 91 - protein, 275 aa, unidentified
MKKAYKFRMYPNKKQQELINKTFGCCRFVYNKYLAKRIEVYKNNKETFTYKQCSSDLTNLKKELNWLKEPDKFSLQNALKDLENAYEKFFKEKAGFPKFKSKKTNRFSYKTNFTNGNIMYCGQHIKLPKLGMVKISDKQVPKGRILNATISKEPSGRYYVSLCCTDVDIEAFENTNNQIGLDLGIKEFCISSYGDFIENPKYLKKSLNKLAKLQRELSRKTIGSLNRNKARLKVARLQEHIANQRKDFLQKLSTKLIKENELIKETILFAYKIYK

SEQ ID NO: 92 - protein, 269 aa, unidentified
MEKAYKFRMYPNKKQQELINKTFGCCRFVYNKYLAKRIEVYKNNKETFTYKQCSSDLTNLKKELKWLKEPDKFSLQNALKDLDNAYKKFFKEKVGFPKFKSKKINRFSYKTNFTNGNIMYCGQHIKLPKLGMIKIRDKQVPQGRILNATISKEPSGRYYVSLCCTDVDIEAFENTNNQIGLDLGIKEFCISSCGEFIENPKYLKKSLSKLAKLQRELSRKTIGSLNRNKARLKVARLQEHIANQRKDFLQKLSTKLIKETILFAYKIYK

SEQ ID NO: 93 - protein, 263 aa, unidentified
MEPTREQGEALERMAGARRWVWNWGLARRKEAYAATGKGLTYNQQAALLTALKQQPETAWLKEADSQLLQQALKDLDRAFKAFFEKRAGFPQFKSKKRDTPRFRIPQRVKVEGSKVYIPKVGRVKIRQSQPIDCPVKGATFKRDTQGHWYVTLTAEFEMPEVPLPPANPERVVGIDLGLKDFAVLSDGTRIAPPEFYRKAERRLRKAHKELSRKQKGGKNRDKARERLNRVHAKVRNQRQDWLHKLTTGLVQKYSTTGCASRT

SEQ ID NO: 94 - protein, 372 aa, unidentified
MKSLADAWTAYKSGKRQRPCYKQYKDKFRTLINNNAKPIKISGKRITLPKLGKVTVKTLDRRWLKSVPIVTLKIVKEPSGYYLQLSGCFPVNKVKPTNKAVGVSLGYSHLTTDGEKVVEPPNFYHKMEKQLAQLQRQLSRQQKTCPISTYNPSSGEHFLSCPINPGKGANRAKTQRKISRLHEKIRRSRRATNHKISTYLVREYDAIAIVKPEIKRIARKPIAIVNKLGEFEHNGANHKAEFNKGLLNNSLGQLSGLIEQKASVQGRKLISVSPKDIPDELKQCAEKRREQIQWSRAVYSTNFSRRYRAWAWELTPGESTETLNQEPPQGGLFCDAGTTSNFISESIGFCGVGDIPEIIPLLQNQSEANSSY

SEQ ID NO: 95 - protein, 310 aa, unidentified
MIKKQAFKFLLEPNKGQLSDFLAFAGSCRFVYNKGLALLNENYRSGKKFIGYNQLASELVEWKNEESLSWLKEAPSQCLQQSLRDLDRAFRNFFTGKSQYPKFKKKGRHDSFRIPCQRVRVDQEKKLVSLPKVGWVKYRKSREIIGDLKNATISFNQGKWYISFNTEQTVPDPIHPSDIKTTIVLNNVNSVHLSSGVGGDNTYQAEEKKKLIRLNKTLTRRKKYSKNWLKTKGKIDRVRSKAARIRLDNIHKATTAICKNHAVVEVVNLMDSVSAKNDNTLSMRYEFVRQLIYKQEWLGGEIIRRESKLL

SEQ ID NO: 96 - protein, 267 aa, unidentified
MEKAYKFRMYPNKKQQELINKTFGCCRFVYNKYLAKRIEVYKNAKETFTYKQCSSDLTNLKKELNWLKEPDKFSLQNALKDLDNAYKKFFKEKAGFPKFKSKKINRFSYKTNFTNGNIMYCGQHIKLPKLDMVKIRDKQVPKGRILNATISKEPSGRYYVSLCCTDVDIEAFENTNNQIGLDLGIKEFCISSCGEFIENPKYLKKSLNKLAKLQRELSRKTIGSLNRNKARLKVARLQEHIANQRNDFLQKLSTKLIKEXHESVRSS

SEQ ID NO: 97 - protein, 295 aa, unidentified
MEKAYKFRMYPNKKQQELINKTFGCCRFVYNKYLAKRIDVYKNNKETFTYKQCSSDLNNLKKELKWLKEPDKFSLQNALKDLDNAYKKFFKEKVGFPKFKSKKINRFSYKTNFTNGNIMYCGQHIKLPKLGMVKVRDKQVPKGRILNATISKEPSGRYYVSLCCTDVDIXVVEKAYKFRMYPNKKQQELINKTFGCCRFVYNKYLAKRIEVYKNDKETFTYKQCSSDLTNLKKELKWLKEPDKFSLQNALKDLENAYEKFFKKRHDFLNLNQRKLIDFHIKLTLQMETLCIVVNI

SEQ ID NO: 98 - protein, 266 aa, unidentified
MEKAYKFRMYPNKKQQELINKTFGCCRFVYNKYLAKRIDVYKNNKETFTYKQCSSDLNNLKKELKWLKEPDKFSLQNALKDLDNAYKKFFKEKAGFPKFKSKKINRFSYKTNFTNGNIVYCGQHIKLPKLGMVKVRDKQVPKGRILNATISKEPSGRYYVSLCCTDVDIEAFENTNNQIGLDLGIKEFCISSCGEFIENPKYLKKSLNKLAKLQRELSRKTIGSLNRNKARLKVARLQEHIANQRNDFLQKLSTKLIKEXSSGKSL

SEQ ID NO: 99 - protein, 264 aa, unidentified
MIAVKKAYKFRMYPNKKQQELINKTFGCCRFVYNKYLAKRIEVYKNDKETFTYKQCSSDLTNLKKELKWLKEPDKFSLQNALKDLDNAYKKFFKEKAGFPKFKSKKINRFSYKTNFTNGNIMYCGQHIKLPKLGMVKIRDKQVPQGRILNATISKEPSGRYYVSLCCTDVDIEAFENTNNQIGLDLGIKEFCISSCGEFIENPKYLKKSLNKLAKLQRELSRKTIGSLNRNKARLKVARFQEHIANQRKDFLQKLSTKLIKEND

SEQ ID NO: 100 - protein, 308 aa, unidentified
MIKKKAFKFLLEPSKSQISDVLVFAGACRFVYNKGLALLSENYNNGKPFLNYNKLAPLLVEWKNDNKLEWLKLCPSQCLQQSLRDLDRAFQNFFSGRSQYPRFKKKGRSDSFRVPCQRVRLDQEKGLVSLPKLGWVKYRKSRAITGDLKNVTVSRKFDKWYISFNTEEVVSNPVHPSVDKTRILLNDGYVTLCTGDDLSVKKFTSLVDEKKIKRLNKELSRKVKNSNNWLKNKKKIDKIRLKSGSFRLDAIHKITTTICKKHAVVEVVNVKNFVSDKNNIATSMRYELVRQLLYKQEWLGGEIIHLDA

SEQ ID NO: 101 - protein, 276 aa, unidentified
MNVIRQKHHSTPIHIIDHEHRFVSMQHLDGFFKLRDQIDYRALPAQANQNVLHMLYRDWKSFFAALADYKAHPDKYEAIPHIPRYADKDGYKPLIFTNQICKLRKDKHGWYVKFPKAVLQAGCVRDRYDLGKMDLHEQKLKEVRLIPNGDTIKLEIVCEIEIMEPTITIHEATRVAGIDIGVDNLTAIAFTSGHRPVLIKGNEIKAVNQFYNKQIAHYRSLLRTGKKDSKGIHQTKRMKRISEKRNRRVKDILHKASRKIIDLCVXWTPPCTDKRK

SEQ ID NO: 102 - protein, 257 aa, unidentified
MNVIRQKHHSTPIHIIDHEHRFVSMQHLDGFFKLRDQIDYRALPAQANQNVLHMLYRDWKSFFAALADYKAHPDKYEAIPHIPRYADKDGYKPLIFTNQICKLRKDKHGWYVKFPKAVLQAGCVRDRYDLGKMDLHEQKLKEVRLIPNGDTIKLEIVCEIEIMEPTITIHEATRVAGIDIGVDNLTAIAFTSGHRPVLIKGNEIKAVNQFYNKQIAHYRSLLRTGKKDSKGIHQTKRMKRISEKRNRRVKDILHKAS

SEQ ID NO: 103 - protein, 389 aa, unidentified
MNVIRQKHHSTPIHIIDHDHRFVSMQHLDGFFKLRDQIDYRALPAQANQNVLHMLYRDWKSFFAALADYKAHPDKYEAIPHIPRYADKDGYKPLIFTNQICKLRKDKHGWYVKFPKAVLQAGCVRDRYDLGKMDLHEQKLKEVRLIPNGDTIKLEIVCEIEIKEPTITIHEATRVTGIDIGVDNLMAIAFTSGHHPVLIKGNEIKAVNQYYNKQIAHYRSLLRTGKKDSKGIHQTKRMKRISEKRNRRVKDILHKASRKIINLCVEEGIEVIVVGNNAGWKKRIHMGKKNNQTFVQIPFRTLIEMIKYKGEAAGIRVVVCEEAIQSKASSIDEDQIPVYGNDVAHTFTGKRIKRGLYRSKWHSNECRYQWSKQYHTKSISMYARARAME

SEQ ID NO: 104 - protein, 308 aa, unidentified
MIKKQAFKFLLEPNKTHMNDFLVFAGSCRFVYNKGLALINENYDSGKKFLNYNQLASELVNWKNEECLAWLKMAPSQCLQQSLRDLDRAFKNFFSGKSQYPRFKKKGRNDSFRVPCQRVRLDQEKHLVSLPKLGWVKYRKSREITGVLKNVTISRKLDKWYISFNTEEVVPEPLHPSFSKTKILLNNEWLMQLTACESLVEQFANMEGNKKLRNLNNILGRKVKYSSNWLKTKKKIDGVKARSSRRRLDALHKITTAICKKHAIVELVNLKDSLPDKNNGSVSMTYEFVRQLMYKQEWLGGKVIRLGD

SEQ ID NO: 105 - protein, 515 aa, unidentified
MCPLLGREAQYIMRTVEFKLSLNRYQQAKVDSWLTIQRWVWNQGLHLLEEFNSFSTWDKVSQSWVPCCSIPWTYYRDSVGQLIPFTRIAKKKPYRMSCPIPQAYRKPLLETPTFFGLLYYFAQKNHSDKPWFCDVPCRFVAGTLKSLADAWTAYKSGKRKRPRYKQYKDKFRTLTNNNAKPVKISGKRITLPKLGKVTVKTLDRRWLKSVPIVTLKIVKEPSGYYLQLTGCFPVNKVKPTNKAVGVSLGYSHLTTDGEKIVEPPNFYHKMEKQLAQLQRQLCRQQKTCPIFSYSPSLGEHFLSCPINPSKGANRAKTQRKISRLHEKIRRSRRATNHKISTYLVREYDAIAMVKPEIRKIARKPIAIVNKLGEFEHNGANHKAEFNKGLLDNSLGQLTSLINQKASVQGRELISVSPKDLPDELKQRTEKCCEQLQWSRAVYLTSFSRRYRAWAWELTPGESTGTLNQEPPQGGLSCDAGTTSNFISESIGLYGVGDIPEIIPLLQNQSEANSSY

SEQ ID NO: 106 - protein, 301 aa, unidentified
MLEPNKGQLSDFLAFAGSCRFVYNKGLALLNENYRSGKKFIGYNQLASELVEWKNEESLSWLKEAPSQCLQQSLRDLDRAFRNFFTGKSQYPKFKKKGRHDSFRIPCQRVRVDQEKKLVSLPKVGWVKYRKSREIIGDLKNATISFNQGKWYISFNTEQTVPDPIHPSEIKTTIVLNNVNSVHLSSGVGGDNTYQAEEKKKLIRLNKTLTRRKKYSKNWLKTKGKIDRVRSKAARIRLDNIHKATTAICKNHAVVEVVNLMDSVSAKNDNTLSMRYEFVRQLIYKQEWLGGEIIRRESKLL

SEQ ID NO: 107 - protein, 579 aa, unidentified
MLEEVAWPDALSVALPSAGRRAGMRTLEFKLYLKAEQQKLVDSWLTDLRGVWNAALDLLLEHAAFRAWDRLEKSWVPCCPLPWKFRYRPNPEGEGYIAVAYSQAARVRPWAQFCPLPQDYRVPRLESPGEFTLAAEFAHKRRPWLAHIPANLIRGVIASLVAAWERHKKDPKNCGEPKFKRPGRGDLDTLIHGDPKGAKIQPGVLPKRHPEIADARLRKRKIAFPGLGVLHARGLEHWPAEVPVCMVKITRRPSGYYLQLTGELPDSWQPKDARPKERATAIAFDPPKQHHADDTGRVVSAPAFLQPKLDRLAKLQRKADRQQPGSNRQKRTYHRIGKLHEQIRLARRNYNQKLSTFAVRKAGALAVAQIQPALKVKTRRPKPVPSKKGLGTFDPNGAQQKSAFNLRLIDIALGQFVALLEAKAKSRGREFQRAVNAPAASIREKGLVSWSRVYPGWAGSTDAEGGESSPAKRQGEQSPPGGVPATVTSTSSTKQNSSSSGPSGTTGANKGQKPDSKRTLQSRKAKQVLENAESQVQNASSAVDPPQEQYQIDPQSPRARRSTKKSAEDGSGSDFRAPP

SEQ ID NO: 108 - protein, 268 aa, unidentified
MRDQIDYRALPAQANQNVLHMLYRDWKSFFAALADYKAHPDKYEAIPHIPRYADKDGCKPLIFTNQICKLRKDKHGWYVKFPKAVLQAGCVRDRYDLGKMDLHEQKLKEVRLIPNGDTIKLEIVCEIEIKEPTITIHEATRVAGIDIGVDNLTAIAFTSGHHPVLIKGNEIKAVNQFYNKQIAHYRSLLRTGKKDSKGIHQTKRMKRISEKRNRRVKDILHKASRKIIDLCVEEGIEVIVVGNNAGWKKRIHMGKKNNQTFVQIPFHT

SEQ ID NO: 109 - protein, 270 aa, unidentified
FKLRDQIDYRALPAQANQNVLHMLYRDWKSFFAALADYKAHPDKYEAIPHIPRYADKDGCKPLIFTNQICKLRKDKHGWYVKFPKAVLQAGCVRDRYDLGKMDLHEQKLKEVRLIPNGDTIKLEIVCEIEIKEPTITIHEATRVAGIDIGVDNLTAIAFTSGHHPVLIKGNEIKAVNQFYNKQIAHYRSLLRTGKKDSKGIHQTKRMKRISEKRNRRVKDILHKASRKIIDLCVEEGIEVIVVGNNAGWKKRIHMGKKNNQTFVQIPFHT

SEQ ID NO: 110 - protein, 259 aa, unidentified
MNVIRQKHHSTPIHIIDHEHRFVSMQHLDGFFKLRDQIDYRALPAQANQNVLHMLYRDWKSFFAALADYKAHPDKYEAIPHIPRYADKDGYKPLIFTNQICKLRKDKHGWYVKFPKAVLQAGWVRDRYDLGKMDLHEQKLKEVRLIPNGDTIKLEIVCEIEIMEPTITIHEATRVAGIDIGVDNLTAIAFTSGHRPVLIKGNEIKAVNQFYNKQIAHYRSLLRTGKKDSKGIHQTKRMKRISEKRNRRVKDILHKASRK

SEQ ID NO: 111 - protein, 299 aa, unidentified
MLEPSKSQISDVLVFAGACRFVYNKGLALLSENYNNGKPFLNYNKLAPLLVEWKNDNKLEWLKLCPSQCLQQSLRDLDRAFQNFFSGRSQYPRFKKKGRSDSFRVPCQRVRLDQEKGLVSLPKLGWVKYRKSRAITGDLKNVTVSRKFDKWYISFNTEEVVSNPVHPSVDKTRILLNDGYVTLCTGDDLSVKKFTSLVDEKKIKRLNKELSRKVKNSNNWLKNKKKIDKIRLKSGSFRLDAIHKITTTICKKHAVVEVVNVKNFVSDKNNIATSMRYELVRQLLYKQEWLGGEIIHLDA

SEQ ID NO: 112 - protein, 503 aa, unidentified
MRTVEFKLSLNRYQQAKVDSWLAIQRWIWNQGLHLLEEFNSFSTWDKVSQTWVPCCPIPWTYYRDSVGQLIAFTRIAKKKPYRMSCPIPQVYRKPVLESPTFFGLLYYFAQKNHSDKPWFCDVPCRFVAGTLKSLADAWTAYKSGKRQRPRYKQYKDKFRTLINNNAKPIKISGKRITLPKLGKVTVKTLDRRWLKSVPIVTLKIVKEPSGYYLQLSGCFPVNKEKPTNKAVGVSLGYSHLTTDGEKVVESPNFYHKMEKQLAQLQRQLCRQQKTCPISTYNPSLGEHFLSCPIDPGKGANRAKTQRKISRLYEKIRRSRLATNHKISTYLVREYDAIAIVKPEIKRITRKPIAIVNKLGEFEHNGANHKAEFSKGLLDNSLGQLAGLIKQKASVQGRELISVSPKDLPDELKQCTEKRREQLQWSRAVYSTNFSRRYRAWEWELTPGESTETLNQEPPQGGLSCDAGTTSNFILESIGLCGVGDIPEIIPLLQNQSEANSSY

SEQ ID NO: 113 - protein, 308 aa, unidentified
MIKKKAFKFLLEPSKSQISDVLVFAGACRFVYNKGLALLSENYNNGKPFLNYNKLAPLLVEWKNDNKLEWLKLCPSQSLQQSLRDLDRAFQNFFSGRSQYPRFKKKGRSDSFRVPCQRVRLDQEKGLVSLPKLGWVKYRKSRAITGDLKNVTVSRKFDKWYISFNTEEVVSNPVHSSVDKTRILLNDGYVTLCTGGDLSVKKFTSLVDEKKIKRLNKELSRKVKNSNNWLKNKKKIDKIRLKSGSFRLDAIHKITTTICKKHAVVEVVNVKNFVSDKNNIATSMRYELVRQLLYKQEWLGGKIIHLDA

SEQ ID NO: 114 - protein, 332 aa, unidentified
MKLGVLKAYKFRIYPNGQQKQFFIETFGCVRFTYNQLLEAKMEELANNEAKQGLTPAKLKKEYPFLKETDSLALANAQRNLDRAFRNYFQKRAGFPKMKTKKSIWQSYTTNNQQHTIYFEDDQIKLPKLKTLVPVKKHRAIKGKIKSATISAKNNEEFYISILCLEEIPPLPKQQASVAVVYDPQQLVKANQPIPITCEHAIQTKQKLTRAERKLQVKATAVKRKKILLTQARNYQKLKGKVARLYRFHCCQKREFIDQVSYHLVKQYDTIYLEQIAEDTVLKAGHYSISDWHQFVRKIQYKAQWYGKELRFVTLDMQDQQKLERLSNEMSS

SEQ ID NO: 115 - protein, 371 aa, unidentified
MDDQAHAARTMWNCLHDWWTMLPKEKRSLAAADAATRQARKEIDWLGVLPAQAAQAVLNTYFQVWRNCWDGRADEPNFKARSRTVMSVDIPQGRDLNISRVHRRWGMVQIPRIGRIRFRWTKDLPVGKRANTENLITGARLVKDALGWHIAFRYDQIKQLRARATRRAVDWQHKTTTDIARQYGTVVVEALTITNMVNSAKGTIEEPGKNVAQKSGLNRSISQEAWGRTVTMLTYKTARQGGTLVKVPAPGTSQRCSACGFTTPGSRQASPWRQARRRKVGRNLPRLRGRALQGGEPDAAEAVGEETGRRAQSSTGDVPVHHGGEVRSVRGGAGRLRRGRRAPGDGAGARRRARAAARGGLGGGSRGRRAA

SEQ ID NO: 116 - protein, 335 aa, unidentified
MKVLKGYRFRIYPDEEQLTFFRQTFGCVRFTYNQLLMARKNTANSEESMKLTPAVLKKDYPFLKKTDSLALANAQRNLERAYANFFQGRASYPKLKNKKSTWQSYTTNNQKHTIYFVDEKLKLPKLKSLIQVHQHREIKGLIRSATISAKNNEEFYVSLLCLEEVTALPKTKKAIGISYCPKHLIHVSKPLDHLETIEEQMQEDRLIKAKRKLLLRAKIAKKHKVKLKDAKNYQKQKQKVHKLIQEKAFRKKDFIDQLTFSLVKEFDYIFVEKQPSTVDSEETSLFNSSDWYLFMQKLTYKTQWYGKKYLAIEKPANTENSGQMIEELGKQRLGL

SEQ ID NO: 117 - protein, 307 aa, unidentified
MAEQIEEVPAELIQTRVYELHPNKTMRRVLDEACDYRRYCWNQGLALWNEMYKARQTLKSSLSTDSKKLTEEQKVLLKDKPSPSERRVRNMLVADKKDWQYAQSARILQLAISDLGKAWNNFFDKAQPGWGKPKFRSKREARQGFKSDQSKIKDGILYLERAKESSVPKDQWRGFKLSEKPLSDEFGVVSYFKEKGRYYVAIPYKIKAKDIKLPDKTGKATAVDVNVGHFDYTGGRINVLPKKLDKIYGKIKHYQRQLAKKQVKNGEAACESENYLKTKAKLQACYRKASNIQNDLMQKFTTELVNN

SEQ ID NO: 118 - protein, 263 aa, unidentified
MLKAYRYRIYPNKEQEIQLAKTFGCCRFVYNQTLAYRKDAYEKEKKSVSKTDCNNYCNRELKKAYEWLKEVDKFALTNAIYNMDSAYQKFFKEHTGYPKFKSKHDNHKSYTTNFTNGNITVDFDRGRIKLPKLKRVKIKLHRKFLGQIKAATISKVPSGKYYVSVLVETEHSPLVKTNGQIGLDLGIKDLCITSDGKKYENPKTIKKYEKKLVKLQRQLANKIKGSGTIRKKGNKSTMHEKITNTRKDYLHKISSEIINENQV

SEQ ID NO: 119 - protein, 336 aa, unidentified
MLKAFKFRMYPTEEQKQQLIRTFGCVRFTYNHLLKERQKSWQQTGVADFSLTPATLKKEYPFLKEVDSLALANAQLNLDRAFRNYFKGRASFPKLKTKKSMWQSYTTNNQTHTVYLKNGHLKLPKQKELIKINQHRPVEGTIRSATISARYNEEFYVALLCDVSSIKKESSAKWIGIAYHPKTLIETSQPIEVTLPKFDQTEEKLQHAQRKLSVKVRSAHHRKTRLDQASNYQKQKRKVMDLYLKQKNQREDYLEQLSGKLVKQYDYLFVESFPKEEAHADFSIHDWHKLITKLRYKSQWYNKKFLFINTDGAEESNSVRKSQVLEQLGRHSVIKE

SEQ ID NO: 120 - protein, 336 aa, unidentified
MLKAFKFRMYPTEEQKQQLIRTFGCARFTYNHLLKKRQKSWQQTGIANFSLTPATLKKEYPFLKEVDSLALANAQLNLDRAFRNYFKGRASFPKLKTKKSMWQSYTTNNQTRTIYLENGYLKLPKQKELIKINQHRPVEGSIRSATISARYNEEFYVALLCDVSPVKKESLAKWIGIAYHPKTLIQTSRPLEVTLPKFHQTEEKLQHAQRKLNVKVRSAHHRKIRLDQASNYQKQKRKVMDLYLKQKNQREDYLEQLSGKLVKQYDYLFVESFPKEEAHADFSIHDWHKLITKLRYKSQWYNKKFLLINTDGAEESNSVRKSQVVEKMGRHSVIKG

SEQ ID NO: 121 - protein, 313 aa, unidentified
MKNLKGYRFRIYPNEAQKRFFIETFGCVRFIYNYFLKLDTAERTSEEIITPASLKRDYPFLKKTDSLALANAKRNLDRAFQNYYQQRSGYPKLKNKSSVWQSYTTNNQNGTVRIEDGYLKLPKLKEKIQICEHRKITGKIKSVTISAKNNEEFYASILCVETIDKFEKTGKKIRLSFDAHQLVQQAKYRAEVIEPIQHTKGRLAFLQRRLKVKARVARKQNRILADCKNYQKQKKQYDKLLTHLNNQIKDYLNHLSVFYIKEYDVIEIVEPEDRSCAEDALFTSNEWHQLVRLLKYKAQWYGKEIQIINCQNI

SEQ ID NO: 122 - protein, 335 aa, unidentified
MLKAFKFRIYPTESQKQWLIQTFGCVRFTYNHLLKARQAYYLETKEIDYTLTPASLKKQYPFLKEVDSLALANAQLNLDRAFRNYFKGRASFPKLKNKKSIWQSYTTNNQKGTIYLEETSIKLPKLKEKIRIHAHRPIEGTIRSATISSRYNEIFYVSLLCEVPQKTMEASNKWIGIAYDPDRLVEMSTPLDIAIPKFKQVDQQLQRAKRKLVIKGRAAQHRRTHVERVKNYQKQKRKIKDLYLKQKFQREDYLEQISGTVIRHYDYLFVESISADCPEGDFSIQDWHKLLAKLQYKSQWYSKKLVLIDMKEQTDPSTNKKSLELVEIGKQVLFE

SEQ ID NO: 123 - protein, 366 aa, unidentified
MFLRKAATTEGIISEGRQVPIKTLKAYRFALYPDEAQKHFFIQTFGCVRFTYNMLLTLRQQESGKTVEERTSARLQKQKMTPAKLKKDYPFLKATDSLALANAQRNLEKAFQNYYRGRASYPKLKSKKSAWQSYTTNNQGHTIYLAEDGLKLPKLKSKVLVHQHRSVAGKIRSATISAKNRQEFYVSLLCEEDIPALPKTGSEIEIAYDPTGLVVTNKPIVGIPTFCQTQVLEKLKKAQRRLSCRAKSAQRRNAKLEQAKNYQKQKSQVQQLYIHKLKQKEDFTEQLSIALLRQFDCIIITKPPELRENKESKAAKTVKKSKHTTVFPSFEDNFTLSDWNRLLLKLKYKAEWYEKELVFICPTNGK

SEQ ID NO: 124 - protein, 329 aa, unidentified
MSVLKGYKFRIYPDEKQKKFFIETFGCVRFTYNHLLMARHTGTARNTTLTPASLKKEYPFLKKTDSLALANAQRNLERAFRNYFSGRAGYPKLKTKKSTWQSYTTNNQQHTVYLEGEYLKVPKLKSLVPIHLHREVRGTIKSVTISAKRNREFYASILCVEEVEELPKTNDLVGISYCPENLIQISAKKELPQIDQSHLVKQLGKEQKKLQLRAKVAKKRKVRLIHAKNYQKQKERVLKLRATKLDQKRNFIDQLTINLVRDFDYLFIESKPKFKNETGEFSEADWQQFIQRIQYKGRWYGKEIRYIEVKELKNEKCKEIERLGRAQLT

SEQ ID NO: 125 - protein, 320 aa, unidentified
MKILKGYRFKIYPNEEQKRFFIQTFGCVRFTYNYLLKAAKKPDNRSEGKVITPAMLKRDYPFLKATDSLALANAARNLNRAFKNYFSGRSGYPKLKNKKSAWQSYTTNNQNGTVAIEGNQLKLPKLKERVMICCHRPVLGTIKSVTISAKNNQEFYVSLLCVEEVDPLPKTNREIQIYFHPEKLIADDLGQLSIQHLEQTQQKINKLTQRLELKARCARKRKVRLSQAKNYQKLKMRLAKHQSLQHNQLQDYLNQLSTLLIRKYDVINFVEPSVRDQQSAANVQEAHLFSLNEWHQLMRMLKYKASWYGKEFKVVFSTQA

SEQ ID NO: 126 - protein, 332 aa, unidentified
MNVLKGYRFRIYPNKEQQEFFTQTFGCVRFVYNHLLMARKEEHYSAESLKLTPASLKATYPFLKKTDSLALANAQRNLDRAFLNFFKGRAGYPNLKSKKKTWQSYTTNNQKHTIYFEEGKLKVPKLKTLIDVHQHREVKGQIKSATISAKNSEEYYVSLLCLEEITALPKTKKVVGVAYCPKHLVSVSCGREHLPELTKSTVEERLARARQKLELRAKIVKKRKVHRDCAKNYQKQKRRVDKLYLTRAYQKNDYIDKLTLKLIEQYDYVFLEKEPNFEKNCSFTETDWHVFMQKLRYKGKWYGKELRLIDIASDQEEKSETLEHLGRTQFSK

SEQ ID NO: 127 - protein, 336 aa, unidentified
MLKAFKFRMYPTEEQKQQLIRTFGCARFTYNHLLKKRQKSWQQTGVADFSLTPATLKKEYPFLKEVDSLALANAQLNLERAFRNYFKGRASFPKLKTKKSMWQSYTTNNQTRTIYLENGYLKLPKQKELIKINQHRPVEGSIRSATISARYNEEFYVALLCDVSPVKKESLAKWIGIAYHPKTLIQTSRPLEVTLPKFHQTEEKLQHAQRKLNVKVRSAHHRKTRLDQASNYQKQKRKVMDLYLKQKNQREDYLEQLSGKLVKQYDYLFVESFPKEEAHADFSIHDWHKLITKLRYKSQWYNKKFLLINTDGAEESNSVRKSQVVEEMGRHSLIKG

SEQ ID NO: 128 - protein, 378 aa, unidentified
MAKFEIPEGWMVQAFRFTLDPTAEQARALARHFGARRKAYNWTVATLKADIDAWQATGIQTAKPSLRVLRKRWNTVKNDVCVNIETGVVWWPECSKEAYADGIDGAVDAYWNWQNSRSGKRDGKRMGFPRFKKKGRDPDRVTFTTGAMRVEPDRRHLTLPVIGTVRTHENTRRVERLIAKGRSRVLAITVRRNGTRIDASVRVLVQRPQQPKVTDPGSRVGVDVGVRRLATVATADGAVLERVPNHGLDDLQRLGKRGDSVANRRERDAVGLRLAPKPAGAQSQIETSLGNDVQRRSHLGQHGRMTVGIAQHAGAQPQLRGVAGQCRKCGPALEQGQRPRRGALARPAGFGAGRGAGVGGDAGDLRILAGAYRQEVVA

SEQ ID NO: 129 - protein, 395 aa, unidentified
MPKFEVPDGWTVQAFRFTLDPTEDQAKALARHFGARRKAYNWTVATLKADIQAWHASGTVTAKPSLRVLRKRWNTVKDDVCVNTETGVAWWPECSKEAYADGIAGAVEAYWNWQTSRAGKRAGKRVGFPRFKRKGRDQDRVSFTTGAMRVEPDRRHLTLPVIGTVRTHENTRRIERLIKAGRARVLAISVRRNGTRLDASVRVLVQRPQQPKVVHPGSRVGVDVGVRRLATVATADGTAIEQVENPRPLGAALRELRHVCRARSRCTKGSRRYRERTTQISRLPGQRCPHPSPARPDDTVGSNPRPHCCRRLGRDRDVAAKRVAGCPRSSARTVGCGPGHSASALVLQDSLVRVGAGGRRPLVPVVENLPRLPACARHRLGRTMAMRPMLSGPSA

SEQ ID NO: 130 - protein, 313 aa, unidentified
MKNLKGYRFRIYPNEAQKRFFIETFGCVRFIYNYFLKLDTAERTSEEIITPASLKRDYPFLKKTDSLALANAKRNLDRAFQNYYQQRSGYPKLKNKSSVWQSYTTNNQNGTVRIEDGYLKLPKLKEKIQICEHRKITGKIKSVTISAKNNEEFYASILCVETIDKFEKTGKKIRLSFDAHQLVQQAKYRAEVIEPIQHTKGRLAFLQRRLKVKARVARKQNRILADCKNYQKQKKQYDKLLTHLNNQIKDYLNHLSIFYIKEYDVIEIVEPEDRSCAEDALFTSNEWHQLVRLLKYKAQWYGKEIQIINCQNI

SEQ ID NO: 131 - protein, 313 aa, unidentified
MKNLKGYRFRIYPNEAQKRFFIETFGCVRFIYNYFLKLDTAERTSEEIITPASLKRDYPFFKKTDSLALANAKRNLDRAFQNYYQQRSGYPKLKNKSSVWQSYTTNNQNGTVRIEDGYLKLPKLKEKIQICEHRKITGKIKSVTISAKNNEEFYASILCVETIDKFEKTGKKIRLSFDAHQLVQQAKYRAEVIEPIQHTKGRLAFLQRRLKVKARVARKQNRILADCKNYQKQKKQYDKLLTHLNNQIKDYLNHLSIFYIKEYDVIEIVEPEDRSCAEDALFTSNEWHQLVRLLKYKAQWYGKEIQIINCQNI

SEQ ID NO: 132 - protein, 313 aa, unidentified
MKNLKGYRFRIYPNEAQKRFFIETFGCVRFIYNYFLKLDTAERTSEEIITPASLKRDYPFLKKTDSLALANAKRNLDRAFQNYYQQRSGYPKLKNKSSVWQSYTTNNQNGTVRIEDGYLKLPKLKEKIQICEHRKITGKIKSVTISAKNNEEFYASILCVETIDKFEKTGKKIRLSFDAHQLVQQAKYRAEVIEPIQHTKGRLAFLQRRLKVKARVARNQNRILADCKNYQKQKKQYDKLLTHLNNQIKDYLNHLSIFYIKEYDVIEIVEPEDRSCAEDALFTSNEWHQLVRLLKYKAQWYGKEIQIINCQNI

SEQ ID NO: 133 - protein, 442 aa, unidentified
MNLAAWAERNGVARVTAYRWFHAGLLPVPARKVGRLILVDELASEAGAQPKTAVYARVSSADQKSDLDRQVARVTSWATAEQIPVDKVVTEVGSVLNGHRRKFPAVLRDLSVTRIVVEHRDRFCRFGSEYVHAALAAQGRELVVVDSAEVDDDLVWDMTEILTSMCARLYGKRAAQNRASGPSRLPLSMIMRRPEMPRLEIPNGWCVQAFRFTLDPTAEQAHALARHFGARRKAYNWTVAQLKADIQAWRATGAQTAKPSLRVLRKRWNTVKDEVCVNAETGTVWWPECSKEAYADGIAGAVDAYWNWQQRRAGKRDGKRMGFPRFKKKGRDADRVSFTTGAMRVEPDRRHLTLPVIGCVRTHENTRRIERLIAKDRARVLAITVRRNGTRLDASVRVLVQRPQQPNVELPESRIGVDVGVRRLATVATADGACCPVLVPDG

SEQ ID NO: 134 - protein, 331 aa, unidentified
MKLSVLKAYKFRIYPNGQQKQFFIETFGCVRFTYNQLLKAKMDELANKEVKLGLTPAKLKKDYPFLKETDSLALANAQRNLERAFRNYFQKRAGFPKMKTKKSVWQSYTTNNQQHTIYFVDDQLKLPKLKSLVPVKLHREIKGTIKSATISAKNGTEFYVSILCLEEVEPLPKQQQNIALIFDPQILVQANHSLPVACTHALSTLQKLVKAENKLTIKAKAVKRKKILLNNARNYQKQKGKVAKLYRLHGCQKREYIDQMSYHLVKQYDTIFIEKINEDMDVAGNYSVSDWHQFIRKMQYKAKWYGKELHFVPLSATENQKMTELLSQMGS

SEQ ID NO: 135 - protein, 257 aa, unidentified
MEKAYKFRMYPNKKQQELINKTFGCCRFVYNKYLAKKIEVYENNKETFTYKQCSSDLTNFKKELEWLKEPDKFSLQNTLKDLENAYKKFFKENAGFPKFKSKKTNRFSYRTNFTNENIMYCGQYIKLPKLGMVKVRDKQVPQGRILNATISKEPSGKYYVSLCCTDIDIKAFENTNNQIGLDLGVKEFCISSCGDFIENPKYLKKSLNKLAKLQRELSRKTIGSLNRNKARLKVARLQEHIANQRKDFLQKLSTKLI

SEQ ID NO: 136 - protein, 344 aa, unidentified
MKVLKAYKFRLYPSAEQKAFFIFTFGCVRFTYNHLLKERQQEYQRTGFLGKGRTPAQLKKEFPFLKKTDSLALANAQLNLDRAYRNYFRSQAGFPKLKTKKSLWQSYTTNNQQGTIDLVDGQLKLPKLKEHIPVLVHRAVKGKIKSATISAKYNEIFYVSLLCEEEVAPLPKTEKQVAVVFCQEIGIRTSQKILYPPYAVAGLESSLAKAERRLQIKATSARKRKVKLMDARNYQKQKRRVAQLYQIRYQRKRDYLEKLSFELVQAFDVIFIGKDSIQEQPGPFDQQDWLLFLQKLAYKAKWYQKQLVFVEVPRLLQDPSELERTGTALLNKPNWQGRQGSPRE

SEQ ID NO: 137 - protein, 331 aa, unidentified
MKKEDLVKVLKGYKFRIYPDEKQIQYFIQTFGCVRFTYNQLLLARQKALQEGEYKTDVSPAKLKLDYPFLKKTDSLALANAQRNLDRAFKNYFSKRAGYPKLKTKKNSWQTYTTNNQKHTIYFVGNQLKLPKLKTLINVNLHREVLGEIKSATISAKDNQLFFVSILCLEEVTPLPKTGKSIAISYCPKHLVQIPATNYLPAFRQEKLQWQLDKAMKRLKVRAKAAKNRKVLLEKAKNYQKQKVKVQKLYMAKNEQKKNYMNQVSYRLVRDYDYIYLEKTPTFMENMNFSETDWHHFLRKLQYKVQWYGKKIIFVDAVENVRTKENSPLNV

SEQ ID NO: 138 - protein, 259 aa, unidentified
MEKAYKFRMYPNKKQQELINKTFGCCRFVYNKYLAKRIDVYKNDKETFTYKQCSSDLTNLKKELNWLKEPDKFSLQNALKDLENAYNKFFKEKAGFPKFKSKKINRFSYKTNFTNGNIMYCGQHIKLPKLGMVKIRDKQVPKGRILNATISKEPSGRYYVSLCCTDVDIEAFENTNNQIGLDLGIKEFCISSCGEFIENPKYLKKSLNKLAKLQRELSRKTIGSLNRNKARLKVARLQEHIANQRNDFLQKLSTKLIKE

SEQ ID NO: 139 - protein, 252 aa, unidentified
MEKAYKFRMYPNKKQQELINKTFGCCRFVYNKYLAKRIEVYKNDKETFTYKQCSSDLTNLKKELKWLKEPDKFSLQNALKDLDNAYKKFFKEKVGFPKFKSKKINRFSYKTNFTNGNIMYLGQHIKLPKLGMIKIRDKQVPQGRILNATISKEPSGRYYVSLCCTDVDIEAFENTNNQIGLDLGIKEFCISSCGEFIENPKYLKKSLNKLAKLQRELSRKTIGSLNRNKARLKVARLQEHIANQRKDFLQKL

SEQ ID NO: 140 - protein, 313 aa, unidentified
MLKLRQQNPSDESTLPEKMTGVWEKKTTATPAKLKRDYPFLKETDSLALANAQRNLTKAFQNYYRGRASYPKLKSKKNAWQSYTTNNQGHTIYLTNEGLKLPKLKSKVPIHQHRQVCGKIRSATISAKNRQEFYVSLLCEEEITALPKTGFDITITYDPIKLIGTSKVLSDRPNFCQQRLLVQLKNAQRKLYCRGKSAQRRNVKLEQAKNYQKQKLRLQKLYIHQIKQKEDFMEQLSIALLRQFDLVTVTMPKAFESLSANHSAAIHQDCSANYKNTAVNFTIRDWNRFVLKLKYKANWYGKKLIFTDQEKVI

SEQ ID NO: 141 - protein, 308 aa, unidentified
MSVLKAYRFRIYPNEEQKHFFVTTFGCVRFTYNHLLVARQQSEGGKLTPAALKKDYPFLKATDSLALANAQRNLEKAFRRYYTGKSDYPSLKNKSNPLQSYTTNNQGQTICLSDGYLKLPKLKSLVAVNCHREIKGTIKSATISSRNNEEFFVSFLCVEEVEPLPKTLKTIHLVYSPNKLLESSEYTPPTLCNQEQLLDKIDRAQRKLRVRGKIARKRRVPLAYAKNYQKQKEKLGRLQLSCREKKENYFDQVSYAIVRQFDFIHVTKELLFETLPDQPLYFSKADWQMFLKKLEYKAEWYGKELTYE

SEQ ID NO: 142 - protein, 245 aa, unidentified
MVVVEKAYKFRMYPNKKQQELINKTFGCCRFVYNKYLAKRIDVYKNNKETFTYKQCSSDLTNLKKELKWLKEPDKFSLQNALKDLDNAYKKFFKEKAGFPKFKSKKINRFSYKTNFTNGNIMYCGQHIKLPKLGMVKIRDKQVPKGRILNATISKEPSGRYYVSLCCTDVDIEAFENTNNHIGLDLGIKEFCISSCGEFIENPKYLKKSLNKLAKLQRELSRKTIGSLNRNKARLKVARLQEHIA

SEQ ID NO: 143 - protein, 332 aa, unidentified
MKLGVLKAYKFRIYPNGQQKQFFIETFGCVRFTYNQLLEAKMEELANNEAKQGLTPAKLKKEYPFLKETDSLALANAQRNLDRAFRNYFQKRAGFPKMKTKKSIWQSYTTNNQQHTIYFEDDQIKLPKLKTLVPVKKHRAIKGKIKSATISAKNNEEFYISILCLEEIPPLPKQQASVAVVYDPQQLVKANQPIPITCEHAIQTKQKLTRAERKLQVKATAVKRKKILLTQARNYQKLKGKVARLYRFHCCQKREFIDQVSYHLVKQYDTIYLEQIAEDTVLKAGHYSISDWHQFVRKIQYKAQWYGKELRFVTLDTQDQQKLERLSGEMSS

SEQ ID NO: 144 - protein, 251 aa, unidentified
MKKAYKFRLYPNKKQQELINKTFGCCRFVYNKYLAKRIDVYKNNKETFTYKQCSSDLTNLKKELKWLKEPDKFSLQNALKDLDNAYKKFFKEKAGFPKFKSKKINRFSYKTNFTNGNIMYCGQHIKLPKLGMVKVRDKQVPKGRILNATISKEPSGRYYVSLCCTDVDIEAFENTNNQIGLDLGIKEFCISSCGEFIENPKYLKKSLNKLAKLQRELSRKTIGSLATYSHFIFSFFSYYNGFDKSVINFYK

SEQ ID NO: 145 - protein, 252 aa, unidentified
MIAVKKAYKFRIYPNKKQQELINKTFGCCRFVYNKYLAKRIDVYKNDKETFTYKQCSSDLTNLKKELNWLKEPDKFSLQNALKDLDNAYKKFFKEKAGFPKFKSKKINRFSYKTNFTNGNIMYCGQHIKLPKLGMVKVRDKQVPKGRILNATISKEPSGRYYVSLCCTDVDIEALENTNNHIGLDLGIKEFCISSCGEFIENPKYLKKSLNKLAKLQRELSRKTIGSLNRNKARLKVARLQEHIANQRNDFL

SEQ ID NO: 146 - protein, 248 aa, unidentified
MVVVEKAYKFRMYPNKKQQELINKTFGCCRFVYNKYLAKRIDVYKNNKETFTYKQCSSDLTNLKKELKWLKEPDKFSLQNALKDLDNAYKKFFKEKTGFPKFKSKKINRFSYKTNFTNGNIMYCGQHIKLPKLGMVKIRDKQVPQGRILNATISKEPSGRYYVSLCCTDVDIEAFENTNNHIGLDLGIKEFCISSCGEFIENPKYLKKSLNKLAKLQRELSRKTIGSLNRNKARLKVARLQEHIANQR

SEQ ID NO: 147 - protein, 252 aa, unidentified
MIAVKKAYKFRIYPNKKQQELINKTFGCCRFVYNKYLAKRIDVYKNDKETFTYKQCSSDLTNLKKELKWLKEPDKFSLQNALKDLDNAYKKFFKEKAGFPKFKSKKINRFSYKTNFTNGNIMYCGQHIKLPKLGMVKIRDKQVPKGRILNATISKEASGRYYVSLCCTDVDIEVFENTNNQIGLDLGIKEFCISSCGEFIENPKYLKKSLNKLAKLQRELSRKTIGSLNRNKARLKVARLQEHIANQRNDFL

SEQ ID NO: 148 - protein, 335 aa, unidentified
MLKAFKFRIYPTASQKEWFIQNFGCVRFTYNHLLKARQESYARTGAIDYSMTPATLKKKYAFLKSADSLALANAQLNLDRAFRNYFNGRASFPKLKNKKSMWQSYTTNNQKGTIYLEDKYLKLPKQKELIQVRLHRPVEGVIRSATISARYNESFYVSLLCEVQIAGVPTTNRWLGVAYDPKKLVETSSPVEVQMPLFRQTRDKMKVAKRKLVIKSKAAQKRKVRLENARNYQKQKRKVMDLYQKQKLQKEDYLERVSGNLIRNYDYLFVEAVPSELSSADFQLQDWYKLITKLRYKAQWYNKTLLFINVNEQLNEPPEKKSMELEKIGKQVIFE

SEQ ID NO: 149 - protein, 331 aa, unidentified
MKLGVLKAYKFRIYPNGQQKQFFIETFGCVRFTYNQLLKAKMDELANKEVKLGLTPAKLKKDYPFLKETDSLALANAQRNLERAFRNYFQKRAGFPKMKTKKSIWQSYTTNNQQHTIYFVEDQLKLPKLKSLVPVKQHRAIKGTIKSATISAKNGTEFYVSILCLEEVEPLPKKQQKIALIFDPQLLVQANHSLPVACTHALATLQKLARAENKLTIKAKAVKRKKILLNNARNYQKQKGKVAKLYRLHGCQKREYIDQMSYHLVKQYDTIYIEKISEDAQVSGNYTISDWHQFVRKMQYKAKWYGKELHFVALSATDNRKMPELLAQMGS

SEQ ID NO: 150 - protein, 332 aa, unidentified
MKLGVLKAYKFRIYPNGQQKQFFIETFGCVRFTYNQLLEAKMEELANNEAKQGLTPAKLKKEYPFLKETDSLALANAQRNLDRAFRNYFQKRAGFPKMKTKKSIWQSYTTNNQQHTIYFEEDQIKLPKLKTLVPVKKHREIKGKIKSATISAKNNEEFYISILCLEEITPLPKQQASIAVVYDPQQLVKANQPVPITCEHAIQTKQKLTRAERKLQVKATAVKRKKILLTQARNYQKLKGKVARLYRFHCCQKREFIDQVSYHLVKQYDTIYLEQIAEDTVLKAGHYSISDWHQFVRKIQYKAQWYGKELRFVTLDTQDQQKLERLSGEMSS

SEQ ID NO: 151 - protein, 332 aa, unidentified
MKLGVLKAYKFRIYPNGQQKQFFIETFGCVRFTYNQLLEAKMEELANNEAKQGLTPAKLKKEYPFLKETDSLALANAQRNLDRAFRNYFQKRAGFPKMKTKKSIWQSYTTNNQQHTIYFEEDQIKLPKLKTLVPVKKHREIKGKIKSATISAKNNEEFYISILCLEEITPLPKQQASIAVVYDPQQLIKANQSVPVTCEHAIQTKQKLTRAERKLQVKATAVKRKKILLTQARNYQKLKGKVARLYRFHCCQKREFIDQVSYHLVKQYDTIYLEQIAEETVLKAGHYSISDWHQFVRKIQYKAQWYGKELRFVTLDTQDQQKLERLSGEMSS

SEQ ID NO: 152 - protein, 336 aa, unidentified
MLKAFKFRMYPTEEQKQQLIRTFGCVRFTYNHLLKERQKSWQQTGVADFSLTPATLKKEYPFLKEVDSLALANAQLNLDRAFRNYFKGRASFPKLKTKKSMWQSYTTNNQTHTVYLKSGYLKLPKQKELIKINQHRPVEGTIRSATISARYNEEFYVALLCDVSSIKKESSAKWIGIAYHPKTLIETSQPIEVTLPKFDQTEEKLQHAQRKLSVKVRSAHHRKTRLDQASNYQKQKRKVMDLYLKQKNQREDYLEQLSGKLVKQYDYLFVESFPKEEAHADFSIHDWHKLITKLRYKSQWYNKKFLFINTDGAEESNSVRKSQVLEQLGRHSVIKE

SEQ ID NO: 153 - protein, 335 aa, unidentified
MLKAFKFRIYPTDSQKQWLIQTFGCVRFTYNHLLKARQAYYLETQEIDYTLTPASLKKQYPFLKEVDSLALANAQLNLDRAFRNYFKGRASFPKLKNKKSIWQSYTTNNQKGTIYLEETYLKLPKLKEKIRIHAHRPIEGTIRSATISSRYNEIFYVSLLCEVPQKTMKASNKWIGIAYDPDRLVEMSTPLDITIPKFKQVDQQLLRAKRKLVIKGRSAQHRRTHVERVKNYQKQKRKIKDLYLKQKFQREDYLEQISGTVIRHYDYLFVESISADCPEGDFSIQDWHKLLAKLQYKSQWYSKKLVLIDMKEQTNPSTNKKSLELVEIGKQVLFE

SEQ ID NO: 154 - protein, 313 aa, unidentified
MKNLKGYRFRIYPNEAQKRFFIETFGCVRFIYNYFLKLDTAERTSEEIITPASLKRDYPFLKKTDSLALANAKRNLDRAFQNYYQQRSGYPKLKNKSSVWQSYTTNNQNGTVRIEDGYLKLPKLKEKIQICEHRKITGKIKSVTISAKNNEEFYASILCVETIDKFEKTGKKIRLSFDAHQLVQQAKYRAEVIEPIQHTKGRLAFLQRRLKVKARVARKQNRILADCKNYQKQKKQYDKLLTHLNNQIKDYLNHLSIFYIKEYDVIEIVEPEDRSCAEDALFTSNEWHRLVRLLKYKAQWYGKEIQIINCQNI

SEQ ID NO: 155 - protein, 313 aa, unidentified
MKNLKGYRFRIYPNEAQKRFFIETFGCVRFIYNYFLKLDTAERTSEEIITPASLKRDYPFLKKTDSLALANAKRNLDRAFQNYYQQRSGYPKLKNKSSVWQSYTTNNQNGTVRIEDGYLKLPKLKEKIQICEHRKITGKIKSVTISAKNNEEFYASILCVETIDKFEKTGKKIRLSFDAHQLVQQTKYRAEVIEPIQHTKGRLAFLQRRLKVKARVARKQNRILADCKNYQKQKKQYDKLLTHLNNQIKDYLNHLSIFYIKEYDVIEIVEPEDRPCAKDDLFTSNEWHQLVRLLKYKAQWYGKEIQIINCQNI

SEQ ID NO: 156 - protein, 313 aa, unidentified
MKNLKGYRFRIYPNEAQKRFFIETFGCVRFIYNYFLKLDTAERTSEEIITPASLKRDYPFLKKTDSLALANAKRNLDRAFQNYYQQRSGYPKLKNKSSVWQSYTTNNQNGTVRIEDGYLKLPKLKEKIQICEHRKITGKIKSVTISAKNNEEFYASILCVETIDKFEKTGKKIRLSFDAHQLVQQAKYHAEVIEPIQHTKGRLAFLQRRLKVKARVARKQNRILADCKNYQKQKKQYDKLLTHLNNQIKDYLNHLSIFYIKEYDVIEIVEPEDRSCAEDALFTSNEWHQLVRLLKYKAQWYGKEIQIINCQNI

SEQ ID NO: 157 - protein, 347 aa, unidentified
MKILKAYKFRIYPDEAQQEFFIKTFGCVRFTYNTLLKLRQQNPSDESTLPEKMTGVWEKKTTATPAKLKRDYPFLKETDSLALANAQRNLTKAFQNYYRGRASYPKLKSKKNAWQSYTTNNQGHTIYLTNEGLKLPKLKSKVPIHQHRQVCGKIRSATISAKNRQEFYVSLLCEEEITALPKTGFDITITYDPIKLIGTSKVLSDRPNFCQQRLLVQLKKAQRKLYCRGKSAQRRNVKLEQAKNYQKQKLRLQKLYIHQIKQKEDFMEQLSIALLRQFDLVTVTMPKAFESLSANHSAAIHQDCSVNYKNTAVNFTIRDWNRFVLKLKYKANWYGKKLIFTDQEKVI

SEQ ID NO: 158 - protein, 335 aa, unidentified
MLKAFKFRIYPTASQKEWFIQNFGCVRFTYNHLLKARQESYARTGAIDYSMTPATLKKKYAFLKSADSLALANAQLNLDRAFRNYFNGRASFPKLKNKKSMWQSYTTNNQKGTIYLEDKYLKLPKQKELIQVRLHRPVEGVIRSATISARYNESFYVSLLCEVQIAGVPTTNRWLGVAYDPKKLVETSSPVEVQMPLFRQTRDKMKVAKRKLVIKSKAAQKRKVRLENARNYQKQKRKVMDLYQEQKLQKEDYLERVSGNLIRNYDYLFVEAVPSELSSADFQLQDWYKLITKLRYKAQWYNKTLLFINVNEQLNEPPEKKSMELEKIGKQVIFE

SEQ ID NO: 159 - protein, 253 aa, unidentified
MVVVEKAYKFRMYPNKKQQELINKTFGCCRFVYNKYLAKRIEVYKNDKETFTYKQCSSDLTNLKKELKWLKEPDKFSLQNALKDLDNAYEKFFKEKAGFPKFKSKKINRFSYKTNFTNGNIMYFSQHIKLPKLGMVKIRDKQVPKGRILNATISKEPSGRYYVSLCCTDVDIEAFENTNNQIGLDLGIKEFCISSCGDFIENPKYLKKSLNKLAKLQRELSRKTIGSLNRNKARLKVARLQEHIANQRNDFLQ

SEQ ID NO: 160 - protein, 248 aa, unidentified
MIAVKKAYKFRMYPNKKQQELINKTFGCCRFVYNKYLAKRIEVYKNNKETFTYKQCSSDLTNLKKELNWLKEPDKFSLQNALKDLENAYEKFFKEKTGFPKFKSKKTNRFSYKTNFTNGNIMYCGQHIKLPKLGMVKIRDKQVPKGRILNATISKEPSGRYYVSLCCTDVDIEAFENTNNQIGLDLGIKEFCISSCGDFIENPKYLKKSLNKLAKLQRELSRKTIGSLNRNKARLKVARLQEHIANQR

SEQ ID NO: 161 - protein, 254 aa, unidentified
MVVVEKAYKFRMYPNKKQQELINKTFGCCRFVYNKYLAKRIDVYKNNKETFTYKQCSSDLTNLKKELKWLKEPDKFSLQNALKDLDNAYKKFFKEKTGFPKFKSKKINRFSYKTNFTNGNIMYCGQHIKLPKLGMVKIRDKQVPQGRILNATISKEPSGRYYVSLCCTDVDIEAFENTNNHIGLDLGIKEFCISSCGEFIENPKYLKKSLNKLAKLQRELSRKTIGSLNRNKARLKVARLQEHIANQRNDFLQK

SEQ ID NO: 162 - protein, 353 aa, unidentified
MKNSSLLNKGYKFRIYPNIHQIAKIEKNFGCVRFVYNYFLSQRIRAYDSAGKTIGYLEQQNHLPLLKKQYPWLKVADSTSLQISIRNLDKAFQNFFKNKAFGFPNFKSKKSIRKCYTVNCVNSNIVIKDGKIKLPKLKWVDAKVHRKVEGRIISATVIKSSSGKYYVSVITEQKKRQIPSTEGKNIISLQMKDFITISNDKSIYYFKYIKKIKKLERKLLSKEKESNNRKKLEKQIGKLYEKIQNKRDDFLHKLSKNIVDENQIIYIQECNVKKGTDYIENCAHLKSFSWSKFCKFLEYKSCWYNKSLIYVENSDSYLNLEYNYKSLNTNIPLNLGEKINVTLMKKILRPHSF

SEQ ID NO: 163 - protein, 335 aa, unidentified
MLKAFKFRIYPTESQKQWLIQTFGCVRFTYNHLLKARQAYYLETKEIDYTLTPASLKKQYPFLKEVDSLALANAQLNLDRAFRNYFKGRASFPKLKNKKSIWQSYTTNNQKGTIYLEETSIKLPKLKEKIRIHAHRPIEGTIRSATISSRYNEIFYVSLLCEVPQKTMEASNKWIGIAYDPDRLVEMSTPLDIAIPKFKQVDQQLQRAKRKLVIKGRAAQHRRAHVERVKNYQKQKRKIKDLYLKQKFQREDYFEQISGTVIRHYDYLFVESIPADCREGDFSIQDWHKLLAKLQYKAQWYSKKLVLIDMKEQTNPSTTKKSLELVEIGKQVLFE

SEQ ID NO: 164 - protein, 295 aa, unidentified
MKTLQAYRFALDLSPRQERAVLAHAGAARVAHNWALARVRAVMSQRAAERTYGVPDELLSPPISWSLPSLRKAWNAAKDEVAPWWAECSKEAFNTGLDALARALKNWSDSRKGARKGHAVGFPRFKSRRRSTPTVTTGVMRIEADRRHVVLPRLGALRLHESARKLARRLEAGTARIMSATVRREGGRWFVSFTCQVERAVRAPARPGSMVGVDLGVKHLAVLSTGERVANPRHLVVAARRMRRLARAVSRCVTPDRRVRRVGSNRCPGRSKSFRGRTRASSGYAATVYTSSPPG

SEQ ID NO: 165 - protein, 326 aa, unidentified
MSSCRTLDNKVDSMKNLKGYRFRIYPNEAQKRFFIETFGCVRFIYNYFLKLDTAERTSEEVITPASLKRDYPFLKKTDSLALANAKRNLDRAFQNYYQQRSGYPKLKNKSSAWQSYTTNNQNGTVRIEDGYLKLPKLKEKIQICEHRKITGKIKSVTISAKNNEEFYASILCVETIDKFEKTGKKIRLSFDEHQLVKQAKYRAEVIEPIQQTKGRLEFLQRKLKVKARVARKQNRVLADCKNYQKQKKQYDKLLTHLNNQIKDYLNHLSIFYIKEYDVIEIVEPEDRSCAKDDLFTSNEWHQLTRLLKYKAQWYGKEIQIINCQNI

SEQ ID NO: 166 - protein, 326 aa, unidentified
MSSCRTLNNKVDSMKNLKGYRFRIYPNEAQKRFFIETFGCVRFIYNYFLKLDTAERTSEEIITPASLKRDYPFLKKTDSLALANAKRNLDRAFQNYYQQRSGYPKLKNKSSVWQSYTTNNQNGTVRIEDGYLKLPKLKEKIQICEHRKITGKIKSVTISAKNNEEFYASILCVETIDKFEKTGKKIRLSFDAHQLVQQAKYRAEVIEPIQHTKGRLAFLQRRLKVKARVARKQNRILVDCKNYQKQKKQYDKLLTHLNNQIKDYLNHLSIFYIKEYDVIEIVEPEDRPCAKDDLFTSNEWHQLVRLLKYKAQWYGKEIQIINCQNI

SEQ ID NO: 167 - protein, 291 aa, unidentified
MADFSLTPATLKKEYPFLKEVDSLALANAQLNLDRAFRNYFKGRASFPKLKTKKSMWQSYTTNNQTHTVYLKNGHLKLPKQKELIKINQHRPVEGTIRSATISARYNEEFYVALLCDVSSIKKESSAKWIGIAYHPKTLIETSQPIEVTLPKFDQTEEKLQHAQRKLSVKVRSAHHRKTRLDKASNYQKQKRKVMDLYLKQKNQREDYLEQLSGKLVKQYDYLFVESFPKEEAHADFSIHDWHKLITKLRYKSQWYNKKFLLINTDGAEESNSVRKSQVLEQLGRHSVIKE

SEQ ID NO: 168 - protein, 313 aa, unidentified
MKNLKGYRFRIYPNEAQKRFFIETFGCVRFIYNYFLKLDTAERTSEEVITPASLKRDYPFLKKTDSLALANAKRNLDRAFQNYYQQRSGYPKLKNKSSAWQSYTTNNQNGTVRIEDGYLKLPKLKEKIQICEHRKITGKIKSVTISAKNNEEFYASILCVETIDKFEKTGKKIRLSFDEHQLVKQAKYRAEVIEPIQQTKGRLEFLQRKLKVKARVARKQNRVLADCKNYQKQKKQYDKLLTHLNNQIKDYLNHLSIFYIKEYDVIEIVEPEDRSCAKDDLFTSNEWHQLTRLLKYKAQWYGKEIQIINCQNI

SEQ ID NO: 169 - protein, 338 aa, unidentified
MLKAFKFRIYPTTLQKQWFIQNFGCVRFTYNYLLKVRQESYAKTGAIDYTVTPASLKKKYPFLKTADSLALANAQLNLDRAFRNYFKGRASFPKLKNKKSMWQSYTTNNQNGTIYLEKNYLKLPKQKERIKVNLHRPVEGVIRSATISARYNEVFYVSLLCEVSAQNLEGSNRWIGVAYDPQKLIETSSPLNVQLPLLKQTQDSIKIAQRKLWIKSKAAQKRKVRLEKAKNYQKQKRKVMDLYLKQKYQKEDYLEQLSGKLIRHYDYLFIEAVPNDCLSTKFSLQDWYKFIHKLRYKAHWYNKSLLLINVNEQSHLSCNQKSVTLENIGKQMMFDEMN

SEQ ID NO: 170 - protein, 313 aa, unidentified
MKNLKGYRFRIYPNEAQKRFFIETFGCVRFIYNYFLKLDTAERTSEEIITPASLKRDYPFLKKTDSLALANAKRNLDRAFQNYYQQRSGYPKLKNKSSVWQSYTTNNQNGTVRIEDGYLKLPKLKEKIQICEHRKITGKIKSVTISAKNNEEFYASILCVETIDKFEKTGKKIRLSFDAHQLVQQAKYRAEVIEPIQHTKGRLAFLQRRLKVKARVARKQNRILVDCKNYQKQKKQYDKLLTHLNNQIKDYLNHLSIFYIKEYDVIEIVEPEDRPCAKDDLFTSNEWHQLVRLLKYKAQWYGKEIQIINCQNI

SEQ ID NO: 171 - protein, 250 aa, unidentified
MIVVEKAYKFRMYPNKKQQELINKTFGCCRFVYNKYLAKRIDVYKNDKETFTYKQCSSDLTNLKKELKWLKEPDKFSLQNALKDLDNAYEKFFKEKAGFPKFKSKKINRFSYKTNFTNGNIMYCGQHIKLPKLGMVKIRDKQVPQGRILNATISKEPSGRYYVSLCCTDVDIEAFENTNNHIGLDLGIKEFCISSCGDFIENPKYLKKSLSKLAKLQRELSRKTIGSLNRNKARLKVARLQEHIANQRND

SEQ ID NO: 172 - protein, 336 aa, unidentified
MLKAFKFRMYPTEEQKQQLIRTFGCVRFTYNHLLKERQKSWQQTGVVDFSLTPATLKKEYPFLKEVDSLALANAQLNLDRAFRNYFKGRASFPKLKTKKSMWQSYTTNNQTHTVYLKNGHLKLPKQKELIKINQHRPVEGTIRSATISARYNEEFYVALLCDVSSIKKESSAKWIGIAYHPKTLIETSHPIEVTLPKFDQTEEKLQHAQRKLSVKVRSAHHRKTRLDQASNYQKQKRKVMDLYLKQKNQREDYLEQLSGKLVKQYDYLFVESFPKEDAHADFSIHDWHKLIKKLRYKSQWYNKKFLLINTDGAEESNFVRKSQVLEQLGRHSVIKE

SEQ ID NO: 173 - protein, 317 aa, unidentified
MEVLKAYKFRLYPTQQQRRFFIETFGCVRFTYNTLLKYRQESHKPKNVRLTPARLKEDFPFLKKTDSLALANAQLNLERAFRNYYKGHAGYPKLKTKRCIWQSYTTNNQHHTIYFQDGKLKLPKLKTLVSLNKHREVPGQIKSATISAKNNRIFYVSILCKEKVVPLPLTKRSVRLNFSKTCLVEASDSELSFPDFSQAEIEGKLQKAERKLAVRGKAARNRHISLSQAKNYQKQKEKVRNLYTHYYERKKTYLNELSMQIIRTYDEIYVETNNKRVNATGPFTSSDWFHFIQKLKYKAVWYGKTVYLNEENRSKIG

SEQ ID NO: 174 - protein, 305 aa, unidentified
MLRMKAYRFRIYPTEEQRVFLIKTFGCVRFTYNTLLKSGSNMQERLSPAKLKKDFPFLKEVDSLALANAQRHLDRAFKNYYQGRASYPKLKSKRSRWQSYTTNNQQHTVYIQDGMLKVPKLKSLIPLELHREIKGNIKTATISAEDSKEFYVSLLCEEDIPIIKKTNKTIKIHFSRERLIEPEMCLEHYYLDILKTEEIIRKAEKRLGVRKHAALKQHKKLSQAQNYQKQKQRVNRLYVHRQNQKNALFDKLSIHLVREYDRIYIQNLPSQEESEKIFYSTDWQRFLTKLSYKAEWYGKEIILDE

SEQ ID NO: 175 - protein, 339 aa, unidentified
MKKEDLVKVLKGYKFRIYPNEKQIQYFIQTFGCVRFTYNHLLHARQKALQAGDYQTQVSPASLKRDYPFLKKTDSLALANAQRNLDRAFKNYFSKRAGYPKLKTKKNNWQSYTTNNQKHTIYFVGNQLKLPKLKSLVTVNLHRKVAGEIKSATVSAQNNQMFFVSLLCLEEINPLPKTGTTIGVAYCPENLVQMSAVNRLPVYKQETLQYQLDKAIKRLEVRAKAAKRRKVLLEQAKNYQKQKSKVQKLYMAKNDQKKNYIDQLTYRLVHDYDCICLEKQPEFTENTKFSETDWQHFLRKIQYKARWYDKQLVFVDSIEKENETKCFTIEQVGKKLINQ

SEQ ID NO: 176 - protein, 254 aa, unidentified
MQAYRFALDLTPSQERAVWSHAGAGRKAHNWALARVKAVLDQRAAERSYGLADDALTPALRWSLPALRKAWNAAKEQVAPWWRECSKEAFNTGLDALARGLKNWSDSRTGKRAGRKVGFPRFKTKHRTTPSVRFTTGTIRVEPDRKHVVLPRLGRLKLHESARKLARSKRWLRAKARLGRAHARVANLRRDGLHKLTTRLAREHATVVVEDLNVAGMMANRRLARHVADAGKRLPGTAPAGKTGTVPPQGRAAA

SEQ ID NO: 177 - protein, 335 aa, unidentified
MLKAFKFRIYPTDSQKQWLIQTFGCVRFTYNHLLKARQAYYLETQEIDYTLTPASLKKQYPFLKEVDSLALANAQLNLDRAFRNYFKGRASFPKLKNKKSIWQSYTTNNQKGTIYLEETYLKLPKLKEKIRIHAHRPIEGTIRSATISSRYNEIFYVSLLCEVPPKTMKASNKWIGIAYDPDRLVEMSTPLDITIPKFKQVDQQLLRAKRKLVIKGRSAQHRRTHVERVKNYQKQKRKIKDLYLKQKFQREDYLEQISGTVIRHYDYLFVESISADCPEGDFSIQDWHKLLAKLQYKSQWYSKKLVLIDMKEQTNPSTNKKSLELIEIGKQVLFE

SEQ ID NO: 178 - protein, 332 aa, unidentified
MKLGVLKAYKFRIYPNGQQRQFFIETFGCVRFTYNQLLEAKMEELANNEAKQGLTPAKLKKEYPFLKETDSLALANAQRNLDRAFRNYFQKRAGFPKMKTKKSIWQSYTTNNQQHTIYFEDDQIKLPKLKTLVPVKKHRAIKGKIKSATISAKNNEEFYISILCLEEIPPLPKQQASVAVVYDPQQLVKANQPIPITCEHAIQTKQKLTRAERKLQVKATAVKRKKILLTQARNYQKLKGKVARLYRFHCCQKREFIDQVSYHLVKQYDTIYLEQIAEDTVLKAGHYSISDWHQFVRKIQYKAQWYGKELRFVTLDTQDQQKLERLSGEMSS

SEQ ID NO: 179 - protein, 258 aa, unidentified
MEKAYKFRMYPNKKQQELINKTFGCCRFVYNKYLAKRIDVYKNDKETFTYKQCSSDLTNLKKELKWLKEPDKFSLQNALKDLDNAYKKFFKEKTGFPKFKSKKINRFSYKTNFTNGNIMYCGQHIKLPKLGMVKIRDKQVPQGRILNATISKEPSGRYYVSLCCTDVDIEAFENTNNHIGLDLGIKEFCISSCGEFIENPKYLKKSLNKLAKLQRELSRKTIGSLNRNKARLKVARLQEHIANQRXKLSILQEMTTFY

SEQ ID NO: 180 - protein, 256 aa, unidentified
MIVVEKAYKFRMYPNKKQQELINKTFGCCRFVYNKYLAKRIEVYKNDKETFTYKQCSSDLTNLKKELKWLKEPDKFLLQNALKDLDNAYKKFFKEKAGFPKFKSKKINRFSYKTNFTNGNIMYFSQHIKLPKLGMVKIRDKQVPKGRILNATISKEPSGRYYVSLCCTDVDIEVFENTNNQIGLDLGIKEFCISSCGDFIENPKYLKKSLNKLAKLQRELSRKTIGSLNRNKARLKVARLQEHIANQRKDFLQKLH

SEQ ID NO: 181 - protein, 261 aa, unidentified
MIAVKKAYKFRLYPNKKQQELINKTFGCCRFVYNKYLAKRIDVYKNNKETFTYKQCSSDLTNLKKELKWLKEPDKFSLQNALKDLDNAYKKFFKEKAGFPKFKSKKINRFSYKTNFTNGNIMYCGQHIKLPKLGMVKIRDKQVPQGRILNATISKEPSGRYYVSLCCTDVDIEAFENTNNHIGLDLGIKEFCISSCGEFIENPKYLKKSLNKLAKLQRELSRKTIGSLNRNKARLKVARLQEHIANQRKDFLQKLSTKLIK

SEQ ID NO: 182 - protein, 336 aa, unidentified
MLKAFKFRMYPTEEQKQQLIRTFGCVRFTYNHLLKERQKSWQQIGVADFSLTPATLKKEYPFLKEVDSLALANAQLNLDRAFRNYFKGRASFPKLKTKKSMWQSYTTNNQTHTVYLKNGHLKLPKQKELIKINQHRPVEGTIRSATISARYNEEFYVALLCDVSSIKKESSAKWIGIAYHPKTLIETSQPIEVTLPKFDQTEEKLQHAQRKLSVKVRSAHHRKTRLDKASNYQKQKRKVMDLYLKQKNQREDYLEQLSGKLVKQYDYLFVESFPKEEAHADFSIHDWHKLITKLRYKSQWYNKKFLLINTDGAEESNSVRKSQVLEQLGRHSVIKE

SEQ ID NO: 183 - protein, 359 aa, unidentified
MKKSSLLNKGYKFRIYPNNEQIAKIEGNFGCARFVYNYYLSQRIGAYNSEGKTIGYLEQQNHLPLLKKHYPWLKVADSTSLQISIRNLDKAFQNFFNNKAFGFPNFKRKKSLRKCYTVNCVNSNIAVKNGKIKLPKLKWVEAKVHRKVEGRIISATVIKNSSGRYYVSIITEQKKREISFIEGENIVSLQMKDFINISNEESIYYFKYIKKISKLEIKLLRKEKESNNRKKLEKQIGKLYEKVQNKRDDFLHNLSKNIVDENQIIYIQEANVKGEKSSVKDYQNLKSFSWSKFCKFLEYKSSWYNRSLIYVENNDNYFNLNYGQKLLNTNIPINFGDKINVTLMKKILHPHSFKYTGIL

SEQ ID NO: 184 - protein, 265 aa, unidentified
MEKAYKFRIYPNKKQQELINKTFGCCRFVYNKYLAKRIDVYKSDKETFTYKQCSSDLTNLKKELKWLKEPDKFSLQNALKDLDNAYKKFFKEKAGFPKFKSKKINRFSYKTNFTNGNIMYCGQHIKLPKLGMVKVRDKQIPQGRILNATISKEPSGRYYVSLCCTDVDIEVFENTNNQIGLDLGIKEFCISSCGEFIENPKYLKKSLNKLAKLQRELSRKTIGSLNRNKARLKVARLQEHIANQRNDFLQKLSTKLIKEXXXXXG

SEQ ID NO: 185 - protein, 335 aa, unidentified
MLKAFKFRIYPTASQKEWFIQNFGCVRFTYNHLLKARQESYARTGAIDYSMTPATLKKKYAFLKSADSLALANAQLNLDRAFRNYFNGRASFPKLKNKKSMWQSYTTNNQKGTIYLEDKYLKLPKQKELIQVRLHRPVEGVIRSATISARYNESFYISLLCEVQIAGVPTTNRWLGVAYDPKKLVETSSPVEVQMPLFRQTRDKMKVAKRKLVIKSKAAQKRKARLENARNYQKQKRKVMDLYQKQKLQKEDYLERVSGNLIRNYDYLFVEAVPSELSSADFQLQDWYKLITKLRYKAQWYNKTLLFINVNEQLNEPPEKKSMELEKIGKQVIFE

SEQ ID NO: 186 - protein, 262 aa, unidentified
MIAVEKAYKFRMYPNKKQQELINKTFGCCRFVYNKYLAKRIEVYKNDKETFTYKQCSSDLTNLKKELKWLKEPDKFSLQNALKDLDNAYKKFFKEKAGFPKFKSKKINRFSYKTNFTNGNIMYCGQHIKLPKLGMVKIRDKQVPKGRILNATISKEPSGRYYVSLCCTDVDIEVFENTNNQIGLDLGIKEFCISSCGEFIENPKYLKKSLNKLAKLQRELSRKTIGSLNRNKARLKVARLQEHIANQRNDFLQKLSTKLIKE

SEQ ID NO: 187 - protein, 333 aa, unidentified
MKVLKGYKFRIYPNEKQIQYFIQTFGCVRFTYNHLLHARQKALQAGDYQTQVSPASLKRDYPFLKKTDSLALANAQRNLDRAFKNYFSKRAGYPKLKTKKNNWQSYTTNNQKHTIYFVGNQLKLPKLKSLVTVNLHRKVAGEIKSATVSAQNNQMFFVSLLCLEEINPLPKTGTTIGVAYCPENLVQMSAVNRLPVYKQETLQYQLDKAIKRLEVRAKAAKRRKVLLEQAKNYQKQKSKVQKLYMAKNDQKKNYIDQLTYRLVHDYDCICLEKQPEFTENTKFSETDWQHFLRKIQYKARWYDKQLVFVDSIEKENETKCFTIEQVGKKLINQ

SEQ ID NO: 188 - protein, 312 aa, unidentified
MKTIQAYRFALDLTPGQEWAVYAHAGAARVAHNWALARVKAVLDQRAAERTYGVSDDQLTPAVSWSLPALRKAWNAAKPEVAPWWGEVSKEAFNTGLDALARGLKNWADSRKGKRAGRPVGFPRFKSRRRTTPSVRFTTGAIRVEPDRKHIVLPRLGRLKLHESARKLARRLEAGTARIMSAAVRRDGGRWHVSFTVEVERAERTPDRPGSVIGIDVGIKHLAVLSTGELVPNPRHLATAQDRLRRLGRALSRKSGPDRRTGRRPSKRWQRAAYAGRWPRSVNPARHQSVRPGPSHRKAGLPTVCSLERTER

SEQ ID NO: 189 - protein, 314 aa, unidentified
MNVLKAYKFRIYPTLEQQQFFIETFGCVRFTYNVLLKNREHQELREYPEEALTPAKLKQDYPFLKKTDSLALANAQRNLERAFRNYYAGRCSHPKLKTKKAMWQSYTTNNQQGTIRIENSQLKLPKIKSLVPLHQHREIKGTIKSATISAKNLEEFYVSLLCEEQVRHLPKTKQKLTIHYSPGQLLTTDQQLDLTAFDQEQLKQKIAKEERRLEVRGISARRRLVKLKDAKNYQKQKKRVLALHRHKRARQEAYMDELSLLLVKEFDTIHILATPPQSTGNFSYSDWQKFLQKLTYKAHWYGKTLHHEATAKQG

SEQ ID NO: 190 - protein, 314 aa, unidentified
MKVLKAYKFRIYPTSEQRQFFIETFGCVRFTYNSLLKNREYRDLRDDPGELLTPAKLKQKHPFLKKTDSLALANAQRNLDRAFRNYYAGRCSHPKLKTKKAMWQSYTTNNQQGTIRIETGRLKLPKIKTLIPLLLHREIKGEIKSATISAKNLEEFYVSLLCEEQVAHLPKTSRTISIRFCPQQLVLADAPLSGLGFCQKELSEKLLKEERRLAIRALSARRRLVKLKEAKNYQKQKNRVMDLQRHKRARQKAYMDELSLTLVKDFDEIIICFEPKQSAVAFNWSDWQKFLQKLKYKARWYGKTVNLQTLSKNA

SEQ ID NO: 191 - protein, 313 aa, unidentified
MLLTLRQQESGKTVEERTSARLQKQKMTPAKLKKDYPFLKATDSLALANAQRNLEKAFQNYYRGRASYPKLKSKKSAWQSYTTNNQGHTIYLAEDGLKLPKLKSKVLVHQHRSVAGKIRSATISAKNRQEFYVSLLCEEDIPALPKTGSEIEIAYDPTGLVVTNKPIVGIPTFCQTQVLEKLKKAQRRLSCRAKSAQRRNAKLEQAKNYQKQKSQVQQLYIHKLKQKEDFTEQLSIALLRQFDCIIITKPPELRENKESKAAKTVKKSKHTTVFPSFEDNFTLSDWNRLLLKLKYKAEWYEKELVFICPTNGK

SEQ ID NO: 192 - protein, 265 aa, unidentified
MDQRAAERSYGIPQEHLTPTIGWSLPALRRWWNAVKGEVAPWWRDYSKEAYNTGLDALARALKNWAESRSGRRAGGRAVGFPRFKSRRRSIPSVRFTTGTIRVEPDRRHVVLPRLGRLRLHESARKLARRLQAGTARILSATVRRHGHRWYVSFTCHVERAHRTPARPDATVGVDLGVKHERTFTCTTCSLVLDRDVNAARNLAALAATVAGSGPETLNGRGADHKTPPTGPVAVKRPPGTATADKTGTVPPQGGTSDHELIPAS

SEQ ID NO: 193 - protein, 333 aa, unidentified
MAGAKSYPVVSVPGVGHRDRLSVVQAYRFALDLSPAQERAVLGHAGAARTAYNWGLERVKAVLNQRAAERSYGIGDDQLTPTIGWSLPALRRSWNAAKDEVAPWWRDYSKEAYNTGLDALARALKNWADSRSGRRASRPVGCPRFRSRRRSAPSVRFTTGAIRVEPDRKHVVLPRLGRLRLHESARKLARRLEAGAARFLSATVRRDGHRWYVSFTCEVQRAPRTPARPCATVGVDLGVRHLAVLSTGGPVPNPRHLDAALRKLRRLSRGLSRKVAPDRRTRRDASIRWQRARGQLGRVHARVANLRRTATADKTGTVPPQGRTSNHALTPAS

SEQ ID NO: 194 - protein, 313 aa, unidentified
MKNLKGYRFRIYPNEAQKRFFIETFGCVRFIYNYFLKLDTAERTSEEIITPASLKRDYPFLKKTDSLALANAKRNLDRAFQNYYQQRSGYPKLKNKSSVWQSYTTNNQNGTVRIEDGYLKLPKLKEKIQICEHRKITGKIKSVTISAKNNEEFYASILCVETIDKFEKTGKKIRLSFDTHQLVQQAKYRAEVIEPIQHTKGRLAFLQRRLKVKARGARKQNRILADCKNYQKQKKQYDKLLTHLNNQIKDYLNHLSIFYIKEYDVIEIVEPEDRSCAEDALFTSNEWHQLVRLLKYKAQWYGKEIQIINCQNI

SEQ ID NO: 195 - protein, 313 aa, unidentified
MKNLKGYRFRIYPNEAQKRFFIETFGCVRFIYNYFLKLDTAERTSEEIITPASLKRDYPFLKKTDSLALANAKRNLDRAFQNYYQQRSGYPKLKNKSSAWQSYTTNNQNGTVRIEDGYLKLPKLKEKIQICEHRKITGKIKSVTISAKNNEEFYASILCVETIDKFEKTGKKIRLSFDEHQLVKQAKYRAEVIEPIQHTKGRLAFLQRRLKVKARVARKQNRILADCKNYQKQKKQYDKLLTHLNNQIKDYLNHLSIFYIKEYDVIEIVEPEDRSCAEDALFTSNEWHQLVRLLKYKAQWYGKEIQIINCQNI

SEQ ID NO: 196 - protein, 318 aa, unidentified
MKNLKGYRFRIYPNEAQKRFFIETFGCVRFIYNYFLKLDTAERTSEEIITPASLKRDYPFLKKTDSLALANAKRNLDRAFQNYYQQRSGYPKLKNKSSVWQSYTTNNQNGTVRIEDGYLKLPKLKEKIQICEHRKITGKIKSVTISAKNNEEFYASILCVETIDKFEKTGKKIRLSFDAHQLVQQAKYRAEVIEPIQHTKGRLAFLQRRLKVKARVARKQNRILADCKNYQKQKKQYDKLLTHLNNQIKDYLNHLSVFYIKEYDVIEIVEPEDRSCAEDALFTSNEWHQLVRLLKYKAQWYGKEIQIINCQNIQKNNW

SEQ ID NO: 197 - protein, 313 aa, unidentified
MKNLKGYRFRIYPNEAQKRFFIETFGCVRFIYNYFLKLDTAERTSEEIITPASLKRDYPFLKKTDSLALANAKRNLDRAFQNYYQQRSGYPKLKNKSSVWQSYTTNNQNGTVRIEDGYLKLPKLKEKIQICEHRKITGKIKSVTISAKNNEEFYASILCVETIDKFEKTGKKIRLSFDAHQLVQQAKYRAEVIEPIQHTKGRLAFLQRRLKVKARVARKQNRILVDCKNYQKQKKQYDKLLTHLNNQIKDYLNHLSIFYIKEYDVIEIVEPEDGPCAKDDLFTSNEWHQLVRLLKYKAQWYGKEIQIINCQNI

SEQ ID NO: 198 - protein, 336 aa, unidentified
MLKAFKFRMYPTEEQKQQLIRTFGCVRFTYNHLLKERQKSWQQTGVVDFSLTPATLKKEYPFLKEVDSLALANAQLNLDRAFRNYFKGRASFPKLKTKKSMWQTYTTNNQTHTVYLKNGHLKLPKQKELIKISQHRPVEGTIRSATISARYNEEFYVALLCDVSSIKKESSAKWIGIAYHPKTLIETSHPIEVTLPKFDQTEEKLQHAQRKLSVKVRSAHHRKTRLDQASNYQKQKRKVMDLYLKQKNQREDYLEQLSGKLVKQYDYLFVESFPKEDAHADFSIHDWHKLITKLRYKSQWYNKKFLLINTDGAEESNFVRKSQVLEQLGRHSVIKE

SEQ ID NO: 199 - protein, 308 aa, unidentified
MSVLKAYKFKIYPNEAQKEFFVKTFGCVRFTYNHLLIARSQTDGKKMTPASLKKEYPFLKETDSLALANAQRNLETAFRRYYTGKSDYPKFKNKSNIWQSYTTNNQGQTICLTDGLLKLPKLKTRIAVNEHREIKGQIKSATISAKNNEEFYVSILCLESIEALPKTTLEIQLRYSPEELLDNLSGLTTLNFDQAAILCKMAKMNRRLKLRGKIARKKKVPLAYAKNYQKQKVKLSRLQGHQKEKKEDYFNQLSYTLIRDFDRITVDKAKLSDRSDDETVNFTKADWQTFLRKLQYKADWYGKEIIYQ

SEQ ID NO: 200 - protein, 309 aa, unidentified
MKELKGYRFRIYPDEIQKKFFVETFGCVRFTYNHLLMNKQEPGIDKMTPAQLKQAHPFLKEVDSLALANAQRNLERAFRNYHNGRAGYPKLKSKKNSWQSYTTNNQKGTIHLSEGYLKLPKLKERVALNQHREVKGEIKSATISAKNNQEFYVSLLCLEEIPPLKKTGEVVHLNFDEEHLVQLDRKLILPKFCQEKLEQKIEQAERRLSCRKKAARRKKIQLQSAQNYQKQKRIVEQLQQEKANQMKNHLEQVSFLLVNHFDKINIQSQSSNLEAPNAIPNFQLKDWKQFVSKLRYKTQWYQKELVKQK

SEQ ID NO: 201 - protein, 293 aa, unidentified
MKAIQAYRYALDLTPAQERAALAHAGAARVAHNWALARVAAVMNQRAAERTYGVADADLTPAIGWSLPALRKAWNAPKDEAAPWWRECSKEAFNTGLDALARALKNWSDSRTGKRAGRPVGFPRFKSRRRSVPSVRFTTGPIRVEPDRKHVVLPRLGRLKLHGFGELRRQLAYKTQWNGGRLIVADRWYPSSKTCSGCGAVKTKLALSERTYTCTTCGMVLDRDLNAARNLAALATGVDTAGSGPVTGRGADRKTRPGGQVATKRQPGTAIADQTGTVPPQGRTTDHVLARAH

SEQ ID NO: 202 - protein, 310 aa, unidentified
MVLKAYKFRIYPTNEQKEFLIQTFGCVRFTYNTLLKHHQQNGGGKSKKLTPASLKKEFLFLKVTDSLALANAQQNLKRAFQNYYQGRSGYPKLKLKKSVWQSYTTNNQKQTIWLKDDLLKVPKLKQPIAVHCHRPVTGQIKSATIMAKNGQQFFVSLLCEEQITPLPKTNVTTTLHFSPDQLVSGSDLVFFRTLCQKNVENKLTKAKRKLEIKAKSAQQRGVKLSAAQNYQKQKVKVQQLYHHKQQQKKAWMDELSLHLIKKYDFLYIKVPHNIQEGVFTLTDWQHFLVKLQYKATWYDKKVIFAAEKVI

SEQ ID NO: 203 - protein, 261 aa, unidentified
MKSIRTKLKLNNKQKTLMAQHAGYSRWVYNWGLSLWNAAYRDGYQPNARKLREVFTNHTKPLYPWMKSLSSKVYQYALINLGEAFKRFFQGLGKYPRFKKKGKHDSFTIDNFGKPIELNGWSHKLPFIGMVKTYEPIEATTQKITISRQADDWYLSLAFEFTPTSTEKITDVVGVDLGVKTLATLSTGEVFNSVKPYRKAQNKLAKLQRQVSRKVKHSRNWYKAVIKLAKQHRRVANIRKDALHKLTTYLAKVRLVPVRSL

SEQ ID NO: 204 - protein, 261 aa, unidentified
MKSIRTKLKLNNKQKTLMAQHAGYSRWCYNWGLSLWNAAYKDGFKPNARKLRDVFTNHTKPLYPWMKNLSSKVYQYAFINLSEAFKRFFKGLGKYPRFKKKGRSDSFTIDNCGKPIELNGWNHKLPFIGMVKTYEPIEATTQKITISRQASDWYLSCSYEFTPTATSKTTEVVGVDLGIKTLATLSTGEIFKSVKPYRQAQNRLAKLQRQLSRKVKHSNNWYKVVIKLAKQHRQVANIRKDALDKLTTYLAKVRLVPVRSL

SEQ ID NO: 205 - protein, 313 aa, unidentified
MVVQAYRFALDPTPAQDRDLHRHAGAGRFAFNWALAAVRANLDQRAAERTYGLDGEQLTPALGWSLPALRRAWNTAKPQVVPWWGQCSKEAFNTGLDGLARALGNWSASRSGRRAGARVGFPRFRSRRRVTPSVRFTTGTIRVEDTRHHVTLPRLGRIRTHESTRKLARRLHAGTARIMSATVRHTGGRWHVSFTVQITRTVCTPAYSQQTVGVDVGIANLAVLSTGQIVPNPAIWPPLPGGCAPQPGPCPDGKDQTGAPAGSRPGAGSRPKPAWPAHTPGSRTCAPTACTNSPRPWPAPTARSWSRTSTSPG

SEQ ID NO: 206 - protein, 313 aa, unidentified
MKNLKGYRFRIYPNEAQKRFFIETFGCVRFIYNYFLKLDTAERTSEEIITPASLKRDYPFLKKTDSLALANAKRNLDRAFQNYYQQRSGYPKLKNKSSVWQSYTTNNQNGTVRIEDGYLKLPKLKEKIQICEHRKITGKIKSVTISAKNNEEFYASILCVETIDKFEKTGKKIRLSFDAHQLVQQAKYRAEVIEPIQHTKGRLAFLQRRLKVKARVARKQNRILADCKNYQKQKKQYDKLLTHLNNQIKDYLNHLSIFYIKEYDVIEIVEPEDRSCAEDALFTNNEWHQLVRLLKYKAQWYGKEIQIINCQNI

SEQ ID NO: 207 - protein, 309 aa, unidentified
MSVLKAYRFKIYPDEAQKQFFVATFGCVRFTYNHLLVASQQKKEQKLTPAKLKKEYPFLKETDSLALANAQRNLEKAFRRYFTGKSDFPKFKHKSNPWQSYTTNNQGHTIYLKEGQLKLPKLKSLVKVNYHREITGQIKSATISAKNNTDFYVSILCVEEIPSLPQTSQSITIAYSPSELLEGSQSLLQITFNQDSLVTKIDKVQKKLKIRAKVARKNRIPLAEAKNYQKLKERLARLQVSQKEKKEDFFDQLSYYLVCHFDQIMVDATIIENNQEACTVVFTKADWHCFYKKLVYKSNWYGKKLIDLD

SEQ ID NO: 208 - protein, 308 aa, unidentified
MKKLKGYRFRIYPEEDQRQFFIETFGCVRFTYNHLLMAKKDKTVESLTPAQLKKDYPFLKKTDSLALANAQRNLDRAFSNYYRGRAGYPKLKNKKAIWQSYTTNNQKNTIQLLNGTLKLPKLKTAVKVEQHRVVHGLIKSATISAKNNTEFYVSLLCLEEIQPLEKTGEKTIVMFHPTTFIQTDANITLPTLDLNPLNQKIEKEQLKLVRRKKVARTRGVALSDSKNYQKQKQRVEQLVLTKSNKKINFFDQLTWILVQQFDKIAISTPAPEDFCEEGLYSPSDWQQFLIKIHYKIDWYQKELHQQQK

SEQ ID NO: 209 - protein, 361 aa, unidentified
MISEGRQVPIKILKAYKFALYPDEAQKQFFIQTFGCVRFTYNTLLTLRQTNYQDNSETFTNPASGRLKTQKLTPAKLKKEYSFLKATDSLALANAQRNLEKAFQNYYRGHASYPKLKSKKSAWQSYTTNNQGHTIYLEKDGLKLPKLKSKVLLHQHRNVTGKIRSATISAKNRQEFYVSLLCEEDSTALPKTGSKIEITYNGITLIEPSVAVRGIPTLCQVQLLAQLKKAQRRLAIRAKSAQRRNVKLEQAKNYQKQKLRLQQLYIRKMKQKEDFTEQLSIALVRQFDCIVVTMPAAGDDETKNKGNKALKTQKNNQNTPVLQNIEEKFTLSDWNRLLLKLKYKADWYEKELVFCSKQKAK

SEQ ID NO: 210 - protein, 329 aa, unidentified
MSVLKGYKFRIYPDEKQKKFFIETFGCVRFTYNHLLMARQTGAARNTTMTPASLKKEYPFLKKTDSLALANAQRNLDRAFRNYFSGRAGYPKLKTKKSTWQSYTTNNQQHTVYLEGEYLKVPKLKSLVPVHLHREIRGKIKSVTISAKRNREFYASILCVEEVEELPKTNDLVGISYCPENLIQISAQRELPQIDQSHLIKQLGKEQKKLQLRAKVAKKRKVRLINAKNYQKQKERVLKLRTTKLDQKRNFIDQLTISLVRDFDYLFIESKPKFQNESGEFSEADWQQFIQRIQYKGRWYGKEVRYIEVKELKNEKCKEIERLGRAQLT

SEQ ID NO: 211 - protein, 313 aa, unidentified
MKNLKGYRFRIYPNEAQKRFFIETFGCVRFIYNYFLKLDTAERTSEEIITPASLKRDYPFLKKTDSLALANAKRNLDRAFQNYYQQRSGYPKLKNKSSVWQSYTTNNQNGTVRIEDGYLKLPKLKEKIQICEHRKITGKIKSVTISAKNNEEFYASILCVETIDKFEKTGKKIRLSFDAHQLVQQAKYRAEVIEPIQHTKGRLAFLQRRLKVKARVARKQNRILVDCKNYQKQKKQYDKLLTHLNNQIKDYLNHLSIFYIKEYDVIEIVEPEDRSCAKDDLFTSNEWHQLVRLLKYKAQWYGKEIQIINCQNI

SEQ ID NO: 212 - protein, 313 aa, unidentified
MKNLKGYRFRIYPNEAQKRFFIETFGCVRFIYNYFLKLDTAERTSEEIITPASLKRDYPFLKKTDSLALANAKRNLDRAFQNYYQQRSGYPKLKNKSSVWQSYTTNNQNGTVRIEDGYLKLPKLKEKIQICEHRKITGKIKSVTISAKNNEEFYALILCVETIDKFEKTGKKIRLSFDAHQLVQQAKYRAEVIEPIQHTKGRLAFLQRRLKVKARVARKQNRILVDCKNYQKQKKQYDKLLTHLNNQIKDYLNHLSIFYIKEYDVIEIVEPEDRSCAKDDLFTSNEWHQLVRLLKYKAQWYGKEIQIINCQNI

SEQ ID NO: 213 - protein, 361 aa, unidentified
MISEGRQVPIKILKAYKFALYPDEAQKKFFIQTFGCVRFTYNTLLTLRQTNYQDNSETFTNPASGRLKTQKLTPAKLKKEYSFLKATDSLALANAQRNLEKAFQNYYRGHASYPKLKSKKSAWQSYTTNNQGHTIYLEKDGLKLPKLKSKVLLHQHRNVTGKIRSATISAKNWQEFYVSLLCEEDSTALPKTGSKIEITYNGTTLIEPSVAVRGIPTLCQVQLLAQLKKAQRRLAIRAKSAQRRNVKLEQAKNYQKQKLRLQQLYIRKMKQKEDFTEQLSIALVRQFDCIVVTMPAAGDDETKNKGNKALKTQKNNQNTPVLQNIEEKFTLSDWNRLLLKLKYKADWYEKELVFCSKQKAN

SEQ ID NO: 214 - protein, 321 aa, unidentified
MGKNQRKVLKAYKFRIYPTKAQQKFLIQTFGCVRFTYNTLLKQRQFNTIEASKKLTPAALKKEFPFLKLTDSLALANAQRNLARAFQNYYQGRSGHPKMKLKKSTWQSYTTNNQQQTIWLKDNLLKVPKLKQPIAVVCHRKVVGKIKSATITAKNLQQFYVSLLCEEEVGHLPKTKTEIELRFAPNQLVVGNQLKFCRQLCVNDLETKLKKAKRKLEIKAKSAQQRKVRLAEAKNYQKQKLKVQKLYHHKQQQKKAWIDELTMHLIKNYDFLYVEVPKNGIEGSFTLADWQSFLVKLQYKANWYGKKVIFLTAAKTVRKIS

SEQ ID NO: 215 - protein, 277 aa, unidentified
MDLTPRQERAVLAHAGAARVAHNWALARVKAVMDQRAAERTYGIDEVDLTPTQGWSLPALRRAWNQAKADVAPWWAECSKEAFNTGLDALARGLKNWSDSRTGKRAGRRVGFPRFKSRRRSTPSVRFTTGAIRVEPDRRHVVLPRLRRLKLHESARKLARRLEAGTARVVSATVRRDGGRWYVSFTCAVQRVQGVPACPDATVGVDLGVSHLAVLSTGEVEPNPRHLDVAARRLRRLARRGPLAGSARTGAPVGVGRCGGSARPARSGACPGCSSAP

SEQ ID NO: 216 - protein, 328 aa, unidentified
MKNLKGYRFRIYPNEAQKRFFIETFGCVRFIYNYFLKLDTAERTSEEIITPASLKRDYPFLKKTDSLALANAKRNLDRAFQNYYQQRSGYPKLKNKSSVWQSYTTNNQNGTVRIEDGYLKLPKLKEKIQICEHRKITGKIKSVTISAKNNEEFYASILCVETIDKFEKTGKKIRLSFDAHQLVQQAKYRAEVIEPIQHTKGRLAFLQRRLKVKARVARKQNRILVDCKNYQKQKKQYDKLLTHLNNQIKDYLNHLSIFYIKEYDVIEIVEPEDRPCAKDDLFTSNEWHQLVRLLKYKAQWYGKEIQIINCQNIKKITGRGARVRLGNN

SEQ ID NO: 217 - protein, 313 aa, unidentified
MKNLKGYRFRIYPNEAQKRFFIETFGCVRFIYNYFLKLDTAERTSEEVITPASLKRDYPFLKKTDSLALANAKRNLDRAFQNYYQQRSGYPKLKNKSSVWQSYTTNNQNGTVRIEDGYLKLPKLKEKIQICEHRKITGKIKSVTISAKNNEEFYASILCVETIDKFEKTGKKIRLSFDEHQLVKQAKYRAEVIEPIQQTKGRLEFLQRKLKVKARVARKQNRVLADCKNYQKQKKQYDKLLTHLNNQIKDYLNHLSIFYIKEYDVIEIVEPEDRSCAKDALFTSNEWHQLTRLLKYKAQWYGKEIQIINCQNI

SEQ ID NO: 218 - protein, 313 aa, unidentified
MKNLKGYRFRIYPNEAQKRFFIETFGCVRFIYNYFLKLDTAERTSEEIITPASLKRDYPFLKKTDSLALANAKRNLDRAFQNYYQQRSGYPKLKNKSSVWQSYTTNNQNGTVRIEDGYLKLPKLKEKIQICEHRKITGKIKSVTISANNNEEFYASILCVETIDKFEKTGKKIRLSFDAHQLVQQAKYRAEVIEPIQHTKGRLAFLQRRLKVKARVARKQNRILADCKNYQKQKKQYDKLLTHLNNQIKDYLNHLSIFYIKEYDVIEIVEPEDRSCAEDALFTSNEWHQLVRLLKYKAQWYGKEIQIINCQNI

SEQ ID NO: 219 - protein, 313 aa, unidentified
MKNLKGYRFRIYPNEAQKRFFIETFGCVRFIYNYFLKLDTAERTSEEVITPASLKRDYPFLKKTDSLALANAKRNLDRAFQNYYQQRSGYPKLKNKSSAWQSYTTNNQNGTVRIEDGYLKLPKLKEKIQICEHRKITGEIKSVTISAKNNEEFYASILCVETIDKFEKTGKKIRLSFDEHQLVKQAKYRAEVIEPIQQTKGRIEFLQRKLKVKARVARKQNRVLADCKNYQKQKKQYDKLLTHLNNQIKDYLNHLSIFYIKEYDVIEIVEPEDRSCAKDALFTSNEWHQLTRLLKYKAQWYGKEIQIINCQNI

SEQ ID NO: 220 - protein, 335 aa, unidentified
MKVLKGYRFRIYPDEEQLTFFRQTFGCVRFTYNQLLMARKNTANSEESMKLTPAALKKDYPFLKKTDSLALANAQRNLERAYANFFQGRASYPKLKNKKSTWQSYTTNNQKHTIYFVDEKLKLPKLKSLIQVHQHREIKGLIRSATISAKNNEEFYVSLLCLEEVTSLPKTKKAIGISYCPKHLLHVSKPLDHLETIEEQMQEDRLIKAKRKLFLRAKIAKKHKVKLKDAKNYQKQKQKVHKLIQEKACRKKDFIDQLTFSLVKEFDYIFVEKQPSTADSEETSLFTSSDWYLFMQKLTYKTQWYGKKYLAIEKPANTENSGQMIEELGKQRLGL

SEQ ID NO: 221 - protein, 335 aa, unidentified
MKVLKGYRFRIYPDEEQLTFFRQTFGCVRFTYNQLLMARKNTANSEESMKLTPAALKKDYPFLKKTDSLALANAQRNLERAYANFFQGRASYPRLKNKKSTWQSYTTNNQKHTIYFVDEKLKLPKLKSLIQVHQHREIKGLIRSATISAKNNEEFYVSLLCLEEVTSLPKTKKAIGISYCPKHLLHVSKPLDHLETIEEQMQEDRLIKAKRKLFLRAKIAKKHKVKLKDAKNYQKQKQKVHKLIQEKACRKKDFIDQLTFSLVKEFDYIFVEKQPSTADSEETSLFTSSDWYLFMQKLTYKTQWYGKKYLAIEKPANTENSGQMIEELGKQRLGL

SEQ ID NO: 222 - protein, 265 aa, unidentified
MIAVEKAYKFRVYPNKKQQELINKTFGCCRFVYNKYLAKRIDVYKNNKETFTYKQCSSDLTNLKKELKWLKEPDKFSLQNALKDLDNAYKKFFKEKAGFPKFKSKKINRFSYKTNFTNGNIMYCGQHIKLPKLGMVKVRDKQVPKGRILNATISKEPSGRYYVSLCCTDVDIEAFENTNNHIGLDLGIKEFCISSCGEFIENPKYLKKSLNKLVKLQSELSRKTIGSLNRNKARLKVARLQEHIANQRNDFLQKLSTKLIKENDI

SEQ ID NO: 223 - protein, 300 aa, unidentified
MKQKKRFFIETFGCVRFIYNYFLKLDTAERTSEEIITPASLKRDYPFLKKTDSLALANAKRNLDRAFQNYYQQRSGYPKLKNKSSVWQSYTTNNQNGTVRIEDGYLKLPKLKEKIQICEHRKITGKIKSVTISAKNNEEFYASILCVETIDKFEKTGKKIRLSFDAHQLVQQAKYRAEVIEPIQHTKGRLAFLQRRLKVKARVARKQNRILADCKNYQKQKKQYDKLLTHLNNQIKDYLNHLSIFYIKEYDVIEIVEPEDRSCAEDALFTSNEWHQLVRLLKYKAQWYGKEIQIINCQNI

SEQ ID NO: 224 - protein, 313 aa, unidentified
MKNLKGYRFRIYPNEAQKRFFIETFGCVRFIYNYFLKLDTAERTSEEVITPASLKRDYPFLKKTDSLALANAKRNLDRAFQNYYQQRSGYPKLKNKSSAWQSYTTNNQNGTVRIEDGYLKLPKLKEKIQICEHRKITGKIKSVTISAKNNEEFYASILCVETIDKFEKTGKKIRLSFDAHQLVKQAKYRAEVIEPIQQTKGRLEFLQRKLKVKARVARKQNRVLADCKNYQKQKKQYDKLLTHLNNQIKDYLNHLSIFYIKEYDVIEIVEPEDRSCAKDALFTSNEWHQLVRLLKYKAQWYGKEIQIINCKNI

SEQ ID NO: 225 - protein, 309 aa, unidentified
MLKAYKFRIYPTNEQKEFLIQTFGCVRFTYNTLLKHHQQNGGGKSKKLTPASLKKEFLFLKVTDSLALANAQQNLKRAFQNYYQGRSGYPKLKLKKSVWQSYTTNNQKQTIWLKDDLLKVPKLKQPIAVHCHRPVTGQIKSATIMAKNGQQFFVSLLCEEQITPLPKTNVTTTLHFSPDQLVSGSDLVFFRTLCQKNVENKLTKAKRKLEIKAKSAQQRGVKLSAAQNYQKQKVKVQQLYHHKQQQKKAWMDELSLHLIKKYDFLYIKVPHNIQEGVFTLTDWQHFLVKLQYKATWYDKKVIFAAEKVI

SEQ ID NO: 226 - protein, 332 aa, unidentified
MKVLKAYKFRIYPNEEQIQYFIQTFGCVRFTYNQLLYTRKKALQEGDYETRLTPAQLKKDYPFLKQTDSLALANAQRNLDRAFKNYFSKRAGYPKWKSKKSSWQSYTTNNQKHTIYFIGEELKLPKLKSLIKVNLHREILGEIKSATISAKNNQLFFVSILCLENVVSLPKTGKSIGIAYCPENLVQMSSTNVFLNRKSNSYYQLKTAKKKLELRARLAKKRKVLLSQAKNYQKQKRKVQKLYMKIDNQKNDYINQLTYYLVKNYDHIYLEKYPKFSENVQFSETDWQHFLRKIQYKVSWYNKQLVFIAPNTKEIEEKCFAIEQLGRQLTTS

SEQ ID NO: 227 - protein, 319 aa, unidentified
MMEVTRVIVIQLKPTKEQKIILKHLTYSASKLWNIANYNIKQGNIKPKELKPTLKENFWYKNLHSQSAQAVLEKLQIAWENCYKKHTKEPRFQPKDGHFPVRWKKQGLQINNGQIRLSLSKQTKQYLKNMHSIKSDYLWISLPKNLSLNGVQEVEIKPPSSKKLHYLIIKERNYVRDYIHKVSTFIVREALSKDVKTIAIGKLSKNITKIDIGRQNNEKLHKIPFGKLCNMIEYKAKEVGINVIYVNEGYTSQTCSICGDVNKTNRKYRGLYICKCGNVINADVNGGINILKRVSPNLTLGRSRGNLNIPTRVRMYNTL

SEQ ID NO: 228 - protein, 370 aa, unidentified
MRADTVYSSLRKSRYESWNVLPSILPYSGNEANYQRRQAFLKKQKKLPNYSQQCRHFKHSDNFKAIGTGKGQAVLKKLDEAWSSFWTLKRLQSEEGRLPPNIRRVRMPSYLKDRDSKQTVVRGFYVRNDCYRLDRKRSTITIIGKNLRLRYAADRVREGKKGRLDVMYDRLKDAWYAFIPVDTAPAKQAVVSGQPEKVGSIDLGICNLVAFYAENEQPVIYSGRAVLSDYVYRTKKIAELQSRLPQKQQHTSRKIGLSYRKRTRRFKHATRAMLKDLFERMKQIGITKVAVGDLNGIRDGNNLGAHTNQKLHNFWSHLQTIEWIRHMCEDYSMEFVQVSEKGTSKTCCVCAVKDIMAGYIEACTSAKKTG

SEQ ID NO: 229 - protein, 240 aa, unidentified
MKQQVSFKFRLKPDGQQERQMRRFAGACRFVFNRALALQNENHEAGKKYIPYTKMASWLVEWKKDTETEWLKDSPSQPLQQSLKDLERAYKNFFQNRAAFPRFKKRGQNDAFRYPQGVKLDQENSRIFLPKLGWMRYRNSRQVTGIVKNVTVSQSCGKWYISIQTEREVSTPVHPSASMVGLDAGVAKLATLSDGTVFEPVNSFQKNQKKLARLQRQLSRKVKFSNNWQKQKRKIQRLHS

SEQ ID NO: 230 - protein, 241 aa, unidentified
MSKNLYNLSTYRYRQHFFQTGQKLSFNDLYHQVSKTSAYYALPNTKVAKQIIRRIDQSWKGYFQAHKDWSRVDNYLHTVSRRVIDWCLLNSIGTLVIGKNDHWKQSINIGKKNNQQFVSIPHARLIEMLCYKGELMGIKVVVTEESYTSQSSFLDFDTLPSYGEKKPKFSGKRIKRGLYKTSTGKLINADVNGSYNCIRKHLQQEKVKSNAFHSHDLMALPFMPVTYDPLRTHNLNFLQIV

SEQ ID NO: 231 - protein, 286 aa, unidentified
MHESFALVNASKLWNVARWTAGRVWDACGQIPDDGVLKSYLKGSGRYVDLHSQSSQRVLEELAEAFTGWYGHRNNGNQKAXXRSTVTFKQAGFKHDTENQRIRLSKGRNLKDHRSDFVLCEYDVIGPRGTTVENVQQVRAVHEHGIWRLHIVCNVEIDVPDAPGNGVAGIDLGICNVAAVVCNVEIDVPDAPGNGVAGIDLGICNVAAVSFGDESLLYPGGALKEDDYYFAKKRAECDECSSREARRLDQKRTDRRTHFLHALSKHIVQQCVERGVGTIVVGDLGG

SEQ ID NO: 232 - protein, 512 aa, unidentified
MPRRRDVDTEPVVHRTARIGLRLTRAQRQRCFGLLRCAGDVWACLLEINWWRRHRGDPPVAGYQQLCRLLAESGPGIFGELDSAGARSVLRRYSDAWFSAAARRKAGALEVRYPRRRRASMPIRWYNGTFTLTGRALRLPTARGCPPLMVRLDRHLPYPPGTVRSVTLLFADGRLCIDVTAELPVTTYPAERAPDPQRVAGVDLGIIHPFAVAGPDGEALLVSGRAIRAEHRLHLADTEHRQRATADRAPSRGQHGSRRWRKTRRRARLVEGRHRRRVRQALHEAAKTVIHWAIQQRIGTLTVGDPRGVLNLQAGRRHNLRLRXWQIGRTLQILHDKATLAGIQLHLVDERAPRRPVPTAGNASPNPPAGPCPARIASSPGIVISPRRSPSPPAPRAAQPPPSASRRLGWLRTVEPDDTSPESPRHGVTPAADHRRPAGPLAGGGPPLSQGSRSPTPVSEDPQHHRTQPGRRSWTHRTSVTAWTSSSCCPSWSCFGFRWGTPISGAIRAGSP

SEQ ID NO: 233 - protein, 260 aa, unidentified
MLKSFKTEIDPTLEQKQKIHQTIGTCRFVYNFYLSHNKEVYEAEKKFVSGMDFQKWLNNVYLKEHPEFSWIKDVSSKSVKQSIMNADKAFRSFFKHQTSFPKFKKKGTSDVKMYFVKTDAKAVIYCERHRIKIPTLGWVRLKEKGYLPTTKTGMVIKSGTVSMKAGRYYASVVVEIDDSPSVKNNENGGIGIDLGLKDLAIVSDGKAYKNINKSAKIKKLEKRLRREQRSLSRKLENTKKGESTQKNIQKQKLKVQKLHQ

SEQ ID NO: 234 - protein, 276 aa, unidentified
MHYAYRYRLNPTEAKQETLDCHRDTCRQLYNHALTEFEQIPDSAGTLNQRVRQVRDQLTDLKHWWDELTDLYSTVAQAAVVRIEQSLKALSGLKQNGYNVGSLNWKAPSEFRSFTYVQSGFEFDNKNGQTVLSLSKLAEIPITVHRQIPDGITVKEVSLKKERTGEWYGSFAVEGKEEPEKPENPDRCVGVDAGILTYAHDTDGCAVGSVELQDERERLTRDQRSLSRKQQGLNDWEKQRLRVAEFHQRVRRKRHDFLQKLSKYYAPEYKLVAGSC

SEQ ID NO: 235 - protein, 310 aa, unidentified
MIKKQAFKFLLEPNKGQLSDFLAFAGSCRFVYNKGLALLNENYRSGKKFIGYNQLASELVEWKNEESLSWLKEAPSQCLQQSLRDLDKAFRNFFTGKSQYPKFKKKGRHDSFRTPSQRVRVDQEKKLVSLPKVGWVKYRKSREIIAELKNVTISMKQGKWYISFNTEHTVPDPIHPSDIKTKIVLNNVNSVHLSSGIGGDNTSQAEEKKKLIRLNKRLARRKKHSKNWLKTKGKIDRVKSKAARLRLDNIHKATTAICKSHAVIEVVNLMGSVSDKNDNTLSMRYEFVRQLIYKQEWLGGEVIRRESKPL

SEQ ID NO: 236 - protein, 256 aa, unidentified
MHYAYRYRLHPTESQRETLDYYRDTCRQLYNHALTEFEQIPQSAGTLNQRVRQVRDQLPALKNWWDDLTDLYSTVSQAAVMRIEDSVKALSQLKQNGYNVGSLNWKAPREFRSFTYVQSGFEFDRKNGQTVLSLSKLADIPLTRHRDIPDSVTVKSVTVKKERTGEWYASFAVDGKDEPTKPDNPDRCVGIDVGILKYAQDTDGRAVGFPDLQDERERLRREQRALSRTQQGSNNWHKQRQTVAECYQALRRKRHD

SEQ ID NO: 237 - protein, 486 aa, unidentified
MANYQTMQIWVKKNHRMHGYFKEMCQHAKNMHNTTNFYIRQVFTAFTQEKAFQPLQEEVLDTIQKHMPIINANQFVVYQKKVVKEHSKPARERKEIKCHLFKEPSRENPYVDYNFLDALFKSMAQEDYRSLPTQSSQGVMKTVFQNWKAFYGSLREYKTNPSKFKARPKIPGYRRKKEKEVLFSNQDCVIKENKFLKFPKTKERLNIGKLGFTEGRLKQVRLIPKYGHYMVELIFQMPSEQEMKASKKRYMSVDLGMDNLATIVTNTGRKPVIVKGKNIKSINQRYNQLKAHYHGILRQGKNTNEGLFTSKRLEKINYKRFNQIKDLFHKASYRIEKIALEEDIDTIIIGQNKAWKQHAKMGKRNNQSFTTIPHRLLMQMIKYKAQRHGIKVIVTEETGRVSRMSMRRHLPQNLPYNQYLSMLFSWIIPHFLNVMKLVMIINECYFISPSTCFSQSSSTPQAISGSPFNDFIVPTYTLFVDLPISI

SEQ ID NO: 238 - protein, 280 aa, unidentified
MKRERGHKARLYPDSDQLSALEDQGHASRAMWNLLHDWWTMASENRRVQLKEADQAIRQARKDIDWLSDLPAQAAQAVLKTYFRAWGNYWEGRAKAPTFKARFRSRMAIDVPQGRDLGIRRITRRWGVVKVPKVGMIRFRWTKDLPVGKHTDVKNKVTGARLVREANGWHVVFRVRTETKELAPQLGPGVGIDRGVAKPLALSDGSFREHDPWLSRLSRNVCADWRRQRHVRSTLASAVREHRTVSSGPMTRSQACAREPSAAPWTGSTRPPPDLPRPSA

SEQ ID NO: 239 - protein, 310 aa, unidentified
MIKKQAFKFLLEPNKGQLSDFLAFAGSCRFVYNKGLALLNENYRSGKKFIGYNQLASELVEWKNEESLSWLKEAPSQCLQQSLRDLDRAFRNFFTGKSQYPKFKKKGRHDSFRIPCQRVRVDQEKKLVSLPKVGWVKYRKSREIIGDLKNATISLNQGKWYISFNTEQTVPDPIHPSDIKTTIVLNNVNSVHLSSGVGGDNTYQAEEKKKLIRLNKTLARRKKYSKNWLKTKGKIDRVRSKAARIRLDNIHKATTAICKNHAVVEVVNLMDSVSAKNDNTPSTRYEFVRQLIYKQEWLGGEIIRRESKLL

SEQ ID NO: 240 - protein, 310 aa, unidentified
MIKKQVFKFLLEPNKGQLSDFLAFAGSCRFVYNKGLALLNENYRSGKKFIGYNQLASELVEWKNEESLSWLKEAPSQCLQQSLRDLDKAFRNFFTGKSQYPKFKKKGRHDSFRTPSQRVRVDQEKKLVSLPKVGWVKYRKSREIIAELKNVTISMKQGKWYISFNTEHTVPDPIHPSDIKTKIVLNNVNSVHLSSGIGGDNTSQAEEKKKLIRLNKRLARRKKHSKNWLKTKGKIDRVKSKAARLRLDNIHKATTAICKSHAVIEVVNLMGSVSDKNDNTLSMRYEFVRQLIYKQEWLGGEVIRRESKPL

SEQ ID NO: 241 - protein, 310 aa, unidentified
MIKKQAFKFLLEPNKGQLSDFLAFAGSCRFVYNKGLALLNENYRSGKKIIGYNQLASELVEWKNEESLSWLKEAPSQCLQQSLRDLDRAFRNFFTGKSQYPKFKKKGRHDSFRIPCQRVRVDQEKKLVSLPKVGWVKYRKSREIIGDLKNATISLNQGKWYISFNTEQTVPDPIHPSDIKSTIVLNNVGSVHLSSGVGGDNTYQAEEKKKLIRLNKILTRRKKHSKNWLKTKGKIDRVKSKAARIRLDNIHKATTAICKNHALVEVVNFMDSVSDKNDNTLSMRYEFVRQLIYKQEWLGGEVIRRESKPL

SEQ ID NO: 242 - protein, 429 aa, unidentified
MPRPSGRGGIGLLPNRAGTAGSRVRVIPSPPGTVVSKPPCIGGFQLPYLTGRLRVVTAGVQASGVAGYARYTYRLRVSSTASGLLLAEWDRCRWIWNECVARAKKAHRDGEKCGPAALDRMLTETRRMTPWLREGSSVPQQQLIRDYGKARGKALKDIKDRLPNHRRAEMPRWKKKREARPSLNYTRRGFRLADGRLHLAGGITVPVVWSRDLPAVPSSVRVYQDSLGHWCASFVVPAQVEPLPSTGRVIGVDLGVRETATTTSDAYDLPHAEYGRKAAAGLARYQRMMARRKPVKGQAASRGYQEAGKQVARLHRKVARQRQDTARKWAKAVVRIMMPWRWRTSARSSSRKRRWPARPLMPRSVRRRQPWSRWAASTDAWCTWFIPRTPRWTAHGAEREPSTHSRSPNEPMPAPRAEPYPPGIKTPRA

SEQ ID NO: 243 - protein, 310 aa, unidentified
MIKKQAFKFLLEPNKGQLSDFLAFAGSCRYVYNKGLALLNENYRSGKKFIGYNQLASELVEWKNEESLSWLKEAPSQCLQQSLRDLDRAFRNFFTGKSQYPKFKKKGRHDSFRIPCQRVRVDQEKKLVSLPKVGWVKYRKSREIIGDLKNATISLNQGEWYISFNTEQTVPDPIHPSDIKTTIVLNNVNSVHLSSGVGGDNTYQAEEKKKLIRLNKTLTRRKKYSKNWLKTKAKIDRVRSKAARIRLDNIHKATTAICKNHAVVEVVNLMDSVSAKNDNTLSMRYEFVRQLIYKQEWLGGEIIRRESKLL

SEQ ID NO: 244 - protein, 482 aa, unidentified
MLACIAAHVLCGHVREYRPLLAKLSAQRFQKLNEVFDGRRLETLDQAMDVLHPAPWFRFQTQTNSVRDPHALQELEDFDHTNKWPTKQVKHERKIDAFDTRADRAQEVSNLTSTINILKCDAATHANDIVSASALRKEMSAKDKLMIRRIRKYRLFPTAEQRKKLHQFMGTCRWTYNKGVAHFRKTNVSSAQTLRDLYVTEKSKKQRVYPEDMEPPPQWAYETPKTFRFNALRKFESGVKSAFSNKINGNISKFKIQFKSRKKDGRYFTFCEDAGRANIMYKTGESRAMLSISKLKNIPIKAFGQVSSPNPKRTTGDGVDQELQRPSFRKAVASARESQASVPLRTAKLSNCVKEMHYQTSTYLTKHYDTIILPVFNSSVMVKKSNARNHTFNRLLSGLKHFQFRKLLQAKCELMGKSLVVCSEMYSSQTCGRCARLHLKLGSRDMFSCPHCEHVAGRDVNAAFNILRFVCAGSLVVSATHH

SEQ ID NO: 245 - protein, 351 aa, unidentified
MKLSFKFFPELTFLQLDILEELCYHTTKLYNIANYECITEGYKSYYEMEKLHTTNWHKAFLHSHTYQQCLKLLEQDWKSYFAAAADYKNNPHKYKAMPMPPKYKNVENHKNHIIFTNLAVRFKNNILMFSLAKEVQTKFGAESLNFEVSDKLQKLMNLDSIQQAKNSYFNKQIAYYTSLEMKKSGSTRFKRTARIRKLQKQRNDCIQDCLHKASRKLIDLALLHNCSTIVAGDISGIKQESPIKGFVQIPIQRLVEQIKYKVELVGMKVILQNESYTSGVSAIDLEPVNKEYYNKNRRIARGLFKSNAGILINADINGSLNILRKYKNVVPELVKQARDNGLVDNPIRIAA

SEQ ID NO: 246 - protein, 310 aa, unidentified
MARRELELFTLPTKEKAFVGYNFLDALFKTIKQKDYYSLPGQINQQVIKNVVQNWDSFFKSLNGYNVNPQKYKGRPNIPGYLPKGSKKEVVLSNQICQLKGEKYLRFPKTRGKLNIGKLANVSGKFQQVRIIPKYDNFTVEVIFLMGKKVEISPKKKRILSIDLGVENIATLVSNVEMTPILFKGGKIKSINRWYNKLKSYYYAALRNGRSSKEGQRYSKRLSKLDSKRHNQIKDFFHKVSFNIVKVAKEHRIDTIIIGKNMDWKQKVALGSKNNQNFVQIPHAMLVSMIRYKANTEGIAVIETEESYTS

SEQ ID NO: 247 - protein, 392 aa, unidentified
MDVKKGHRLFSYFEELCANGNNLYNLTNFYIRQVYTALKSDKPLQPLQREVLETIYRNIDKMNEKKTIAYYKKLKKENLLGKEKQKELELFTLPTKEKAFVGYNFLDALFKTIKQKDYYSLPGQINQQVIKNVVQNWDSFFKSLNDYKENPQKYIGRPSIPRYLPKGSKKEVVLSNQICLLKGEKYLRFPKTRGKLNIGKLANVSGKFQQVRIIPKYDSFTVEVIFFIGKKVEINPKKKRILSIDLGVENIATLVSNVEMTPILFKGGKIKSINRWYNKLKSYYYAALRNGRSSKEGQRYSKRLSKLDSKRHNQIKDFFHKVSFNIVKVAKEHRIDTIIIGKNMDWKQKVALGSKNNQNFVQIPHAMLVSMIRYKANTEGIAVIETEESYTS

SEQ ID NO: 248 - protein, 243 aa, unidentified
MKQQVSFKFRLKPDGQQERQMRRFAGACRFVFNRALALQNENHEAGKKYIPYTKMASWLVEWKKDTETEWLKDSPSQPLQQSLKDLERAYKNFFQNRAAFPRFKKRGQNDAFRYPQGVKLDQENSRIFLPKLGWMRYRNSRQVTGIVKNVTVSQSCGKWYISIQTEREVSTPVHPSASMVGLDAGVAKLATLSDGTVFEPVNSFQKNQKKLARLQRQLSRKVKFSNNWQKQKRKIQRLHSRIA

SEQ ID NO: 249 - protein, 235 aa, unidentified
MKQQVSFKFRLKPDGQQERQMRRFAGACRFVFNRALALQNENHEAGKKYIPYTKMASWLVEWKKDTETEWLKDSPSQPLQQSLKDLERAYKNFFQNRAAFPRFKKRGQNDAFRYPQGVKLDQENSRIFLPKLGWMRYRNSRQVTGIVKNVTVSQSCGKWYISIQTEREVSTPVHPSASMVGLDAGVAKLATLSDGTVFEPVNSFQKNQKKLARLQRQLSRKVKFSNNWQKQKRKI

SEQ ID NO: 250 - protein, 319 aa, unidentified
MLSGMIALRNIEHKRIITRPCERGRRSTVGTKRHFTNRTRLLKRLKIQRAPTAISICRLPLRSNPAITNKPPGYRKRGDRHPRSTVTWKQNGIKHDDKHGQLRLSKGWNLKDGRSDFILVEYETRPDVTVENIQQVRAVWTGDRWELHLVCETVIPVEDAPGDNTAGIDLGISNYLAIDYEDGPSELYPGNRLKQDKHYFTRDEYQIEGENGPSKRARRARRKLSRRKDHFLHTLSKHIVERCIEEEIGTIAVGDLSDIREDDDGDSRDWGQRGNKKLHGWEFDRFTRLLEYKAEAYGILVDRVDEENTSKTCSCCGQI

SEQ ID NO: 251 - protein, 258 aa, unidentified
LDALCDYRRYCWNKGLETWQLMYEAHTLNKKDNPSPNERRVRDELVTNKADWQYDLSARCLQLAIKDLANAWKNFFDKAQPDWGIPSFKSKKSPRQGFKTDRAKIVNGKLRLDRPRSISKDSWHDLSSYEVLKMSEVKVVSIFKEKGAYYAALTYEEEPISKTKTHQKTAVDVNVGHFNYTDGKINVLPAKLQKLYKRIKHYQRMLARKREVNGKLATKSNNYYAVRIKLQRDYRKVANIQNDLLQQFTTKLVDNYDQ

SEQ ID NO: 252 - protein, 310 aa, unidentified
MSGDLNQCGFSASKLWNVARYYTQGRWDEDGEIPDDGELKSELKEHERYRDLHSQSSQRVLEELAESFTSWYKARQRGDEDANPPGYRKHGDNHPRSTVTWKQKGIKHDPKHNHLRLFKGFNHKSEGENGPSRRALRACQKLSRRKDHFLHALAKHIVERCIDHEVGRIAIGNLSKIREAENGEARNWGKRGNKKLHGWAFDRFATLLEYKAEEHGILVERKSERDTSKTCSCCEQKRDANRVERGLYVCASCGGTMNADVNGAVNIRRKITQNPPTEDMSNGRLARPVTYLFNQTSGSFHPREQVGCEL

SEQ ID NO: 253 - protein, 301 aa, unidentified
MYNPREHRNYKFRIYPTKTQAETLTNWLTLCRLCYNAALVDRKNHYLRNKASLTRTKQQTTLKLDKDKHPQLKEVHSQVLQEVLFRVEKAYQAFFRRVKAGENPGYPRYKGMGQYNSLTYTQFGDGRGAYFKEEKLALSKIGLLKIKLHREIPGKVKTCIIKRETTGKWYAVLSVEGYPVLYSPNWKKTGLDVGIEKLATLSDGEQIPNPKPIQKSEKKVKRAQRDLCRKKKGSKNREKARQRLAQIHERIRHQRQDYLHKIANYLVWKRYNNKGKRIETRDLGYQRGFPVTCKEMNKFMF

SEQ ID NO: 254 - protein, 301 aa, unidentified
MLDPNQEQLSMMTVISGACRYVFNKALEIAVKNHLAGEKYVPYNKTAPLLVQWKSQENLSWLKLAPSQSLQQSLKDLDRAFHGYISRKSGFPKFRKKGTDESFRFPQQRVKVDEGNKKVYLPKIGWVRYRKSRDIIGEIKNITISQSANKWYVSFQTQIEVPDPVHTSNSTIKVTLSDEGTIFLSDGKKYALPATYSKHFNQLNKLIRQKHRKIKNSQSWLAFHHSTILKKAKLRNILIDFLHKTSTLICNNHAKISVDTKKGNSARKTKPLPINFKPYEFLRQITYKQSWNGGSVCMEQS

SEQ ID NO: 255 - protein, 331 aa, unidentified
MLETTRTYRAKIVNHSQVSDNLDDCGHSVSKLWNVARYHAQQEWDDTGEIPSEADLKRELKDHERYSDLHSQSSQRVLEELAESFNGWFKKRKNGDTDANPPGYRKRGDNHPRSTVTWKQNGIKHDSKHNQLRLSKGFNLKNHRSDFILCEYETRPDVTVENIQQVRAVWNGDHWELHLVCKVKIPVEDAPGDNTAGIDLGISNYLAIAYDDGEAELYPGNVLKQDKHYFTRDEYDTEGENGPSRRALRTRQKLSRRKDHFLHALAKHIVEQCIDHEVGHIAIGDLSEIREDENGDSRNWGRSGNKKLHGWEFDRFTTLLEYKAEEHGILV

SEQ ID NO: 256 - protein, 426 aa, unidentified
MITYKTMQIWVKKGHRMHPYFTEMCQNAKNMYNSTNFYIRQIFTGLTQEKELHPLQTEVLNTLQKHLPRMNDNQLLAYQKKIAKEKAKPVQKQKEVKCNLFEKPSKEKPYVDYHLLDALFKSISLNDYRSLPTQSSQGIMKTVFQNWKSFYASLKEYKMNPTKFKARPRIPGYSRSKEKEVLFSNQDCVIKENKFLKFPKTKEIDNVATIVTNTGRIPVLMKGKNIKSVNQRYNQLRAHFMGILRQGKNTNEGPFTSKRLEQINRKRFNQIKDLFHKASHQIEKIALEEDVDTIIIGQNKEWKQQSNMGKRNNQSFTAIPHSLLIQMIKYKAARHGIKVIVNEESYTSKASFLDHDEIPVYGEVDLKKSFSGKRMKRGLYCSKNGTIINADVNGAANIMRKVFPKAFNETFACVQALLQPISLLLK

SEQ ID NO: 257 - protein, 287 aa, unidentified
MAEQIEEVPAELIQTRVYELHPNKTMRRVLDEACDYRRYCWNQGLALWNKMYKARQALKSSLASDSKKLTEEQKVLLKEKPSPSERRVRNMLVTDKKDWQYTQSARILQLAISDLGKAWNNFFDKAQPGWGKPKFRSKREARQGFKSDQSKIKDGILYLERAKESSVPKDQWRGFKLSEKPLSDEFGTVSYFKEKGRYYVAIPYKIKAEDVKLPDKTGKATAVDVNVGHFDYTGGRVNVLPKKLDRIYKKIKPLSKEACQKASRKWRSCLQNRELLEDESQASSMLS

SEQ ID NO: 258 - protein, 241 aa, unidentified
MRTIHFTLERCRLLYNRLLEERILAYKTEGKSLNYDQANTFNERKQHIPALKQVHSQVLQDVAKRLDKAFQAFFRRVKHGETPGFPRFKPQQQYDSFTYPQGGHAIKGNKVRLSKIGDVKIKLHRQPQGKIKTCTITVKNGKYYACFSFEVDPQQLPVSDEKVVLILACCILQLLQTAQRLRHQSNCEETKCRLKQLLTVCNTQETRFLIAERRLFTFWPNCMKRWRISIRIMHIRFPDNW

SEQ ID NO: 259 - protein, 390 aa, unidentified
MRQFGHRARLALTSAQIRLMDDQAHAARTMWNCLHDWWTMLPKEKRSLAAADAATRQARKEIDWLGVLPAQAAQAVLNTYFQVWRNCWDGRADEPNFKARSRTVMSVDIPQGRDLNISRVHRRWGMVQIPRIGRIRFRWTKDLPVGKRANTENLITGARLVKDALGWHIAFRYDQIKQLRARATRRAVDWQHKTTTDIARQYGTVVVEALTITNMVNSAKGTIEEPGKNVAQKSGLNRSISQEAWGRTVTMLTYKTARQGGTLVKVPAPGTSQRCSACGFTTPGSRQASPWRQARRRKVGRNLPRLRGRALQGGEPDAAEAVGEETGRRAQSSTGDVPVHHGGEVRSVRGGAGRLRRGRRAPGDGAGARRRARAAARGGLGGGSRGRRAA

SEQ ID NO: 260 - protein, 403 aa, unidentified
MGIRRTYKVQIGRGHGLYPWCETITSLANNLYNACRFRQRQLITAARKTDRELTDNEKGVIAEFLSVLNCNGRSGLPACPRYETFDTVMKLTKNPDYYAKGLPRQSAQQVLKRSCADVDNFFAAVKAWKDRGCPEGERPKFPGYKRKGGHGAVAITNQDCTLKEGRDGNLIAGLPFAKSMPLKIGFPLGRLKQAEVCPDNGVYVIAFSFELDLEVPVPVHPASWIAAIDFGVDNLMAVTNNCGLPCLLYKGGIVKSTNQGYNKRLAQIMQEEMKKPGCPKNKEGKPWFVPTEESMGMTLRRNNIVHDFMHKAAKHLVLWCVENRIDTIVGVNAGFKQEVNIGHINNQNFVQIPFAYLRSCIKYLCEEQGILYVKREEDLEYDQMSLVEYIDPFTGEPVRKNKK

SEQ ID NO: 261 - protein, 329 aa, unidentified
MAKENPSNYKTLQIWIKKGHRMYSYFQECCHNAKNMYNTTNFYIRQVYTGLTQEKELQPLQKEVLANIHKNIGKMNDTQLLAYQKKLEKEKLKPKEEQKEITCNLFSEPNFEKPYVDYNFLDALFKAMIQNDYRALPTQCSQSIMKGVFQNWKSFFASLKDYKKNPNKYAGMPRIPKYIRSSEKEILYTNQDCIIKNSRFLKFPKTKLQLNIGKLGFTEGKLKQVRVIPKYNEYVVELVIDVPSEQQMIEENARYMSIDLGIDNLATIVTNTGMKPVLVKGKHVKSINQYYNKMKSHFTSILRNGKQTNEGPFTSKRIEKLHQKRYLKI

SEQ ID NO: 262 - protein, 305 aa, unidentified
MTEQIEEVPAELIQTRVYELRPNETMRRVLDEACDYRRYCWNQGLALWNEMYKARQALKSSSASDSKKLTEEQKVLLKEKPSPSERRVRNMLVADKKDWQYTQSARILQLAISDLGKAWNNFFDKAQPGWGKPKFRSKREARQGFKSDRSKIKDGILYLERARGSRVPKDQWRGFKLSEKPLSDEFGVVSYFKEKGRYYVAIPYKIKAEDVKLPDKTGKATAVDVNVGHFDYTGGRVNVLPKKLDRIYKKIKHNQRQLAKKASPKWRSCLRKQELLEDESQASSVLSQGKQYPKRLDAQIYDRTG

SEQ ID NO: 263 - protein, 311 aa, unidentified
MTKENPSNYKTLQIWIKKGHRMYSYFQECCHNAKNMYNTTNFYIRQVYTGLTQEKELQPLQKEVLANIHKNIGKMNDTQLLAYQKKLEKEKLKPKEEQKEITCNLFSEPNFEKPYVDYNFLDALFKAMIQNDYRALPTQCSQSIMKGLFQNWKSFFASLKDYKKNPNKYAGMPRIPKYIRSSEKEILYTNQDCIIKNSRFLKFPKTKLQLNIGKLGFTEGKLKQVRVIPKYNEYVVELVIDVPSEQQIIEENARYMSIDLGIDNLATIVTNTGMKPVLVKGKHVKSINQYYNKMKSHFTSILRNGKQTNEG

SEQ ID NO: 264 - protein, 482 aa, unidentified
MEGIKEYRTYQIRIKKGHKLYEYFDKLCMNSNNLYNTTNFYIRQVYTAINNKKNLQPLQKEVMETIYQNLNKMNDKQTIAYFKKLRKEKTRPNEIRKEMILNLFEAPSKEKSFLGYNFLDCLFKTIKQKDYYSLPGQINQQTIKNVVQNWKSFFSSLKDYKENPHKYKERPSIPGYLPKGSRKEVVLSNQICKIVGEKFLRFPKTKTQLNIGKLVNLKGTFQQIRIVPKYGDFIVELIYLVGDKREVVAKKEHCMSLDLGVDNIVTAVFNLKIVPILFKGGKIKAINQWYNKLRSLYYAAIRNGKGPKEGGFHSKRLVKLERDRHLKIKDLLHKVSFNIVKIAKAHQIDTIVIGKNKEWKQNSNLGKVNNQKFVQIPHTLLIELITYKANAKGIAVIVTEESYTSKASFLDGDHIPTFNPGNKEPHIFSGKRVHRGMYHSKHNILLNAHVNGAANILRKVVPKAFANGIAAVCSQPLVVNVQ

SEQ ID NO: 265 - protein, 264 aa, unidentified
MLLTYKFRICPSKQQEQKLLFTLDKCRFTYNKLLEILNKQEKINQSEIQAKIPKLKQEYSDLNEIYSKTLQYECYRLFSNLRALSRLKKNGKRIGKLRYKGKDWFKTFTYNQSGFVLGIKNKRYNKLHLSKIGILQIRTHRIINGSIKQVQIKKECSGKWFALLCVHKGEEKPKERTNKSIGIDLGTINFIYDSDGNHIDAPKFLSKSLKKLAGEQRKLSKKKKGSKNRIKQKINVARIHECIFNQRNDFLHKISRYYVNNYDF

SEQ ID NO: 266 - protein, 282 aa, unidentified
MLKKYANKSLTQRESKQSSPEINSFKALINKKTAFFFMLLTYKFRIYPSKQQQEKLLFVLDKCRFTYNKLLEILNKQEKINQSEIQAEIPKLKEQYPDLNEIYSKTLQYESYRLFSNLRALSRLKKNGKKIGCLRFKGKDWFKTFTYNQSGFVLEIKNKKYNKLHLSKIGSIPIRTHRVINGSIKQVQIKKECSGKWFALLCVHMNEPKQREKTKKSIGIDLGTINFIYDSDGNHADHPKFLNKSLKKLAAEQRKLSRKKKGSNNRTKQKINVAKIHEAICN

SEQ ID NO: 267 - protein, 367 aa, unidentified
MIRTHIFACNIDRKLADSLNRESGRIYTQVMVEQWRTFRHAGHWISPRGVEKLADFYDKQAGQKPLLHAHSVDAAQQGFPKACKTAKACKNIGLNSSYPHKRKPYRSTIWKNTGISKTEDEKLQLALARGQSPIFIELPPNLKNLVKECYVEMRLVYNKNHKFYQWHVVVDDGMDSKVASGTNVIGIDLGEIHPVAATDGETSVVFSARALRSVNQYSNKWLASFQSKISKKKKGSQSYKRMMARKRKFLAKQARRRKDIEQKVSRAVVDYAVERNCNEIAIGDVRKVANKCKLGKKSNQKVSNWSHGKIRTMIEYKANAEGISVTMVKEHYTSQTCPNLDCQHKYKPSGRTYRCPVCGFVGLSHLR

SEQ ID NO: 268 - protein, 509 aa, unidentified
MSYRWCWVWVVPRRRDPAAPRVVHRTARVAVRVTPGQRRRCFGLLRSAGDVWACLLEVNAWRRRRRDAPLVGYQQLCRELSGSGPGTLGELDTTGARSVLRRFSDAWFAAAKRRKDGDLSARFPRRRRGLVPVRWYHGTFTLDGRRARIPTAKGTAPLWIRLAREVPYPAEQVRSITLLCEGGRLFLDVTAEVPLAVYPPGEKPDPARFAGVDLGIIHPYAVAGPDGEGLLVSGRAIRAEHRMHLADTKARRRAVARRAPKRGEQGSRRWRKYRRRARLVEGRHRRRVRQAQHEAARQVVSWAVERRVGVLHVGDPRGVLDIAAGRRHNLRLRQWQIGRLLQVLTDKATLAGITSGWSTNAAPRPPAPPAAHAFRNLVAGPCPARAVDSPGTATWSRPPASPPAPRAADPPPRQPLLCCRRWSRTVEPAGTSPVPGGPGEDQLARGGPPHHLVGSRSPTRRGSTTTTEHPVNVRGHRTRGRMRRVSIGGRAGAGWGRIGSSRSAPRVGR

SEQ ID NO: 269 - protein, 310 aa, unidentified
MIKKQAFKFLLEPNKGQLSDFLAFAGSCRFVYNKGLALLNENYRSGKKFIGYNQLASELVEWKNEESLSWLKEAPSQCLQQSLRDLDRAFRNFFTGKSQYPKFKKKGRHDSFRIPCQRVRVDQEKKLVSLPKVGWVKYRKSREIIGDLKNATISLNQGKWYISFNTEQTVPDPIHPSDIKTTIVLNNVNSVHLSSGVGGDNTYQAEEKKKLIRLNKTLARRKKYSKNWLKTKGKIDRVRSKAARIRLDNIHKATTAICKNHAVVEVVNLMGSVSAKNDNTPSTRYEFVRQLIYKQEWLGGEIIRRESKLL

SEQ ID NO: 270 - protein, 270 aa, unidentified
MYVIALTVDLDQPRLKVGADLGKDRLQFLKSPAVEDTAAVFGYQHQMNMHSKHAVSSVPKVLAFVPRPDQNASMERQAFQFELMPNGEQPRQMSRSAGCVRYVYNQALALKKERYEKQEKLTRFELDKMLVGWKQETPWPSEAPAHALQQALLGLDRAYTNFFRKRAEFPKFHKKGIRDSFRESDPKCIKLDQVNRRIQVPKLGWVRYRNRREVLGEIPSVTVSLSAGKWFVSISTRREVEPPLHPSTSSVGLDWGMARFYTDAEHQDQL

SEQ ID NO: 271 - protein, 270 aa, unidentified
MYVIALTVDLDQPRLKVGADLGKDRLQFLKSPAVEDTAAVFGYQDQMNMHSKHAVSSVPKVLAFVPRPDQNASMERQAFQFELMPNGEQPRQMSRSAGCVRYVYNQALALKKERYEKQEKLTRFELDKMLVGWKQETPWPSEAPAHALQQALLGLDRAYTNFFRKRAEFPKFHKKGIRDSFRESDPKCIKLDQVNRRIQVPKLGWVRYRNRREVLGEIPSVTVSLSAGKWFVSISTRREVEPPLHPSTSSVGLDWGMARFYTDAEHQDQL

SEQ ID NO: 272 - protein, 235 aa, unidentified
MIRYKTEIKPNKKQIKEINKTINACRSVYNKFIEINKIRYDNGLKFLNHMKFSVWYNNEFIPNNEDKKWTKEVSTKTIKQAMANAENAYNRFWNYNSGYPNFKKKQSNGSYYLIGTIKIERHRIKLPNLKWVRLKEKGYIPKHNIKSATISKEFDRYYVSVLVDEEPKIIFKKLQTEGIGIDLGLKDTLFTPSGVKITDLRKNKRLIKLNKSLKRQQRKLSRKQKKSNNVKIVVQ

SEQ ID NO: 273 - protein, 240 aa, unidentified
MKRLLRAYKTEIRPTEGQIILIHKTIGTCRYVYNLYLQKNREAYEATSSFLSGYDFSKWLNNEHATQDEFAWIKEVPSKAVKQAIMNADVAYKRFFKKLSSSPRSKRKSDYGSFYLVGTIHVKRHLIQLPKLGKVKLKEKGYIPFDGVKSATVSREGDRYFVSVLVEEPSRVVQKHGQTDGIGIDMGIKELLFDSDGNAVANINRSNQIIKLTRSLKRQQRKLSRRVKGSENFKKQKVIV

SEQ ID NO: 274 - protein, 284 aa, unidentified
MAEQVKEAPAELIQTRVYELCPNKTMRKVLDEACDYRRYCWNQGLDLWNEMYKERQALKSSLASDSKKLTEEQKVLLKEKPSPSERRVRNMLVADKKDWQYTQSARILQLAISDLGKAWNNFFDKAQPGWCKPKFRSKREARQGFKSDRSKIKDGILYLERARGSRVPKDQWRGFKLSEKPLSDEFGTVSYFKEKGRYYVAISYKIKAEDVKLPDKTGKATAVDINVGHFDYTGGRVNVLPKKLDRIYKKIKHYQRQLAKKRVQNGAAACESKNYLKTKAKLQA

SEQ ID NO: 275 - protein, 291 aa, unidentified
MMTVISGACRYVFNKALEIAVKNHLAGEKYVPYNKTAPLLVQWKSQENLSWLKLAPSQSLQQSLKDLDRTFHGYISRKSGFPKFRKKGTDESFRFPQQRVKVDEGNKKVYLPKIGWVRYRKSRDIIGEIKNITISQSANKWYVSFQTQIEVPDPVHTSNSTIKVTLSDEGTIFLSDGKKYALPATYSKHFNQLNKLIRQKHRKIKNSQSWLAFHHSTILKKAKLRNILIDFLHKTSTLICNNHAKISVDTKKGNSARKTKPLPINFKPYEFLRQITYKQSWNGGSVCMEQS

SEQ ID NO: 276 - protein, 240 aa, unidentified
MTKGKDSTHSRKETKQLQALSRKRDAFLRDFFYKTAWYLVRYAKEQRVDVIVIGHNEEQKQNIRIGKQNNQNFVSIPFCLFIKILRNTAAKVGIPVVDREESYTSKASLLDLDAIPTYRKGNAQTYTFSGKRVHRGLYKTNSGCVINADINGDGNILRKEYPYAFDGQDMSYLYKTTKVVSYTDIYAGAKSVCKEKYNQKSHEPGLGSRVNHRYRQDTRLIYRKLWGRSTFVWTGKKKTA

SEQ ID NO: 277 - protein, 256 aa, unidentified
MSMQLTETVKLYPNKYQTELIKATMTEYISTVNHLVFDAINGRTITKITTADVNAILPSALCNQCIRDSKSIIRKYNKALRNSDTQVKLPVLKKMCCYINNQNFRISDDCISFPVIINGKSKRISVKTKISKRQKSIFSSSKLGTMRIVVKGHDLVAQIQNIRSTTRTSRKNNHNLHTWSFYRLATFIEYKAKLAGIEVEYVDPAYTSQICPICGRIQHAKDRNYTCRCGYQTHRDLLGAINICNSTEYIGNRYTA

SEQ ID NO: 278 - protein, 417 aa, unidentified
MRTFKMIIDPTKNKKDAAFCQYFKTNTADSKCMYNTANFYIRNTMTGLKKSPEERTHLETEVLHYVFTGIQKANEVIGQKNMKKKFAELNLSKVGGMNSAVIAFSIVSQEPFQYPTEEKWFLSYGTLDAIFKFTDNPVYRRMNSQVNQNAIRKAVTAWQGYFESLKAYKKNPAGFTGKPKIPGYKQDEEYIAWFSKQVAKLKEEDGRCYIQFVNNPDRFEIGKASLYSDLKYVKTEVKAMYGKYYILITFDDKIAEVEAPENPKRILGLDPGVNNFLGVANNFGGVPFVMNGRAVKSANQRFNKKRAKLISSVTKGSDSKSSVKYSKHLNILSQKRESFLRDYFYKCAWYICRYAKAAGVDVIVMGHNDGQKQEIDLKDNVNQNFVSIPYTKFITILKAVASKCGIAVVIREESYTL

SEQ ID NO: 279 - protein, 220 aa, unidentified
MKSIRTKLKLNNKQKTLMAQHAGYSRWCYNWGLSLWNAAYTDGYKPNPRKLREVFTNHTKPLYPWMKNLSSKVYQYAFINLGEAFKRFFQGLGKRPRFKKKGKSDSFTIDNCGKPIELNGWSHKLPFIGMVKTYEPIEATTQKITISRQAGDWYLSLSYEFTPSPTPTTTEVVGVDLGVKTLATLSDGKVFESVKSYRRFETKLSRLQYLNRNKIIGSAN

SEQ ID NO: 280 - protein, 230 aa, unidentified
MLRAYKTEINPSFEQCQTINQTIGTCRWIYNKFIETNQYLYEKEKSYMDGYTFSKWMNNVYLPSHPDKHWVKQSASKAIKQSIMNAHRAYQTFFKNKQGYPKFKKKSGIGSYYLIGTIHVQRHRIQLPKLGWIKLKERGYIPTNNIKSATIVKEYDRYYVSVLVDQPPPPIFKPEQTEGIGIDLGLKEAVFTPSGVKIRSFKTNQTIIKLDKSLKRQQRKLSRKKKGSRN

SEQ ID NO: 281 - protein, 272 aa, unidentified
MLRAYRTEIDPSFEQRQTINQTIGTCRWIYNKFIETNQNFHKTGQSYMNGFAFSKWMNNVYLPNNPNKHWIKQSASKAVKQSIMNAHRAYQTFFKNKKGYPKFKKKSGIGSYYLIGTIHVQRHRIRLPKLGWIQLKEKGYIPTNNIKSATVIREFDRYYVSVLIDCEPSPLFKPKQTEGIGIDLGLKEAVFTPSGVKIRSFKTNQTIVRLDKSLKRQQRKLSRKKKGSHNWYKQLLKVQRLYRRIKNKKEISNAKAYSLLFAQIRNLLRLKI

SEQ ID NO: 282 - protein, 305 aa, unidentified
MTEQIEEVPAELIQTRVYELRPNETMRRVLDEACDYRRYCWNQGLALWNEMYKARQALKSSLASDSKKLTEEQKVLLKEKPSPSERRVRNMLVADKKDWQYTQSARILQLAISDLGKAWNNFFDKAQPGWGKPKFRSKREARQGFKSDRSKIKDGILYLERARGSRVPKDQWRGFKLSEKPLSDEFGVVSYFKEKGRYYVAIPYKIKAEDVKLPDKTGKATAVDVNVGHFDYTGGRVNVLPKKLDRIYKKIKHNQRQLAKKASPKWRSCLRKQELLEDESQASSVLSQGKQYPKRLDAQIYDRTG

SEQ ID NO: 283 - protein, 305 aa, unidentified
MIKKQAFKFLLEPNKSQLSDFLAFAGSCRFVYNKGLALLNENYRSGKKFIGYNQLASELVEWKHEESLSWLKEAPSQCLQQSLRDLDRAFRNFFTGKAQYPKFKKKGRHDSFRIPCQRVRVDQEKKLVSLPKVGWVKYRKSREIIGDLKNVTISMKHGKWYISFNTEHTVPDPIHPSDIKTTIVLNNENSVHLSTRVGGANTYQAEEKKKLVRLNKILARRKKHSNNWLKTKGKIDSVILKSARIRLDNIHKATTAICKNHAVVEVVNLMDSVSDKNDNTLSMRYEFVRQLIYKQEWLGGEIIRR

SEQ ID NO: 284 - protein, 243 aa, unidentified
MLRAYRTEIDPSFEQRQTINQTIGTCRWIYNKFIETNQNFHKTGQSYMNGFAFSKWMNNVYLPNNPNKHWIKQSASKAVKQSIMNAHRAYQTFFKNKKGYPKFKKKSGIGSYYLIGTIHVQRHRIRLPKLGWIQLKEKGYIPTNNIKSATVIREFDRYYVSVLIDCEPSPLFKPKQTEGIGIDLGLKEAVFTPSGVKIRSFKTNQTIVRLDKSLKRQQRKLSRKKKGSHNWYKQLLKVQRLYR

SEQ ID NO: 285 - protein, 310 aa, unidentified
MIKHQAFKYMLDPNQEQLSMMTVISGACRYVFNKALEIAVKNHLAGEKYVPYNKTAPLLVQWKSQENLSWLKLAPSQSLQQSLKDLDRAFHGYISRKSGFPKFRKKGTDESFRFPQQRVKVDEGNKKVYLPKIGWVRYRKSRDIIGEIKNITISQSANKWYVSFQTQIEVPDPVHTSNSTIKVTLSDEGTIFLSDGKKYALPATYSKHFNQLNKLIRQKHRKIKNSQSWLAFHHSTILKKAKLRNILIDFLHKTSTLICNNHAKISVDTKKGNSARKTKPLPINFKPYEFLRQITYKQSWNGGSVCMEQS

SEQ ID NO: 286 - protein, 284 aa, unidentified
MTEQIEEVPAELIQTRVYELRPNETMRRVLDEACDYRRYCWNQGLALWNEMYKARQALKSSLASDSKKLTEEQKVLIKEKPSPSERRVRNMLVADKKDWQYTQSARILQLAISDLGKAWNNFFDKAQPGWGKPKFRSKREARQGFKSDRSKIKDGILYLERTRGSRVPKDQWHGFKLSEKPLSDEFGVVSYFKEKGRYYVAISYKIKAEDVKQPDKTGKATAVDINVGHFDYTGGRVNVLSKKLDRIYKKIKHYQRQLAKKRVQNGAAACESKNYLKTKAKLQA

SEQ ID NO: 287 - protein, 249 aa, unidentified
MIVLEYKVKGKPNQYQAIDQAIRTTQFVRNKAIRYWMDNSRELKIDRFALNKYSTTLRNEFPFVADLNSMAVQSASERGWSAISRFYDNCQKKISGKKGYPKFQKDCRSVEYKTSGWALHPTKRQITFTDKNGIGKLKLLGKWDIQSYNVKDIIRQWIEYFAAKFDKLAIPVAPHYTSQKCSNCGVIVKKSLSTRTHVCNCGCELHRDTNAAINILNLGKQARGGHPRSNANGLETSTLLGETLVAARI

SEQ ID NO: 288 - protein, 308 aa, unidentified
MAKENPSNYKTLQIWIKKGHRMYSYFQECCHNAKNMYNTTNFYIRQVYTGLTQEKELQPLQKEVLANIHKNIGKMNDTQLLAYQKKLEKEKLKPKEEQKEITCNLFSEPNFEKPYVDYNFLDALFKAMIQNDYRALPTQCSQSIMKGLFQNWKSFFASLKDYKKNPNKYAGPPRIPKYIRSSEKEILYTNQDCIIKNDRFLKFPKTKLQLNIGKLGFTEGKLKQVRVIPKYNEYVVELVIDVPYEQQMIEENARYMSIDLGIDNLATIVTNTGMKPVLVKGKHVKSINQYYNKMKSHFTSILRNGKQT

SEQ ID NO: 289 - protein, 339 aa, unidentified
MDQIKQLRIYPPEKGSCKIIVVYEVPDQEELPQNGHELSIDLGLHNLMTCYDSENGNTFILGRKYLGLERYFHKEIARVQAQWYGQQSGKGVKHPTTSKHIRKLYKRKHDSVTDYLHKVTRYLAEYCREQGITCVIAGDXENKIFRGMDQIKQLRIYPPEKGNCKIIVVYEVPDQEELPQNGHELAIDLGLHNLMTCYDPGNGKTFILGRKYLALERYFHKEIARVQAQWYGQQSGKGVKHPVTSKHIRKLYKRKHDSVTDYLHKVTRYLAEYCREQGITCVVAGDIRNIRREKDLGRRTNQKLHSLPYNRIYIMLEYKLKRYGIRFIKQPANKKSRLN

SEQ ID NO: 290 - protein, 287 aa, unidentified
MAEQVKEAPAELIQTRVYELCPNKTMRKVLDEACDYRRYCWNQGLDLWNEMYKERQALKSSLASDSKRLTEEQKVLLKEKPSPSERRVRNMLVTDKKDWQYTQSARILQLAISDLGKAWNNFFDKAQPGWGKPKFRSKREARQGFKSDQSKIKDGILYLERAKESSVPKDQWRGFKLSEKPLSDEFGTVSYFKEKGRYYVAIPYKIKAEDVKLPDKTGKATAVDVNVGHFDYTGGRVNVLPKKLDRIYKKIKPLSKEACQKASRKWRSCLQNRELLEDESQASSMLS

SEQ ID NO: 291 - protein, 310 aa, unidentified
MIKKQAFKFLLEPNKGQLSDFLAFAGSCRFVYNKGLALLNENYRSGKKFIGYNQLASELVEWKNEASLSWLKEAPSQCLQQSLRDLDRAFRNFFTGKSQYPKFKKKGRHDSFRIPCQRVRVDQEKKLVSLPKVGWVKYRKSREIIGDLKNATISLNQGKWYISFNTEQTVPDPIHPSDIKTTIVLNNVNSVHLSSGVGGDNTYQAEEKKKLIRLNKTLTRRKKYSKNWLKTKGKIDRVRAKAARIRLDNIHKATTAICKNHAVVEVVNLMDSVSAKNDNTLSMRYEFVRQLIYKQEWLGGEIIRRESKLL

SEQ ID NO: 292 - protein, 310 aa, unidentified
MIKKQAFKFLLEPNKGQLSDFLAFAGSCRFVYNKGLALLNENYRSGKKFIGYNQLASELVEWKNEESLSWLKEAPSQCLQQSLRDLDRAFRNFFTGKSQYPKFKKKGRHDSFRIPCQRVRVDQEKKLVSLPKVGWVKYRKSREIIGDLKNATISLNQGKWYISFNTEQTVPDPIHPSDIKTTIVLNNVNSVHLSSGVGGDNTYQAEEKKKLIRLNKTLTRRKKYSKNWLKTKGKIDRVRAKAARIRLDNIHKATTAICKNHAVVEVVNLMDSVSAKNDNTLSMRYEFVRQLIYKQEWLGGEIIRRESKLL

SEQ ID NO: 293 - protein, 310 aa, unidentified
MIKKQAFKFLLEPNKGQLFDFLAFAGSCRFVYNKGLALLNENYRSGKKFIGYNQLASELVEWKNEESLSWLKEAPSQCLQQSLRDLDRAFRNFFTGKSQYPKFKKKGRHDSFRIPCQRVRVDQEKKLVSLPKVGWVKYRKSREIIGDLKNATISLNQGKWYISFNTEQTVPDPIHPSDIKTTIVLNNVNSVHLSSGVGGDNTYQAEEKKKLIRLNKTLTRRKKYSKNWLKTKGKIDRVRSKAARIRLDNIHKATTAICKNHAVVEVVNLMDSVSAKNDNTLSMRYEFVRQLIYKQEWLGGEIIRRESKLL

SEQ ID NO: 294 - protein, 329 aa, unidentified
MLELNAWRRQRRDTPLASYQELCRELAASGPGVFGELDSTGARSVLRRFSDAWFAAAKRRRGGDAAARFPRRRRGLVPVRWYHGTFTLDPGGRRVRIPAARGGQPLWLRLARSLPYPVDQVRSVTLLAEGGRLFLDVTAEVPVTVYEPGCGPDPARTAGVDLGIIHPYAVAGPDGQALLVSGRAIRGEHRMHLADTKQRRRAVAGRAPTRGQRGSRRWRKYRRRARAVDGRHARRVRQAQHEAAKTVVSWAVGQRVGTLHMGDPRGVLQVAAGRRHNLRLRQWQIGQLIRILADKATVAGITFTSSTNAAPRPPARAAGGGSRNHPGGS

SEQ ID NO: 295 - protein, 260 aa, unidentified
MISYRTEIKPNKKQIREINKTIDACRTVYNKFLEVNKIIYENNKSFMSHTKFSVWYNNEFIPNNEDKKWTKEVNTKATKQAMANAENAYKRFWKNNNGFPKFKKKQNNGSYYLIERIHVERHRIKLPNLKWVKLKEKGYIPSSNIKSTTIIKDGNRYFVSVLVDEEHKTIFKPLQTEGIGLDLGLKDTLFTPKGVHITDLRKNKKLINLDKSLKRQQRKLTRKQRKSNNWFKQLLKVQRLYRKISNIKKDIKRKKVLEII

SEQ ID NO: 296 - protein, 310 aa, unidentified
MIKKQAFKFLLEPNKGQLSDFLAFAGSCRFVYNKGLALLNENYRSGKKIIGYNQLASELVEWKNEESLSWLKEAPSQCLQQSLRDLDRAFRNFFTGKSQYPKFKKKGRHDSFRIPCQRVRVDQEKKLVSLPKVGWVKYRKSREIIGDLKNATISLNQGKWYISFNTEQTVPDPIHPSDIKSTIVLNNVGSVHLSSGVGGDNTYQAEEKKKLIRLNKILTRRKKHSKNWLKTKGKIDRVKSKAARIRLDNIHKATTAICKNHALVEVVNLMDSVSDKNDNTLSMRYEFVRQLIYKQEWLGGEVIRRESKPL

SEQ ID NO: 297 - protein, 310 aa, unidentified
MIKKQAFKFLLEPNKGQLSDFLAFAGSCRFVYNKGLALLNENYRSGKKFIGYIQLASELVEWKNEESLSWLKEAPSQCLQQSLRDLDRAFRNFFTGKSQYPKFKKKGRHDSFRIPCQRVRVDQEKKLVSLPKVGWVKYRKSREIIGDLKNATISLNQGKWYISFNTEQTVPDPIHPSDIKSTIVLNNVDSVHLSSGGGGDNTYQAEEKKKLIRLNKTLTRRKKHSQNWLKTKGKIDRVKSKAARIRLDNIHKATTAICKNHAVVEVVNLMDSVSAKNDKTLSMRYEFVRQLIYKQEWLGGEIIRRESKLL

SEQ ID NO: 298 - protein, 292 aa, unidentified
MLTITHRYRIYPDATQKQQFIDWMEVCRGAFNYALREIKDWCNSRKCLIDRCSLEKEYILPAELKFPSEIQQLNNLPRAKKEFPRLSEVPSQVLQQAIKQLHKAWEYFQKRGFGFPRFKKYGQFKSLLFPQFKENPVPNLHVLLPKIGTIPINLHRPIPTGFVVKQVRILRKADRWYAWKRGNFFGEVDARGTSQECPECGGEVRKDLSVRIHNCPHCGYKTDRDVAAGQNIRNRGIKLISTVGQTGKETACADVLPGAEETQSRQVSKSPERSAALSLPKGRRGVTRKPKK

SEQ ID NO: 299 - protein, 260 aa, unidentified
MLNLTYNYRIYPGLDQEAQMLDWLEQCCRVYNYAFAERKDWIGSRKCPVNACSIKQEYIISADAPYPDYYKQQNALTRAKREIPELKAVHSQVLQDALKRLDKSFKFMQKRGFGFPRFKKFGQYRSFVFPQFKFKMTSRGILAKHCLDAAWGSFLEILKWVAWKRGVYFARVDPNGTRQTCPQCGVHTGKKELGERVHHYSECGYTTDRDVAAAQVVMQRGLVLAADGQSVMLPAEEGCLGTPMKQENPTARKGSPRSTR

SEQ ID NO: 300 - protein, 280 aa, unidentified
MQTLEYKIKASINQYKAIEEAIRTTQFVRNKSIRYWMDSPQDAKINRFSLNKYSTELRNKYQFVSDLNSMAVQSASERAWISIQRFYDNCKKSSKGKKGYPKFQKDNRSVEYKTSGWKLHPSKRKITFTDKKGIGDLKLLGKWDIHLYPLKSIKRVRIVRRADLAKSISDVGWYLFRQWIEYFASKFGRIAIAVAPQYTSQKCSNCGRIVKKSLSTRTHVCVCGCELHRDTNAAINILNLAKQARAGQARSNATGDATSTLVAERLSQQVASMNVESPRL

SEQ ID NO: 301 - protein, 261 aa, unidentified
MKSIRTKLKLNNKQKTLMAQHAGYSRWCYNWGLSLWNAAYRDGYKPNYRKLREVFTNHTKPLYPWMKNLSSKVYQYAFINLGEAFKRFFQGLGKYPRFKKKGRSDSFTIDNCGKPIELNGWSHKLPFIGIVKTSEPIEATTQKITISRQAGDWYLSCSYEFHSHTTPKKTDVVGVDLGMKTLATLSDGKVFESVRAYQKFEAKLSRLQYLNRHKQVGSANWRKAQLKIARLLRKVANIRQDALHKLTTYLAKVRLVPVRSL

SEQ ID NO: 302 - protein, 225 aa, unidentified
MITLTYQYKLKPNKQQEADINLMLDVCKSVYNYGLRERKDWLNSRKSPINSCSIVSEYIIPADTPYPNYNHQAKNLTIAKKTNTKLKSVNAQVLQQTLKTLERAFSDMKYLGKGFPRFKKKLRSFVFPAMLKNCLGNNRVKLPQLGWIKIRQSRQYPDGFQAKQARIVKKATGYYLMIIFTSSESAPDNPVGKKSLGIDAGIESFVATSTGKLIKSPKFLLSQLR

SEQ ID NO: 303 - protein, 261 aa, unidentified
MKSIRTKLKLNNKQKTLMAQHAGYSRWCYNWGLSLWNQAYTDGYKPNTRKLREVFTNHTKPLYPWMKNLSSKVYQYAFINLGEAFKRFFQGLGKRPRFKKKGKFDSFTIDNCGKPIELNGWNHKLPFIGIVKTYEPIEATTQKITISRQAGDWYLSLSHEFSATPTPKTTDVVGVDLGVKTLATLSDGKVFESVRAYQKFEAKLSREQYLNRHKQVGSANWRKAQLKIARLHRKVANIRQDALHKLTAYLAKVRLVPVRSL

SEQ ID NO: 304 - protein, 264 aa, unidentified
MLTGRRYLLALTDVQTGQAERFGAICRAVWNTGLQQRREYRRRGAWINYVQQARQMAEAKKDLDCSWLAEAPSHIPQQTLRDLEKACQAHGTGKVRWRSKSRTAPAFRFPDPNQIRVERLNRRWGRVRLPKLGWVRFRWSRPLGGPIRNATVARDGGRWYISFCVEDGVTGVAPTDAPGVNVRQKAGLNRAILNKGWGGVLLALEHTARYHGATVVSVNPAYTSQRCSRCTLVDANSRKSQAEFTCTGCGHRDNADVNAAKNMP

SEQ ID NO: 305 - protein, 283 aa, unidentified
MNYNYRYRLMPTDSQRETLDYHRDTCRQLYNHALYRFNQIPEDEGTVKQRVRTIRDELPDLKDWWDALTDVYSKVLQPTVMRIAKNINALGRLKEQGYKVGELRWKSPREFRSFTYNQSGFELDKNGGQTVLSLSKLADIPIELHRPLPEDATVKEVTLKKEKTGEWFAIFGIEMDTEPPAKPPLEDIDAENMVGIDVGILKYAHDTDGTAVESLDLSEERDRLEREQRKLSRKAYESNNWERQRRKVAECHLDIKRKRRDFLHKLSAYYAREYELVRSKTST

SEQ ID NO: 306 - protein, 308 aa, unidentified
MKTLKLRIKDKHCKVLDQLASEVNFVWNYVNDLGFRHLKRKGEFLSAFDIAKYTKGTSKECNLHSQTIQAVTEELVTRRKQFKKAKLKWRVSNKKSARRSLGWVPFKKVAIKYANGYVQYGKHQFKLWDSYGLSKYTFSDGTVISNPKFYRKYEQTLGIAQRARNKKRVRALHAKIANSRKDHLHKASTKLVNENALIIVGDLNAKKLVKTKMAKSVLDTGFSALKTMLKYKCENAGVLFEEVQEAYTTQICSCCGEITSSSPKGSTDLGIREWECMSCGTVHDRDINSALNILALGHKRLAVGITLF

SEQ ID NO: 307 - protein, 226 aa, unidentified
MKYLTGYDFHKWINKEYLPNNPDKLWIKEVYSKSTTRAMQNADKAYKNFLQGNSRFPKYKKKQTNGSYYLWGNMEVERHRIKLPKLKWVKLKRKGYIPTDLKVVSATLTKEVDRYYISVMFERELNVIFKKPQTEGIGIDLGLKDTLFTPSGVHITDLRKNQKLIKLTKSLKRQQRKLSRKQSKSNNWFKQLLKIQRLYRKISNIKKDIKQKKILEVESYQIVSNK

SEQ ID NO: 308 - protein, 274 aa, unidentified
MLVGRKYRLEFDFGQRAFAERLGGICRAVWNTGLEQRREYRRRGQWINYAEQCKQLAEAKKDPYCGWLADAPAQVIQQTLKDLDQACRKHGTWKVRWKSKAKWRPSFRFPTAQHLPVERIGRRWGRVSLPKFAVKPKPDPGRPGRFLCNGAAAKSGLNRAILDKGWYGLEVALRSKARYTGSVIHKINPVYTSQTCPESACGKVDEKSRKSQAIFSCTSCGHTEHADIVGARNIKSKGQAAGLVVSGRGDPPGSAKRQAPRSTARAAQAARAAA

SEQ ID NO: 309 - protein, 291 aa, unidentified
MAEQIEEVPAELIQTRVYELHPNKTMRRVLDEACDYRRYCWNQGLALWNEMYKARQTLKSSLSTDSKKLTEEQKVLLKDKPSPSERRVRNMLVADKKDWQYAQSARILQLAISYLGKAWNNFFDKAQPGWGKPKFRSKREARQGFKSDQSKIKDGILYLERAKESSVPKDQWRGFKLSEKPLSDEFGVVSYFKEKGRYYVAIPYKIKAKDIKLPDKTGKATAVDVNVGHFDYTGGRINVLPKKLDKIYGKIKHYQRQLVKKQVKNGEAACESENYLKTKAKLQACYRKASN

SEQ ID NO: 310 - protein, 261 aa, unidentified
MAEQVKEAPAELIQTRVYELRPNKTMRKVLDEACDYRRYCWNQGLALWNEMYKARQTLKSSLSTDFKKLTEEQKVLLKDKPSPSERRVRNMLVADKKDWQYTQSARILQLAISDLGKAWNNFFDKAQPGWCKPKFRSKREARQGFKSDRSKIKDGILYLERARGSRVPKDQWRGFKLSEKPLSDEFGVVSYFKEKGRYYVAISYKIKAEDVKLPDKTGKATAVDVNVGHFDYTGGRVNVLPKKLDRIYKKIKHYQRQLAKK

SEQ ID NO: 311 - protein, 226 aa, unidentified
MEKAYSYRFYPTPEQESLLRRTLGCVRLVYNQALHERTQAWYERQERVGYSQTSSMLTNWKKQEDLDFLNQVSCVPLQQGLRHLQTAFTNFFVGRAKYPNFKKKHQGGSAEFTKSAFKFKNGQIYLAKCLEPLAYKCRWYGRNYIEIDRWFPSSKRCSNCGHIVEKMPLNIREWDCPNCGTHHDRDLNASKNILAAGLAVSVCGASVRPEQSKSVKATAKKQKPKL

SEQ ID NO: 312 - protein, 310 aa, unidentified
MIKHQAFKYMLHPNQEQLSMMTVISGACRYVFNKALEIAVQNHIAGEKYVPYNKTAPLLVQWKSQESLSWLKLAPSQSLQQSLKDLDRAFHGYISRKSGFPKFRKKGTDESFRFPQQRVKVDEVNKKVYLPKIGWVRYRKSRDVIGEIKNITISQTANKWYVSFQTQIEIPDPVHTSSLTAKVTLSDEGTILLSDGKKYALPETYSRHFNQLNKLIRQKNRKIKNSQSWLAMHHSIILKKAKLRNILMDFLHKTSTLICNNHAKISVDTEKGNSARKTSPLPVNFKPYEFLRQLKYKQSWNGGSVCVEQT

SEQ ID NO: 313 - protein, 236 aa, unidentified
MKQQVSFKFRLKPDGQQERQMRRFAGACRFVFNRALALQNENHEAGKKYIPYTKMASWLVEWKKDTETEWLKDSPSQPLQQSLKDLERAYKNFFQNRAAFPRFKKRGQNDAFRYPQGVKLDQENSRIFLPKLGWMRYRNSRQVTGIVKNVTVSQSCGKWYISIQTEREVSTPVHPSASMVGLDAGVAKLATLSDGTVFEPVNSFQKNQKKLARLQRQLSRKVKFSNNWQKQKRKIQ

SEQ ID NO: 314 - protein, 256 aa, unidentified
MRVAFVYRLYPTREQMRTIHFTLERCRLLYNRLLEERILAYKTEGKSLNYDQANTFNERKQHIPALKQVHSQVLQDVAKRLDKAFQAFFRRVKHGETPGFPRFKPQQQYDSFTYPQGGHAIKGNKVRLSKIGDVKIKLHRQPQGKIKTCTITVKNGKYYACFSFEVDPQQLPVSDEKVVLILACCILQLLQTAQRLRHQSNCEETKCRLKQLLTVCNTQETRFLIAERRLFTFWPNCMKRWRISIRIMHIRFPDNW

SEQ ID NO: 315 - protein, 296 aa, unidentified
MKRLQAFKYELQPNGEQARSMRRFAGSCRFVFNKALAMQKAIYEGGEKKLGYAGLCKELTTWKTQPETAWLKEIHSQVLQQSLKDLERAYKNFFDKRADFPRFKKKGMGDSFRYPQGCKLDQSNSRVFLPKLGWLKYRNSRDVLGTVSNITVSANGGKWFVSIQTEREVEQPVHPATSIVGIDVGITRFATLSDGSHIEPLNTFRKHQQRLARYQRAMSRKTKFSSNWKKAKARVQKIHTRIANVRKDFLHKTTTTISKKPRDCVHRGFAGTEYVQVRSRQQRFARAQCQSQIWPE

SEQ ID NO: 316 - protein, 296 aa, unidentified
MKRLQAFKYELQPNGEQARSMRRFAGSCRFVFNKALAMQKAIYEGGEKKLGYAGLCKELTTWKTQPETAWLKETHSQVLQQSLKDLERAYKNFFDKRADFPRFKKKGMGDSFRYPQGCKLDQSNSRVFLPKLGWLKYRNSRDVLGTVSNITVSANGGKWFVSIQTEREVEQPVHPATSIVGIDVGITRFATLSDGSHIEPLNTFRKHQQRLARYQRAMSRKTKFSSNWKKAKARVQKIHTRIANVRKDFLHKTTTTISKKPRDCVHRGFAGTEYVQVRSRQQRFARAQCQSQIWPE

SEQ ID NO: 317 - protein, 268 aa, unidentified
MKRRQAFRFNVRPTDTQERIFRQFAGAFRFVHNRALVLEIDRHASGKAHLGYVGTANLLPLWKRDPETVWLSGIHSQILRQSLKDLDRAYKNFFEKRAGFPKFRRKGEKDSFRFPQGARLDEPNARIWLPKIGWVRYRKSRTVLGTIKNVTVRRSGDRWFVSIQTEREIESPVHPNPGIVGIDLGVARFATLSDGTAIAPGRFFSRHEARLKRLQRALSRKKKGSKTGRRSERSWPGSTGTWPTRGTTSCTRSRRRSAKATRSSWSKT

SEQ ID NO: 318 - protein, 268 aa, unidentified
MKRRQAFRFALRPTDTQERIFRQFAGACRFVHNRALALEIDRHASGEARLGYVGTANLLPLWKRDPETVWLSGIHSQILQQSLKDLDRTYRNFFEKRAGFPKFRRKGENDSFRFPQGARLDEPNARIWLPKIGWVRYRKSRTVLGTIKNVTVRRSGDRWFVSIQTEREIESPVHPNPGIVGIDLGVARFATLSDGTAIAPGRFFSRHEARLKRLQRALSRKKKGSKTGRRSERSWPGSTGTWPTRGTTSCTRSRRRSAKATRSSWSKT

SEQ ID NO: 319 - protein, 268 aa, unidentified
MKRRQAFRFTVRPTDTQERIFRQFAGAFRFVHNRALVLEIDRHASGKAHLGYVGTANLLPLWKRDPETVWLSGIHSQILQQSLKDLDRAYKNFFGKQAGFPKFRRKGWNDSFRFPQGARLDEPNARIWLPKIGWARYRKSRTVLGTIKNVTVRRSGDRWFVSIQTEREIESPVHPNPGIVGIDLGVARFATLSDGTVIAPGRFFSRHEARLKRLQRALSRKKKGSKTGRRSERSWPGSTGTWPTRGTTSCTRSRRRSAKATRSSWSKT

SEQ ID NO: 320 - protein, 414 aa, unidentified
MARKKAVKVLRKQKKRETMQRFTQKQNIGRACLTAKEFRLLQRMSHSSKALRNVGLYTMKQIYLNNNRMATVKEVDTAMQADINYPGVQSNSVQAIRRALFTEVKSFFKALEQWKKKPEKFTGRPKFPNYSRSTDKRIIEIYQVPKVDDNGYWIIPMNVAFRKKFGSIKIRMPKNLRNKKISYIEIVPKQKGRFFEVHYTYEMHVSQMKKPSTTTSNALSCDLGVDRLVSCVTNTGDTFLIDGKKLKSINQYFNKTIRNLQQKNMENGLSKRVVTNQMAELWHKREQQINGYISQTVGLLFKKVKVFNIDTVVVGYNAGWKQESDMGKKNNQKFVQIPFHKLIAAIENKCVKEGIRFLKQEESYTSKPVFLIKIRFPFGLRMIGRIIALVANESLMVCTKVKQEHVFMLILMVR

SEQ ID NO: 321 - protein, 308 aa, unidentified
MKYQTQKILLTGNIDDETHAYLLWCCEQSNKLYNSVLFTIRQDYFEKCNYKTWFDKNDNYRRSPRLRRVKISYAQLCKDFKDDVHYQAIGGQQGQQTIKSVVEAIKGYNKLLPMWFSGELKDTPRIPSYRKRGLYQVAFTSQNIRYEPLEGICYLPIPNSQRKELETPSIIIPSGVNFQSEDIAEVRVIPSNGKLWAEYVYKTQLLKASNLDYSQGLGIDHGVDNWLSCISTKGKSFIVNGRKIKSINQRYNRLVAKQKQGKSQEYWDEKLDQATHKCNCQMRDAVNKAARFIINYCLKYQIGNIVFG

SEQ ID NO: 322 - protein, 278 aa, unidentified
MVKTMAKKKAVKVLRKQKKRETLRRFTQKQNIGRACLTAQEFRLLQRMSHSSKALRNVGLYTMKQSYLNHNKMATVKEVDAAMQADMNYWGIQSNSVQAIRRALFTEVKSFFKALEQWKKNPEKFTGRPKFPNYSHSTDKRIIEIYQVPKVDENGFWMIPMSVAFRKKFGSIKIRMPKNLRNKNIYYIEIVPKQKGRFFEVHYTYEMHVSQMKKQPMTTSNALGCDLGVDRLVSCVTNTGDAFLIDGKKTKNPLTSTSTKRYVIYNKKMWKMDFQNEL

SEQ ID NO: 323 - protein, 364 aa, unidentified
MDKKTYKLLRTLTHLSKDLYNLTLYTVKQHYELNGTFLPFVKAYHMVKDSEPYKLLPSQVAQQTMKIVERNFRSFFHVLKERKKGNYNRPVRPPKYLPKNGHFILIFPYQSFRVKEDRIILTLGKNFAEKYGVKHLEIPLPKNVKGHRIKEIRILPRYNALWFEVEYVYEVLPEERDLDRSKYLAIDLGLDNFATCVSTTGTAFIIEGRGLKSFNRWWNKEKAKLQSQYDKQGVKFGKRMVWLLKKRKNVVNDFMNKAVSYIVNYCLENGIGNVVIGELKGVKQNTDLGRRNNQNFHYIPYGLFKQKLKAKCERYGINYIEVDEAYTSKVDALTLEPIEKREKYLGKRGETWTVPVFRWCFNKC

SEQ ID NO: 324 - protein, 276 aa, unidentified
MARKKAVKVLRKQKKRETMQRFTQKQNIGRACLTAKEFRLLQRMAHSSKALRNVGLYTIKQSYLNDNKMATVKEVDTAMQADMNYWGIQSNSVQAIRRTLFTEVKSFFKALEQWKKNPEKFTGRPKFPNYSRSTDKRIIEIYQVPKVDENGYWIIPMNVAFRKKFGSIKIRMPKNLRNKKISYIEIVPKQKGRFFEVHYTYEMHVSQMKKQPTTTSNALSCDLGVDRLVSCVTTTGDAFLIDGKKLKSINQYFNKVIRNLQQKNMENGLSKRIVTN

SEQ ID NO: 325 - protein, 277 aa, unidentified
MARKKAVKVLRKQKKRENMQRFTQKQNIGRACLTAKEFRLLQRMSHSSKALRNVGLYTMKQSYLNNNRMATVKEVDTAMQNDMNYSGIQSNSVQAIRRSLFTEVKSFFKALEQWKKNPEKFTGRPKFPNYSRSTDKRIIEIYQVPKVDEKGYWMIPMNVAFRKKFGSIKIRMPKNLRNKNISYIEIVPKQKGRFFEVHYTYEMHVSQMKKQPTTTSNALSCDLGVDRLVSCVTNTGDTFLIDGKKLKSINQYFNKMICNLQQKNMDNGISKRIVTNT

SEQ ID NO: 326 - protein, 329 aa, unidentified
MRLVERHVIKKNHRFYAEIDRLCFLSKNLYNYANYLVRQSFIFENTYRNYHDVQKTLQSQQDYQAMPAKVSQQVLMILDRNWISFKESNLAYKESPSKFKARPRLPGYKHKIKGRNVVVYTAQAIRKKQLKRGIINPNKTAIYLKTKVDTSKIKQVRLVPRLNHYVIEVIYEADKQQYELEENRYASIDIGLNNLATLTFNQAGIKPLLINGKPLKSINQYYNKVKSDLQSLLGENKSSQKLKKLCNKREFKINDYLHKASRLIIDTLINQKIGTLIIGHNTDWKQKINLGKRNNQNFVSIPYNKFIEMLSYKAEMVGIKVIITEESYT

SEQ ID NO: 327 - protein, 305 aa, unidentified
MYLTTVNRLRLNQNEFNLVKELCWLSKNLYNSTLYEVRQHYFNTSEFLKYTKAYHILKNTENYKLLPSQVAQQTMKVVERTMKSFFGLLREKKKGNYNKPIKIPRYLNKEGKFVLLYTPAHMRYISNNQIRLTVKKELLEKHNLKELIITIPKHIIGKTIKELRINPLGQFLKVEFIYLNNENNYPKVTKNKNILSIDLGIDNLCTMINNVNNQPIIIDGREIKSINRLFNKNLSKYKSISKKVNDRYSTKKIDRLYYKRNNVFKDKFHKVSNYIINYCIDNNISKVIIGYNQEWKQNINIGKTN

SEQ ID NO: 328 - protein, 275 aa, unidentified
PAKVAQQILMRLHEAWQGFFSSLASYKEEPEKFFCSPRIPSYLHKTNGRFPCIYTIQAISKKYLKHSQIKPSKTNIVIPTNVNQIRQVRLVPKGSYYVFEVVYKRLEEPQIHTSDGIAGIDIGLNNLAAVTSNIKGFKPILVNGKPLNKINAYYHKIRSKLQSLLPSKHKTSHQIQNLTRKRNFKIYDYLHKSSRLIIDYLAANQIGTLIIGHNDKWKQSIGLGKRNNQNFVSIPFDRFISMLKYKAKLIGIKVIITEESYTSKCSFIDEEPLSK

SEQ ID NO: 329 - protein, 252 aa, unidentified
MTRKKAVKVLRKQKKRENMQRFTQKQNIGRACLTAKEFRLLQRMSHSSKALRNVGLYTMKQSYLNHNRMATVKEVDTAMQADTNYWGVQSNSVQAIRRALFTEVKSFFKALEQWKKNPEKFTGRPKFPNYSRSTDKRIIEIYQVPKVDENGYWMIPMNVAFRKKFGSIKIRMPKNLRNKNISYIEIVPKQKGRFFEVHYTYEMHVSQMKKPSTTTSNALSCDLGVDRLLSCVTHTGDAFLIDGKKLKSINQY

SEQ ID NO: 330 - protein, 294 aa, unidentified
MARKKAVKVLRKQKKRENMQRFTQKQNIGRACLTAKEFRLLQRMSHSSKALRNVGLYTMKQSYLNDNKMATVKEVDTAMQADTNYWGIQSNSVQAIRRALYAEVKSFFKALEQWKKNPEKFTGRPKFPNYSRSTDKRIIEIYQVPKVDENGYWIIPMNVAFRKKFGSIQIRMPKNLRNKNISYIEIVPKQKGRFFEVHYTYEMHVSQMKKPPATTSNALSCDLGVDRLLSCVTNTGDAFLIDGKKLKSINQYFNKMICNLGQKNMDNGISKRIVTNKMAALWHKRERQINGYIA

SEQ ID NO: 331 - protein, 331 aa, unidentified
MTRKKAVKVLRKQKKRETMQRFTQKQNIGRACLTAKEFRLLQRMSHSSKALRNVGLYTMKQSYLNHNKMATVKEVDTAMQADMNYWGIQSNSVQAIRRALYAEVKSFFKAMEKWKKNPEKFTGRPKFPNYSRPTDKRIIEIYQVPKVDDNGYWMIPMSVAFRKKFGSIKIRMPKNVRNKKISYIEIVPKQKGRFFEVHYTYELHVSQMKKQSTTTSNALSCDLGVDRLVSCATNTGDTFLIEGKKLKSINQYFNKMIRNLQQKNVENGISKRVVTNKMAALWHKRERQINGYISQTVGLLFKKVKAFGIDTVVVGYNAGWKQKSDMGKKNN

SEQ ID NO: 332 - protein, 295 aa, unidentified
MWFKTGKILSGYDLTAQMKTNKHFNAGYASSMQQTCLNVGEAFKSFKKLLSKAKKGELNQKPLPPKYRKSGGLFTVTYPKRWLKLKSGLIRFPLGNQVKAWFGISEFFLPLPTNLNWSNIKEIRILPRNGCFYAEFVYKTSVEPIKLNKSNVLGIDHGLNNWLTCVSNVGTSLVVDGLHLKSLNQWYNKSIAKIKENKPYSFWSKRLARITEKRNRQMRDAVNKAARIAVNHCLENNIGTLIFGWNEGQKNSSDMGKKNNQKFVQIPTARLKNRIEQLCEQYGIEFVETAIFLYF

SEQ ID NO: 333 - protein, 319 aa, unidentified
MARKKAVKVLRKQKKRENMQRFTQKQNIGRACLTAKEFRLLQRMSHSSKALRNVGLYTMKQSYLNNNKMATVKEVDTAMQADMNYWGMQSNSVQAIRRALFTEVKSFFKAMEQWQKNPEKFTGRPKFPNYSRSTDKRIIEIYQVPKVDDNGYWMIPMSVAFRQKFGSIKIRMPKNLRHKKISYIEIVPKQKGRFFEVHYTYEMHVSQMKKQSTTTSNALSCDLGVDRLVSCVTNTGDTFLIDGKKLKSINQYFNKMICNLQQKNIENGISKRVVTNRMAALWHKRERQINGYISQTVGLLFKKVKAFGIDTIVVGYNVG

SEQ ID NO: 334 - protein, 371 aa, unidentified
MNSLRKAVKVLRKQKKRENIQRFTQKQNIGRACLTAKEFRLLQRMSHSSKALRNVGLYTMKQSYLNHNKMVTVKEVDTAMQADMNYWSMQSNSVQAIRRSLFTEVKSFFKAMEQWKKNPEKFTGRPKFPNYSGSTDKRIIEIYQVPKVDENGYWMIPMNVAFRKKFGSIKIRMPKNLRNKKISYIEIVPKQKGRFFEVHYTYEMHVSQMKKPFTTTSNALSCDLGVDRLVSCVTNTGDTFLIDGKKLKSINQYFNKMICNLQQKNIENRISKRVVTNQMAVLWHKRERQINGYISQTVGLLFKKVKAFGIDTIVVGYNVGWKQKADMGKKNNQTFLQIPFHKLIAAIENKCVKEGIRFLKQEESYTSKASF

SEQ ID NO: 335 - protein, 283 aa, unidentified
MARKKAVKVLRKQKKRENIQRFTQKQNIGRACLTAKEFRLLQRMSHSSNALRNVGLYTMKQSYLNHNKMVTVKEVDTAIQADMNYWSMQSNSVQAIRRSLFTEVKSFFKAMEQWKKNPEKFTGRPKFPNYSGSTDKRIIEIYQVPKVDENGYWMIPMNVAFRKKFGSIKIRMPKNLRNKKISYIEIVPKQKGRFFEVHYTYEMHVSQMKKPFTTTSNALSCDLGVDRLVSCVTNTGDTFLIDGKKLKSINQYFNKMICNLQQKNIENRISKRVVTNQMAVLWH

SEQ ID NO: 336 - protein, 319 aa, unidentified
MARKKAMKVLRKQKKRENMQRFTQKQNIGRACLTAKEFRLLQRMSHSSKALRNVGLYTMKQSYLNHNKMATVKEVDTAMQADMNYWGIQSNSVQAIRRALYAEVKSFFKAWEQWKKKPETFTGRPKFPNYSRSTDKRIIEIYQVPKVDDNGYWMIPMNVAFRKKFGSIKIRMPKNLRNKKISYIEIVPKQKGRFFEVHYTYEIHVSQMKKPSTTTSNALSCDLGVDRLLSCVTNTGDTFLIDGKKLKSINQYFNKMIRNLQQKNMDNGISKRIVTNQMAALWHKRERQINGYISQTVGLLFKKVKACNIDTIVVGYNVG

SEQ ID NO: 337 - protein, 319 aa, unidentified
MARKKAMKVLRKQKKRENMQRFTQKQNIGRACLTAKEFRLLQRMSHSSKALRNVGLYTMKQSYLNHNKMATVKEVDTAMQADMNYWGIQSNSVQAIRRALYAEVKSFFKAWEQWKKKPETFTGRPKFPNYSRSTDKRIIEIYQVPKVDDNGYWMIPMNVAFRKKFGSIKIRMPKNLRNKKISYIEIVPKQKGRFFEVHYTYEMHVSQMKKPSTTTSNALSCDLGVDRLLSCVTNTGDTFLIDGKKLKSINQYFNKMIRNLQQKNMDNGISKRIVTNQMAALWHKRERQINGYISQTVGLLFKKVKACNIDTIVVGYNVG

SEQ ID NO: 338 - protein, 410 aa, unidentified
MKRSVTVKLQPSKGQETTLFELASVGAKIWNHVNYLRRQQFFQEQIVDFNKTEKIVYEEYKKEIGSATVQQIARKNAEAWRSFFSLLRKKRNKELPNWFKPRPPNYLKEDGKRKPLIVLRNDQYKIEGNKLILKGLGKFGKLEIQFKGRIHLKGKQGRLEITYDEVKRKWYAHISFTVEEKLEGEEWVALPRQPKGNLSAGIKSIDFYWRKGMADYQSKLNKSGAKTSRKLKRMHEKAKLQAKHYINTAVRQTVRKLYELGVSRIVVGYPKGIARNSDKGKKQNFLLSHIWRFNYVIKRLTEVAEEYCIQVELVDEAYTSKICPVCGRPHEGARFVRGLFKCPETGFVFNADLVGAFNILKKKVKTITPNLGGLYAQGRGNWPKARPGGFERTTLTGSLMKTPQTFPPVG

SEQ ID NO: 339 - protein, 290 aa, unidentified
MAMLGRTLKVRLYPDASQATQLLEMSREYQHLANLVSQWVFDHDFPLNSLKINHALYKVFRRESLLNSQMIQSVFRTVVARYKTVLEQMKHHPYRYQDDDKKWVRVTKDLTWLFKPLHFSRPQADLVRRSNYSFGNGLTEISLTTLEKRAKMPFTIKGVEHYFQNGWKLGTAKLIHSRGKWYLHIGITKEVADFDSTIPSQIVGIDRGLRFLTTTFDQRGKTRFFDGKKVLLKRHKFQKIRAELQHRGTKSAKKKLKQLQQRENRWMTDINHQLSKTLVTLYGPQTLFVL

SEQ ID NO: 340 - protein, 249 aa, unidentified
MKGGSDSKSSVKYSKQLNILSQRRESFLRDYFYKCAWYICRYAKAADVDVIVMGHNDGQKQEIDLTDNVNQNFVSIPYTKFITILKTVASKCGIAVVIREESYTSQASLLDMDDIPTYKKGENKKHAFSGKRIHRGLYRSKNGTLLNADINGAANILRKEYPNAFDSIKNFAYLYVTTISIGYKDLYRNAKACAGRPKSYKYHKSGRCTVVRHMERSHKKCEYCKLWGKGKFVWRPDKNKQDTQQGKAA

SEQ ID NO: 341 - protein, 246 aa, unidentified
MKQQVSFKFRLKPDGQQERQMRRFAGACRFVFNRALALQNENHEAGKKYIPYTKMASWLVEWKKDTETEWLKDSPSQPLQQSLKDLERAYKNFFQNRAAFPRFKKRGQNDAFRYPQGVKLDQENSRIFLPKLGWMRYRNSRQVTGVVKNVTVSQSCGKWYISIQTEREVSTPVHPSASMVGLDAGVAKLATLSDGTVFEPVNSFQKNQKKLARLQRQLSRKVKFSNNWQKQKRKIQRLHSRIANIR

SEQ ID NO: 342 - protein, 328 aa, unidentified
MHDDLAFHQFCSVYTGPVVIKKQAFKFLLEPNKGQLSDFLAFAGSCRYVYNKGLALLNENYRSGKKFIGYNQLASELVEWKNEESLSWLKEAPSQCLQQSLRDLDRAFRNFFTGKSQYPKFKKKGRHDSFRIPCQRVRVDQEKKLVSLPKVGWVKYRKSREIIGDLKNATISLNQGEWYISFNTEQTVPDPIHPSDIKTTIVLNNVNSVHLSSGVGGDNTYQAEEKKKLIRLNKTLTRRKKYSKNWLKTKAKIDRVRSKAARIRLDNIHKATTAICKNHAVVEVVNLMDSVSAKNDNTLSMRYEFVRQLIYKQEWLGGEIIRRESKLL

SEQ ID NO: 343 - protein, 422 aa, unidentified
MTKENPSNYKTLQIWIKKGHRMYSYFQECCHNAKNMYNTTNFYIRQVYTGLTQEKELQPLQKEVLANIHKNIGKMNDTQLLAYQKKLEKEKLKPKEEQKEIKCNLFSEPNFEKPYVDYNFLDALFKAMIQNDYRALPTQCSQSIMKGLFQNWKSFFASLKDYKKNPNKYVGMPRIPKYIRSSEKEILYTNQDCIIKNSRFLKFPKTKLQLNIGKLGFTEGKLKQVRVIPKYNEYVVELVIDIPSEQQIIEENARYMSIDLGIDNLATIVTNTGMKPVLVKGKHVKSINQYYNKMKSHFTSILRNGKQTNEGPLTSKRIENLHQKCYLKIKDVFHKVSHHIVKLAQEEEVCKIVIGQNKSWKQETNMGKRNNQSFCHIPHNLLVQMITYKANAVGIQVVVTEESYTSKASFLDNDFIPTYGEN

SEQ ID NO: 344 - protein, 286 aa, unidentified
MFAGSCRFVYNKALALLNDNYHSGKKFMGYNQLATELVEWKSEESLSWLKASPSQCLQQSLRDLDRAFRNFFSGKAQYPKFKKKGRHDSFRIPCQRVRVDQDKKMVSLPKVGWVKYRKSREIIGELKNVTISMKQDKWYISFNTESMVPDPMHPSDIKTKIVLSDQCEFPIRLDSSMDSSHQLDEVKKLARLNRILIRRIKYSSNWLKTKGKIDRIKARLARCRLDNIHKVTTAICKKHAVVEVLSLMDSVSDKNDITLSMRYEFVRQLIYKQEWLGGEVIRRELA

SEQ ID NO: 345 - protein, 239 aa, unidentified
MKQQVSFKFRLKPDGQQERQMRRFAGACRFVFNRALALQNENHEAGKKYIPYTKMASWLVEWKKDTETEWLKDSPSQPLQQSLKDLERAYKNFFQNRAAFPRFKKRGQNDAFRYPQGVKLDQENSRIFLPKLGWMRYRNSRQVTGIVKNVTVSQSCGKWYISIQTEREVSTPVHPSASMVGLDAGVAKLATLSDGTVFEPVNSFQKNQKKLARLQRQLSRKVKFSNNWQKQKRKIQRLH

SEQ ID NO: 346 - protein, 373 aa, unidentified
PLYGYAQQLTAMANNLSNAARFRQRQLMTAAKKEPADWTANEQEVMDELYAAFPEDFMDGPADRQGFLNVYGNLEKLMRRSGNPDYFAEGFPRQCSQQVLKQAARDMKAFFDSLKAYQKNPSAFTGKPQLPGYKRKGGHCTVTVTNQDCKVSEKDGMWYAAFPLRKDCPLAIGHPIPDAVLKEATITPDNGRYRFCLKFEVMAELPPVTEQPGRVCAIDFGVDNLMAVTNNCGLPCLIYKGGVAKSINQKYNKTVAVMVSRQTAATGKKYVPDAAYHAVTNRRNDRIGDLLHKCAKHFITWCVENRIDAIVLGVNKYWKQEVALGDDRNQNFVQIPFLVLRRIIGYLAEWNGIHCIEQEESYTSKASFPDMDA

SEQ ID NO: 347 - protein, 226 aa, unidentified
MEKAYSYRFYPTPEQESLLRRTLGCVRLVYNQALHERTQAWYERQERVGYSQTSSMLTNWKKQEDLDFLNQVSCVPLQQGLRHLQTAFTNFFAGRAKYPNFKKKHQGGSAEFTKSAFKFKNGQIYLAKCLEPLAYKCRWYGRNYIEIDRWFPSSKRCSSCGHIVEKMPLNIREWDCPNCGTHHDRDLNASKNILAAGLAVSDCGASVRPEQSKSVKATAKKQKPKL

SEQ ID NO: 348 - protein, 236 aa, unidentified
MRTACKCRASPTPAQATQLGRTFGCVLLVWNKTLAERHAAYHQRGEKTPYGQTGRALTGWKKTTDLAFLSEVSSVPLQQTLRHQHTAFQNFFSGRARSPRFKSRSSRQSAHYTRSAFRVRDGRLTLGEFRRRLEYKAARRGRTLAVADRWFPSAKTCAHCGHLLDTLPLGTRFWACPRRRARHDRDVNAAKHILAAGRAAVRARAGDACGAGVRRQGPSLPRSATKQEAAAARQST

SEQ ID NO: 349 - protein, 280 aa, unidentified
MYCTVKQQLKHLSKEEYLLLKELCHTAKNLYNEGLYQVRQHYFQEKNYLNYQNNYHLLKGSENYKRLNSNMAQQILKEIDGVWKSFFGLIRLAKQGKYDFRAIRIPWYLPKDQQFALVVKRNRRVHDYLSKTCRKIINYCLNHRIGTLVIGYNENLQKGSNLGRRNNQNFVNIPIGMIKKKLEYLCQLYGMTFVQQEESYTSQASFWDRDELPTYDPSNVKTYTFSGKRVKRGLYRTASGKLLHADIHDALNILRKSNVVALTGLYARGEVDTPVRIRIA

SEQ ID NO: 350 - protein, 226 aa, unidentified
MEKAYSYRFYPTPEQESLLRRTLGCVRLVYNQALHERTQAWYERQERVGYSQTSSMLTNWKKQEDLDFLNQVSCVPLQQGLRHLQTAFTNFFAGRAKYPNFKKKHQGGSAEFTKSAFKFKNGQIYLAKCLEPLAYKCRWYGRNYIEIDRWFPSSKRCSNCGHIVEKMPLNIREWDCPNCGTHHDRDLNASKNILAAGLAVSDCGASVRPEQSKSVKATDKKQKPKL

SEQ ID NO: 351 - protein, 266 aa, unidentified
MRLVQKHLINKNHPYWSYFDQQAFLSKNLFNLANYHIRQHFFNTRTVLSFTSLYHLVSKTDAYGALPNTKVAKQIIRRVHKAWIGYKQAHKDWQRHPEKYLGEPKIPKYKYKQNGRYIVVFPDETVSKPALRKGVVKLTPCPIEFNSGLRQVNEVRVIPRSGCYVVEIVYEQDRVASTTGDATAGVDIGLVNLVTLTTNQSGVKPLLIKGGALKAINTYYNKQKAKIQSELATKYQRKSSRRLESLTFKRNCRVDNYLHTVSLYSD

SEQ ID NO: 352 - protein, 273 aa, unidentified
MRTAYKCRAHPNPEQAAALSRTFGCVRLVWNKTLNDRNRRYKTENKGTSYRETDATLTIWKRSDVLGFLSEVSCVPLQQTLRHQHSAFQNFFSRRSRYPRFKSRTGRQSAHCTRSAFRMRGGSLTLAKMSTPLPFTWSFTGVDVGELNPATVIVSREPDGRWYVSFAVDVRDSAAARPANREIGLDLGLRNFVTTSDGTRVPRPRSMDRKARNLGCRTRHDRDLNAAKNILAAGRAVARGFSGDACGADVRRQGPSLPLSAVNQEAHAETLGS

SEQ ID NO: 353 - protein, 249 aa, unidentified
MLTGFRYRLAPTGEQAGLCQVYGDICRAVWNTGLHQRREAVRRWQRGQDLPFCGYHLQARQLAEAKTEEEWLKAAPSHILQQTLRDLDRACRDHGTFNVRWRAKGRWKPSFRFPAGARVIVQRLGRKWGRLKLPKLGWVRFRWSRSAKGTVDAPGTHVRQKAGLNRAILARGWHGFKLACQNAARRSATRIVEVNPAYTSQTCHPCGHVASENRESPSVFRCGACGYRAHADVNAARNTRARGWTSPSG

SEQ ID NO: 354 - protein, 263 aa, unidentified
MARKKAVKVLRKQKKRENIQRFTQKQNIGRACLTAKEFRLLQSMSHSSKALRNVGLYTIKQSYLNNNKMATVKEVDTAMQADMNYWGIQSNSVQAIRRSLFTEVKSFFKGLEQWKKKPETFAGRPKFPNYSGSTDKRIIEIYQVPKVDDNGYWMIPMNVAFRKKFGSIKIRMPKNVRNKKISYIEIVPKQKGRFFEVHYTYEMHVSQMKKPSTTTSNALSCDLGVDRLLSCVTNTGDTFLIDGKKLKSINQYFNKMIRNLQLK

SEQ ID NO: 355 - protein, 315 aa, unidentified
MKNSKKNEEEDNWGYRRYSIVVRKSSPDYQKIDELCFKSKNLFNATLYSQRQSYFDTGKFIKHNDLNTSFAHTNQPDYRALPAKVSKYTQKKVDQAIKSFLGLKKSKKITFTPKIPKYLKKDGRFVTEYEKDALSFKREGFIKLSKTNIYIPIPNKLKIKGKGKDLKKVFRVVRLVPKTGYYLIEVLYKKSIPKKRKKKMTHKTRFASIDLGVNNLVTVTSNVFQPLIINGRPIKSINQYYNKYRKRKQQLLPKNQYTSKAIRQLGYKREMKLNDYLHKSAAFLVNYLVSQTIDVLVIGTNKGWKQNINIGKRNN

SEQ ID NO: 356 - protein, 359 aa, unidentified
MTLTERHIIRPTHPIFKRIKDFCHLSKNLYNYANFILREHYFAGFKLPTAYDLINRFVKESQRDYKALPAQSAQQVLMLLSQNWKSYLKALKAYKLKPSSFLARPKIPKFKPKDGVSIGVLTNQQTSFTKGRMTKIKFPKKANLKRLITKINPQTSRLKQVRLIPKTTCFIVEVVYEQTTHKLPQTHGIGIMGIDLGLNNFVTAIDNQSSPFIIKGGGVKSVNQWFNKLKAHYQAKAKTSNKRFWTKRLGKLALWRECKVNDFMHKASAYVVGHCLKKGISTIVIGKNDGWKQELKLGKRTNQNFTNIPYESFIEKLAYKCALVGITLHTTEERFTSKCDHLANEPMQHHEQYLGKRVK

SEQ ID NO: 357 - protein, 279 aa, unidentified
MSKKTKKKVKNLGCQQVLLHPDQELRAILEYLCGEANKVFNCSVYYARQVWFKENRFVSKSELCEQMKWNRHFNAMYASSAQQICNGVVESFSSFRQLLKLFGKGELANKPKPPNYRKPGLFTVSYPKRWLKFTNEGIRVPLGRKVKAWFGLEAFYIPMVSNLDWDSIKEIRILPRHGCFYTEFVYEMKTPVAVKLDAGQALSIDHGLDNWLTCVDTQGDSFIIDGKHLKSKNQWYNKQIATIKENQPQGFWSQRLARMTEKRNRQMRDAVNTRSAISY

SEQ ID NO: 358 - protein, 347 aa, unidentified
MTLTERHIIRPTHPIFKRIKDFCHLSKNLYNYANFILREHYFAGFKLPTAYDLINRFVKESQRDYKALPAQSAQQVLMLLSQNWKSYLKALKAYKLKPSSFLARPKIPKFKPKDGVSIGVLTNQQTSFTKGRMTKIKFPKKANLKRLITKINPQTSRLKQVRLIPKTTCFIVEVVYEQTTHKLPQTHGIGIMGIDLGLNNFVTAIDNQSSPFIIKGGGVKSVNQWFNKLKAHYQAKAKTSNKRFWTKRLGKLALWRECKVNDFMHKASAYVVGHCLKKGISTIVIGKNDGWKQELKLGKRTNQNFTNIPYESFIEKLAYKCALVGITLHKTEERFTSKCDHLANEPM

SEQ ID NO: 359 - protein, 267 aa, unidentified
MGTAYKCRAYPDPEQAAIFGRTFGCVRLVWNKTLAERHRAWHSHGRRTSYKETDAALTAWKKTEELAFLSEVSSVPLQQALRHQHAAFAGFFAGRARYPRFKTRTSRQSAHYTRSAFRMRDGELQMAKAISDCGWGEFRRQLEYKAHRAGRTLIVIDRWYPSSKTCSNCGHLLEKLSPSTRHWTCPGCRTRHDRDHNAAKNILAAGRAAAGARPGEVCGADVRRQGSPLPQSATKQKPPRREPRESPSFQGEEEVNHALWRGGRPPR

SEQ ID NO: 360 - protein, 379 aa, unidentified
MARKKAVKVLRKQKKRETMQRFTQKQNIGRACLTAKEFRLLQRMSHSSKALRNVGLYTMKQGYLNDNKMATVKEVDTAMQADMNYWGIQSNSVQAIRRALFTEVKSFFKALEQWKKNPEKFTGRPKFPNYSRSTDKRIIEIYQVPKVDDNGYWTIPMNVAFRKKFGSIKIRMPKNLRNKKISYIEIVPKQKGRFFEVHYTYEMHVSQMKKPSTTTSNALSCDLGVDRLLSCVTNTGDTFLIDGKKLKSINQYFNKMIRNLQQKNMDNGISKRIVTNKMAALWHKRERQINGYISQTVGLLFKKVKAFDIDTIVVGYNMGWKQKSDMGKKNNQRFVQIPFHKLMAAIENKCVKEGIRFLKQEESYTSKASFLDKDPVPVW

SEQ ID NO: 361 - protein, 350 aa, unidentified
MARKKAVKVLRKQKKRENIQRFTQKQNIGRACLTAKEFRLLQRMSHSSKALRNVGLYTMKQSYLNHSKMATVKEVDTAMQADMNYSGMQSNSVQAIRRALYAEVKSFFKALEQWKKKPEAFTGRPRFPNYSRSTDKRIIEIYQVPKVDDNGYWMIPMNVAFRKKYGSIKIRMPRNIRNKKISYIEIVPKQKGRFFEVHYTYEMHVSQMKKQFTTTSNALSCDLGVDRLLSCVTNTGDAFLIDGKKLKSINQYFNKMIRNLQLENIENGLSKRVVTNEMAALWHKRERQISGYISQTVGLLFKKVKAFDIDTIVVGYNTGWKQKSDMGKKNNQKFVQIPFHKLIAAIENKC

SEQ ID NO: 362 - protein, 268 aa, unidentified
MYLCIKQQLKKISKEDYENLRELSHVAKNLYNYGLYNVRQYYFEQKEYLNYEKNYAIYKNNENYKLLNSNMAQQVLKEVDGVFKSFFGLIKLAKKGKYNFRDIKLPKYLKKDGFATLVIGFVRIKGITKKQSILRNNRNNRVNDYINKTCRYIINYCLDNNIGNLVIGYNETLQRDSNLGKVNNQNFVNIPVGNIKEKLEYLCKLYGINFVKQEESYTSKASFFDNDNIPKYNADNPIQATFSGKRIKRGLYKTKSGYAYKNKDCINF

SEQ ID NO: 363 - protein, 265 aa, unidentified
MTKTKKLMGVQQCLINPDKDLKAILEYICSESNKLHNCAVYYARQIWFKTRRFVTGFDLVNELGSNKHFSTLPSEAAVQTCLSVGESVKSFSELLKKSRKGELEQNPKFPKYRKQGYQLVAFPKRALRLVGNTIRFPLGLQVKAWFGLKEFFLPMPSNLDFGLLKEVRILPRNGAFYAEFVYPKANIKAELDPAKCLGIDHGLNNWLTCVSNVETSFIVDGLHLKSLNQWYNKHTSDLMEGKPNGYWTKRLANREHPKFALSRNT

SEQ ID NO: 364 - protein, 451 aa, unidentified
MARKKAVKVLRKQKKRENMQRFTQKQNIGRACLTAKEFRLLQRMSHNSKALRNVGLYTIKQSYLNDNKMATIKEVDTAMQADTNYWGMQSNSVQAIRRTLFTEVKSFFKALEQWKKNPEKFTGRPKFPNYSRSTDKRIVEIYQVPKVDDNGYWMIPMNVAFRKKFGSIKIRMPKNLKNKKISYIEIVPKQKGRFFEVHYTYEMHVSQMKKPSTTTSNALSCNLGVDRLVSCVTNTGDAFLIDGKKLKSINQYFNKMICNLGQKNMDNGISKRIVTNKMAALWHKRERQINGYIAQTVGLLFKKVKEFDIDTIVIGYNAGWKQNSHMGKKNNQKFVQIPFQKLMAAIENKCIKEGIRFFKQEESYTSKASFIDKDPVPVWSKDDKTQYCFSGKRITRGLYQSKAGTCIHADINGALNTLQKSRVVQLDDNLKVKTPILLEVQKRKAVASRIA

SEQ ID NO: 365 - protein, 380 aa, unidentified
MLKGGRVQLVERHVIKKSHKYHQEIDNLCFLSKNLYNVANYLIRQKLFQSGEILNYNQVQKLFSGSVDYKAIPAKVSQQILMVLDKNWKAFQAASKSYLKNPSKFLGKPKLPKYKHKTDGRNLLIYTVQALSKPALAKGFVNPSQTNIFIPTNAKDIAQVRIVPKLDHYVVEVVYHKEIEEKQLETTRIASVDLGLNNLAAVTFNQAGLVPFLINGRPLKSINQFFNKKKAELQAILKTGTSKRLKKLCTKRNLKVDDYLHKASRYLINKLVELNIGILVIGKNDNWKQKIAIGNRNNQNFVQVPHTRFIDQITYKAELTGIKVIVNEESYTSIASFWDQDEIPVVRSVDSKTVKAGLLDFYEIESQCPQVGISHNFKFI

SEQ ID NO: 366 - protein, 319 aa, unidentified
MARKKAVKVLRKQKKRENMQRFTQKQNIGRACLTAKEFRLLQRMSHSSKALRNVGLYTMKQSYLNNNRMATVKEVDTAMQNDMNYSGIQSNSVQAIRRSLFTEVKSFFKALEQWKKNPEKFTGRPKFPNYSRSTDKRIIEIYQVPKVDEKGYWMIPMNVAFRKKFGSIKIRMPKNLRNKNISYIEIVPKQKGRFFEVHYTYEMHVSQMKKQPTTTSNALSCDLGVDRLVSCVTNTGDTFLIDGKKLKSINQYFNKMICNLQQKNMDNGISKRIVTNTMAALWHKRERQINGYIAQTVGLLFKKVKEFNIDTIIVGYNAG

SEQ ID NO: 367 - protein, 358 aa, unidentified
MARKKAVKVLRKQKKRETMQRFTQKQNIGRACLTAKEFRLLQRMSHSSKALRNVGLYTIKQSYLNDNKMATVKEVDTAMRADMNYSGMQSNSVQAIRRALFTEVKSFFKAMEQWKKNPEKFTGRPKFPNYSRSTDKRIIEIYQVPKVDKNGYWIIPMNVAFRKKFGSIQIRMPKNVRNKKISYIEIVPKQKGRFFEVHYTYEMHVSQMKKQSTTTSNALSCDLGVDRLVSCVTNTGDTFLIDGKKLKSINQYFNKMICNLQQKNMDNGLSKRIVTNRMAALWHKRERQINGYISQTVGLLFKKVKEFDIDTIVVGYNTGWKQKSHMRKKNNQTFAQIPFHKLIVAIENKCLKEGIRFL

SEQ ID NO: 368 - protein, 298 aa, unidentified
MLTGFRYRLSLTDEQAERCAEYGDICRAVWNTALDQRRQAVQRWQRGYDQLFCGYHLQATQLAETKTEETWLRAAPSHILQQTLKDLDRACRDHGTFGVRWRGKGRWKPSFRFPDPKQITVERLGRRWGHLKLPKLGWVRFRWSRAPKGAVRSATVSRDGEHWYVSLLCEDGEHTPGEHAVPDAAVGIDRGVAVAVATSDGDLFDRTLQTPKEHERERRLRRKFKLACLNAARRTGTRIVEVDPAYTSQTCNPCGHVAPENRESQSVFRCTSCGHTAHADVNAAQNTLSRGWTGSLSG

SEQ ID NO: 369 - protein, 374 aa, unidentified
MIRRQAYKFQLKPNPEQIASMKSFAGACRFVYNRALTMQSDVWRNGDRYIPYNKMAPWLVEWKSQEEMSWLSNAPSQILQQSLKDLDKAFNNLFARRATFPSSKKKGKNDAFRYPTQRVKLDEANERIQLPKLGWVRYRKSRNITGVIKNVTVSMKLDKWYVSLQTESEVETPAPLQSSIIGLDTCNIECLTTSEGTDFLSQATLPKMEKSLEKSIRRLRRKKKFSCNWVKQRHKVNRLLHRISNMRKDHFHKISTVLSKNHAIVVIENLEHATSLPNRSLGKKAAAVYNIYELKRQLDYKLSWNGGQLVTVHEHDNNLKQVEADSACTAYGAIRAKKILAAGHAVIACGGVDMLRHPLKQEPSEDNGSTAILL

SEQ ID NO: 370 - protein, 374 aa, unidentified
MIRRQAYKFQLKPNPEQIASMKSFAGACRFVYNRALTMQSDIWRNGDRYIPYNKMAPWLVEWKSQEEMSWLSNAPSQILQQTLKDLDKAFNNLFSRRATFPSPKKKGKNDAFRYPTQRVKLDEGNERIQLPKLGWVRYRKSRSITGVIKNVTVSMKLDKWYVSLQTEAEVDEPSSQQSSMIGLDASNIECITTSDSTDFLSQASLPKMEKSLEKNIKRLRKKKRFSSNWVKQRHKVNRLLNRISNMRKDHFHKISTTLSKNHAIVVIENLEAATSLSKRPKSTKRFLSNETYELKRQLDYKLNWNGGELMTVRERDNNFKPVSDNASSNLYGRLRAEKILAAGHAVIACGGAEFLGHPMKQEPSEDGKSTVILL

SEQ ID NO: 371 - protein, 374 aa, unidentified
MIRRQAYKFQLKPTPEQIASMKSFAGACRFVYNRALTMQSDIWRNGDRYIPYNKMAPWLVEWKSQEEMSWLSNAPSQILQQSLKDLDKAFNNLFARRATFPSPKKKGKNDAFRYPTQRVKLDEGNERIQLPKLGWVRYRKSRSITGVVKNVTVSMKLDKWYVSLQTEAEVDEPSSQQSSMIGLDTSNIECITTSDSTDFLSQASLPKMEKSLEKNIKRLRKKKRFSSNWVKQRHKVNRLLNRISNMRKDHFHKISTTLSKNHAIVVIENLEAATSLSKRPKSTKRFLSNETYELTRQLDYKLIWNGGELVTVRERDNNFKPVSDDASSNHYGKLRAERILAAGHAVIACGGAELLGHPMKQEPSEDGKSTANLL

SEQ ID NO: 372 - protein, 374 aa, unidentified
MIRRKAYKFQLKPNPEQIASMKSFAGACRFVYNRALTMQSDIWRNGDRYIPYNKMAPWLVEWKSQEEMSWLSNAPSQILQQSLKDLDKAFNNLFARRATFPSPKKKGRNDAFRYPTQRVKLDEGNERIQLPKLGWMRYRKSRSITGVIKNVTVSMKLDKWYVSLQTEAEVDDPSPKQSSIIGLDTSNIKCITTSDSIDFLSQASLPKMEKSLEKSLKLLRKKKRFSSNWAKQKHKVNRLLHRISNMRKDHFHKISTALSKNHAIVVIENLEDATSLSNHRKRTSGFTLNDIYELKRQLDYKLKWNGGELVTVCERDDNLKPIIDDASSNHYGRLRAEKILAAGHAVIACGGADLLGHPMKQEPSEDGKSTVILL

SEQ ID NO: 373 - protein, 310 aa, unidentified
MIKKQAFKFLLEPNKGQLSDFLAFAGSCRFVYNKGLALLNENYRAGKKFIGYNKLASELVEWKNEESLSWLKEAPSQCLQQSLRDLDRAFRNFFTGKSQYPKFKKKGRHDSFRIPCQRVRVDQEKKLVSLPKVGWVKYRKSREIIGDLKNATISLNQGKWYISFNTEQTVPEPIHPSDIKTTIVLNNVNSVHLSSGVGGDNTYQAEEKKKLVRLNKTLTRRKRYSKNWLKTKGKIDRVKSKAARIRLDNIHKATTAICKNHAVVEVVNLMDSVFDKNDNTLSMRYEFVRQLIYKQEWLGGEIIRRESKLL

SEQ ID NO: 374 - protein, 308 aa, unidentified
MIKKKAFKFLLEPSKSQISDVLVFAGACRFVYNKGLALLSENYNNGKPFLNYNKLAPLLVEWKSDHKFEWLKLCPSQCLQQSLRDLDRAFQNFFSGRALYPRFKKKGRSDSFRVPCQRVRLNQEKGLVSLPKLGWVKYRKSREVTGNLKNVTISKKLDKWYISFNTEEFVSEPVHPSINKTKVLLNDGYVTLCAGNEVSVESFTGIVDEKKIKRLNKELSRKVKHSNNWLKSKIKIYIIRTSSGNFRLDALHKITTAICKKHAVVEVVDVKNFVSDKNNIAKNMRYEFVRQLLYKQEWLGGKIVQLDA

SEQ ID NO: 375 - protein, 357 aa, unidentified
MIKQQAFKFALKLNDQQKANMLLFAGACRFVYNKGLALLKESYESGQKHMHYNQLAPLLVEWKSDPALSWLKQAPSQSLQQSLRDLDKAFSNFFYGKAEHPRFKKKGQHDAFRFPSQRVKVDQEKQLVLLPKLGWVKYRKSRNITGAIKNVSISGKLGNWYISFNTQTDIAEPIHPAISKIGVYVDTKKNITLSDGTQYIPPQSLITLPKQIQRLTNCLRKKNRYSNNWLKSKHRINRLSSRLNQVKVDYLHKASTAISKNHAMIVIADFEKKSFSADKQQKNLTTCEKSTSIHYELIRQLTYKQEWHGGLVIKLSAEKNVDAESAWTKACNLLAAGLAVTACGGEVSKDSPMKQEP

SEQ ID NO: 376 - protein, 329 aa, unidentified
MKRLQAFKFQLRPGGQQEREMRRFAGACRFVFNRALALQNENHEAGNKYIPYPRMASWLVEWKNATETQWLKDAPSQPLQQSLKDLERAYKNFFQKRAAFPRFKKRGQNDAFRYPQGVKLDQESSRIFLPKLGWMRYRNSRQVTGVVKNVTVSQSCGKWYISIQTESEVSTPVHPSVSMVGLDAGVAKLATLSDGTIFDPVNSFQKNQKTLARLQRQLSRKVRFSNNWQKQKRKIQQLHSRIANIRRDYLHKVTTTVSKNHAMIVIEDLKVSNMSRSAAGTVSQPGRNVRAKSGLNRSILDQGWYEMRRQLEYKQLWRGGQVLAVPPAY

SEQ ID NO: 377 - protein, 282 aa, unidentified
MKRLQAFKFQLRPGDQQECEMRRFAGACRFVFNRALALQNENHEAGNKYIPYGKMASWLVEWKNATETQWLKDSPSQPLQQSLKDLERAYKNFFRKRAAFPRFKKRGQNDAFRYPQGVKLDQENSRIFLPKLGWMRYRNSRQVTGVVKNVTVSQSCGKWYISIQTESEVSTPVHPSASMVGLDAGVAKLATLSDGTVFEPVNSFQKNQKTLARLQRQLSRKVKFSNNWQKQKRKIQRLHSRIANIRRDYLHKVTTTVSKNHAMIVIEDLKVSNMSKSAAGTV

SEQ ID NO: 378 - protein, 310 aa, unidentified
MYYDQKKAFKFLLEPSKSQISDVLVFAGACRFVYNKGLALLSENYNNGKPFLNYNKLAPLLVEWKNDNKLEWLKFCPSQCLQQSLRDLDRAFQNFFSGRSQYPRFKKKGRSDSFRVPCQRVRLDQEKGLVSLPKLGWVKYRKSRAITGDLKNVTVSRKFDKWYISFNTEEVVSNPVHPSVDKTRILLNDGYVTLCTGGDLSVKKFTSLVDEKKIKRLNKELSRKVKNSNNWLKNKKKIDKIRLKSGSFRLDAIHKITTTICKKHAVVEVVNVKNFVSDKNNIATSMRYELVRQLLYKQEWLGGKIIHLDA

SEQ ID NO: 379 - protein, 291 aa, unidentified
MNDFLVFAGSCRFVYNKGLALINENYDSGKKFLNYNQLASELVNWKNEECLAWLKMAPSQCLQQSLRDLDRAFKNFFSGKSQYPRFKKKGRNDSFRVPCQRVRLDQEKHLVSLPKLGWVKYRKSREITGVLKNVTISRKLDKWYISFNTEEVVPEPLHPSFSKTKILLNNEWLMQLTACESLVEQFANMEGNKKLRNLNNILGRKVKYSSNWLKTKKKIDGVKARSSRRRLDALHKITTAICKKHAIVELVNLTDSLPDKNNGSVSMTYEFVRQLMYKQEWLGGKVIRLGD

SEQ ID NO: 380 - protein, 312 aa, unidentified
MGSIVIKKQAFKFLLEPNKNHINEFLVFAGSCRFVYNKGLALINENYDSGKKFLNYNQLASELVNWKNEECLAWLKMAPSQCLQQSLRDLDKAFKNFFSGKSQYPRFKKKGRNDSFRVPCQRVRLDQEKHLVSLPKLGWVKYRKSREITGVLKNVTISRKLDKWYISFNTEVVVPEPVHPSFSKAKVLLNNECIVQLTSNESLVEQFTSMEGNKKLRNLNNILGRKVKYSSNWLKTKKKIDSVKARSSRRRLDALHKITTAICKKHAIVELVNLTDSLPDKNNGFVSMGYEFVRQLMYKQEWLGGQVIRLGD

SEQ ID NO: 381 - protein, 275 aa, unidentified
MRRFAGACRFVFNRALALQNENHEAGNKYIPYGKMASWLVEWKNATETQWLKDSPSQPLQQSLKDLERAYKNFFRKRAAFPRFKKRGQNDAFRYPQGVKLDQENSRIFLPKLGWMRYRNSRQVTGVVKNVTVSQSCGKWYISIQTESEVSTPVHPSASMVGLDAGVAKLATLSDGTVFEPVNSFQKNQKTLARLQRQLSRKVKFSNNWQKQKRKIQRLHSRIANIRRDYLHKVTTTVSKNHAMIVIEDLKVSNMSKSAAGTVSASRGAMSGQNQV

SEQ ID NO: 382 - protein, 295 aa, unidentified
MKRLQAFKFQLRPGDQQECEMRRFAGACRFVFNRALALQNENHEAGNKYIPYGKMASWLVEWKNATETQWLKDSPSQPLQQSLKDLERAYKNFFRKRAAFPRFKKRGQNDAFRYPQGVKLDQENSRIFLPKLGWMRYRNSRQVTGVVKNVTVSQSCGKWYISIQTESEVSTPVHPSASMVGLDAGVAKLATLSDGTVFEPVNSFQKNQKTLARLQRQLSRRVKFSNNWQKQKRKIQRLHSRIANIRRDYLHKVTTTVSKNHAMIVIEDLKVSNMSKSAAGTVSQPGRNVRAKSGL

SEQ ID NO: 383 - protein, 284 aa, unidentified
MKRLQAFKFQLRPGDQQECEMRRFAGACRFVFNRALALQNENHEAGNKYIPYGKMASWLVEWKNATETQWLKDSPSQPLQQSLKDLERAYKNFFRKRAAFPRFKKRGQNDAFRYPQGVKLDQENSRIFLPKLGWMRYRNSRQVTGVVKNVTVSQSCGKWYISIQTESEVSTPVHPSASMVGLDAGVAKLATLSDGTVFEPVNSFQKNQKTLARLQRQLSRKVKFSNNWQKQKRKIQRLHSRIANIRRDYLHKVTTTVSKNHAMIVIEDLKVSNMSKSAAGTVSQ

SEQ ID NO: 384 - protein, 297 aa, unidentified
MKRLQAFKFQLRPGGQQECEMRRFAGACRFVFNRALALQNENHEAGNKYIPYGKMASWLVEWKNATETQWLKDAPSQPLQQSLKDLERAYKNFFQKRAAFPRFKKRGQNDAFRYPQGVKLDQENSRIFLPKLGWMRYRNSRQVTGVVKNVTVSQSCGKWYISIQTESEVSTPVHPSASMVGLDAGVAKLATLSDGTVFEPVNSFQKNQKTLARLQRQLSRKVKFSNNWQKQKCKIQRLHSRIANIRRDYLHKVTTTVSKNHAMIVIEDLKVSNMSKSAAGTVSQPGRNVRAKSGLNR

SEQ ID NO: 385 - protein, 310 aa, unidentified
MIKKQAFKFLLEPNKGQLSDFLAFAGSCRFVYNKGLALLNENYRAGKKFIGYNKLASELVEWKNEERLSWLKEAPSQCLQQSLRDLDRAFRNFFTGKSQYPKFKKKGRHDSFRIPCQRVRIDQEKKLVSLPKVGWVKYRKSREIIGDLKNATISLNQGKWYISFNTEQTVPEPIHPSNIKTTIILNNVNSVHLSSGVGGDNTYQAEEKKKLVRLNKTLTRRKRYSKNWLKTKGKIDRVKSKAARIRLDNIHKATTAICKNHAVVEVVNLMDSVFDKNDNTLSMRYEFVRQLIYKQEWLGGEIIRRESKLL

SEQ ID NO: 386 - protein, 301 aa, unidentified
MLEPNKGQLSDFLAFAGSCRFVYNKGLALLNENYRSGKKFIGYIQLASELVEWKNEESLSWLKEAPSQCLQQSLRDLDRAFRNFFTGKSQYPKFKKKGRHDSFRIPCQRVRVDQEKKLVSLPKVGWVKYRKSREIIGDLKNATISLNQGKWYISFNTEQTVPDPIHPSDIKSTIVLNNVDSVHLSSGGGGDNTYQAEEKKKLIRLNKTLTRRKKHSQNWLKTKGKIDRVKSKAARIRLDNIHKATTAICKNHAVVEVVNLMDSVSDKNDNTLSMRYEFVRQLIYKQEWLGGEVIRRESKPL

SEQ ID NO: 387 - protein, 324 aa, unidentified
MGGLPFHFVYAGPAVIKKQAFKFLLEPNKGQLSDFLAFAGSCRFVYNKGLALLNENYRSGKKFIGYNQLASELVEWKNEESLSWLKEAPSQCLQQSLRDLDKAFRNFFTGKSQYPKFKKKGRHDSFRTPSQRVRVDQEKKLVSLPKVGWVKYRKSREIIAELKNVTISMKQGKWYISFNTEHTVPDPIHPSDIKTKIVLNNVNSVHLSSGIGGDNTSQAEEKKKLIRLNKRLARRKKHSKNWLKTKGKIDRVKSKAARLRLDNIHKATTAICKSHAVIEVVNLMGSVSDKNDNTLSMRYEFVRQLIYKQEWLGGEVIRRESKPL

SEQ ID NO: 388 - protein, 359 aa, unidentified
MKRLQAFKFQLRPGGQQEREMRRFAGACRFVFNRALALQNENHEAGNKYIPYGKMASWLVEWKNATETQWLKDAPSQPLQQSLKDLERAYKNFFRKRAAFPRFKKRGQNDAFRYPQGVKLDQENSRIFLPKLGWMRYRNSRQVTGVVKNVTASQSCGKWYISIQTENEVSTPVHPSALMVGLDAGVAKLATLSDGTVFGPVNSFQKNQKTLARLQRQLSRKVKFSNNWQKQKRKIQRLHSCIANICRDYLHKVTTTVSKNHAMIVIEDLKVSNMSKSAAGTVSQPGRNVRAKSGLNRSILDQGWYEMRRQLEYKQLWRGGQVLAVPPAYTSQRCACCGHTAKENRLSQSKFRCQACGYT

SEQ ID NO: 389 - protein, 328 aa, unidentified
MQDDLAFHQFCSVYTGPVVIKKQAFKFLLEPNKGQLSDFLAFAGSCRYVYNKGLALLNENYRSGKKFIGYNQLASELVEWKNEESLSWLKEAPSQCLQQSLRDLDRAFRNFFTGKSQYPKFKKKGRHDSFRIPCQRVRVDQEKKLVSLPKVGWVKYRKSREIIGDLKNATISLNQGEWYISFNTEQTVPDPIHPSDIKTTIVLNNVNSVHLSSGVGGDNTYQAEEKKKLIRLNKTLTRRKKYSKNWLKTKAKIDRVRSKAARIRLDNIHKATTAICKNHAVVEVVNLMDSVSAKNDNTLSMRYEFVRQLIYKQEWLGGEIIRRESKLL

SEQ ID NO: 390 - protein, 319 aa, unidentified
MTLRCLLNPWRFKQAFKFLLEPNKGQLSDFLAFAGSCRFVYNKGLALLNENYRSGKKFIGYNQLASELVEWKNEESLSWLKEAPSQCLQQSLRDLDKAFRNFFTGKSQYPKFKKKGRHDSFRTPSQRVRVDQEKKLVSLPKVGWVKYRKSREIIAELKNVTISMKQGKWYISFNTEHTVPDPIHPSDIKTKIVLNNVNSVHLSSGIGGDNTSQAEEKKKLIRLNKRLARRKKHSKNWLKTKGKIDRVKSKAARLRLDNIHKATTAICKSHAVIEVVNLMGSVSDKNDNTLSMRYEFVRQLIYKQEWLGGEVIRRESKPL

SEQ ID NO: 391 - protein, 356 aa, unidentified
MKALKAYKYRLYPTSKQEEFIQKTFSCVRLVYNLMLQDRIDIYKEMRKNPQQTFKMPTPAKYKKQYPVLREVDSLALANAQVYLDRAFKNFYREKGMGFPKKKKKETVHSYTTNNQHGTVKILDNRYLKVPKLKSLIKMKVHRQPLGEIKSVTISMSASHNYYVSILCEAPIETKTKQQKMVGICSSREKFALLSNGESFEKSYCSKHLKQKLRQEERKLNKRKMIALEKGVDLSQAKNYQKQKIKVAKIREKIANQRTDILNKITTELVSSYDVICIEKAHHSNERPPKHDRSELAWSLFLAKLLYKAQWYGKELICIESEEIETELSFSESTENSEYLRSQKILERGLSKRETL

SEQ ID NO: 392 - protein, 336 aa, unidentified
MLKAFKFRMYPTEEQKQQLIRTFGCARFTYNHLLKKRQKSWQQTGVANFSLTPATLKKEYPFLKEVDSLALANAQLNLDRAFRNYFKGRASFPKLKTKKSMWQSYTTNNQTRTIYLENGYLKLPKQKELIKINQHRPVEGSIRSATISARYNEEFYVALLCDVSPVKKESLAKWIGIAYHPKTLIQTSRPLEVTLPKFHQTEEKLQHAQRKLNVKVRSAHHRKIRLDQASNYQKQKRKVMDLYLKQKNQREDYLEQLSGKLVKQYDYLFVESFPKEEAHADFSIHDWHKLITKLRYKSQWYNKKFLLINTDGAEESNSVRKSQVVEKMGRHSVIKG

SEQ ID NO: 393 - protein, 356 aa, unidentified
MKALKAYKYRLYPTSKQEEFIQKTFSCVRLVYNLMLQDRIDIYKEMRKNPQQTFKMPTPAQYKKQYPVLREVDSLALANAQVYLDRAFKNFYREKGMGFPKKKKKETVHSYTTNNQHGTVKILDNRYLKVPKLKSLIKMKVHRQPLGEIKSVTISMSASHNYYVSILCEAPVETKTKQQKMVGICSSREKFALLSNGESFEKSYCSKHLKQKLRQEERKLNKRKMIALEKGVDLSQAKNYQKQKIKVAKIREKIANQRTDILNKITTELVSSYDVICIEKAHHSNERPPKHDRSELAWSLFLAKLLYKAQWYGKELICIESEEIETELSFSESTENSEYLRSQKILERGLSKRETL

SEQ ID NO: 394 - protein, 345 aa, unidentified
MKLSVLKAYKFRIYPTEEQKQFFIQTFGCVRFTYNQLLKAKMEELTTNAEKEKLTPAKLKKEYPFLKETDSLALANAQRNLERAFRNYFQKRAGFPKLKTKKNIWQSYTTNNQQHTIYLVDDQLKLPKLKSFVAVKRHRPINGQIKSATISARNNTEFYISILCIEEIQPLPKNQRKIALVYHPEVLVEANAQLPFISTNAIKSQQRLARAERKLNVKAKAVKRKKMVLSHARNYQKQKGKVSQLYRAHRDQKKEYIDQVTFHLVKQYDTIFLERLIDETCRSTGNFSVSDWHQFIRKITYKAEWYGKEVRFISLSAKECQKMTQMLRVIESETNWEERQGSPRG

SEQ ID NO: 395 - protein, 336 aa, unidentified
MLKAFKFRMYPTEEQKQQLIRTFGCARFTYNHLLKKRQKSWQQTGVANFSLTPATLKKEYPFLKEVDSLALANAQLNLDRAFRNYFKGRASFPKLKTKKSMWQSYTTNNQTRTIYLENGYLKLPKQKELIKINQHRPVEGSIRSATISARYNEEFYVALLCDVSPVKKESLAKWIGIAYHPKTLIQTSRPLEVTLPKFHQTEEKLQHAQRKLNVKVRSAHHRKTRLDQASNYQKQKRKVMDLYLKQKNQREDYLEQLSGKLVKQYDYLFVESFPKEEAHADFSIHDWHKLITKLRYKSQWYNKKFLLINTDGAEESNSVRKSQVVEEMGRHSLIKG

SEQ ID NO: 396 - protein, 356 aa, unidentified
MKALKAYKYRLYPTSKQEEFIQKTFSCVRLVYNLMLQDRIDIYKEMRRNPQQTFKMPTPAKYKKQYPVLREVDSLALANAQVYLDRAFKNFYREKGMGFPKKKKKETVHSYTTNNQHGTVKILDNRYLKVPKLKSLIKMKVHRQPLGEIKSVTISMSASHNYYVSILCEAPIETKTKQQKMVGICSSREKFALLSNGESFEKSYCSKHLKQKLRQEERKLNKRKMIALEKGVDLSQAKNYQKQKIKVAKIREKIANQRTDILNKITTELVSSYDVICIEKAHHSNERPPKHDRSELAWSLFLAKLLYKAQWYGKELICIESEEIETELSFSESTENSEYLRSQKILERGLSKRETL

SEQ ID NO: 397 - protein, 356 aa, unidentified
MKALKAYKYRLYPTSKQEQFIQKTFSCVRLVYNLMLQDRIDIYKEMRKNPQQTFKMPTPAKYKKQYPVLREVDSLALANAQVYLDRAFKNFYREKGMGFPKKKKKETVHSYTTNNQHGTVKILDNRYLKVPKLKSLIKMKVHRQPLGEIKSVTISMSASHNYYVSILCEAPIETKTKQQKMVGICSSREKFALLSNGESFEKSYCSKHLKQKLRQEERKLNKRKMIALEKGVDLSQAKNYQKQKIKVAKIREKIANQRTDILNKITTELVSSYDVICIEKAHHSNERPPKHDRSELAWSLFLAKLLYKAQWYGKELICIESEEIETELSFSESTENSEYLRSQKILERGLSKRETL

SEQ ID NO: 398 - protein, 356 aa, unidentified
MKALKAYKYRLYPTSKQEEFIQKTFSCVRLVYNLMLQDRIDIYKEMRKNPQQTFKMPTPAKYKKQYPVLREVDSLALANAQVYLDRAFKNFYREKGMGFPKKKKKETVHSYTTNNQHGTVKILDNRYLKVPKLKSLIKMKVHRQPLGEIKSVTISMSASHNYYVSILCEAPVETKTKQQKMVGICSSREKFALLSNGESFEKSYCSKHLKQKLRQEERKLNKRKMIALEKGVDLSQAKNYQKQKIKVAKIREKIANQRTDILNKITTELVSSYDVICIEKAHHSNERPPKHDRSELAWSLFLAKLLYKAQWYGKELICIESEEIETELSFSESTENSEYLRSQKILERGLSKRETL

SEQ ID NO: 399 - protein, 356 aa, unidentified
MKALKAYKYRLYPTSKQEEFIQKTFSCVRLVYNLMLQDRIDIYKEMRKNPQQTFKMPTPAKYKKQYPVLREVDSLALANAQVYLDRAFKNFYREKGMGFPKKKKKETVHSYTTNNQHGTVKILDNRYLKVPKLKSLIKMKVHRQPLGEIKSVTISMSASHNYYVSILCEAPIETKTKQQKMVGICSSREKFALISNGESFEKSYCSKHLKQKLRQEERKLNKRKMIALEKGVDLSQAKNYQKQKIKVAKIREKIANQRTDILNKITTELVSSYDVICIEKAHHSNERPPKHDRSELAWSLFLAKLLYKAQWYGKELICIESEEIETELSFSESTENSEYLRSQKILERGLSKRETL

SEQ ID NO: 400 - protein, 336 aa, unidentified
MLKAFKFRMYPTEEQKQQLIRTFGCARFTYNHLLKKRQKSWQQTGVANFSLTPATLKKEYPFLKEVDSLALANAQLNLDRAFRNYFKGRASFPKLKTKKSMWQSYTTNNQTRTIYLENGYLKLPKQKELIKINQHRPVEGSIRSATISARYNEEFYVALLCDVSPVKKESLAKWIGIVYHPKTLIQTSRPLEVTLPKFHQTEEKLQHAQRKLNVKVRSAHHRKIRLDQASNYQKQKRKVMDLYLKQKNQREDYLEQLSGKLVKQYDYLFVESFPKEEAHADFSIHDWHKLITKLRYKSQWYNKKFLLINTDGAEESNSVRKSQVVEKMGRHSVIKG

SEQ ID NO: 401 - protein, 336 aa, unidentified
MLKAFKFRMYPTEEQKQQLIRTFGCARFTYNHLLKKRQKSWQQTGVANFSLTPATLKKEYPFLKEVDSLALANAQLNLDRAFRNYFKGRASFPKLKTKKSMWQSYTTNNQTRTIYLENGYLKLPKQKELIKINQHRPVEGSIRSATISARYNEEFYVALLCDVSSVKKESLAKWIGIAYHPKTLIQTSRPLEVTLPKFHQTEEKLQHAQRKLNVKVRSAHHRKIRLDQASNYQKQKRKVMDLYLKQKNQREDYLEQLSGKLVKQYDYLFVESFPKEEAHADFSIHDWHKLITKLRYKSQWYNKKFLLINTDGAEESNSVRKSQVVEEMGRHSVIKG

SEQ ID NO: 402 - protein, 332 aa, unidentified
MKLGVLKAYKFRIYPNGQQKQFFIETFGCVRFTYNQLLEAKMEELANNEAKQGLTPAKLKKEYPFLKETDSLALANAQRNLDRAFRNYFQKRAGFPKMKTKKSIWQSYTTNNQQHTIYFEDDQIKLPKLKTLVPVKKHRAIKGKIKSATISAKNNEEFYISILCLEEISPLPKQQASVAVVYDPQQLVKANQPIPITCEHAIQTKQKLTRAERKLQVKATAVKRKKILLTQARNYQKLKGKVARLYRFHCCQKREFIDQVSYHLVKQYDTIYLEQIAEDTVLKAGHYSISDWHQFVRKIQYKAQWYGKELRFVTLDTQDQQKLERLSGEMSS

SEQ ID NO: 403 - protein, 356 aa, unidentified
MKALKAYKYRLYPTSKQEEFIQKTFSCVRLVYNLMLQDRIDIYKEMRKNPQQTFKMPTPAKYKKQYPVLREVDSLALANAQVYLDRAFKNFYREKGMGFPKKKKKETVHSYTTNNQHGTVKILDNRYLKVPKLKSLIKMKVHRQPLGEIKSVTISMSASHNYYVSILCEAPIETKTKQQKMVGICSSREKFALLSNGESFEKSYCSKHLKQKLRQEERKLNKRKMIALEKGVDLSQAKNYQKQKIKVAKIREKIANQRMDILNKITTELVSSYDVICIEKAHHSNERPPKHDRSELAWSLFLAKLLYKAQWYGKELICIESEEIETELSFSESTENSEYLRSQKILERGLSKRETL

SEQ ID NO: 404 - protein, 356 aa, unidentified
MKALKAYKYRLYPTSKQEEFIQKTFSCVRLVYNLMLQDRIDIYKEMRKNPQQTFKMPTPAKYKKQYPVLREVDSLALANAQVYLDRAFKNFYREKGMGFPKKKKKETVHSYTTNNQHGTVKILDNRYLKVPKLKSLIKMKVHRQPLGEIKSVTISMSASHNYYVSILCEAPIETKTKQQKMVGICSSREKFALLSNGESFEKSYCSKHLKQKLRQEERKLNKRKMIALEKGVDLSQAKNYQKQKIKVAKIREKIANQRTDILNKITTELVSNYDVICIEKAHHSNERPPKHDRSELAWSLFLAKLLYKAQWYGKELICIESEEIETELSFSESTENSEYLRSQKILERGLSKRETL

SEQ ID NO: 405 - protein, 341 aa, unidentified
MIEEEIGVRGGEMSVLKGYKFRIYPDEKQKKFFIETFGCVRFTYNHLLMARHTGTARNTTLTPASLKKEYPFLKKTDSLALANAQRNLERAFRNYFSGRAGYPKLKTKKSTWQSYTTNNQQHTVYLEGEYLKVPKLKSLVPIHLHREVRGTIKSVTISAKRNREFYASILCVEEVEELPKTNDLVGISYCPENLIQISAKKELPQIDQSHLVKQLGKEQKKLQLRAKVAKKRKVRLIHAKNYQKQKERVLKLRATKLDQKRNFIDQLTINLVRDFDYLFIESKPKFKNETGEFSEADWQQFIQRIQYKGRWYGKEIRYIEVKELKNEKCKEIERLGRAQLT

SEQ ID NO: 406 - protein, 325 aa, unidentified
MEQLKAYKFRIYPTEEQEIFFAKSFGCVRKVYNLMLDDRKKAYEEVKNDSSKKMTFPTPAKYKKEFPFLKEIDSLALANAQLNLDKAYKNFFRDKSVGFPRFKSKKNPVQSYTTNNQNGTIALIDSKFIKVPKLKSLIRIKLHRQPKGMIKSATISRHSSGKYYISLLCKEEISELPKTNSAIGIDLGITDFAILSDGQKIDNNKFTSKMEKKLKREQRKLSRRALLAKQKGINLFEAKNYQKQKRKVARLHEKVMNQRTDFLNKLSTEIIKNHDIICIEDLNVKGMLRNHKLAKSISDVSWSKFVTKLQYKADWYGRKIIKVDK

SEQ ID NO: 407 - protein, 332 aa, unidentified
MKLGVLKAYKFRIYPNGQQKQFFIETFGCVRFTYNQLLEAKMEELANNEAKQGLTPAKLKKEYPFLKETDSLALANAQRNLDRAFRNYFQKRAGFPKMKTKKSIWQSYTTNNQQHTIYFEDDQIKLPKLKTLVPVKKHRAIKGKIKSATISAKNNEEFYISILCLEEIPPLPKQQASVAVVYDPQQLVKANQPVPITCEHAIQTKQKLTRAERKLQVKATAVKRKKILLTQARNYQKLKGKVARLYRFHCCQKREFIDQVSYHLVKQYDTIYLEQIAEDTVLKAGHYSISDWHQFVRKIQYKAQWYGKELRFVTLDTQDQQKLERLSGEMSS

SEQ ID NO: 408 - protein, 356 aa, unidentified
MKALKAYKYRLYPTSKQEEFIQKTFSCVRLVYNLMLQDRIDIYKEMRKNPQQTFKMPTPAKYKKQYPVLREVDSLALANAQVYLDRAFKNFYREKGMGFPKKKKKETVHSYTTNNQHGTVKILDNRYLKVPKLKSLIKMKVHRQPLGEIKSVTISMSASHNYYVSILCEAPIETKTKQQKMVGICSSREKFALLSNGESFEKSYCSKHLKQKLRQEERKLNKRKMIVLEKGVDLSQAKNYQKQKIKVAKIREKIANQRTDILNKITTELVSSYDVICIEKAHHSNERPPKHDRSELAWSLFLAKLLYKAQWYGKELICIESEEIETELSFSESTENSEYLRSQKILERGLSKRETL

SEQ ID NO: 409 - protein, 336 aa, unidentified
MLKAFKFRMYPTEEQKQQLIRTFGCARFTYNHLLKKRQKSWQQTGVANFSLTPATLKKEYPFLKEVDSLALANAQLNLDRAFRNYFKGRASFPKLKTKKSMWQSYTTNNQTRTIYMENGYLKLPKQKELIKINQHRPVEGSIRSATISARYNEEFYVALLCDVSPVKKESLAKWIGIAYHPKTLIQTSRPLEVTLPKFHQTEEKLQHAQRKLNVKVRSAHYRKIRLDQASNYQKQKRKVMDLYLKQKNQREDYLEQLSGKLVKQYDYLFVESFPKEEAHADFSIHDWHKLITKLRYKSQWYNKKFLLINTDGAEESNSVRKSQVVEKMGRHSVIKG

SEQ ID NO: 410 - protein, 356 aa, unidentified
MKALKAYKYRLYPTSKQKEFIQKTFSCVRLVYNLMLQDRIDIYKEMRKNPQQTFKMPTPAKYKKQYPVLREVDSLALANAQVYLDRAFKNFYREKGMGFPKKKKKETVHSYTTNNQHGTVKILDNRYLKVPKLKSLIKMKVHRQPLGEIKSVTISMSASHNYYVSILCEAPIETKTKQQKMVGICSSREKFALLSNGESFEKSYCSKHLKQKLRQEERKLNKRKMIALEKGVDLSQAKNYQKQKIKVAKIREKIANQRTDILNKITTELVSSYDVICIEKAHHSNERPPKHDRSELAWSLFLAKLLYKAQWYGKELICIESEEIETELSFSESTENSEYLRSQKILERGLSKRETL

SEQ ID NO: 411 - protein, 375 aa, unidentified
MKVLKAYKYRLYPTSLQEEFIKKTFSCVRLVYNLLLQERIQLYKELKENPDLKVKMPTPAQYKKEYPCLKEVDSLALANAQVYLDRAFKKFHREKAVGFPKLKQKKNAVCSYTTNNQNGTIKIIDEKYLKVPKLKSLMKMKMHRPVIGKIKSATISLTPSNKYFVSILCEEEIPAVEKTHFAIGITLGASEFAVLSNGRRFDNDKYTKEFERRITREERKLRRRKEIAKIKGTDLSQQKNYQKQKVKVVKMREKLMNQRIDFLNKITTEIVRKYDLICIEDIHQADFYRNNKLHRGVTDVSWALFVSKLEYKASWYNKRLIKVSVCHKCSEHSDNTRISKLFFHEINEKKGRQDPETAASIQVLTQGLKEATVND

SEQ ID NO: 412 - protein, 356 aa, unidentified
MKALKAYKYRLYPTSKQEEFIQKTFSCVRLVYNLMLQDRIDIYKEMRKNPQQTFKMPTPAKYKKHYPVLREVDSLALANAQVYLDRAFKNFYREKGMGFPKKKKKETVHSYTTNNQHGTVKILDNRYLKVPKLKSLIKMKVHRQPLGEIKSVTISMSASHNYYVSILCEAPIETKTKQQKMVGICSSREKFALLSNGESFEKSYCSKHLKQKLRQEERKLNKRKMIALEKGVDLSQAKNYQKQKIKVAKIREKIANQRTDILNKITTELVSSYDVICIEKAHHSNERPPKHDRSELAWSLFLAKLLYKAQWYGKELICIESEEIETELSFSESTENSEYLRSQKILERGLSKRETL

SEQ ID NO: 413 - protein, 356 aa, unidentified
MKALKAYKYRLYPTSKQEQFIQKTFSCVRLVYNLMLQERIDIYKEMRKNPQQTFKMPTPAKYKKQYPVLREVDSLALANAQVYLDRAFKNFYREKGMGFPKKKKKETVHSYTTNNQHGTVKILDNRYLKVPKLKSLIKMKVHRQPLGEIKSVTISMSASHNYYVSILCEAPIETKTKQQKMVGICSSREKFALLSNGESFEKSYCSKHLKQKLRQEERKLNKRKMIALEKGVDLSQAKNYQKQKIKVAKIREKIANQRTDILNKITTELVSSYDVICIEKAHHSNERPPKHDRSELAWSLFLAKLLYKAQWYGKELICIESEEIETELSFSESTENSEYLRSQKILERGLSKRETL

SEQ ID NO: 414 - protein, 332 aa, unidentified
VKVLKAYKFRIYPNEEQIQYFIQTFGCVRFTYNQLLYARKKALQAGDYVTRLTPAQLKKDYPFLKQTDSLALANAQRNLDRAFKNYFSKRAGYPKWKSKKSHWQSYTTNNQKHTIYFIGEELKLPKLKSLVKANLHREILGEIKSATISAKNNQLFFVSILCLENVMSLPKTGESIGVAYCSENLVQMSSTNVFLSRKSNSYYQLKTAKKRLELRAKLAKKRKVLLSQAKNYQKQKRKVQKLYMIIDNQKNDYINQLTYFLVKNYDYIYLEKHPKFSENAKFSETDWQHLLRKIQYKVSWYNKQLAFVAPDTKESEEKCFTIEQLGRQLTTS

SEQ ID NO: 415 - protein, 373 aa, unidentified
MKVLKAYKYRLYPTSLQEEFIKKTFSCVRLVHNLLLQERIQLYKQLKENPDLNVKLPTPAQYKKEHPCLREVDSLALSNAQVYLDRAFKKFHREKSVGFPKLKQKKNAVNSYTTNNQNGTVKIIDGKYLKVPKLKSLIKMKMHRPVIGKIKSATISLTPSNKYFVSILCEEEIPTVEKTHSAIGITLGVSEFAVLSNGRRIDNDKYTKEFEQRITREERKLMRRKEIAKSKGTELSQQKNYQKQKLKIVKMREKLMNQRIDFLNKITTEIVRKYDLICIEDIQQADFYRNNKLHRGVTDVSWALFVSKLEYKASWYNKRLIKVSACGKCSEHSDNKELSQIFFQDINTKKSKNDPETAASVQVLIRGLQEVVQ

SEQ ID NO: 416 - protein, 374 aa, unidentified
MKVLKAYKYRLYPTLLQEEFIKKTFSCVRLVHNLLLQERIQLYKELKNNPDLKVKLPTPAQYKKEHPCLKEVDSLALSNAQVYLDRAFKKFHREKTVGFPRLKQKKNAVTSYTTNNQNGTIKIIDEKYLKVPKLKSLIKMKLHRPVIGKIKSATISLTPSNKYFVSILCEEEIPKVEKTYSAIGITLGASEFAVLSNGKRIDNDKFTKEFEQRITREERKLTRRKEIAKSKNTELSQQKNYQKQKLKVAKMREKLMNQRIDFLNKITTEIVRQYDLICIEDIHQADFFRNSKLHRGVSDVSWALFVSKLEYKAAWYKKRLIKVSACGKCSEHSDNSLVSQIFTQDINEKKGQHDPETAASIQVLIQGLKDTKAN

SEQ ID NO: 417 - protein, 370 aa, unidentified
MKVLKAYKYRLYPTLAQEEFIKKTFSCVRFVYNLLLQDRISLYKALKENPSLTVKLPTPAHYKKEHPFLKEVDSLALANAQVYLDRAFKKFHREKSVGFPKLKQKKDSVSSYTTNNQNGTIKIIDDKYVKVPKLKSVVKVKMHRPLKGKIKSATISLTPSHKYFISILCEEEVPSVAKTYSAIGITLGTSEFAVLSNGRRIDNDKYTKAFKQRIAREERKLTRRKEIAKLKGVELSQQKNYQKQKLKVAKMREKLMNQRTDFLNKITTEIVQKYDVICIEDIQQSDIYRNSKLHCGISDVSWAMFVSKLEYKATWYNKRLIKVSMCNECSEHSDNNKRSNLFIQDIDKQKGQCDPETAASIQVLNKGLSS

SEQ ID NO: 418 - protein, 373 aa, unidentified
MKVLKAYKYRLYPNPLQEEFIRKTFSCVRLVHNLLLQDRVEIYRKLKKDSKLKIKYPTPAKYKKDYPFLKEVDSLALSNAQVHLDRAFKNFHKNKSVGFPKLRQRKDSVSSYTTNNQNGTIKILDSKYLKVPKLKTLIKMKVHRPLTGEIKSATISLSPSKKYFVSLLCEEEIPKAPKTYSAVGITLGTSEFAILSNGQRIDNDKYTQNFQIRLKREEKKLIRRKEIAQSKKMDISQQKNYQKQKLKIAKMHEKLMNQRIDFLNKITTEIVTKYDVICVEDIHKEDFFRNSKLNRGITDVSWAMFISKLEYKALWYNKKIIKVSACQDSSVIVEETESKLFTPDVNKKKALEDPEIAASVQVLSMGLNEAIAN

SEQ ID NO: 419 - protein, 356 aa, unidentified
MKALKAYKYRLYPTSKQEEFIQKTFSCVRLVYNLMLQDRIDIYKEMRKNPQQTFKMPTPAKYKKQYPVLREVDSLALANAQVYLDRAFKNFYREKGMGFPKKKKKETVHSYTTNNQHGTVKILDNRYLKVPKLKSLIKMKVHRQPLGEIKSVTISMSASHNYYVSILCEAPIETKTKQQKMVGICSSREKFALLSNGESFEKSYCSKHLKQKLRQEERKLNKRKMIALEKGVDLSQAKNYQKQKIKVAKIREKIANQRTDILNKITTELVSSYDVICIEKAHHSNERPPKHDRSELAWSLFLAKLLYKAQWYGKKLICIESEEIETELSFSESTENSEYLRSQKILERGLSKRETL

SEQ ID NO: 420 - protein, 343 aa, unidentified
VHNLLLQERIKLYKQLKEDPNLKVKLPTPAQYKKEYPCLKEVDSLALSNAQVYLDRAFKKFHREKSIGFPKLKQKKDSVCSYTTNNQNGTVKIIDEKYLKVPKLKSLVRMKMHRPVIGKIKSATISLAPSNKYFVSILCEEEIPTIEKTYSAVGITLGASEFAILSNGRRIDNDKFTKEFEQRITREERKLTRRKEIAKAKGTDLSQQKNYQKQKLKVAKMREKLMNQRIDFLNKITTEIVRKYDLICIEDIHQADFYRNSKLHRGISDVSWALFVSKLEYKATWYNKRVIKVLACGKCSEHSENNVSQIFTQDINEQKGLQDPETAASINVLIQGLKETTGN

SEQ ID NO: 421 - protein, 344 aa, unidentified
VHNLLLQERIQLYKELKKNPDLKVKLPTPAQFKKEHPCLKEVDSLALSNAQVYLDRAFKKFYREKSVGFPKLKQKKNAVSSYTTNNQNGTIKIIDEKYLKVPKLKSLIKMKMHRPVIGKIKSATISLTPSNKYFVSILCEEELPRVEKTYSAIGITLGASEFAVLSNGRRIDNDKFTKEFEQRITREERKLTRRKEIAKSKGTELLQQKNYQKQKLKVAKMREKLMNQRIDFLNKITTEIVKKYDLICIEDIHQADFFRNTKLHRGVSDVSWALFVSKLEYKATWYNKRLIKVSACGKCSEHSDNDLVSQIFTQDVNEEKGKHDPETAASIQVLIQGLKGTTAN

SEQ ID NO: 422 - protein, 339 aa, unidentified
MQERVQLYKELKENPDLKVKLPTPAQYKKEHPCLKEVDSLALSNAQVYLDRAFKKFYREKSVGFPKLKQKKDSVSSYTTNNQNGTVKIIDEKYLKVPKLKSLLKMKMHRPVIGKIKSVTISLTKSNKYFVSILCEEEIPIIEKTHSAIGITLGASEFAVLSNGNRIDNDKYTKEFEQRITREERKLQRRKEIAKVKGTDLSQQKNYQKQKLKVAKMREKLMNQRVDFLNKITTEIIRKYDLICIEDIHQADVYRNNKLYRGVSDVSWALFVSKLEYKASWYNKRLIKVSACGKCSEHSDNTQVSQMFTQDINEQKGLHDPETAASIQVLIKGLKETTRK

SEQ ID NO: 423 - protein, 328 aa, unidentified
MKENPDLKVKLPTPAQYKKEHPCLKEIDSLALSNAQVYLDRAFKKFHREKSVGFPKLKQKKNAVRSYTTNNQNGTIKIIDGRYLKVPKLKSLIKMKMHRQMVGKIKSATISLTPSQKYFVSILCEEEVPTVEKTYAAIGITLGSSEFAVLSNGKRIDNDKYTKEFETRINREERKLMRRKEIAKSKGIELSQQKNYQKQKLKVAKMREKLMNQRIDFLNKVTTEIVRKYDLICIEEIHQADVFRNNKLHRGVSDVSWALFVSKLEYKASWYNKRLIKVSICGKSSEHSDNDMSSRLFFQDINEKRAMIDPETATSVQVLTQGLKEVVI

SEQ ID NO: 424 - protein, 345 aa, unidentified
VHNLLLQERIQLYKKLKENPNLKVKMPTPAQYKKEHPCLREVDSLALANAQVYLDRAFKKFHREKSVGFPKLKQKKNAVCSYTTNNQNGTIKIIDEKYLKVPKLKSLMKMKMHRPVIGKIKSATISLTPSNKYFVSILCEEEIPAVEKTHFAIGITLGASEFAVLSNGRRFDNDKYTKEFERRITREERKLRRRKEIAKLKGTDLSQQKNYQKQKTKVAKMREKLMNQRIDFLNKITTEIVRKYDLICIEDIHQADFYRNNKLHRGVTDVSWALFVSKLEYKASWYNKRLVKVSVCQKCSEHSDNNRMSKIFFHDINEKKGRQDPETAASIHVLTQGLKEATVTD

SEQ ID NO: 425 - protein, 332 aa, unidentified
MKLGVLKAYKFRIYPNGQQKQFFIETFGCVRFTYNQLLEAKMEELANNEAKQGLTPAKLKKEYPFLKETDSLALANAQRNLDRAFRNYFQKRAGFPKMKTKKSIWQSYTTNNQQHTIYFEEDQIKLPKLKTLVPVKKHREIKGKIKSATISAKNNEEFYISILCLEEITPLPKQQASIAIVYDPQQLVKANQPVPITCEHAIQTKQKLTRAERKLQVKATAVKRKKILLTQARNYQKLKGKVTRLYRFHCCQKREFIDQVSYHLVKQYDTIYLEQIAEDTVLKAGHYSISDWHQFVRKIQYKAQWYGKELRFVTLDTQDQQKLERLSGEMSS

SEQ ID NO: 426 - protein, 356 aa, unidentified
MKALKAYKYRLYPTSKQEEFIQKTFSCVRLVYNLMLQDRIDIYKEMRKNPQQTFKMPTPAKYKKQYPVLREVDSLALANAQVYLDRAFKNFYREKGMGFPKKKKKETVHSYTTNNQHGTVKILDNRYLKVPKLKSLIKMKVHRQPLGEIKSVTISMSASHNYYVSILCEAPIETKTKQQKMVGICSSREKFALLSNGESFEKSYCSKHLKQKLRQEERKLNKRKMIALEKGVDLSQAKNYQKQKIKVAKIREKIANQRTDILNKITTELVSSYDVICIEKAHHSSERPPKHDRSELAWSLFLAKLLYKAQWYGKELICIESEEIETELSFSESTENSEYLRSQKILERGLSKRETL

SEQ ID NO: 427 - protein, 327 aa, unidentified
MVYNLMLQDRIDIYKEMRKNPQQTFKMPTPAKYKKQYPVLREVDSLALANAQVYLDRAFKNFYREKGMGFPKKKKKETVHSYTTNNQHGTVKILDNRYLKVPKLKSLIKMKVHRQPLGEINSVTISMSASHNYYVSILCEAPIETKTKQQKMVGICSSREKFALLSNGESFEKSYCSKHLKQKLRQEERKLNKRKMIALEKGVDLSQAKNYQKQKIKVAKIREKIANQRTDILNKITTELVSSYDVICIEKAHHSNERPPKHDRSELAWSLFLAKLLYKAQWYGKELICIESEEIETELSFSESTENSEYLRSQKILERGLSKRETL

SEQ ID NO: 428 - protein, 356 aa, unidentified
MKALKAYKYRLYPTSKQEQFIQKTFSCVRLVYNLMLQDRIDIYKEMRKNPQQTFKMPTPAKYKKQYPVLREVDSLALANAQVYLDRAFKNFYREKGMGFPKKKKKETVHSYTTNNQHGTVKILDNRYLKVPKLKSLIKMKVHRQPLGEIKSVTISMSASHNYYVSILCEAPVETKTKQQKMVGICSSREKFALLSNGESFEKSYCSKHLKQKLRQEERKLNKRKMIALEKGFDLSQAKNYQKQKIKVAKIREKIANQRTDILNKITTELVSSYDVICIEKAHHSNERPPKHDRSELAWSLFLAKLLYKAQWYGKELICIESEEIETELSFSESTENSEYLRSQKILERGLSKRETL

SEQ ID NO: 429 - protein, 373 aa, unidentified
MKVLKAYKYRLYPTSIQEEFIKKTFSCVRLVHNLLLQERIQLYKQLKENPDLKVKLPTPAQYKKEYPCLKEVDSLALSNAQVYLDRAFKKFHREKSIGFPKLKQKKDSVSSYTTNNQNGTVKIIDEKYLKVPKLKSLVKMKMHRPVIGKIKSVTISLTPSNKYFASILCEEEIPTIEKTYSAVGITLGASEFAVLSNGRRIDNDKFTKEFEQRITREERKLTRRKEIAKAKGTDLSQQKNYQKQKLKVAKMREKLMNQRIDFLNKITTEIVRKYDLICIEDIHQADFYRNSKLHRGISDVSWALFVSKLEYKATWYNKRVIKVLACGKCSEHSENRVSQIFTQDINEQKGLQDPETAASINVLIQGLKKTTGN

SEQ ID NO: 430 - protein, 374 aa, unidentified
MKVLKAYKYRLYPTALQEEFIKKTFSCVRLVHNLLLQERIQLYKELKKTPDLKVKLPTPAQFKKEHPCLREVDSLALSNAQVYLDRAFKKFYREKSVGFPKLKQKKNAVRSYTTNNQSGTIKLIDKKYLKVPKLKSLIKIKMHRPVMGKIKSATISLTPSNKYFVSILCEEEIPTVEKTYSAVGITLGASEFAVLSNGRRIDNDKFTKDFEQRITREERKLLRRKEIAKLKGNELSQQKNYQKQKLKVAKMREKLMNQRVDFLNKITTEIVRKYDLICIEDIHQADFFRNNKLHRGISDVSWALFVSKLEYKATWYNKRLVKVTSCGESSEHSDNNALSKIFTQDINEKKGQKDPETAASIQVLIKGLRDTKNG

SEQ ID NO: 431 - protein, 336 aa, unidentified
MLKAFKFRMYPTEEQKQQLIRTFGCARFTYNHLLKKRQKSWQQTGVADFSLTPATLKKEYPFLKEVDSLALANAQLNLDRAFRNYFKGRASFPKLKTKKSMWQSYTTNNQTRTIYLENGYLKLPKQKELIKINQHRPVEGSIRSATISARYNEEFYVALLCDVSPVKKESLAKWIGIAYHPKTLIQTSRPLEVTLPKFHQTEEKLQHAQRKLNVKVRSAHHRKIRLDQASNYQKQKRKVMDLYLKQKNQREDYLEQLSGKLVKQYDYLFVESFPKEEAHADFSIHDWHKLITKLRYKSQWYNKKFLLINTDGAEESNSVRKSQVVEKMGRHSVIKG

SEQ ID NO: 432 - protein, 373 aa, unidentified
MKVLKAYKYRLYPTLSQEVFIKKTFSCVRLVHNLLLQERIQLFKTLKEQPELKVKMPTPAQFKKEHPCLKEVDSLALSNAQVYLDRAFKKFHREKSVGFPKLKQKKDAVSSYTTNNQNGTIKIIDEKYLKVPKLKSLIKMKMHRPIIGKIKSATISLSPSNKYFVSILCEAEIPTVEKTYSAIGITLGTSEFAVLSNGRRIDNDKFTKEFEQRITREERKLTRRKEIAKVKGTDITQQKNYQKQKLKVAKMREKLMNQRIDFLNKITTELVRKYDLICIEDIHQNDFFRNSKLHRGVSDVSWALFVSKLEYKVSWYNKRLIKVSACGKCSEHSDNTQLSQMFTQDINAKKGQNDSETAASIQVLVQGLKNIRT

SEQ ID NO: 433 - protein, 366 aa, unidentified
VKVLKACKYRLYPTSSQIEFFEKTFSSVYLVHNLLLQDRINLYREAKKNPQLKQSLPTPAKYKREHPLLKEVDSLALANAQVHLERSLKRFYSGKDVGFPKMKSRKNPVMSYTTNNQNGTIKFVGLNCLKIPKLKSLIKVKMHREVKGKIKSATISKSSTGKYFVSILCEETIACQKKTNKAVGISLGCSELAVLSNGRRIDNDCLTEEIERKIRREEKKLARKKKLASQKGLDLLEQKNYQKQKMKVAKLRERLLNQRNDFLNKVTTDLIKEYDLICIEEAHKKEFHRNCKLTKRVSDVSWSLFVSKLEYKAMWHDKRLIKIKKNDQIEATKIPTKMILDIDQELSESDTETASSIQLLLQGLNQ

SEQ ID NO: 434 - protein, 370 aa, unidentified
MRVLKAYKYRLYPTSAQEEFIKKTFSCVRLVYNLLLQDRIALYKALKENPDLTVKLPTPAQYKKEHPCLKEVDSLALANAQVYLDRAFKKFHREKGVGFPKLKQKKDSVSSYTTNNQNGTIKIIDDKCIKVPKLKTPMKVKMHRPIKGKIKSATISLTPSHKYFISILCEEEVPEVEKTYSAIGITLGTSEFAVLSNGRRIDNDKYTREFEQRLAREERKLVRRKEIAKVKGIELSQQKNYQKQKLKVAKMREKLMNQRTDFLNKITTEIVRKYDVICIEDIHQTEVYRNRKLHRGISDVSWALFVSKLEYKASWYNKRLIKVSACNECSEHSENKKQSKIFLEDIDKQKGASDPETAASIHVLNKGLSY

SEQ ID NO: 435 - protein, 370 aa, unidentified
MRVLKAYKYRLYPTSAQEEFIKKTFSCVRLVYNLLLQDRIALYKALKENPDLTVKLPTPAQYKKEHPCLKEVDSLALANAQVYLDRAFKKFHREKGVGFPKMKQKKDSVSSYTTNNQNGTIKIIDDKWIKVPKLKTPMKVKMHRPIKGKIKSATISLTPSHKFFISILCEEEVLAVEKTHSAIGITLGTSEFAVLSNGRRIDNDKYTKEFEQRLIREERKLVRRKEIAKLKGTELSQQKNYQKQKLKVAKMREKLMNQRTDFLNKITTEIVHKYDVICIEDIHQSDVYRNSKLHRGISDVSWALFVSKLEYKASWYNKRLIKVSACDKCSEHSENKKRSKIFIEDIDKQKEVSDLETAASIHVLNKGLSY

SEQ ID NO: 436 - protein, 332 aa, unidentified
MKLGVLKAYKFRIYPNGQQKQFFIETFGCVRFTYNQLLEAKMEELANNEAKQGLTPAKLKKEYPFLKETDSLALANAQRNLDRAFRNYFQKRAGFPKMKTKKSIWQSYTTNNQQHTIYFEEDQIKLPKLKTLVPVKKHREIKGKIKSATISAKNNEEFYISILCLEEITPLPKQQASIAVVYDPQQLVKANQPVPITCEHAIQTKQKLTRAERKLQVKATAVKRKKILLTQARNYQKLKGKVARLYRFHCCQKREFIDQVSYHLVKQYDTIYLEQIAEDTVLKAGHYSISDWHQFVRKIQYKAQWYGKELRFVTLDTQDQQKLERLSGEMRS

SEQ ID NO: 437 - protein, 336 aa, unidentified
MLKAFKFRMYPTEEQKQQLIRTFGCARFTYNHLLKKRQKSWQQTGVANFSLTPATLKKEYPFLKEVDSLALANAQLNLDRAFRNYFKGRASFPKLKTKKSMWQSYTTNNQTRTIYLENGYLKLPKQKELIKINQHRPVEGSIRSATISARYNEEFYVALLCDVSPVKKESLAKWIGIAYHPKTLIQTSRPLEVTLPKFHQTEEKLQHAQRKLNVKVRSAHHRKIRLDQASNYQKQKRKVMDLYLKQKNQREDYLEQLSGKLVKQYDYLFVESFPKEEAHADFSIHDWHKLITKLRYKSQWYNKKFLLINTDEAEESNSVRKSQVVEKMGRHSVIKG

SEQ ID NO: 438 - protein, 332 aa, unidentified
VKVLKAYKFRIYPNEEQIQYFIQTFGCVRFTYNQLLYARKKALQAGDYVTRLTPAQLKKDYPFLKQTDSLALANAQRNLDRAFKNYFSKRAGYPKWKSKKSHWQSYTTNNQKHTIYFIGEELKLPKLKSLVKANLHREILGEIKSATISAKNNQLFFVSILCLENVMSLPKTGESIGVAYCSENLVQMSSTNVFLSRKSNSYYQLKTAKKRLELRAKLAKKRKVLLSQAKNYQKQKRKVQKLYMIIDNQRNDYINQLTYFLVKNYDYIYLEKHPKFSENAKFSETDWQHLLRKIQYKVSWYNKQLAFVAPDTKESEEKCFTIEQLGRQLTTS

SEQ ID NO: 439 - protein, 356 aa, unidentified
MKALKAYKYRLYPTSKQEQFIQKTFSCVRLVYNLMLQDRIDIYKEMRKNPQQTFKMPTPAKYKKQYPVLREVDSLALANAQVYLDRAFKNFYREKGMGFPKKKKKETVHSYTTNNQHGTVKILDNRYLKVPKLKSLIKMKVHRQPLGEIKSVTISMSASHNYYVSILCEAPIETKTKQQKMVGICSSREKFALLSNGESFEKSYCSKHLKQKLRQEERKLNKRKMIVLEKGVDLSQAKNYQKQKIKVAKIREKIANQRTDILNKITTELVSSYDVICIEKAHHSNERPPKHDRSELAWSLFLAKLLYKAQWYGKELICIESEEIETELSFSESTENSEYLRSQKILERGLSKRETL

SEQ ID NO: 440 - protein, 347 aa, unidentified
VERLKAYKFRIYPTEEQEIFFAKTFGCVRKVYNLMLNDRKKAYEEVKNDPSKKMAFPTPAKYKKEFPFLKEVDSLALANAQLHLDKAYKNFFRDKSVGFPRFKSKKNPVQSYTTNNQKGTIALIGSKFIKLPKLKSLVRIKLHRQPKGMIKSATISRHSSGKYYISLLCKEEISELPKTNSAIGIDLGITDFAILSDGQKIDNHKFTSKMEKKLKREQRKLSRRALLAKQKGINLFEAKNYQKQKRKVARLHEKVMNQRTDFLNKLSTEIIKNHDIICIEDLNVKGMLRNHKLARSISDVSWSSFVAKLQYKADWYGREIIKVNQWFPSSQICSECGHKDGKKPLDI

SEQ ID NO: 441 - protein, 332 aa, unidentified
MKLGVLKAYKFRIYPNGQQKQFFIETFGCVRFTYNQLLEAKMEELANNEAKQGLTPAKLKKEYPFLKETDSLALANAQRNLDRAFRNYFQKRAGFPKMKTKKSIWQSYTTNNQQHTIYFKDDQIKLPKLKTLVPVKKHRAIKGKIKSATISAKNNEEFYISILCLEEIPQLPKQQASVAVVYDPQQLVKANQPIPITCEHAIQTKQKLTRAERKLQVKATAVKRKKILLTQARNYQKLKGKVARLYRFHCCQKREFIDQVSYHLVKQYDTIYLEQIAEDTVLKAGHYSISDWHQFVRKIQYKAQWYGKELRFVTLDTHDQQKLERLSGEMSS

SEQ ID NO: 442 - protein, 332 aa, unidentified
MKLGVLKAYKFRIYPNGQQKQFFIETFGCVRFTYNQLLEAKMEELANNEAKQGLTPAKLKKEYPFLKETDSLALANAQRNLDRAFRNYFQKRAGFPKMKTKKSIWQSYTTNNQQHTIYFEDDQIKLPKLKTLVPVKKHRAIKGKIKSATISAKNNEEFYISILCLEEIPPLPKQQASVAIVYDPQQLVKANQPVPITCEHAIQTKQKLTRAERKLQVKATAVKRKKILLTQARNYQKLKGKVARLYRFHCCQKREFIDQVSYHLVKQYDTIYLEQIAEDTVLKAGHYSISDWHQFVRKIQYKAQWYGKELRFVTLDTQDQQKLERLSGEMSS

SEQ ID NO: 443 - protein, 321 aa, unidentified
VKVLKGYKFRIYPNEEQIQFFIQTFGCVRFTYNCLLCARKESLQKRSYETKLSPAHLKKDYPFLKQADSLALANAQRNLDRAFKNYFSKRMGYPKFKTKNNTWQSYTTNNQKNTIYLVGKQLKLPKLKSLVSVNLHREVFGEIKSATISAKNNQLFFVSLLCLEEVFPLPKTGKAIGIAYCPKHLVQLTSDRSLPVYECKGVQHRLKRANKKLELRAKVAKKRAVVVKQAKNYQKQKHKVQKLTVKKNNQKRNYIDQLTHLLVHEYDSIYLEENPHFIDNTHFLEADWHHFLRTIRYKAHWYNKKLIFVEDVKKFDEFVMN

SEQ ID NO: 444 - protein, 336 aa, unidentified
MLKAFKFRMYPTEEQKQQLIRTFGCARFTYNHLLKKRQKSWQQSGVADFSLTPATLKKEYPFLKEVDSLALANAQLNLDRAFRNYFKGRASFPKLKTKKSMWQSYTTNNQTRTIYLENGYLKLPKQKELIKINQHRPVEGSIRSATISARYNEEFYVALLCDVSPVKKESLAKWIGIAYHPKTLIQTSRPLEVTLPKFHQTEEKLQHAQRKLNVKVRSAHHRKIRLDQASNYQKQKRKVMDLYLKQKNQREDYLEQLSGKLVKQYDYLFVESFPKEEAHADFSIHDWHKLITKLRYKSQWYNKKFLLINTDGAEESNSVRKSQVVEKMGRHSVIKR

SEQ ID NO: 445 - protein, 332 aa, unidentified
MKLGVLKAYKFRIYPNGQQKQFFIETFGCVRFTYNQLLEAKMEELANNEAKQGLTPAKLKKEYPFLKETDSLALANAQRNLDRAFRNYFQKRAGFPKMKTKKSIWQSYTTNNQQHTIYFEEDQIKLPKLKTLVPVKKHREIKGKIKSATISAKNNEEFYISILCLEEITPLPKQQASIAVVYDPQQLVKANQPVPITCEHAIQTKKKLTRAERKLQVKATAVKRKKILLTQARNYQKLKGKVARLYRFHCCQKREFIDQVSYHLVKQYDTIYLEQIAEDTVLKAGHYSISDWHQFVRKIQYKAQWYGKELRFVTLDTQDQQKLERLSGEMSS

SEQ ID NO: 446 - protein, 332 aa, unidentified
MKLGVLKAYKFRIYPNGQQKQFFIETFGCVRFTYNQLLEAKMEELANNEAKQGLTPAKLKKEYPFLKETDSLALANAQRNLDRAFRNYFQKRAGFPKMKTKKSIWQSYTTNNQQHTIYFEEDQIKLPKLKTLVPVKKHREIKGKIKSATISAKNNEEFYISILCLEEITPLPKQQASIAVVYDPQQLVKANQPVPITCEHAIQTKQKLIRAERKLQVKATAVKRKKILLTQARNYQKLKGKVARLYRFHCCQKREFIDQVSYHLVKQYDTIYLEQIAEDTVLKAGHYSISDWHQFVRKIQYKAQWYGKELRFVTLDTQDQQKLERLSGEMSS

SEQ ID NO: 447 - protein, 336 aa, unidentified
MLKAFKFRMYPTEEQKQQLIRTFGCARFTYNHLLKKRQKSWQQTGVANFSLTPATLKKEYPFLKEVDSLALANAQLNLDRAFRNYFKGRASFPKLKTKKSMWQSYTTNNQTRTIYLENGYLKLPKQKELIKINQHRPVEGSIRSATISARYNEEFYVALLCDVSPVKKESLAKWIGIAYHPKTLIQTSRPLEVTLPKFHQTEEKLQHAQRKLNVKVRSAHHRKIRLDQAGNYQKQKRKVMDLYLKQKNQREDYLEQLSGKLVKQYDYLFVESFPKEEAHADFSIHDWHKLITKLRYKSQWYNKKFLLINTDGAEESNSVRKSQVVEKMGRHSVIKG

SEQ ID NO: 448 - protein, 332 aa, unidentified
MKLGVLKAYKFRIYPNGQQRQFFIETFGCVRFTYNQLLEAKMEELANNEAKQGLTPAKLKKEYPFLKETDSLALANAQRNLDRAFRNYFQKRAGFPKMKTKKSIWQSYTTNNQQHTIYFEDDQIKLPKLKTLVPVKKHRAIKGKIKSATISAKNNEEFYISILCLEEISPLPKQQASVAVVYDPQQLVKANQPIPITCEHAIQTKQKLTRAERKLQVKATAVKRKKILLTQARNYQKLKGKVARLYRFHCCQKREFIDQVSYHLVKQYDTIYLEQIAEDTVLKAGHYSISDWHQFVRKIQYKAQWYGKELRFVTLDTQDQQKLERLSGEMSS

SEQ ID NO: 449 - protein, 332 aa, unidentified
MKLGVLKAYKFRIYPNGQQKQFFIETFGCVRFTYNQLLEAKMEELANNEAKQGLTPAKLKKEYPFLKETDSLALANAQRNLDRAFRNYFQKRAGFPKMKTKKSIWQSYTTNNQQHTIYFEDDQIKLPKLKTLVPVKKHRAIKGKIKSATISAKNNEEFYISILCLEEIPPLPKQQASVAVVYDPQQLVKANQPIPITCEHAIQTKQKLTRAERKLQVKATAVKRKKILLTQARNYQKLKGKVARLYRFHCCQKREFIDQVSYHLVKQYDTIYLEQIAEDTVLKAGHYSISDWHQFVRKIQYKAQWYGKELRFVTLDTQDQQKLERLSNEMSS

SEQ ID NO: 450 - protein, 332 aa, unidentified
MKLGVLKAYKFRIYPNGQQKQFFIETFGCVRFTYNQLLEAKMEELANNEAKQGLTPAKLKKEYPFLKETDSLALANAQRNLDRAFRNYFQKRAGFPKMKTKKSIWQSYTTNNQQHTIYFEDDQIKLPKLKTLVPVKKHREIKGKIKSATISAKNNEEFYISILCLEEIPPLPKQQASVAVVYDPQQLVKANQPVPITCEHAIQTKQKLTRAERKLQVKATAVKRKKILLTQARNYQKLKGKVARLYRFHCCQKREFIDQVSYHLVKQYDTIYLEQIAEDTVLKAGHYSISDWHQFVRKIQYKAQWYGKELRFVTLDTQDQQKLERLSGEMSS

SEQ ID NO: 451 - protein, 356 aa, unidentified
MKALKAYKYRLYPTSKQEEFIQKTFSCVRLVYNLMLQDRIDIYKEMRKNPQQTFKMPTPAKYKKQYPVLREVDSLALANAQVYLDRAFKNFYREKGMGFPKKKKKETVHSYTTNNQHGTVKILDNRYLKVPKLKSLIKMKVHRQPLGEIKSVTISMSASHNYYVSILCEAPIETKTKQQKMVGICSSREKFALLSNGESFEKSYCSKHLKQKLRQEERKLNKRKMIALEKGVDLSQAKNYQKQKIKVAKIREKIANQRTDILNKITTELVSSYDVICIEKAHHSNERPPKHYRSELAWSLFLAKLLYKAQWYGKELICIESEEIETELSFSESTENSEYLKSQKILERGLSKRETL

SEQ ID NO: 452 - protein, 367 aa, unidentified
MVKILKACKYRLYPTSSQIEFFEKTFSSVYLVHNLLLQDRINLYKEAKKNPNSKKSPPTPAKYKREYPLLKEVDSLALANAQVHLERALKRYYSGKDVGFPKMKSKKNPVNSYTTNNQNGTIKFVGLNCLKIPKLKSLIKVKVHREPKGKIKSATISRSSTGKYFVSILCEETICCQKKTNRAVGISLGCSELAVLSNGRRIDNDHLTEEIERKIQREEKKLARKKYLASAKGLDLLEQKNYQKQKMKVARLRERLLNQRNDFLNKVTTHLVKEYDLICIEDAHKKEFNRNCKLTKRVSDVSWSLFVSKLEYKAMWHDKQLIKLKKNDDKIVTTASTEMTLDIDPELSKNDPETAASIQLLLQGLNQ

SEQ ID NO: 453 - protein, 374 aa, unidentified
MKVLKAYKYRLYPTLLQEEFIKKTFSCVRLVHNLLLQERTQLYKELKNNPDLKVKLPTPAQYKKEHPCLKEVDSLALSNAQVYLDRAFKKFHREKSVGFPKLKQKKNAVTSYTTNNQNGTIKIIDEKYLKVPKLKSLIKMKLHRPVIGKIKSATISLTPSNKYFVSILCEEEIPKVEKTYSAIGITLGASEFAVLSNGKRVDNDKFTKEFEQRITREERKLTRRKEIAKSKNTELSQQKNYQKQKLKVAKMREKLMNQRIDFLNKITTEIVRKYDLICIEDIHQADFFRNSKLHRGVSDVSWALFVSKLEYKAAWYKKRLIKVSACGKCSEHSDNSLVSQIFTQDINEKKGQHDPETAASIQVLIQGLRDTKAN

SEQ ID NO: 454 - protein, 374 aa, unidentified
MKVLKAYKYRLYPTLLQEEFIKKTFSCVRLVHNLLLQERIQLYKELKKNPDLKVKLPTPAHYKKEHPCLREVDSLALSNAQVYLDRAFKKFHREKSVGFPKLKQKKNAVRSYTTNNQNGTIKIIDDKYLKVPKLKSLIKMRMHRPVIGKIKSATISLTPSNKYFVSILCEEEIPRIDKTYSAIGITLGASEFVVLSNGRRIDNDKFTKEFEQRITREERKLKRRKEIAKLKGTELSRQKNYQKQKLKVAKMREKLTNQRIDFLNKITTEIVKKYDLICIEDIQQADFFRNSKLQRGFSDVSWALFVSKLEYKATWYNKRMIKVSACGKCSEHSDNNPVSQIFMQDIDEKTGRHDPETAASIQVLMQGLKEIMTY

SEQ ID NO: 455 - protein, 374 aa, unidentified
MKVLKAYKYRLYPTSLQEEFIKKTFSCVRLVHNLLLQERIQLYKNLKENPNLKVKLPTPAQYKKEHPCLKEVDSLALSNAQVYLDRAFKNFHREKSVGFPKLKQKKNSVTSYTTNNQNGTVKIIDEKYLKVPKLKSLIKMKMHRPIMGKIKSATISLTPSKKYFVSILCEEDIPKVEKTYSAIGITLGASEFAVLSNGRRIDNDKYTKEFEQRITREERKLTRRKEIAKVKGIELSQQKNYQKQKLKVAKMREKLMNQRIDFLNKITTEIVRKYDLICIEDIHRADFFRNNKLHRGISDVSWALFVSKLEYKASWYNKRLIKVSACGKCSEHSDNKSVSQIFIQDIDEKKGIQDPETAASIQVLVQGLKESVAN

SEQ ID NO: 456 - protein, 374 aa, unidentified
MKVLKAYKYRLYPTSLQEEFIKKTFSCVRLVHNLLLQERIQLYKNLKENPGLKVKLPTPAQYKKEHPCLKEVDSLALSNAQVYLDRAFKNFHREKSVGFPKLKQKKNSVTSYTTNNQNGTIKIIDEKYLKVPKLKSLIKMKMHRPVIGKIKSATISLTPSKKYFVSILCEEDIPIVEKTYSAIGITLGASEFAVLSNGRRIDNDKYTKEFEQRITREERKLTRRKEIAKVKGIELSQQKNYQKQKLKVAKMREKLMNQRIDFLNKITTEIVRKYDLICIEDIHRADFFRNNKLHRGISDVSWALFVSKLEYKASWYNKRLIKVSACGKCSEHSDNKRISQIFIQDIDEKKGIQDPETAASIQVLVQGLKESVAN

SEQ ID NO: 457 - protein, 373 aa, unidentified
MKVLKAYKYRLYPTSIQEEFIKKTFSCVRLVHNLLLQERIQLYKQLKENPDLKVKLPTPAQYKKEYPCLKEVDSLALSNAQVYLDRAFKKFHREKSIGFPKLKQKKDSVSSYTTNNQNGTVKIIDEKYLKVPKLKSLVKMKMHRPVIGKIKSVTISLTPSNKYFASILCEEEIPTIEKTYSAVGITLGASEFAVLSNGRRIDNDKFTKEFEQRITREERKLTRRKEIAKAKGTDLSQQKNYQKQKLKVAKMREKLMNQRIDFLNKITTEIVRKYDLICIEDIHQADFYRNSKLHRGISDVSWALFVSKLEYKATWYNKRVIKVLACKKCSEHSENSVSQIFTQDINEQKGLQDPETAASINVLIQGLKETTGN

SEQ ID NO: 458 - protein, 364 aa, unidentified
MKACKYRLYPTSSQIEFFEKTFSSVHLVHNLLLQDRIALYKEAKKNPQRKNSLPTPAKYKREYPLLKEVDSLALANAQVHLERALKRFYSGKDVGFPKMKSKKNPVTSYTTNNQKGTIKIVGLNCLKIPKLKTLIKLKVHREPKGKIKSATISRSSTGKYFVSILCEETIQCRKKTNRAVGITLGCSELAILSNGQRIDNDQLTKEIEGRIQREEKKLARKKQLASEKGLDLLEQKNYQKQKMKVARLRERLLNQRHDFLNKVTTNLVNEYDLICIEDAHKKEFNRNCKLNKRVSDVSWSLFVSKLEYKAMWHDKQLIKLKRSCTEEPCAKPLTELLLDIDSENGKHDKEIASSIQLLFQGLNQ

SEQ ID NO: 459 - protein, 370 aa, unidentified
MRVLKAYKYRLYPTSAQEEFIKKTFSCVRLVYNLLLQDRIALYKALKENPDLTVKLPTPAQYKKEHPCLKEVDSLALANAQVYLDRAFKKFHREKGVGFPKLKQKKDSVSSYTTNNQNGTIKIIDDKCIKVPKLKTPMKVKMHRPIKGKIKSATISLTPSHKYFISILCEEEVPEVEKTYSAIGITLGTSEFAVLSNGRRIDNDKYTREFEQRLAREERKLVRRKEIAKVKGTELSQQKNYQKQKLKVAKMREKLMNQRTDFLNKITTEIVRKYDVICIEDIHQTEVYRNRKLHRGISDVSWALFVSKLEYKASWYNKRLIKVSACNECSEHSENKKQSKIFLEDIDKQKGASDPETAASIHVLNKGLSY

SEQ ID NO: 460 - protein, 368 aa, unidentified
MVKVLKAYKYRLYPTPSQIEFFEKNFYSVSLVHNLLLQDRIMQYRASKKNPDLHLKPPTPAKYKKEYPFLKEADSLALANAQVYLERGLKYYYTGKNVGFPKLKSRKNPVTSYTTNNQGGTIKIIGLNYLKIPKLKTFVKVKAHREIKGKIKSATISKTPSGKYFVSLLCEEKIHCKEKTNRAVGISLGQTEFAVLSNGQKIDNDQLTDEIEQRIRREEKKLARKKHLAGRKGLDLLNQKNYQKQKMKVAKLREKLLNQRHDFLNKVTTELIDTYDVICVEDAHKEDFCRNYKLNKRVSDVSWALFVSKLEYKATWHDKQLIKLKKCDEKMAVSLKNGLIGDVDLELAKEDSETDASIQLLLQGLKNK

SEQ ID NO: 461 - protein, 332 aa, unidentified
MKLGVLKAYKFRIYPNGQQKQFFIETFGCVRFTYNQLLEAKMEELANNEAKQGLTPAKLKKEYPFLKETDSLALANAQRNLDRAFRNYFQKRAGFPKMKTKKSIWQSYTTNNQHHTIYFEDDQIKLPKLKTVVPVKKHRAIKGKIKSATISAKNNEEFYISILCLEEIPPLPKQQASVAVVYDPQQLVKANQPIPITCEHAIQTKQKLTRAERKLQVKATAVKRKKILLTQARNYQKLKGKVARLYRFHCCQKREFIDQVSYHLVKQYDTIYLEQIAEDTVLKAGHYSISDWHQFVRKIQYKAQWYGKELRFVTLDTQDQQKLERLSGEMSS

SEQ ID NO: 462 - protein, 325 aa, unidentified
MEQLKAYKFRIYPTEEQEIFFAKSFGCVRKVYNLMLDDRKKAYEEVKNDSSKKMTFPTPAKYKKEFPFLKEIDSLALANAQLNLDKAYKNFFRDKSVGFPRFKSKKNPVQSYTTNNQNGTVALIDSKFIKVPKLKSLVRIKLHRQPKGIIKSATISRHSSGKYYISLLCKEEVRELPKSNSAVGIDLGIIDFAILSDGQKIDNNKFTSKMEKKLKREQRKLSRRALLAKQKGINLFEARNYQTQKRKVARLHEKVMNQRTDFLNKLSTEIIKNHDIICIEDLNTKGMLRNHKLAKSISDVSWSSFVSKLQYKADWYGRKGSVAKF

SEQ ID NO: 463 - protein, 310 aa, unidentified
VLKAYKFRIYPTNEQKEFLIQTFGCVRFTYNTLLKHHQQSGGGKSKKLTPASLKKEFLFLKVTDSLALANAQQNLKRAFQNYYQGRSGYPKLKLKKSVWQSYTTNNQKQTIWLKDDLLKVPKLKQPIAVHCHRPVTGQIKSATIMAKNGQQFFVSLLCEEQITPLPKTNVTTTLHFSPDQLVSGSDLVFFRTLCQKNVENKLTKAKRKLEIKAKSAQQRGVKLSAAQNYQKQKVKVQQLYHHKQQQKKAWMDELSLHLIKKYDFLYIKVPHNIQEGVFTLTDWQHFLVKLQYKATWYDKKVIFAAAEKVI

SEQ ID NO: 464 - protein, 315 aa, unidentified
VWDISVLKAYKFRIYPTNEQKEFLIQTFGCVRFTYNTLLKHHQQSGGGKSKKLTPASLKKEFLFLKVTDSLALANAQQNLKRAFQNYYQGRSGYPKLKLKKSVWQSYTTNNQKQTIWLKDDLLKVPKLKQPIAVHCHRPVTGQIKSATIMAKNGQQFFVSLLCEEQITPLPKTNVTTTLHFSPDQLVSGSDLVFFRTLCQKNVENKLTKAKRKLEIKAKSAQQRGVKLSAAQNYQKQKVKVQQLYHHKQQQKKAWMDELSLHLIKKYDFLYIKVPHNIQEGVFTLTDWQHFLVKLQYKATWYDKKVIFAAAEKVI

SEQ ID NO: 465 - protein, 347 aa, unidentified
IKILKAYKFRIYPDEAQQEFFIKTFGCVRFTYNTLLKLRQQNPSDESTLPEKMTGVWEKKTTATPAKLKRDYPFLKETDSLALANAQRNLTKAFQNYYRGRASYPKLKSKKNAWQSYTTNNQGHTIYLTNEGLKLPKLKSKVPIHQHRQVCGKIRSATISAKNRQEFYVSLLCEEEITALPKTGFDITITYDPIKLIGTSKVLSDRPNFCQQRLLVQLKNAQRKLYCRGKSAQRRNVKLEQAKNYQKQKLRLQKLYIHQIKQKEDFMEQLSIALLRQFDLVTVTMPKAFESLSANHSAAIHQDCSANYKNTAVNFTIRDWNRFVLKLKYKANWYGKKLIFTDQEKVI

SEQ ID NO: 466 - protein, 326 aa, unidentified
MSSCRTLNNKVDSMKNLKGYRFRIYPNEAQKRFFIETFGCVRFIYNYFLKLDTAERTSEEVITPASLKRDYPFLKKTDSLALANAKRNLDRAFQNYYQQRSGYPKLKNKSSAWQSYTTNNQNGTVRIEDGYLKLPKLKEKIQICEHRKITGKIKSVTISAKNNEEFYASILCVETIDKFEKTGKKIRLSFDEHQLVKQAKYRAEVIEPIQQTKGRLEFLQRKLKVKARVARKQNRVLADCKNYQKQKKQYDKLLTHLNNQIKDYLNHLSIFYIKEYDVIEIVEPEDRSCAKDDLFTSNEWHQLTRLLKYKAQWYGKEIQIINCQNI

SEQ ID NO: 467 - protein, 335 aa, unidentified
MLKAFKFRIYPTASQKEWFIQNFGCVRFTYNHLLKARQESYARTGAIDYSMTPATLKKKYAFLKSADSLALANAQLNLDRAFRNYFKGRASFPKLKNKKSMWQSYTTNNQKGTIYLEDKYLKLPKQKELIQVRLHRPVEGVIRSATISARYNESFYVSLLCEVQIAGVPTTNRWLGVAYDPKKLVETSSPVEVQMPLFRQTRDKMKVAKRKLVIKSKAAQKRKARLENSRNYQKQKRKVMDLYQKQKLQKEDYLERVSGNLIRNYDYLFVEAVPSELSSADFQLQDWYKLITKLRYKAQWYNKTLLFINVNEQLNEPPEKKSMELEKIGKQVIFE

SEQ ID NO: 468 - protein, 325 aa, unidentified
IQTFGCVRFTYNMLLTLRQQESGKTVEERTSARLQKQKMTPAKLKKDYPFLKATDSLALANAQRNLEKAFQNYYRGRASYPKLKSKKSAWQSYTTNNQGHTIYLAEDGLKLPKLKSKVLVHQHRSVAGKIRSATISAKNRQEFYVSLLCEEDIPALPKTGSEIEIAYDPTGLVVTNKPIVGIPTFCQTQVLEKLKKAQRRLSCRAKSAQRRNAKLEQAKNYQKQKSQVQQLYIHKLKQKEDFTEQLSIALLRQFDCIIITKPPELRENKESKAAKTVKKSKHTTVFPSFEDNFTLSDWNRLLLKLKYKAEWYEKELVFICPTNGK

SEQ ID NO: 469 - protein, 321 aa, unidentified
MGKNQRKVLKAYKFRIYPTKAQQKFLIQTFGCVRFTYNTLLKQRQFNTIEASKKLTPAALKKEFPFLKLTDSLALANAQRNLARAFQNYYQGRSGHPKMKIKKSTWQSYTTNNQQQTIWLKDNLLKVPKLKQPIAVVCHRKVVGKIKSATITAKNLQQFYVSLLCEEEVCHLPKTKTEIELRFAPNQLVVGNQLKFCRQLCVNDLETKLKKAKRKLEIKAKSAQQRKVRLAEAKNYQKQKLKVQKLYHHKQQQKKAWIDELTMHLIKNYDFLYVEVPKNGIEGSFTLADWQSFLVKLQYKANWYGKKVIFLTAAKTVRKIS

SEQ ID NO: 470 - protein, 339 aa, unidentified
MKKEDLVKVLKGYKFRIYPNEKQIQYFIQTFGCVRFTYNHLLHARQKALQAGDYQTQVSPASLKRDYPFLKKTDSLALANAQRNLDRAFKNYFSKRAGYPKLKTKKNNWQSYTTNNQKHTIYFVGNQLKLPKLKSLVTVNLHRKVAGEIKSATVSAQNNQMFFVSLLCLEEINPLPKTGTTIGVAYCPENLVQMSAVNRLPVYKQETLQYQLDKAIKRLEVRAKAAKRRKVLLEQAKNYQKQKSKVQKLYMAKNDQKKNYIDQLTCRLVHDYDCICLEKQPEFTENTKFSETDWQHFLRKIQYKARWYDKQLVFVDSIEKENETKCFTIEQVGKKLINQ

SEQ ID NO: 471 - protein, 335 aa, unidentified
MLKAFKFRIYPTESQKQWLIQTFGCVRFTYNHLLKARQAYYLETKEIDYTLTPASLKKQYPFLKEVDSLALANAQLNLDRAFRNYFKGRASFPKLKNKKSIWQSYTTNNQKGTIYLEETSIKLPKLKEKIRIHAHRPIEGTIRSATISSRYNEIFYVSLLCEVPQKTMEASNKWIGIAYDPDRLVEMSTPLDIAIPKFKQVDQQLQRAKRKLVIKGRAAQHRRAHVERVRNYQKQKRKIKDLYLKQKFQREDYFEQISGTVIRHYDYLFVESIPADCREGDFSIQDWHKLLAKLQYKAQWYSKKLVLIDMKEQTNPSTTKKSLELVEIGKQVLFE

SEQ ID NO: 472 - protein, 378 aa, unidentified
MFLRKAATTEGIISEGRQVPIKTLKAYRFALYPDEAQKHFFIQTFGCVRFTYNMLLTLRQQESGKTVEERTSARLQKQKMTPAKLKKDYPFLKATDSLALANAQRNLEKAFQNYYRGRASYPKLKSKKSAWQSYTTNNQGHTIYLAEDGLKLPKLKSKVLVHQHRSVAGKIRSATISAKNRQEFYVSLLCEEDIPALPKTGSEIEIAYDPTGLVVTNKPIVGIPTFCQTQVLEKLKKAQRRLSCRAKSAQRRNAKLEQAKNYQKQKSQVQQLYIHKLKQKEDFTEQLSIALLRQFDCIIITKPPELRENKESKAAKTVKKSKHTTVFPSFEDNFTLSDWNRLLLKLKYKAEWYEKELVFICPTNGKENWHRNSSALSL

SEQ ID NO: 473 - protein, 388 aa, unidentified
MARKSRAAEGQVIQYTTLKVRLYPTPAQAELFEKTFGCCRYIWNQMLSDQQMFYAETGAHFIPTPAKYKKGAPFLTEVDNQALIQEHNKLSQAFRVFFKRPEAFGHPNFKKKKTDRDSFTACNHVFESGPTIYTTRDGIRMTKAGVVKARFSRRAQAWWRLKRITVEKTKTQKYYCYILYEHSGKQPEPVIPTPETTVGLKYSMRHFYVADDGTTADPPRWLKQSQEKLVRVQQKLARMEPGSRNYEEAVQKYRLLHERIANQRRDFLHKESSRIANGWDAVCMRDDALAEMSKGPLRKDAASSGFRMLRELLQYKLERQGKRLILLDRYAPTTRVCSVCGQLQDSVDYGARTWTCPKCGTVHDREVNAAKNIKLEGLAQFLPTASPA

SEQ ID NO: 474 - protein, 390 aa, unidentified
MKQQRAVKVELYPTDEQRILIHKTFGCVRAVWNDMLGDEQEFYAAADKHFIPTTAKYKKKRPYLSEVDSLALCNAQLALKKAFKRFFENPGHFGHPKFKTKKKAKKSYTTNCQYHVSGPTVYTAKDAIRLPKLGLVKAKLYRNTPDNWVLKSATISETKSGRIFCALLYEFDVPAPKEVLPTLENSIGLDYSSPLFYVDHENRSPDKPQWFRESEAKLAHEQRLLSHMKYGSKNYIRQLHKIEVLQEHIANQRKDFAHKESRRIANAYGAVCVEDLDLQAMAQSLNLGKATNDNGFGMFREFLKYKLEEQGKHLIKVDKWYPSSKTCHYCGGYYKDLQLGEEEWVCPHCGKHILRNQNAGINIRREGIRQFYAERAVEPVTFFESHAAAS

SEQ ID NO: 475 - protein, 390 aa, unidentified
MKQQRAVKVELYPTDEQRILIHKTFGCVRAVWNDMLGDEQEFYAAADKHFIPTTAKYKKKRPYLSEVDSLALCNAQLALKKAFKRFFENPGHFGHPKFKTKKKAKKSYTTNCQYHVSGPTVYTAKDAIRLPKLGLVKAKLYRNTPDNWVLKSATISETKSGRIFCALLYEFDVPAPKEVLPTLENSIGLDYSSPLFYVDHENRSPDKPQWFRESEAKLAHEQRLLSHMKYGSKNYIRQLHKIEVLQEHIANQRKDFAHKESRRIANAYGAVCVEDLDLQAMAQSLNLGKATNDNGFGMFREFLKYKLEEQGKHLIKVDKWYPSSKTCHYCGGYYKDLQLGEEEWVCPHCGKHILRNQNAGINIRREGIRQFYAERAVEPVTFFESHVAAS

SEQ ID NO: 476 - protein, 381 aa, unidentified
MCIQYNTIKVRLYPSVNQKELFQKTFGCCRYIWNQMLSDHERFYLETDVHFIPTPAKYKKSAPFLSKVDNQALIQEHNKLSQAFRNFFRNPGAFGYPRFKRKKDDRDTFTACNQFFGRSATIYITQNAVRMTKVGLVRAVFPRRPRSGWRLTRITVERTRTDKYYGYLLYACPVRPPQPVTPTEETTVGLNYSVSRFYVADDGTAADPPRWLRQSQDKLCQIQRQLCRMQKGSKNYQEMVQKYRLLHEHIANQRRDFLHKESRRIANEWDAVCVRSDSLTALAAKTGGGCILDTGFGMFREMLRYKLERQGKSLLLVDRFRPTTKVCSVCGYVNEDLPAEALRWRCPVCGTEHRRERNAAANVKAIGLGRYRTETAAGGIG

SEQ ID NO: 477 - protein, 408 aa, unidentified
MASREKQYNVLKLRLYPTSEQAELFEKTFGCCRYLWNQMLADQQRFYLETGVHFIPTPAKYKKGAPFLKEVDNQALIQEHNQLSRAFRLFFQNPEAFGHPNFKRKKDDRDSFTACNHVFTSGPTIYTTRDGIRMTKAGMIRAVFPRRPQNGWKLKRVTVEKARTGRYYAYVLYESLVQPPEPVLPAPERTLGLKYSLRHFYVDDQGNRADPPRWLKQSQEKLVHLQRRLNRMQPGSKNYEEAVLKYRLLHEHIANQRRDFLHKESRRIANAWDAVCVRGDDLGAMTDTLIRAGSAVKEAGFGMFREMLCYKLARQGKAFIQVDRYLPTTRSCSACGLTRDALHARDYRRSGWVCPECGAVHDREVNAAKNIKARGLEQFFDLQGQNRSARPFPGVLCSALTICRPGHR

SEQ ID NO: 478 - protein, 389 aa, unidentified
MASREKQYNVLKLRLYPTSEQAELFEKTFGCCRYLWNQMLADQQRFYLETGVHFIPTPAKYKKGAPFLKEVDNQALIQEHNQLSRAFRLFFQNPEAFGHPNFKRKKDDRDSFTACNHVFTSGPTIYTTRDGIRMTKAGMIRAVFPRRPQNGWKLKRVTVEKARTGRYYAYVLYESLVQPPEPVLPAPERTLGLKYSLRHFYVDDQGNRADPPRWLKQSQEKLVHLQRRLNRMQPGSKNYEEAVLKYRLLHEHIANQRRDFLHKESRRIANAWDAVCVRGDDLGAMTDTLIQAGSAVKESGFGMFREMLCYKLARQGKAFIQVDRYLPTTRSCSACGLTRDALHARDYRRSGWVCPECGAVHDREVNAAKNIKARGLEQFFDLQGQDRSA

SEQ ID NO: 479 - protein, 389 aa, unidentified
MASREKQYNVLKLRLYPTSEQAELFEKTFGCCRYLWNQMLADQQRFYLETGVHFIPTPAKYKKGAPFLKEVDNQALIQEHNQLSRAFRLFFQNPEAFGHPNFKRKKDDRDSFTACNHVFTSGPTIYTTRDGIRMTKAGMIRAVFPRRPQNGWKLKRVTVEKARTGRYYAYVLYESLVQPPEPVLPAPERTLGLKYSLRHFYVDDQGNRADPPRWLKQSQEKLVHLQRRLNRMQPGSKNYEEAVLKYRLLHEHIANQRRDFLHKESRRIANAWDAVCVRGDDLGAMTDTLIQAGSAAKEAGFGMFREMLCYKLARQGKAFIQVDRYLPTTRSCSACGLTRDALHARDYRRSGWVCPECGAVHDREVNAAKNIKARGLEQFFDLQGQNRSA

SEQ ID NO: 480 - protein, 389 aa, unidentified
MSSREKQYNVLKLRLYPTSEQAELFEKTFGCCRYLWNQMLADQQRFYLETGVHFIPTPAKYKKGAPFLKEVDNQALIQEHNQLSRAFRLFFQNPEAFGHPNFKRKKDDRDSFTACNHVFTSGPTIYTTRDGIRMTKAGMIRAVFPRRPQNGWKLKRVTVEKARTGRYYAYVLYESLVQPPEPVLPVPERTLGLKYSLRHFYVDDQGNRADPPRWLKQSQEKLVHLQRRLNRMQPGSKNYEEAVLKYRLLHEHIANQRRDFLHKESRRIANAWDAVCVRGDDLGAMTDTLIQAGSAVKEAGFGMFREMLCYKLARQGKAFIQVDRYLPTTRSCSACGLTRDALHARDYRRSGWVCPECGAVHDREVNAAKNIKARGLEQFFDLQGQNRSA

SEQ ID NO: 481 - protein, 408 aa, unidentified
MASREKQYNVLKLRLYPTSEQAELFEKTFGCCRYLWNQMLADQQRFYLETGVHFIPTPAKYKKGAPFLKEVDNQALIQEHNQLSRAFRLFFQNPEAFGHPNFKRKKDDRDSFTACNHVFTSGPTIYTTRDGIRMTKAGMIRAVFPRRPQNGWKLKRVTVEKARTGRYYAYVLYESLVQPPEPVLPALERTLGLKYSLRHFYVDDQGNRADPPRWLKQSQEKLVHLQRRLNRMQPGSKNYEEAVLKYRLLHEHIANQRRDFLHKESRRIANAWDAVCVRGDDLGAMTDTLIRAGSAVKEAGFGMFREMLCYKLARQGKAFIQVDRYLPTTRSCSACGLTRDALHARDYRRSGWVCPECGAVHDREVNAAKNIKARGLEQFFDLQGQNRSARPFPGVLCSALTICRPGHR

SEQ ID NO: 482 - protein, 389 aa, unidentified
MSSREKQYNVLKLRLYPTSEQAELFEKTFGCCRYLWNQMLADQQRFYLETGVHFIPTPAKYKKGAPFLKEVDNQALIQEHNQLSRAFRLFFQNPEAFGHPNFKRKKDDRDSFTACNHVFTSGPTIYTTRDGIRMTKAGMIRAVFPRRPQNGWKLKRVTVEKARTGRYYAYVLYESLVQPPEPVLPAPERTLGLKYSLRHFYVDDQGNRADPPRWLKQSQEKLVHLQRRLNRMQPGSKNYEEAVLKYRLLHEHIANQRRDFLHKESRRIANAWDAVCVRGDDLGAMTDTLIQAGSAVKEAGFGMFREMLCYKLARQGKAFIQVDRYLPTTRSCSACGLTRDALHARDYRRSGWVCPECGAVHDREVNAAKNIKARGLEQFFDLQGQNRSA

SEQ ID NO: 483 - protein, 383 aa, unidentified
MSTETRKSRYTVLKVPAYPTPEQAQLMEKTFGCCRYLWNQMLSDVQEFYAATDIHYIPTPARYKKQAPFLKEVDSQALCAVHQSLRKAYLDFFRNPKVFQYPKPKTKKARKDSFTVYCRPYHTGPSLRLTNAGLQMPKLGLLQVRLYRKPLHWWSLRSVTMTKTKTGKYFCSITFGYEAELPEPVIPTPARTVGLNYSMARFYVDSNGNSPELPPQMAAAREKLARMQRKLSRMQQGSKNYEAQLHKIRLQYEHIANQRRDFAHQQSRRIANAWDAVCVRDDDLNVMAQRLKGGNVPDSGFGMFRAFLRYKLEAQGKAYIDVDPYAPAAKTCHACGHVNENLPARARSWVCPHCGEELLREENTAQNIRDFGLMAVTRQPGVA

SEQ ID NO: 484 - protein, 383 aa, unidentified
MKQQRAVKVELYPTDEQCVLIHKTFGCVRAVWNDMLGDEQEFYAATDKHFIPTPAKYKKKRPYLREVDSLALCNAQQSLKKAFKNFFENPKHFGRPCFKTKKKAKKSYTTNCQYLSSGPTVFTTKDAVRLPKLGLVKAKLYRQIPDDWVLKSATISETKSGRIFCALLYEFDVPTPAEVLPTLEGSIGLDYSSPLFYVDHENRSPDKPQWFRASEAKLAHEQRLLSHMKYGSKNYIRQLHKVQVLQEHIANQRKDFAHKESRRIANACEAVCVEDLDMRAMAQSLNLGKSTNDNGFGMFREFLKYKLEEQGKHLIKVDKWYPSSKTCHYCGGYYKDLQLGEEEWTCPHCGRRILRNQNAGINIRREGIRQFYAERAAADPAAQ

SEQ ID NO: 485 - protein, 383 aa, unidentified
MSTETRKSRYTVLKVPAYPTPEQAQLMEKTFGCCRYLWNQMLSDVQEFYAATDIHYIPTPARYKKQAPFLKEVDSQALCAVHQSLRKAYLDFFRNPKVFQYPKPKTKKARKDSFTVYCRPYHTGPSLRLTDTGLQMPKLGLLQVRLYRKPLHWWSLRSVTITRTKTGKYFCSITFGYEAEPPEPVAPTPARTVGLNYSMARFYVDSNGHSPELPPRMAAAREKLARMQRKLSRMQQGSKNYEAQLHKIRLQYEHIANQRRDFAHQQSRRIANAWDAVCVRGDDLNVMAQRLKGGNVPDSGFGMFRAFLRYKLEAQGKAYIDVDPYAPAAKTCHACGHVNENLPARARSWVCPHCGEELLREENTARNIRDFGLMAVTRQPGVA

SEQ ID NO: 486 - protein, 389 aa, unidentified
MSSREKQYNVLKLRLYPTSEQAELFEKTFGCCRYLWNQMLADQQRFYLETGVHFIPTPAKYKKGAPFLKEVDNQALIQEHNQLSRAFRLFFQNPEAFGHPNFKRKKDDRDSFTACNHVFTSGPTIYTTRDGIRMTKAGMIRAVFPRRPQNGWKLKRVTVEKARTGRYYAYVLYESLVQSPEPVLPVPERTLGLKYSLRHFYVDDQGNRADPPRWLKQSQEKLVHLQRRLNRMQPGSKNYEEAVLKYRLLHEHIANQRRDFLHKESRRIANAWDAVCVRGDDLGAMTDTLIQAGSAVKEAGFGMFREMLCYKLARQGKAFIQVDRYLPTTRSCSACGLTRDALHARDYRRSGWVCPECGAVHDREVNAAKNIKARGLEQFFDLQGQDRSA

SEQ ID NO: 487 - protein, 394 aa, unidentified
MKMNDNRRPSAPKRTTQYNTIKIRLYPNQEQEELFQRTFGCCRYIWNRMLADHERFYYETDAHFIPTPAKYKTEAPFLKEVDHQALTQEYNKLSQAFRNFFRNPASFGYPKFKRKKDDRDSFSACNQVMGNSATIYITQDAVRMTKAGLVRAKFPRRPRSGWKLTRITVERTKTGKYYGYLLFACPVHAPEPVKPTADTTIGLKYSLTHFYVRDDGITADPPRWLRQSQDKVSSIQEKLNRMQPGSRNYREMVQKYRLLHEHIANQRRDFLHKESRRIANDWDAVCIRDDSLKAISEELGGSDIHDTGFGMFREMLRYKLDRQGKQLLEVGRFDPTTKVCSVCGAINETLSPKARHWVCPVCGAEHKRGKNAAVNIKAHGLACYQNKQVAEAVS

SEQ ID NO: 488 - protein, 390 aa, unidentified
MKQQRAVKVELYPTDEQRILIHKTFGCVRAVWNDMLGDEQEFYAAADKHFIPTPAKYKKKRPYLSEVDSLALCNAQLALKKAFKRFFKNPGHFGHPKFKTKKKAKKSYTTNCQYHVSGPTVYTAKDAIRLPKLGLVKAKLYRNTHDNWVLKSATISETKSGRIFCALLYEFDVPVPKEVLPTLENSIGLDYSSPLFYVDHENRSPDKPRWFRESEAKLAHEQRMLSHMKYGSKNYIRQLRKIEVLQERIANQRKDFAHKESRRIANAYGAVCVEDLDLQAMAQSLNLGKSTNDNGFGMFREFLKYKLEEQGKHLIKVDKWYPSSKTCHYCGGYYKDLQLGEEEWICPHCGKHILRNQNAGINIRREGIRQFYAERAVEPVTFFESHVAAS

SEQ ID NO: 489 - protein, 383 aa, unidentified
MARKPKVADGQVIQYTTLKVRLYPTEAQAELFEKTFGCCRYIWNRMLADQRRFYEETGAHFIPTPAKYKNGAPFLKEVDNQALTQEYNKLAQAFRVFFKSPEVFRHPKFKRKKDDRDSFTACSHEFESGPTIYTTRDGIRMTKAGIVKAKFSRRPQAWWKLKRITVSKTKAGKYYCSILYDCPVKKPEPVVPTPETTLGLKYSMGHFYVADNGEMAGPPRWLKQSREKLVRIQQKLSRMEPGSRNYEQAVQKYRLLHEHIANQRRDFLHKESSRIANGWDAVCMRDDDMREMSQKVMLGNALEAGFGTFRELLRYKLERQGKSLVLLDRYTPTTRTCSVCAMVQSGVDYTASAWTCPKCGTIHNREVNAAKNIKLEGLARLCA

SEQ ID NO: 490 - protein, 389 aa, unidentified
MSSREKQYNVLKLRLYPTSEQAELFEKTFGCCRYLWNQMLADQQRFYLETGVHFIPTPAKYKKGAPFLKEVDNQALIQEHNQLSRAFRLFFQNPEAFGHPNFKRKKDDRDSFTACNHVFTSGPTIYTTRDGIRMTKAGMIRAVFPRRPQNGWKLKRVTVEKARTGRYYAYVLYESLVQPPEPVLPVPERTLGLKYSLRHFYVDDQGNRADPPRWLKQSQEKLVHLQRRLNRMQPGSKNYEEAVLKYRLLHEHIANQRRDFLHKESRRIANAWDAVCVRGDDLGAMTDTLIQAGSAVKESGFGMFREMLCYKLARQGKAFIQVDRYLPTTRSCSACGLTRDALHARDYRRSGWVCPECGAVHDREVNAAKNIKARGLEQFFDLQGQDRSA

SEQ ID NO: 491 - protein, 389 aa, unidentified
MASREKQYNVLKLRLYPTSEQAELFEKTFGCCRYLWNQMLADQQRFYLETGVHFIPTPAKYKKGAPFLKEVDNQALIQEHNQLSRAFRLFFQNPESFGHPNFKRKKDDRDSFTACNHVFTSGPTIYTTRDGIRMTKAGMIRAVFPRRPQNGWKLKRVTVEKARTGRYYAYVLYESLVQPPEPVLPVPERTLGLKYSLRHFYVDDQGNRADPPRWLKQSQEKLVHLQRRLNRMQPGSKNYEEAVLKYRLLHEHIANQRRDFLHKESRRIANAWDAVCVRGDDLGAMTDTLIQAGSAVKEAGFGMFREMLCYKLARQGKAFIQVDRYLPTTRSCSACGLTRDALHARDYRRSGWVCPECGAVHDREVNAAKNIKARGLEQFFDLQGQNRSA

SEQ ID NO: 492 - protein, 374 aa, unidentified
MKVRLYPSVNQKELFQKTFGCCRYIWNQMLSDHERFYLETDVHFIPTPAKYKKSAPFLSKVDNQALIQEHNKLSQAFRNFFRNPGAFGYPRFKRKKDDRDTFTACNQFFGRSATIYITQNAVRMTKVGLVRAVFPRRPRSGWRLTRITVERTRTDKYYGYLLYACPVRPPQPVTPTEETTVGLNYSVSRFYVADDGTAADPPRWLRQSQDKLCQIQRQLCRMQKGSKNYQEMVQKYRLLHEHIANQRRDFLHKESRRIANEWDAVCVRSDSLTALAAKTGGGCILDTGFGMFREMLRYKLERQGKSLLLVDRFRPTTKVCSVCGYVNEDLPAEALRWRCPVCGTEHRRERNAAANVKAIGLGRYRTETAAGGIG

SEQ ID NO: 493 - protein, 389 aa, unidentified
MSSREKQYNVLKLRLYPTSEQAELFEKTFGCCRYLWNQMLADQQRFYLETGVHFIPTPAKYKKGAPFLKEVDNQALIQEHNQLSRAFRLFFQNPEAFGHPNFKRKKDDRDSFTACNHVFTSGPTIYTTRDGIRMTKAGMIRAVFPRRPQNGWKLKRVTVEKARTGRYYAYVLYESLVQPPEPVLPVPERTLGLKYSLRHFYVDDQGNRADPPRWLKQSQEKLVHLQRRLNRMQPGSKNYEEAVLKYRLLHEHIANQRRDFLHKESRRIANAWDAVCVRGDDLGTMTDTLIQAGSAVKESGFGMFREMLCYKLARQGKAFIQVDRYLPTTRSCSACGLTRDALHARDYRRSGWVCPECGAVHDREVNAAKNIKARGLEQFFDLQGQDRSA

SEQ ID NO: 494 - protein, 365 aa, unidentified
MNRAVKIRIYPNKEQRVQIEQTIGCSRFIYNQMLADKISYYQKEKKMLRNTPAGYKKEYPWLKEVDSLALANAQLHLESAFRKFFREPACGFPRYKSKKHVRNSYTTNALNGNILLQDTHLKLPKMSVIRIKLHRQIPSDWKLKSVTVSREPSGKYFASLLFCCEDQTVEKRPAERFLGIDFAMQGMCVFSTGERAGYPMFYRKAEKKLAREQRKLSHCEKESRNYQKQKKRAALCHEKIKNQRKDFQHKLSRELAERYDAVCVEDLNLKGMSGGLHLGKGVQDNGYGQFLFMLGYKLEECGKHLIKVDRYFASSKICSVCGHKKKELALSDRMYVCECGNRMDRYVNAAVNIREEGKRIYKECA

SEQ ID NO: 495 - protein, 389 aa, unidentified
MGHRETVGQAIQYNTIKVRLYPSVNQKELFQKTFGCCRYIWNQMLSDHERFYLETDVHFIPTPAKYKKSAPFLSKVDNQALIQEHNKLSQAFRNFFRNPGAFGYPRFKRKKDDRDTFTACNQFFGRSATIYITQNAVRMTKVGLVRAVFPRRPRSGWRLTRITVERTRTDKYYGYLLYACPVRPPQPVTPTEETTVGLNYSVSRFYVADDGTAADPPRWLRQSQDKLCQIQRQLCRMQKGSKNYQEMVQKYRLLHEHIANQRRDFLHKESRRIANEWDAVCVRSDSLTALAAKTGGGCILDTGFGMFREMLRYKLERQGKSLLLVDRFRPTTKVCSVCGYVNEDLPAEALRWRCPVCGTEHRRERNAAANVKAIGLGRYRTETAAGGIG

SEQ ID NO: 496 - protein, 389 aa, unidentified
MGHRETVGQAIQYNTIKVRLYPSVNQKELFQKTFGCCRYIWNQMLSDHERFYLETDVHFIPTPAKYKKSAPFLSKVDNQALIQEHNKLSQAFRNFFRNPGAFGYPRFKRKKDDRDTFTACNQFFGRSATIYITQNAVRMTKVGLVRAVFPRRPRSGWRLTRITVERTRTDKYYGYLLYACPVRPPQPVTPTEETTVGLNYSVSRFYVADDGTAADPPRWLRQSQDQLCQIQRQLCRMQKGSKNYQEMVQKYRLLHEHIANQRRDFLHKESRRIANEWDAVCVRSDSLTALAAKTGGGCILDTGFGMFREMLRYKLERQGKSLLLVDRFRPTTKVCSVCGYVNEDLPAEALRWRCPVCGTEHRRERNAAANVKAIGLGRYRTETAAGGIG

SEQ ID NO: 497 - protein, 389 aa, unidentified
MASREKQYNVLKLRLYPTSEQAELFEKTFGCCRYLWNQMLADQQRFYLETGVHFIPTPAKYKKGAPFLKEVDNQALIQEHNQLSRAFRLFFQNPEAFGHPNFKRKKDDRDSFTACNHVFTSGPTIYTTRDGIRMTKAGMIRAVFPRRPQNGWKLKRVTVEKARTGRYYAYVLYESLVQPPEPVLPVPERTLGLKYSLRHFYVDDQGNRADPPRWLKQSQEKLVHLQRRLNRMQPGSKNYEEAVLKYRLLHEHIANQRRDFLHKESRRIANAWDAVCVRGDDLGAMTDTLIQAGSTVKEAGFGMFREMLCYKLARQGKAFIQVDRYLPTTRSCSACGLTRDALHARDYRRSGWVCPECGAVHDREVNAAKNIKARGLEQFFDLQGQDRSA

SEQ ID NO: 498 - protein, 389 aa, unidentified
MASREKQYNVLKLRLYPTSEQAELFEKTFGCCRYLWNQMLADQQRFYLETGVHFIPTPAKYKKGAPFLKEVDNQALIQEHNQLSRAFRLFFQNPEAFGHPNFKRKKDDRDSFTACNHVFTSGPTIYTTRDGIRMTKAGMIRAVFPRRPQNGWKLKRVTVEKARTGRYYAYVLYESLVQPPEPVLPAPERTLGLKYSLRHFYVDDQGNRADPPRWLKQSQEKLVHLQRRLNRMQPGSKNYEEAVLKYRLLHEHIANQRRDFLHKESRRIANAWDAVCVRGDDLGAMTDTLIQAGSAVKEAGFGMFREMLCYKLARQGKAFIQVDRYLPTTRSCSACGLTRDALHARDYRRSGWVCPECGAVHDREVNAAKNIKARGLEQFFDLQGQDRSA

SEQ ID NO: 499 - protein, 391 aa, unidentified
MYGKGAARKGGKTQYTTIKVRLEPTAEQAELFEKTFGCCRYIWNQMLADQQRFYAETDAHFIPTPAKYKKEAPFLKEVDNQALIQEHNKLSQAFRVFFKNPESFGYPHFKRKKNDRDSFTACNHVFESGPTIYLTKNGIRMTKAGIVRARFHRRPQNGWDLKRITVEKTRAGKYYCCILYAYAAEEPEPVVPAPETTVGLNYSVSHFYAADDGSTADPPRWMKQSQEKLVRLQRRLSRMQPGSQNYREAVRKYRLLHEHIANQRLDFVHKESRRIANAWEAVCVRGDDLGDIARKLVYGNALESGYGMFRECLRYKLERQGKPLIVVDRYAPTARTCSACGLVRDAVGLKEDLWTCPKCGAAHRREVNAAKNIKAQGLARYFGSQERRVSA

SEQ ID NO: 500 - protein, 390 aa, unidentified
MAAKRSKSETLRYTTLKVRLYPSAEQAALFEKTFGCCRYIWNQMLADQQRFYIETDKFFIPTPAKYKAGAPFLKEVDNQALIQEHNKLGQAFRVFFKSPENFGYPKFKRKKDDRDSFTVCNHVMGNSETVYTTRDGLRMTKAGIVRAKFPRRPQGWWKLKRVTVDRTRSGKYYGYILYECPEKKPEVVVPTPETTVGLKYSMARFYVADTGETADPPHWLKQSQEKLARIQQRLNRMRPGSKNYQETVQKYRLLHEHIANQRRDFIHKESRRIANAWDAVCVRGDDMEQISRITNRGNALEAGFGMFRECLRYKLARQGKELLVVDRYFPSTRTCSACGRVMPEEISMKRRTWTCPQCGAVLKREANAARNIKDQGLAQYFSTRERRESA

SEQ ID NO: 501 - protein, 389 aa, unidentified
MASREKQYNVLKLRLYPTSEQAELFEKTFGCCRYLWNQMLADQQRFYLETGVHFIPTPAKYKKGAPFLKEVDNQALIQEHNQLSRAFRLFFQNPEAFGHPNFKRKKDDRDSFTACNHVFTSGPTIYTTRDGIRMTKAGMIRAVFPRRPQNGWKLKRVTVEKARTGRYYAYVLYESLVQPPEPVLPVPERTLGLKYSLRHFYVDDQGNRADPPRWLKQSQEKLVHLQRRLNRMQPGSKNYEEAVLKYRLLHEHIANQRRDFLHKESRRIANAWDAVCVRGDDLGAMTDTLIQAGSAVKEAGFGMFREMLCYKLARQGKAFIQVDRYLPTTRSCSACGLTRDALHARDYRRSGWVCPECGAVHDREVNAAKNIKARGLEQFFDLQGQNRSA

SEQ ID NO: 502 - protein, 389 aa, unidentified
MSSREKQYNVLKLRLYPTSEQAELFEKTFGCCRYLWNQMLADQQRFYLETGVHFIPTPAKYKKGAPFLKEVDNQALIQEHNQLSRAFRLFFQNPEAFGHPNFKRKKDDRDSFTACNHVFTSGPTIYTTRDGIRMTKAGMIRAVFPRRPQNGWKLKRVTVEKARTGRYYAYVLYESLVQPPEPVLPAPERTLGLKYSLRHFYVDDQGNRADPPRWLKQSQEKLVHLQRRLNRMQPGSKNYEEAVLKYRLLHEHIANQRRDFLHKESRRIANAWDAVCVRGDDLGAMTDTLIQAGSAVKEAGFGMFREMLCYKLARQGKAFIQVDRYLPTTRSCSACGLTRDALHARDYRRSGWVCPECGAVHDREVNAAKNIKARGLEQFFDLQGQDRSA

SEQ ID NO: 503 - protein, 389 aa, unidentified
MASREKQYNVLKLRLYPTSEQAELFEKTFGCCRYLWNQMLADQQRFYLETGVHFIPTPAKYKKGAPFLKEVDNQALIQEHNQLSRAFRLFFQNPEAFGHPNFKRKKDDRDSFTACNHVFTSGPTIYTTRDGIRMTKAGMIRAVFPRRPQNGWKLKRVTVEKARTGRYYAYVLYESLVQPPEPVLPVPERTLGLKYSLRHFYVDDQGNRADPPRWLKQSQEKLVHLQRRLNRMQPGSKNYEEAVLKYRLLHEHIANQRRDFLHKESRRIANAWDAVCVRGDDLGAMTDTLIQAGSAVKEAGFGMFREMLCYKLARQGKAFIQVDRYLPTTRSCSACGLTRDALHARDYRRSGWVCPECGAVHDREVNAAKNIKARGLEQFFDLQGQDRSA

SEQ ID NO: 504 - protein, 392 aa, unidentified
MVGRSQSSHVQAGKTSLYTTIKARLYPTAEQAELFEKTFGCCRFIWNRMLSDQQKFYDETGAHFIPTPAKYKDGAPFLKEVDNQALIQTHNQLSQAFRIFFKNPEHFGHPRFKRKKDGRDAFTACNHVFSSGPTIYLTRDGIRMTKAGVVKAKFPRRPRNGWKLKRITVSKTRTGTYNCSIVFEYPAPAPQPIPPTPERTIGLKYSVSHFYVADNGAMADPPHWLKLTQEKLARLQQRMARMTPGSRNYEEAVQKYRLLHEHIANQRRDYIHKESRRIANAWDAVCVRADDLADGNRAMKLSNGLELGFGMFRACLDYKLSRQGKSLLMVERCAPTSRQCHSCGYLLPEGVDYRREQWRCPACGAALQREINAAQNIKTAGLRQVLTTQKSA

SEQ ID NO: 505 - protein, 383 aa, unidentified
MSTETRKSRYTVLKVPAYPTPEQAQLMEKTFGCCRYLWNQMLSDVQEFYAATDIHYIPTPARYKKQAPFLKEVDSQALCAVHQSLRKAYLDFFRNPKVFQYPKPKTKKARKDSFTVYCRPYHTGPSLRLTDAGLQMPKLGLLQVRLYRKPLHWWSLRSVTMTKTKTGKYFCSITFGYEAELPEPVIPTPARTVGLNYSMSRFYVDSNGHSPELPPQMAAAREKLARMQRKLSRMQQGSKNYEAQLHKIRLQYERIANQRRDFAHQQSRRIANAWDAVCVRGDDLNVMAQRLKGGNVPDSGFGMFRAFLRYKLEAQGKAYIDVDPYAPAAKTCHACGHVNENLPARARSWVCPLCGEELLREENTAQNIRDFGLMAVTRQPGVA

SEQ ID NO: 506 - protein, 389 aa, unidentified
MASREKQYNVLKLRLYPTSEQAELFEKTFGCCRYLWNQMLADQQRFYLETGVHFIPTPAKYKKGAPFLKEVDNQALIQEHNQLSRAFRLFFQNPEAFGHPNFKRKKDDRDSFTACNHVFTSGPTIYTTRDGIRMTKAGMIRAVFPRRPQNGWKLKRVTVEKARTGRYYAYVLYESLVQPPEPVLPAPERTLGLKYSLRHFYVDDQGNRADPPRWLKQSQEKLVHLQRRLNRMQPGSKNYEEAVLKYRLLHEHIANQRRDFLHKESRRIANAWDAVCVRGDDLGAMTDTLIQAGSTVKEAGFGMFREMLCYKLARQGKAFIQVDRYLPTTRSCSACGLTRDALHARDYRRSGWVCPECGAVHDREVNAAKNIKARGLEQFFDLQGQDRSA

SEQ ID NO: 507 - protein, 389 aa, unidentified
MASREKQYNVLKLRLYPTSEQAELFEKTFGCCRYLWNQMLADQQRFYLETGVHFIPTPAKYKKGAPFLKEVDNQALIQEHNQLSRAFRLFFQNPEAFGHPNFKRKKDDRDSFTACNHVFTSGPTIYTTRDGIRMTKAGMIRAVFPRRPQNGWKLKRVTVEKARTGRYYAYVLYESLVQPPEPVLPAPERTLGLKYSLRHFYVDDQGNRADPPRWLKQSQEKLVHLQRRLNRMQPGSKNYEEAVLKYRLLHEHIANQRRDFLHKESRRIANAWDAVCVRGDDLGAMTDTLIQAGSAVKEAGFGMFREMLCYKLARQGKAFIQVDRYLPTTRSCSACGLTRDALHARDYRRSGWVCPECGAVHDREVNAAKNIKARGLEQFFDLQGQNRSA

SEQ ID NO: 508 - protein, 389 aa, unidentified
MASREKQYNVLKLRLYPTSEQAELFEKTFGCCRYLWNQMLADQQRFYLETGVHFIPTPAKYKKGAPFLKEVDNQALIQEHNQLSRAFRLFFQNPEAFGHPNFKRKKDDRDSFTACNHVFTSGPTIYTTRDGIRMTKAGMIRAVFPRRPQNGWKLKRVTVEKARTGRYYAYVLYESLVQSPEPVLPVPERTLGLKYSLRHFYVDDQGNRADPPRWLKQSQEKLVHLQRRLNRMQPGSKNYEEAVLKYRLLHEHIANQRRDFLHKESRRIANAWDAVCVRGDDLGAMTDTLIQAGSAVKEAGFGMFREMLCYKLARQGKAFIQVDRYLPTTRSCSACGLTRDALHARDYRRSGWVCPECGAVHDREVNAAKNIKARGLEQFFDLQGQNRSA

SEQ ID NO: 509 - RNA, 220 nt, synthetic construct
  source 1..220: mol_type = other RNA
tgagtatgagatacgaatttgtcaggcagttgatatacaaacaagaatggctgggtggtgaagttattcgccgggagagtaaacccttgtaagggggttcagtgataatgtagtatatgatgaattttaagcggcagggcatgtcgtttctgcttgtggaggaaggttaattcaacttccgttgaagcaagaatctcttgattgttattgagaatgtcaa

SEQ ID NO: 510 - RNA, 220 nt, synthetic construct
  source 1..220: mol_type = other RNA
tgagtatgagatacgaatttgtcaggcagttgatatacaaacaagaatggctgggtggtgaagttattcgccgggagagtaaacccttgtaagggggttcggtgataatgtagtatatgatgaattttaagcggcagggcatgtcgtttctgcttgtggaggaaggttaattcaacttccgttgaagcaagaatctcttgattgttattgagaatgtcaa

SEQ ID NO: 511 - RNA, 220 nt, synthetic construct
  source 1..220: mol_type = other RNA
ttcattatgaattaatacgtcagctaacttataaacaagaatggcatggtgggcttgttatcaagctttcggcagaaaaaaatgtagatgctgaaagtgcatggaccaaagcatgtaatttattggcggcagggcttgccgtcactgcctgtggaggagaggtgtcaaaagactctccgatgaagcaggaaccctaagtcagcaacgactgggaagtcaa

SEQ ID NO: 512 - RNA, 220 nt, synthetic construct
  source 1..220: mol_type = other RNA
atgagatacgaatttgtcaggcagttgatatacaaacaagagtggctgggtggtgaaattattcgccgggagagtaagctcttgtaacggttttttccgtgatgatgttgtactatgtgatgaattttaagcggcagggcatgtcgtttctgcttgtggaggaaggttaattcaacttccgttgaagcaagaatctcttgattgttattgagaatgtcaa

SEQ ID NO: 513 - RNA, 220 nt, synthetic construct
  source 1..220: mol_type = other RNA
gttagacagttaatgtataagcaagaatggttgggtggtaaggtaattcggttgggcgattagcgtagtttattaatgattaaataagagttatatacagctgtttatatggccttagataaattgctggcggcagggcatgtcgtgtcagtttgtggaggggggttatttcaacttccgatgaagcaaaaatctcggttattgatactgagaatgtcaa

SEQ ID NO: 514 - RNA, 220 nt, synthetic construct
  source 1..220: mol_type = other RNA
gttaggcagttaatgtataagcaagaatggttgggtggtaaggtaattcggttgggcgattagcgtagtttattaatgattaaataagagttatatacagctgtttatatggccttagataaattgctggcggcagggcatgtcgtgtcagtttgtggaggggggttatttcaacttccgatgaagcaaaaatctcggttattgatactgagaatgtcaa

SEQ ID NO: 515 - RNA, 220 nt, synthetic construct
  source 1..220: mol_type = other RNA
atgagatacgaatttgtcaggcagttgatatacaaacaagagtggctgggtggtgaaattattcgccgagagagtaaactcttgtaacggttttttccgtgatgatgttgtactatgtgatgaattttaagcggcagggcatgtcgtttctgcttgtggaggagggttaattcaacctccgttgaagcaagaatctcttgattgttattgagaacgtcaa

SEQ ID NO: 516 - RNA, 220 nt, synthetic construct
  source 1..220: mol_type = other RNA
acgagatacgaatttgtcaggcagttgatatacaaacaagagtggctgggtggtgaaattattcgccgggagagtaaactcttgtaacggttttttccgtgatgatgttgtactatgtgacgaattttaagcggcagggcatgtcgtttctgcttgtggaggaaggttaattcaacttccgttgaagcaagaatctcttgattgttattgagaatgtcaa

SEQ ID NO: 517 - RNA, 220 nt, synthetic construct; identical to SEQ ID NO: 516
  source 1..220: mol_type = other RNA

SEQ ID NO: 518 - RNA, 220 nt, synthetic construct
  source 1..220: mol_type = other RNA
cactctgagtatgagatacgaatttgtcaggcagttgatatacaaacaagaatggctgggtggtgaagttatttgccgggagagtaaacccttgtaaagggttttcagtgataatgtggtatatgatgaattttaagcggcagggcatgtcgtttctgcttgtggaggaagtttaatttaacttccgttgaagcaagaatctcataatcgagaatgtcaa

SEQ ID NO: 519 - RNA, 220 nt, synthetic construct
  source 1..220: mol_type = other RNA
cactctgagtatgagatacgaatttgtcaggcagttgatatacaaacaagaatggctgggcggtgaagttatttgccgggagagtaaacccttgtaaagggttttcagtgataatgtggtatatgatgaattttaagcggcagggcatgtcgtttctgcttgtggaggaagtttaatttaacttccgttgaagcaagaatctcataatcgagaatgtcaa

SEQ ID NO: 520 - RNA, 220 nt, synthetic construct
  source 1..220: mol_type = other RNA
atgagatacgaatttgtcaggcagttgatatacaaacaagagtggctgggtggtgaaattattcgccgggagagtaaactcttgtaacggttttttccgtgatgatgttgtactatgtgatgaattttaagcggcagggcatgtcgtttctgcttgtggaggaaggttaattcaacttccgttgaagcaagaatctcttgattgttattgagaatgtcaa

SEQ ID NO: 521 - RNA, 220 nt, synthetic construct
  source 1..220: mol_type = other RNA
tgagatacgaatttgtcaggcagttgatatacaaacaagagtggctgggtggtgaaattattcgccgagaaagtaaactcttgtaacggtttttttccgtgatgatgttgtactatgtgatgaattttaagcggcagggcatgtcgtttatgcttgtggaggaaggttaattcaacttccgttgaagcaagaatctcttgattgttattgagaatgtcaa

SEQ ID NO: 522 - RNA, 220 nt, synthetic construct
  source 1..220: mol_type = other RNA
tgagatacgaatttgtcaggcagttgatatacaaacaagagtggctaggtggtgaaattattcgccgagaaagtaaactcttgtaacggtttttttccgtgatgatgttgtactatgtgatgaattttaagcggcagggcatgtcgtttatgcttgtggaggaaggttaattcaacttccgttgaagcaagaatctcttgattgttattgagaatgtcaa

SEQ ID NO: 523 - RNA, 220 nt, synthetic construct
  source 1..220: mol_type = other RNA
atgagatacgaatttgtcaggcagttgatatacaaacaagagtggctgggtggtgaaattattcgccgagaaagtaaactcttgtaacggttttttccgtgatgatgttgtactatgtgatgaattttaagcggcagggcatgtcgtttatgcttgtggaggaaggttaattcaacttccgttgaagcaagaatctcttgattgttattgagaatgtcaa

SEQ ID NO: 524 - RNA, 220 nt, synthetic construct
  source 1..220: mol_type = other RNA
agcatgagatacgaatttgtcagacagctaatttacaaacaagagtggctgggtggtgaagttattcgccgagagttagcctagtaacgcctgttttcgagatgatgtagtactaaatgatgaaatttatgcggcagggcatgtcgtttctgcttgtcgaggaaggttacttaaacttccgttgaagcaagaatctcatgattgcatctgagagtgtcaa

SEQ ID NO: 525 - RNA, 220 nt, synthetic construct
  source 1..220: mol_type = other RNA
cactctgagtatgagatacgaatttgtcaggcagttgatatacaaacaagagtggctgggtggtgaagttattcgtcgggagagtaaacccttgtaacgggttttcagtggtgatgtagtatatgatgaatgttaagcggcagggcatgtcgtttctgcttgtggaggaaggttaatttaacttccgttgaagcaagaatctcaaaattgagaatgtcaa

SEQ ID NO: 526 - RNA, 220 nt, synthetic construct
  source 1..220: mol_type = other RNA
atgagatacgaatttatcaggcagttgatatacaaacaagagtggctgggtggtgaaattattcgccggtagagtcaacttttgtaacggttttttccgtgatgatgttgtactttgtgatgagttttaagcggcagggcatgtcgtttgtgcttgtggaggaaggttaattcaacttccgttgaagcaagaatctcttgattgtgaatgagaatgtcaa

SEQ ID NO: 527 - RNA, 220 nt, synthetic construct
  source 1..220: mol_type = other RNA
atgagatacgaatttatcaggcagttgatatacaaacaagagtggctgggtggtgaaattattcgccggtagagtcaacttttgtaacggttttttttgtgatgatgttgtactttgtgatgagttttaagcggcagggcatgtcgtttgtgcttgtggaggaaggttaattcaacttccgttgaagcaagaatctcttgattgtgaatgagaatgtcaa

SEQ ID NO: 528 - RNA, 220 nt, synthetic construct
  source 1..220: mol_type = other RNA
acttgttaggcaattattgtataaacaggaatggttaggtgggaaaataattcatctggatgcttagtatttattaaatatcctttgagagatttttcactcgttttttaatataaatcaaagtgattattggcggcagggcatgtcgtttcagtttgtggaggaaggtttttttaacttctgttgaagcaaaaatctcggatgtcattgagaatgtcaa

SEQ ID NO: 529 - RNA, 220 nt, synthetic construct
  source 1..220: mol_type = other RNA
aacttgttaggcaattattgtataaacaggaatggttaggtgggaaaataattcatctggatgcttagtatttattaaatatcctttgagagattttgcctggttttttaatataaatcaaagtgattattggcggcagggcatgtcgtttcagtttgtggaggaaggtttttttaacttctgttgaagcaaaaatctcggatgtcattgagaatgtcaa

SEQ ID NO: 530 - RNA, 220 nt, synthetic construct
  source 1..220: mol_type = other RNA
gcttgttatcaagcttccggcagaagagcaaaagctgcaaaggaagaccaggcatcacgagcaaaatgttcggtagaaaaaatgtagatgctgaaagttcgtggactaaagcatgtaatttattggcggcagggcttgccgtcactgcctgtggaggagaggtggcaaaacactctccaatgaagcaggaaccctaagtcagcaacgactgggaagtcaa

SEQ ID NO: 531 - RNA, 220 nt, synthetic construct
  source 1..220: mol_type = other RNA
gcttgttatcaagcttccggcagaagagcaaaagctgcaaaggaagaccaggcatcacgagcaaaatgttcggtagaaaaaatgtagatgctgaaagttcgtggactaaagcatgtaatttattggcggcagggcttgccgtcactgcctgtggaggagaggtggcaaaacactctccaatgaagcaggaaccctaaatcagcaacgactgggaagtcaa

SEQ ID NO: 532 - RNA, 220 nt, synthetic construct; identical to SEQ ID NO: 530
  source 1..220: mol_type = other RNA

SEQ ID NO: 533 - RNA, 220 nt, synthetic construct; identical to SEQ ID NO: 520
  source 1..220: mol_type = other RNA

SEQ ID NO: 534 - RNA, 220 nt, synthetic construct
  source 1..220: mol_type = other RNA
cactctgagtatgagatacgaatttgtcaggcagttgatatacaaacaagaatggctgggtggtgaagttattcgccgggagagtaaacccttgtaaagggttttcagtgataatgtagtatatgatgaattttaagcggcagggcatgtcgtttctgcttgtggaggaaggttaatttaacttccgttgaaacaagaatctcaaaattgagaatgtcaa

SEQ ID NO: 535 - RNA, 220 nt, synthetic construct
  source 1..220: mol_type = other RNA
atgagatacgaatttgtcaggcagttgatatacaaacaagagtggctgggtggtgaaattattcgccaggagagtaaactcttgtaacggttttttccgtgatgatgttgtactatgtgatgaattttaagcggcagggcatgtcgtttctgcttgtggaggaaggttaattcaacttccgttgaagcaagaatctcttgattgttattgagaatgtcaa

SEQ ID NO: 536 - RNA, 220 nt, synthetic construct
  source 1..220: mol_type = other RNA
gtttgttaggcaattattgtataaacaagagtggttaggtggaaaaattgttcagctggatgcttagtttttattaaatatcctttgagatatttttcacccgttttttaatataaatcaaagtgattattggcggcagggcatgtcgtttcagtttgttgaggaaggtttttttaacttctgttgaagcaaaaatctcgaatgttattgagaatgtcaa

SEQ ID NO: 537 - RNA, 220 nt, synthetic construct
  source 1..220: mol_type = other RNA
ttatcaaactaccagataatactagcataagttctatagacaatcatgcatctaagaatgaatatatagctgaaaaattgaatttaaatgctgatagtttacgaactaaggcatgtaatttattggcggcagggcttgccgtcacagcctgcggaggagatgtagtcaaacgctctccggtgaaacaggaaccctaagtcagtaatggccgggaagtcaa

SEQ ID NO: 538 - RNA, 220 nt, synthetic construct
  source 1..220: mol_type = other RNA
tcggccagaaaaactagtccactgccggtcaatttcaaaccatacgagtttttgaggcaactaaaatacaagcagtcatggaacggtggttctgtatgtgtggagcagacttagcacattaaagataattggcggcagggcatgccgtcgttacctgtggagagtactttcaagtgctcgttgaagcagaaaacctgttattttcaaggcaggaagtcaa

SEQ ID NO: 539 - RNA, 220 nt, synthetic construct
  source 1..220: mol_type = other RNA
gtttgttaggcaattattgtataaacaagagtggttaggtggaaaaattgttcagctggatgcttagtttttattaaatatcctttgagatatttttcacccgttttttaatataaatcaaagtgattattggcggcagggcatgtcgtttcagtttgtggaggaaggtttttttaacttctgttgaagcaaaaatctcgaatgttattgagaatgtcaa

SEQ ID NO: 540 - RNA, 220 nt, synthetic construct; identical to SEQ ID NO: 536
  source 1..220: mol_type = other RNA

SEQ ID NO: 541 - RNA, 220 nt, synthetic construct; identical to SEQ ID NO: 536
  source 1..220: mol_type = other RNA

SEQ ID NO: 542 - RNA, 220 nt, synthetic construct; identical to SEQ ID NO: 536
  source 1..220: mol_type = other RNA

SEQ ID NO: 543 - RNA, 220 nt, synthetic construct; identical to SEQ ID NO: 512
  source 1..220: mol_type = other RNA

SEQ ID NO: 544 - RNA, 220 nt, synthetic construct
  source 1..220: mol_type = other RNA
agacagttaatgtataaacaagaatggttgggtggtcaggtaattcggttaggcgattagcgtagtttattaatgattaaataagagttatatacagctgtttatatgaccttagatgaattgctggcggcagggcatgtcgtgtcagtttgtggagggggggggttatttcaacttccgatgaagcaaaaatctcggttattagtactgagaatgtcaa

SEQ ID NO: 545 - RNA, 220 nt, synthetic construct; identical to SEQ ID NO: 530
  source 1..220: mol_type = other RNA

SEQ ID NO: 546 - RNA, 220 nt, synthetic construct
  source 1..220: mol_type = other RNA
agtttgttagacaattattgtataaacaagaatggttaggcggggaaattattcagctgaatgcttagttttgattaaatcctttggtgagtttttttcatccgttttttagtataatcaaagtgattattggcggcagggcatgtcgtttcagtttgtggaggaaggtttttttaacttctgttgaagcaaaaatctcggatgttattgagaatgtcaa

SEQ ID NO: 547 - RNA, 220 nt, synthetic construct
  source 1..220: mol_type = other RNA
taagatacgaatttgtcaggcagttgatatacaaacaagagtggctgggtggtgaaattattcgccgagaaagtaaactcttgtaacggtttttttccgtgatgatgttgtactatgtgatgaattttaagcggcagggcatgtcgtttatgcttgtggaggaaggttaattcaacttccgttgaagcaagaatctcttgattgttattgagaatgtcaa

SEQ ID NO: 548 - RNA, 220 nt, synthetic construct; identical to SEQ ID NO: 511
  source 1..220: mol_type = other RNA

SEQ ID NO: 549 - RNA, 220 nt, synthetic construct; identical to SEQ ID NO: 528
  source 1..220: mol_type = other RNA

SEQ ID NO: 550 - RNA, 220 nt, synthetic construct
  source 1..220: mol_type = other RNA
aacttgttaggcaattattgtataaacaggaatggttaggtgggaaaataattcatctggatgcttagtatttattaaatatcctttgagagatttttcactcgttttttaatataaatcaaagtgattattggcggcagggcatgtcgtttcagtttgtggaggaaggttttttaacttctgttgaagcaaaaatctcggatgtcattgagaatgtcaa

SEQ ID NO: 551 - RNA, 220 nt, synthetic construct; identical to SEQ ID NO: 520
  source 1..220: mol_type = other RNA

SEQ ID NO: 552 - RNA, 220 nt, synthetic construct
  source 1..220: mol_type = other RNA
atgagatacgaatttgtcaggcagttgatatacaaacaagagtggctgggtggtgaaattattcgccgagagagtaaactcttgtaacggttttttccgtgatgatgttgtactatgtgatgaattttaagcggcagggcatgtcgtttctgcttgcggaggaaggttaattcaacttccgttgaagcaagaatctcttgattgttattgagaatgtcaa

SEQ ID NO: 553 - RNA, 220 nt, synthetic construct; identical to SEQ ID NO: 516
  source 1..220: mol_type = other RNA

SEQ ID NO: 554 - RNA, 220 nt, synthetic construct; identical to SEQ ID NO: 509
  source 1..220: mol_type = other RNA

SEQ ID NO: 555 - RNA, 220 nt, synthetic construct
  source 1..220: mol_type = other RNA
acttgttaggcaattattgtataaacaggaatggttaggtgggaaaataattcatctagatgcttagtatttattaaatatcctttgagagatttttcactcgttttttaatataaatcaaagtgattattggcggcagggcatgtcgtttcagtttgtggaggaaggtttttttaacttctgttgaagcaaaaatctcggatgtcattgagaatgtcaa

SEQ ID NO: 556 - RNA, 220 nt, synthetic construct
  source 1..220: mol_type = other RNA
gttagacagttaatgtataaacaagaatggttaggtggtcaggtaattcggttaggcgattagcgtagtttattaatgattaaataagagttatatacagctgtttatatgaccttagatgaattgctggcggcagggcatgtcgtgtcagtttgtggaggggggttatttcaacttccgatgaagcaaaaatctcggttattagtactgagaatgtcaa

SEQ ID NO: 557 - RNA, 220 nt, synthetic construct; identical to SEQ ID NO: 520
  source 1..220: mol_type = other RNA

SEQ ID NO: 558 - RNA, 220 nt, synthetic construct
  source 1..220: mol_type = other RNA
acttgttaggcaattattgtataaacaggaatggttaggtggggaaataattcatctggatgcttagtttttattaaatatcctttgagagatttttcactcgttttttaatataaatcaaagtgattattggcggcagggcatgtcgtttcagtttgtggaggaaggtttttttaacttctgttgaagcaaaaatctcggatgtcattgagaatgtcaa

SEQ ID NO: 559 - RNA, 220 nt, synthetic construct; identical to SEQ ID NO: 513
  source 1..220: mol_type = other RNA

SEQ ID NO: 560 - RNA, 220 nt, synthetic construct; identical to SEQ ID NO: 520
  source 1..220: mol_type = other RNA

SEQ ID NO: 561 - RNA, 220 nt, synthetic construct; identical to SEQ ID NO: 558
  source 1..220: mol_type = other RNA

SEQ ID NO: 562 - RNA, 220 nt, synthetic construct; identical to SEQ ID NO: 528
  source 1..220: mol_type = other RNA

SEQ ID NO: 563 - RNA, 220 nt, synthetic construct; identical to SEQ ID NO: 525
  source 1..220: mol_type = other RNA

SEQ ID NO: 564 - RNA, 220 nt, synthetic construct; identical to SEQ ID NO: 525
  source 1..220: mol_type = other RNA

SEQ ID NO: 565 - RNA, 220 nt, synthetic construct
  source 1..220: mol_type = other RNA
cactctgagtatgagatacgaatttgtcaggcaattgatatacaaacaagaatggctgggtggtgaagttattcgccgggagagtaaacccttgtaaggtgttttcagtgataaggtagtatatgatgaagtttaagcggcagggcatgtcgtttctgcttgtggaggaaggttaatttaacttccgttgaagcaagaatctcataattgagaatgtcaa

SEQ ID NO: 566 - RNA, 220 nt, synthetic construct
  source 1..220: mol_type = other RNA
atgagatacgaatttgtcaggcagttgatatacaaacaagagtggctgggtggtgaaattattcgccgagagagtaaactcttgtaacggttttttccgtgatgatgttgtactatgtgatgaattttaagcggcagggcatgtcgtttctgcttgtggaggaaggttaattcaacttccgttgaagcaagaatctcttgattgttattgagaatgtcaa

SEQ ID NO: 567 - RNA, 220 nt, synthetic construct
  source 1..220: mol_type = other RNA
atgagatacgaatttgtcaggcagttgatatacaaacaagagtggctgggtggtgaaattattcgccgagagagtaaactcttgtaacggttttttccgtgatgatgttgtactatgtgatgaattttaagcggcagggcatgtcgtttctgcttgtggaggaaggttaattcaacttccgttgaagcaagaatctctagattgttattgagaatgtcaa

SEQ ID NO: 568 - RNA, 220 nt, synthetic construct
  source 1..220: mol_type = other RNA
tcggccagaaaaactaagccactaccaatcaatttcaaaccatacgagtttttgaggcaaataacatacaaacagtcatggaatggtggttctgtatgtatggagcagtcttagcacattaaagataattggcggcagggcatgccgtcgttacctgtggagggttctttcaaggactcgctgaagcaggaaacctgatattttcaaggcaggaagtcaa

SEQ ID NO: 569 - RNA, 220 nt, synthetic construct; identical to SEQ ID NO: 516
  source 1..220: mol_type = other RNA

SEQ ID NO: 570 - RNA, 220 nt, synthetic construct; identical to SEQ ID NO: 568
  source 1..220: mol_type = other RNA

SEQ ID NO: 571 - RNA, 220 nt, synthetic construct
  source 1..220: mol_type = other RNA
tgagatacgaatttgtcaggcagttgatatacaaacaagaatggctgggtggtgaaattattcgccggtagagtaagctcttgtaacggttttttccgtgatgatagttgtactatgagatgagttttaagcggcagggcatgtcgtttctgcttgtggaggaaggttaattcaacttccgttgaagcaagaatctcttgattgtgattgagaatgtcaa

SEQ ID NO: 572 - RNA, 220 nt, synthetic construct; identical to SEQ ID NO: 568
  source 1..220: mol_type = other RNA

SEQ ID NO: 573 - RNA, 220 nt, synthetic construct; identical to SEQ ID NO: 523
  source 1..220: mol_type = other RNA

SEQ ID NO: 574 - RNA, 220 nt, synthetic construct; identical to SEQ ID NO: 523
  source 1..220: mol_type = other RNA

SEQ ID NO: 575 - RNA, 220 nt, synthetic construct
  source 1..220: mol_type = other RNA
tatgagatacgaatttgtcaggcagttgatatacaaacaagagtggctgggtggtgaaattattcgccgagagagtaaactcttgtaacggttttttccgtgatgatgttgtactatgtgatgaattttaagcggcagggcatgtcgttctgcttgtggaggaaggttaattcaacttccgttgaagcaagaatctcttgattgttattgagaatgtcaa

SEQ ID NO: 576 - RNA, 220 nt, synthetic construct; identical to SEQ ID NO: 565
  source 1..220: mol_type = other RNA

SEQ ID NO: 577 - RNA, 220 nt, synthetic construct; identical to SEQ ID NO: 521
  source 1..220: mol_type = other RNA

SEQ ID NO: 578 - RNA, 220 nt, synthetic construct
  source 1..220: mol_type = other RNA
tcggccagaaaaactagcccactaccggtcaatttcaaaccatacgagtttttgaggcaactaaaatacaagcagtcatggaacggtggttctgtatgtgtggagcagacttagcacattaaagataattggcggcagggcatgccgtcgttacctgtggagagtactttcaagtgctcgttgaagcaggaaacctgttattttcaaggcaggaagtcaa

SEQ ID NO: 579 - RNA, 220 nt, synthetic construct; identical to SEQ ID NO: 566
  source 1..220: mol_type = other RNA

SEQ ID NO: 580 - RNA, 220 nt, synthetic construct; identical to SEQ ID NO: 524
  source 1..220: mol_type = other RNA

SEQ ID NO: 581 - RNA, 220 nt, synthetic construct
  source 1..220: mol_type = other RNA
gtgcacgagcacgacaacaatctgaagcaagttgaagctgacagtgcttgcaccgcctatggtgcaataagagctaagaaaattttagcggcagggcatgccgtgattgcctgtggaggagtggatatgttgcgccatccgttgaagcaggaaccctcagaagataatggtagtaccgctatcttactgtaagctcggtttagtccgcgccggatgtcaa

SEQ ID NO: 582 - RNA, 220 nt, synthetic construct
  source 1..220: mol_type = other RNA
cgtgcgcgaacgcgataacaatttcaagccagtttcagataacgcctcaagcaacctttatggcaggcttagggctgagaagattctagcggcagggcatgccgttattgcctgtggaggagcggagtttttaggccatccgatgaaacaggaaccctcagaagatggcaaaagcaccgttatcttgctgtaagctcgggttatccgcgccggatgtcaa

SEQ ID NO: 583 - RNA, 220 nt, synthetic construct
  source 1..220: mol_type = other RNA
cgtgcgcgaacgcgataacaatttcaagccagtttcagatgacgcctcaagcaaccattatggcaagctaagggctgaaaggattttagcggcagggcatgccgttattgcctgtggaggagcggagttattaggccatccgatgaaacaggaaccctcagaagatggcaaaagcaccgccaacttgctgtaagttcggattatccgcgccggatgtcaa

SEQ ID NO: 584 - RNA, 220 nt, synthetic construct
  source 1..220: mol_type = other RNA
cgtgtgcgaacgcgatgacaacttaaagccaattatagatgatgcctcaagcaaccattatggcaggcttagggctgagaagattttagcggcagggcatgccgttattgcctgtggaggagcggatttgttaggccatccgatgaaacaggaaccctcagaagatggcaaaagcaccgttatcttactgtaagctcgggttatccgcgccggatgtcaa

SEQ ID NO: 585 - RNA, 220 nt, synthetic construct; identical to SEQ ID NO: 520
  source 1..220: mol_type = other RNA

SEQ ID NO: 586 - RNA, 220 nt, synthetic construct; identical to SEQ ID NO: 536
  source 1..220: mol_type = other RNA

SEQ ID NO: 587 - RNA, 220 nt, synthetic construct; identical to SEQ ID NO: 511
  source 1..220: mol_type = other RNA

SEQ ID NO: 588 - RNA, 220 nt, synthetic construct; identical to SEQ ID NO: 528
  source 1..220: mol_type = other RNA

SEQ ID NO: 589 - RNA, 220 nt, synthetic construct; identical to SEQ ID NO: 513
  source 1..220: mol_type = other RNA

SEQ ID NO: 590 - RNA, 220 nt, synthetic construct; identical to SEQ ID NO: 556
  source 1..220: mol_type = other RNA

SEQ ID NO: 591 - RNA, 220 nt, synthetic construct
  source 1..220: mol_type = other RNA
cgcctgtcacaaagtcaattcagatgccaggtatgtggatatacagcgaacgccgatgtaaacggcgctcgtaacattttagcggcggggcacgccgttcttgcctgtggagagatggtgcagtcaggccgctcgttgaagcaggaacccaccgaaatgattcaggcgacagcctgaacgtagcagggatcctcgtcattcagggcgtggaggatgtcaa

SEQ ID NO: 592 - RNA, 220 nt, synthetic construct
  source 1..220: mol_type = other RNA
aaagtaaattcagatgccaggtatgtggatatacagcgaacgccgatgtaaacggcgctcgtaacattttagcggcgggacacgccgttcttgcctgtggagagatggtgcagtcaggccgctcgttgaagcaggaacccaccgaaataattcaggcgacagcctgaacgtagcagggannnnnnnnnntccacgtccttcagggcgtggaggatgtcaa

SEQ ID NO: 593 - RNA, 220 nt, synthetic construct; identical to SEQ ID NO: 512
  source 1..220: mol_type = other RNA

SEQ ID NO: 594 - RNA, 220 nt, synthetic construct; identical to SEQ ID NO: 509
  source 1..220: mol_type = other RNA

SEQ ID NO: 595 - RNA, 220 nt, synthetic construct; identical to SEQ ID NO: 525
  source 1..220: mol_type = other RNA

SEQ ID NO: 596 - RNA, 220 nt, synthetic construct; identical to SEQ ID NO: 566
  source 1..220: mol_type = other RNA

SEQ ID NO: 597 - RNA, 220 nt, synthetic construct; identical to SEQ ID NO: 525
  source 1..220: mol_type = other RNA

SEQ ID NO: 598 - RNA, 128 nt, synthetic construct
  source 1..128: mol_type = other RNA
gggggttcagtgataatgtagtatatgatgaattttaagcggcagggcatgtcgtttctgcttgtggaggaaggttaattcaacttccgttgaagcaagaatctcttgattgttattgagaatgtcaa

SEQ ID NO: 599 - RNA, 128 nt, synthetic construct
  source 1..128: mol_type = other RNA
gggggttcggtgataatgtagtatatgatgaattttaagcggcagggcatgtcgtttctgcttgtggaggaaggttaattcaacttccgttgaagcaagaatctcttgattgttattgagaatgtcaa

SEQ ID NO: 600 - RNA, 23 nt, synthetic construct
  source 1..23: mol_type = other RNA
gtcagcaacgactgggaagtcaa

SEQ ID NO: 601 - RNA, 133 nt, synthetic construct
  source 1..133: mol_type = other RNA
cggttttttccgtgatgatgttgtactatgtgatgaattttaagcggcagggcatgtcgtttctgcttgtggaggaaggttaattcaacttccgttgaagcaagaatctcttgattgttattgagaatgtcaa

SEQ ID NO: 602 - RNA, 157 nt, synthetic construct
  source 1..157: mol_type = other RNA
cgtagtttattaatgattaaataagagttatatacagctgtttatatggccttagataaattgctggcggcagggcatgtcgtgtcagtttgtggaggggggttatttcaacttccgatgaagcaaaaatctcggttattgatactgagaatgtcaa

SEQ ID NO: 603 - RNA, 157 nt, synthetic construct; identical to SEQ ID NO: 602
  source 1..157: mol_type = other RNA

SEQ ID NO: 604 - RNA, 133 nt, synthetic construct
  source 1..133: mol_type = other RNA
cggttttttccgtgatgatgttgtactatgtgatgaattttaagcggcagggcatgtcgtttctgcttgtggaggagggttaattcaacctccgttgaagcaagaatctcttgattgttattgagaacgtcaa

SEQ ID NO: 605 - RNA, 133 nt, synthetic construct
  source 1..133: mol_type = other RNA
cggttttttccgtgatgatgttgtactatgtgacgaattttaagcggcagggcatgtcgtttctgcttgtggaggaaggttaattcaacttccgttgaagcaagaatctcttgattgttattgagaatgtcaa

SEQ ID NO: 606 - RNA, 133 nt, synthetic construct; identical to SEQ ID NO: 605
  source 1..133: mol_type = other RNA

SEQ ID NO: 607 - RNA, 123 nt, synthetic construct
  source 1..123: mol_type = other RNA
agggttttcagtgataatgtggtatatgatgaattttaagcggcagggcatgtcgtttctgcttgtggaggaagtttaatttaacttccgttgaagcaagaatctcataatcgagaatgtcaa

SEQ ID NO: 608 - RNA, 123 nt, synthetic construct; identical to SEQ ID NO: 607
  source 1..123: mol_type = other RNA

SEQ ID NO: 609 - RNA, 133 nt, synthetic construct; identical to SEQ ID NO: 601
  source 1..133: mol_type = other RNA

SEQ ID NO: 610 - RNA, 134 nt, synthetic construct
  source 1..134: mol_type = other RNA
cggtttttttccgtgatgatgttgtactatgtgatgaattttaagcggcagggcatgtcgtttatgcttgtggaggaaggttaattcaacttccgttgaagcaagaatctcttgattgttattgagaatgtcaa

SEQ ID NO: 611 - RNA, 134 nt, synthetic construct; identical to SEQ ID NO: 610
  source 1..134: mol_type = other RNA

SEQ ID NO: 612 - RNA, 133 nt, synthetic construct
  source 1..133: mol_type = other RNA
cggttttttccgtgatgatgttgtactatgtgatgaattttaagcggcagggcatgtcgtttatgcttgtggaggaaggttaattcaacttccgttgaagcaagaatctcttgattgttattgagaatgtcaa

SEQ ID NO: 613 - RNA, 136 nt, synthetic construct
  source 1..136: mol_type = other RNA
taacgcctgttttcgagatgatgtagtactaaatgatgaaatttatgcggcagggcatgtcgtttctgcttgtcgaggaaggttacttaaacttccgttgaagcaagaatctcatgattgcatctgagagtgtcaa

SEQ ID NO: 614 - RNA, 123 nt, synthetic construct
  source 1..123: mol_type = other RNA
cgggttttcagtggtgatgtagtatatgatgaatgttaagcggcagggcatgtcgtttctgcttgtggaggaaggttaatttaacttccgttgaagcaagaatctcaaaattgagaatgtcaa

SEQ ID NO: 615 - RNA, 148 nt, synthetic construct
  source 1..148: mol_type = other RNA
agtcaacttttgtaacggttttttccgtgatgatgttgtactttgtgatgagttttaagcggcagggcatgtcgtttgtgcttgtggaggaaggttaattcaacttccgttgaagcaagaatctcttgattgtgaatgagaatgtcaa

SEQ ID NO: 616 - RNA, 148 nt, synthetic construct
  source 1..148: mol_type = other RNA
agtcaacttttgtaacggttttttttgtgatgatgttgtactttgtgatgagttttaagcggcagggcatgtcgtttgtgcttgtggaggaaggttaattcaacttccgttgaagcaagaatctcttgattgtgaatgagaatgtcaa

SEQ ID NO: 617 - RNA, 153 nt, synthetic construct
  source 1..153: mol_type = other RNA
tatttattaaatatcctttgagagatttttcactcgttttttaatataaatcaaagtgattattggcggcagggcatgtcgtttcagtttgtggaggaaggtttttttaacttctgttgaagcaaaaatctcggatgtcattgagaatgtcaa

SEQ ID NO: 618 - RNA, 152 nt, synthetic construct
  source 1..152: mol_type = other RNA
tatttattaaatatcctttgagagattttgcctggttttttaatataaatcaaagtgattattggcggcagggcatgtcgtttcagtttgtggaggaaggtttttttaacttctgttgaagcaaaaatctcggatgtcattgagaatgtcaa

SEQ ID NO: 619 - RNA, 144 nt, synthetic construct
  source 1..144: mol_type = other RNA
aaaaaatgtagatgctgaaagttcgtggactaaagcatgtaatttattggcggcagggcttgccgtcactgcctgtggaggagaggtggcaaaacactctccaatgaagcaggaaccctaagtcagcaacgactgggaagtcaa

SEQ ID NO: 620 - RNA, 144 nt, synthetic construct
  source 1..144: mol_type = other RNA
aaaaaatgtagatgctgaaagttcgtggactaaagcatgtaatttattggcggcagggcttgccgtcactgcctgtggaggagaggtggcaaaacactctccaatgaagcaggaaccctaaatcagcaacgactgggaagtcaa

SEQ ID NO: 621 - RNA, 144 nt, synthetic construct; identical to SEQ ID NO: 619
  source 1..144: mol_type = other RNA

SEQ ID NO: 622 - RNA, 133 nt, synthetic construct; identical to SEQ ID NO: 601
  source 1..133: mol_type = other RNA

SEQ ID NO: 623 - RNA, 123 nt, synthetic construct
  source 1..123: mol_type = other RNA
agggttttcagtgataatgtagtatatgatgaattttaagcggcagggcatgtcgtttctgcttgtggaggaaggttaatttaacttccgttgaaacaagaatctcaaaattgagaatgtcaa

SEQ ID NO: 624 - RNA, 133 nt, synthetic construct; identical to SEQ ID NO: 601
  source 1..133: mol_type = other RNA

SEQ ID NO: 625 - RNA, 153 nt, synthetic construct
  source 1..153: mol_type = other RNA
tttttattaaatatcctttgagatatttttcacccgttttttaatataaatcaaagtgattattggcggcagggcatgtcgtttcagtttgttgaggaaggtttttttaacttctgttgaagcaaaaatctcgaatgttattgagaatgtcaa

SEQ ID NO: 626 - RNA, 23 nt, synthetic construct
  source 1..23: mol_type = other RNA
gtcagtaatggccgggaagtcaa

SEQ ID NO: 627 - RNA, 106 nt, synthetic construct
  source 1..106: mol_type = other RNA
cacattaaagataattggcggcagggcatgccgtcgttacctgtggagagtactttcaagtgctcgttgaagcagaaaacctgttattttcaaggcaggaagtcaa

SEQ ID NO: 628 - RNA, 153 nt, synthetic construct
  source 1..153: mol_type = other RNA
tttttattaaatatcctttgagatatttttcacccgttttttaatataaatcaaagtgattattggcggcagggcatgtcgtttcagtttgtggaggaaggtttttttaacttctgttgaagcaaaaatctcgaatgttattgagaatgtcaa

SEQ ID NO: 629 - RNA, 153 nt, synthetic construct; identical to SEQ ID NO: 625
  source 1..153: mol_type = other RNA

SEQ ID NO: 630 - RNA, 153 nt, synthetic construct; identical to SEQ ID NO: 625
  source 1..153: mol_type = other RNA

SEQ ID NO: 631 - RNA, 153 nt, synthetic construct; identical to SEQ ID NO: 625
  source 1..153: mol_type = other RNA

SEQ ID NO: 632 - RNA, 133 nt, synthetic construct; identical to SEQ ID NO: 601
  source 1..133: mol_type = other RNA

SEQ ID NO: 633 - RNA, 160 nt, synthetic construct
  source 1..160: mol_type = other RNA
cgtagtttattaatgattaaataagagttatatacagctgtttatatgaccttagatgaattgctggcggcagggcatgtcgtgtcagtttgtggagggggggggttatttcaacttccgatgaagcaaaaatctcggttattagtactgagaatgtcaa

SEQ ID NO: 634 - RNA, 144 nt, synthetic construct; identical to SEQ ID NO: 619
  source 1..144: mol_type = other RNA

SEQ ID NO: 635 - RNA, 152 nt, synthetic construct
  source 1..152: mol_type = other RNA
ttttgattaaatcctttggtgagtttttttcatccgttttttagtataatcaaagtgattattggcggcagggcatgtcgtttcagtttgtggaggaaggtttttttaacttctgttgaagcaaaaatctcggatgttattgagaatgtcaa

SEQ ID NO: 636 - RNA, 134 nt, synthetic construct; identical to SEQ ID NO: 610
  source 1..134: mol_type = other RNA

SEQ ID NO: 637 - RNA, 23 nt, synthetic construct
  source 1..23: mol_type = other RNA
gtcagcaacgactgggaagtcaa

SEQ ID NO: 638 - RNA, 153 nt, synthetic construct; identical to SEQ ID NO: 617
  source 1..153: mol_type = other RNA

SEQ ID NO: 639 - RNA, 152 nt, synthetic construct
  source 1..152: mol_type = other RNA
tatttattaaatatcctttgagagatttttcactcgttttttaatataaatcaaagtgattattggcggcagggcatgtcgtttcagtttgtggaggaaggttttttaacttctgttgaagcaaaaatctcggatgtcattgagaatgtcaa

SEQ ID NO: 640 - RNA, 133 nt, synthetic construct; identical to SEQ ID NO: 601
  source 1..133: mol_type = other RNA

SEQ ID NO: 641 - RNA, 133 nt, synthetic construct
  source 1..133: mol_type = other RNA
cggttttttccgtgatgatgttgtactatgtgatgaattttaagcggcagggcatgtcgtttctgcttgcggaggaaggttaattcaacttccgttgaagcaagaatctcttgattgttattgagaatgtcaa

SEQ ID NO: 642 - RNA, 133 nt, synthetic construct; identical to SEQ ID NO: 605
  source 1..133: mol_type = other RNA

SEQ ID NO: 643 - RNA, 128 nt, synthetic construct; identical to SEQ ID NO: 598
  source 1..128: mol_type = other RNA

SEQ ID NO: 644 - RNA, 153 nt, synthetic construct; identical to SEQ ID NO: 617
  source 1..153: mol_type = other RNA

SEQ ID NO: 645 - RNA, 157 nt, synthetic construct
  source 1..157: mol_type = other RNA
cgtagtttattaatgattaaataagagttatatacagctgtttatatgaccttagatgaattgctggcggcagggcatgtcgtgtcagtttgtggaggggggttatttcaacttccgatgaagcaaaaatctcggttattagtactgagaatgtcaa

SEQ ID NO: 646 - RNA, 133 nt, synthetic construct; identical to SEQ ID NO: 601
  source 1..133: mol_type = other RNA

SEQ ID NO: 647 - RNA, 153 nt, synthetic construct
  source 1..153: mol_type = other RNA
tttttattaaatatcctttgagagatttttcactcgttttttaatataaatcaaagtgattattggcggcagggcatgtcgtttcagtttgtggaggaaggtttttttaacttctgttgaagcaaaaatctcggatgtcattgagaatgtcaa

SEQ ID NO: 648 - RNA, 157 nt, synthetic construct; identical to SEQ ID NO: 602
  source 1..157: mol_type = other RNA

SEQ ID NO: 649 - RNA, 133 nt, synthetic construct; identical to SEQ ID NO: 601
  source 1..133: mol_type = other RNA

SEQ ID NO: 650 - RNA, 153 nt, synthetic construct; identical to SEQ ID NO: 647
  source 1..153: mol_type = other RNA

SEQ ID NO: 651 - RNA, 153 nt, synthetic construct; identical to SEQ ID NO: 617
  source 1..153: mol_type = other RNA

SEQ ID NO: 652 - RNA, 123 nt, synthetic construct; identical to SEQ ID NO: 614
  source 1..123: mol_type = other RNA

SEQ ID NO: 653 - RNA, 123 nt, synthetic construct; identical to SEQ ID NO: 614
  source 1..123: mol_type = other RNA

SEQ ID NO: 654 - RNA, 123 nt, synthetic construct
  source 1..123: mol_type = other RNA
ggtgttttcagtgataaggtagtatatgatgaagtttaagcggcagggcatgtcgtttctgcttgtggaggaaggttaatttaacttccgttgaagcaagaatctcataattgagaatgtcaa

SEQ ID NO: 655 - RNA, 133 nt, synthetic construct; identical to SEQ ID NO: 601
  source 1..133: mol_type = other RNA

SEQ ID NO: 656 - RNA, 133 nt, synthetic construct
  source 1..133: mol_type = other RNA
cggttttttccgtgatgatgttgtactatgtgatgaattttaagcggcagggcatgtcgtttctgcttgtggaggaaggttaattcaacttccgttgaagcaagaatctctagattgttattgagaatgtcaa

SEQ ID NO: 657 - RNA, 106 nt, synthetic construct
  source 1..106: mol_type = other RNA
cacattaaagataattggcggcagggcatgccgtcgttacctgtggagggttctttcaaggactcgctgaagcaggaaacctgatattttcaaggcaggaagtcaa

SEQ ID NO: 658 - RNA, 133 nt, synthetic construct; identical to SEQ ID NO: 605
  source 1..133: mol_type = other RNA

SEQ ID NO: 659 - RNA, 106 nt, synthetic construct; identical to SEQ ID NO: 657
  source 1..106: mol_type = other RNA

SEQ ID NO: 660 - RNA, 149 nt, synthetic construct
  source 1..149: mol_type = other RNA
agtaagctcttgtaacggttttttccgtgatgatagttgtactatgagatgagttttaagcggcagggcatgtcgtttctgcttgtggaggaaggttaattcaacttccgttgaagcaagaatctcttgattgtgattgagaatgtcaa

SEQ ID NO: 661 - RNA, 106 nt, synthetic construct; identical to SEQ ID NO: 657
  source 1..106: mol_type = other RNA

SEQ ID NO: 662 - RNA, 133 nt, synthetic construct; identical to SEQ ID NO: 612
  source 1..133: mol_type = other RNA

SEQ ID NO: 663 - RNA, 133 nt, synthetic construct; identical to SEQ ID NO: 612
  source 1..133: mol_type = other RNA

SEQ ID NO: 664 - RNA, 132 nt, synthetic construct
  source 1..132: mol_type = other RNA
cggttttttccgtgatgatgttgtactatgtgatgaattttaagcggcagggcatgtcgttctgcttgtggaggaaggttaattcaacttccgttgaagcaagaatctcttgattgttattgagaatgtcaa

SEQ ID NO: 665 - RNA, 123 nt, synthetic construct; identical to SEQ ID NO: 654
  source 1..123: mol_type = other RNA

SEQ ID NO: 666 - RNA, 134 nt, synthetic construct; identical to SEQ ID NO: 610
  source 1..134: mol_type = other RNA

SEQ ID NO: 667 - RNA, 106 nt, synthetic construct
  source 1..106: mol_type = other RNA
cacattaaagataattggcggcagggcatgccgtcgttacctgtggagagtactttcaagtgctcgttgaagcaggaaacctgttattttcaaggcaggaagtcaa

SEQ ID NO: 668 - RNA, 133 nt, synthetic construct; identical to SEQ ID NO: 601
  source 1..133: mol_type = other RNA

SEQ ID NO: 669 - RNA, 136 nt, synthetic construct; identical to SEQ ID NO: 613
  source 1..136: mol_type = other RNA

SEQ ID NO: 670 - RNA, 28 nt, synthetic construct
  source 1..28: mol_type = other RNA
gctcggtttagtccgcgccggatgtcaa

SEQ ID NO: 671 - RNA, 27 nt, synthetic construct
  source 1..27: mol_type = other RNA
gctcgggttatccgcgccggatgtcaa

SEQ ID NO: 672 - RNA, 27 nt, synthetic construct
  source 1..27: mol_type = other RNA
gttcggattatccgcgccggatgtcaa

SEQ ID NO: 673 - RNA, 27 nt, synthetic construct
  source 1..27: mol_type = other RNA
gctcgggttatccgcgccggatgtcaa

SEQ ID NO: 674 - RNA, 133 nt, synthetic construct; identical to SEQ ID NO: 601
  source 1..133: mol_type = other RNA

SEQ ID NO: 675 - RNA, 153 nt, synthetic construct; identical to SEQ ID NO: 625
  source 1..153: mol_type = other RNA

SEQ ID NO: 676 - RNA, 23 nt, synthetic construct
  source 1..23: mol_type = other RNA
gtcagcaacgactgggaagtcaa

SEQ ID NO: 677 - RNA, 153 nt, synthetic construct; identical to SEQ ID NO: 617
  source 1..153: mol_type = other RNA

SEQ ID NO: 678 - RNA, 157 nt, synthetic construct; identical to SEQ ID NO: 602
  source 1..157: mol_type = other RNA

SEQ ID NO: 679 - RNA, 157 nt, synthetic construct; identical to SEQ ID NO: 645
  source 1..157: mol_type = other RNA

SEQ ID NO: 680 - RNA, 368 nt, synthetic construct
  source 1..368: mol_type = other RNA
accgttcgatactggatcagggctggtatatgaaatgcgccgccagcttgagtacaagcagctctggcgtggcggtcaggtgcttgctgttccgccagcgtacacaagccagcgttgcgcgtgctgtggtcatacagcgaaagaaaatcgcctgtcacaaagtcaattcagatgccaggtatgtggatatacagcgaacgccgatgtaaacggcgctcgtaacattttagcggcggggcacgccgttcttgcctgtggagagatggtgcagtcaggccgctcgttgaagcaggaacccaccgaaatgattcaggcgacagcctgaacgtagcagggatcctcgtcattcagggcgtggaggatgtcaa

SEQ ID NO: 681 - RNA, 321 nt, synthetic construct
  source 1..321: mol_type = other RNA
nnnnnnnnnncgtggcggtcaggtgcttgctgtttcgccagcgtacacaagccagcgttgcacgtgctgtggtcatacagcgaaagaaaatcgcctgtcacaaagtaaattcagatgccaggtatgtggatatacagcgaacgccgatgtaaacggcgctcgtaacattttagcggcgggacacgccgttcttgcctgtggagagatggtgcagtcaggccgctcgttgaagcaggaacccaccgaaataattcaggcgacagcctgaacgtagcagggannnnnnnnnntccacgtccttcagggcgtggaggatgtcaa

SEQ ID NO: 682 - RNA, 133 nt, synthetic construct; identical to SEQ ID NO: 601
  source 1..133: mol_type = other RNA

SEQ ID NO: 683 - RNA, 128 nt, synthetic construct; identical to SEQ ID NO: 598
  source 1..128: mol_type = other RNA

SEQ ID NO: 684 - RNA, 123 nt, synthetic construct; identical to SEQ ID NO: 614
  source 1..123: mol_type = other RNA

SEQ ID NO: 685 - RNA, 133 nt, synthetic construct; identical to SEQ ID NO: 601
  source 1..133: mol_type = other RNA

SEQ ID NO: 686 - RNA, 123 nt, synthetic construct; identical to SEQ ID NO: 614
  source 1..123: mol_type = other RNA

SEQ ID NO: 687 - RNA, 20 nt, synthetic construct
  source 1..20: mol_type = other RNA
cgtctggtccaatactttac

SEQ ID NO: 688 - RNA, 20 nt, synthetic construct
  source 1..20: mol_type = other RNA
cgtctggtccaatactttac

SEQ ID NO: 689 - RNA, 20 nt, synthetic construct
  source 1..20: mol_type = other RNA
cgtctggtcattttttaaaa

SEQ ID NO: 690 - RNA, 20 nt, synthetic construct
  source 1..20: mol_type = other RNA
cgtctggtccaatactttac

SEQ ID NO: 691 - RNA, 20 nt, synthetic construct
  source 1..20: mol_type = other RNA
cgtctggtcaatactttggc

SEQ ID NO: 692 - RNA, 20 nt, synthetic construct
  source 1..20: mol_type = other RNA
cgtctggtcaatactttggc

SEQ ID NO: 693 - RNA, 20 nt, synthetic construct
  source 1..20: mol_type = other RNA
cgtctggtccaatactttac

SEQ ID NO: 694 - RNA, 20 nt, synthetic construct
  source 1..20: mol_type = other RNA
cgtctggtccaatactttac

SEQ ID NO: 695 - RNA, 20 nt, synthetic construct
  source 1..20: mol_type = other RNA
cgtctggtccaatactttaa

SEQ ID NO: 696 - RNA, 20 nt, synthetic construct
  source 1..20: mol_type = other RNA
cgtctggtccaatactttac

SEQ ID NO: 697 - RNA, 20 nt, synthetic construct
  source 1..20: mol_type = other RNA
cgtctggtccaatactttac

SEQ ID NO: 698 - RNA, 20 nt, synthetic construct
  source 1..20: mol_type = other RNA
cgtctggtccaatactttac

SEQ ID NO: 699 - RNA, 20 nt, synthetic construct
  source 1..20: mol_type = other RNA
cgtctggtccaatactttac

SEQ ID NO: 700 - RNA, 20 nt, synthetic construct
  source 1..20: mol_type = other RNA
cgtctggtccaatactttac

SEQ ID NO: 701 - RNA, 20 nt, synthetic construct
  source 1..20: mol_type = other RNA
cgtctggtccaatactttac

SEQ ID NO: 702 - RNA, 20 nt, synthetic construct
  source 1..20: mol_type = other RNA
cgtctggtccaatatgttta

SEQ ID NO: 703 - RNA, 20 nt, synthetic construct
  source 1..20: mol_type = other RNA
cgtctggtccaatactttac

SEQ ID NO: 704 - RNA, 20 nt, synthetic construct
  source 1..20: mol_type = other RNA
cgtctggtccaatgctttac

SEQ ID NO: 705 - RNA, 20 nt, synthetic construct
  source 1..20: mol_type = other RNA
cgtctggtccaatgctttac

SEQ ID NO: 706 - RNA, 20 nt, synthetic construct
  source 1..20: mol_type = other RNA
cgtctggtccaatactaatt

SEQ ID NO: 707 - RNA, 20 nt, synthetic construct
  source 1..20: mol_type = other RNA
cgtctggtccaatactaatt

SEQ ID NO: 708 - RNA, 20 nt, synthetic construct
  source 1..20: mol_type = other RNA
cgtctggtctttttttttga

SEQ ID NO: 709 - RNA, 20 nt, synthetic construct
  source 1..20: mol_type = other RNA
cgtctggtctttttttttga

SEQ ID NO: 710 - RNA, 20 nt, synthetic construct
  source 1..20: mol_type = other RNA
cgtctggtctttttttttga

SEQ ID NO: 711 - RNA, 20 nt, synthetic construct
  source 1..20: mol_type = other RNA
cgtctggtccaatactttac

SEQ ID NO: 712 - RNA, 20 nt, synthetic construct
  source 1..20: mol_type = other RNA
cgtctggtccaatactttac

SEQ ID NO: 713 - RNA, 20 nt, synthetic construct
  source 1..20: mol_type = other RNA
cgtctggtccaatactttac

SEQ ID NO: 714 - RNA, 20 nt, synthetic construct
  source 1..20: mol_type = other RNA
cgtctggtccaataccaatt

SEQ ID NO: 715 - RNA, 20 nt, synthetic construct
  source 1..20: mol_type = other RNA
cgtctggttcttttttaaaa

SEQ ID NO: 716 - RNA, 20 nt, synthetic construct
  source 1..20: mol_type = other RNA
cgtctggttactttaacaaa

SEQ ID NO: 717 - RNA, 20 nt, synthetic construct
  source 1..20: mol_type = other RNA
cgtctggtccaataccaatt

SEQ ID NO: 718 - RNA, 20 nt, synthetic construct
  source 1..20: mol_type = other RNA
cgtctggtccaataccaatt

SEQ ID NO: 719 - RNA, 20 nt, synthetic construct
  source 1..20: mol_type = other RNA
cgtctggtccaataccaatt

SEQ ID NO: 720 - RNA, 20 nt, synthetic construct
  source 1..20: mol_type = other RNA
cgtctggtccaataccaatt

SEQ ID NO: 721 - RNA, 20 nt, synthetic construct
  source 1..20: mol_type = other RNA
cgtctggtccaatactttac

SEQ ID NO: 722 - RNA, 20 nt, synthetic construct
  source 1..20: mol_type = other RNA
cgtctggtcaatactttggc

SEQ ID NO: 723 - RNA, 20 nt, synthetic construct
  source 1..20: mol_type = other RNA
cgtctggtctttttttttga

SEQ ID NO: 724 - RNA, 20 nt, synthetic construct
  source 1..20: mol_type = other RNA
cgtctggtccaatactaatt

SEQ ID NO: 725 - RNA, 20 nt, synthetic construct
  source 1..20: mol_type = other RNA
cgtctggtccaatactttac

SEQ ID NO: 726 - RNA, 20 nt, synthetic construct
  source 1..20: mol_type = other RNA
cgtctggtcatttttaaaaa

SEQ ID NO: 727 - RNA, 20 nt, synthetic construct
  source 1..20: mol_type = other RNA
cgtctggtccaatactaatt

SEQ ID NO: 728 - RNA, 20 nt, synthetic construct
  source 1..20: mol_type = other RNA
cgtctggtccaatactaatt

SEQ ID NO: 729 - RNA, 20 nt, synthetic construct
  source 1..20: mol_type = other RNA
cgtctggtccaatactttac

SEQ ID NO: 730 - RNA, 20 nt, synthetic construct
  source 1..20: mol_type = other RNA
cgtctggtccaatactttac

SEQ ID NO: 731 - RNA, 20 nt, synthetic construct
  source 1..20: mol_type = other RNA
cgtctggtccaatactttac

SEQ ID NO: 732 - RNA, 20 nt, synthetic construct
  source 1..20: mol_type = other RNA
cgtctggtccaatactttac

SEQ ID NO: 733 - RNA, 20 nt, synthetic construct
  source 1..20: mol_type = other RNA
cgtctggtccaatactaatt

SEQ ID NO: 734 - RNA, 20 nt, synthetic construct
  source 1..20: mol_type = other RNA
cgtctggtcaatactttggc

SEQ ID NO: 735 - RNA, 20 nt, synthetic construct
  source 1..20: mol_type = other RNA
cgtctggtccaatactttac

SEQ ID NO: 736 - RNA, 20 nt, synthetic construct
  source 1..20: mol_type = other RNA
cgtctggtccaatactaatt

SEQ ID NO: 737 - RNA, 20 nt, synthetic construct
  source 1..20: mol_type = other RNA
cgtctggtcaatactttggc

SEQ ID NO: 738 - RNA, 20 nt, synthetic construct
  source 1..20: mol_type = other RNA
cgtctggtccaatactttac

SEQ ID NO: 739 - RNA, 20 nt, synthetic construct
  source 1..20: mol_type = other RNA
cgtctggtccaatactaatt

SEQ ID NO: 740 - RNA, 20 nt, synthetic construct
  source 1..20: mol_type = other RNA
cgtctggtccaatactaatt

SEQ ID NO: 741 - RNA, 20 nt, synthetic construct
  source 1..20: mol_type = other RNA
cgtctggtccaatactttac

SEQ ID NO: 742 - RNA, 20 nt, synthetic construct
  source 1..20: mol_type = other RNA
cgtctggtccaatactttac

SEQ ID NO: 743 - RNA, 20 nt, synthetic construct
  source 1..20: mol_type = other RNA
cgtctggtccaatgctttac

SEQ ID NO: 744 - RNA, 20 nt, synthetic construct
  source 1..20: mol_type = other RNA
cgtctggtccaatactttac

SEQ ID NO: 745 - RNA, 20 nt, synthetic construct
  source 1..20: mol_type = other RNA
cgtctggtccaatactttac

SEQ ID NO: 746 - RNA, 20 nt, synthetic construct
  source 1..20: mol_type = other RNA
cgtctggttactttaacact

SEQ ID NO: 747 - RNA, 20 nt, synthetic construct
  source 1..20: mol_type = other RNA
cgtctggtccaatactttac

SEQ ID NO: 748 - RNA, 20 nt, synthetic construct
  source 1..20: mol_type = other RNA
cgtctggttactttaacact

SEQ ID NO: 749 - RNA, 20 nt, synthetic construct
  source 1..20: mol_type = other RNA
cgtctggtccaatgctttac

SEQ ID NO: 750 - RNA, 20 nt, synthetic construct
  source 1..20: mol_type = other RNA
cgtctggttactttaacact

SEQ ID NO: 751 - RNA, 20 nt, synthetic construct
  source 1..20: mol_type = other RNA
cgtctggtccaatactttac

SEQ ID NO: 752 - RNA, 20 nt, synthetic construct
  source 1..20: mol_type = other RNA
cgtctggtccaatactttac

SEQ ID NO: 753 - RNA, 20 nt, synthetic construct
  source 1..20: mol_type = other RNA
cgtctggtccaatactttac

SEQ ID NO: 754 - RNA, 20 nt, synthetic construct
  source 1..20: mol_type = other RNA
cgtctggtccaatgctttac

SEQ ID NO: 755 - RNA, 20 nt, synthetic construct
  source 1..20: mol_type = other RNA
cgtctggtccaatactttac

SEQ ID NO: 756 - RNA, 20 nt, synthetic construct
  source 1..20: mol_type = other RNA
cgtctggttactttaacaaa

SEQ ID NO: 757 - RNA, 20 nt, synthetic construct
  source 1..20: mol_type = other RNA
cgtctggtccaatactttac

SEQ ID NO: 758 - RNA, 20 nt, synthetic construct
  source 1..20: mol_type = other RNA
cgtctggtccaatatgttta

SEQ ID NO: 759 - RNA, 20 nt, synthetic construct
  source 1..20: mol_type = other RNA
cgtctgcccttaactttggt

SEQ ID NO: 760 - RNA, 20 nt, synthetic construct
  source 1..20: mol_type = other RNA
cgtctgcccttaactttgag

SEQ ID NO: 761 - RNA, 20 nt, synthetic construct
  source 1..20: mol_type = other RNA
cgtctgcccttaactttgag

SEQ ID NO: 762 - RNA, 20 nt, synthetic construct
  source 1..20: mol_type = other RNA
cgtctgcccttaactttgag

SEQ ID NO: 763 - RNA, 20 nt, synthetic construct
  source 1..20: mol_type = other RNA
cgtctggtccaatactttac

SEQ ID NO: 764 - RNA, 20 nt, synthetic construct
  source 1..20: mol_type = other RNA
cgtctggtccaataccaatt

SEQ ID NO: 765 - RNA, 20 nt, synthetic construct
  source 1..20: mol_type = other RNA
cgtctggtcatttttttaaa

SEQ ID NO: 766 - RNA, 20 nt, synthetic construct
  source 1..20: mol_type = other RNA
cgtctggtccaatactaatt

SEQ ID NO: 767 - RNA, 20 nt, synthetic construct
  source 1..20: mol_type = other RNA
cgtctggtcaatactttggc

SEQ ID NO: 768 - RNA, 20 nt, synthetic construct
  source 1..20: mol_type = other RNA
cgtctggtcaatactttggc

SEQ ID NO: 769 - RNA, 20 nt, synthetic construct
  source 1..20: mol_type = other RNA
gacacggaaaacgaacatga

SEQ ID NO: 770 - RNA, 20 nt, synthetic construct
  source 1..20: mol_type = other RNA
tgagttgcgtcatctcctgg

SEQ ID NO: 771 - RNA, 20 nt, synthetic construct
  source 1..20: mol_type = other RNA
cgtctggtccaatactttac

SEQ ID NO: 772 - RNA, 20 nt, synthetic construct
  source 1..20: mol_type = other RNA
cgtctggtccaatactttac

SEQ ID NO: 773 - RNA, 20 nt, synthetic construct
  source 1..20: mol_type = other RNA
cgtctggtccaatactttac

SEQ ID NO: 774 - RNA, 20 nt, synthetic construct
  source 1..20: mol_type = other RNA
cgtctggtccaatactttac

SEQ ID NO: 775 - RNA, 20 nt, synthetic construct
  source 1..20: mol_type = other RNA
cgtctggtccaatactttac

SEQ ID NO: 776 - RNA, 1078 nt, synthetic construct
  source 1..1078: mol_type = other RNA
ctgggtgttttaaaagcatacaaatttcggatctatcctaatggacagcaaaaacagtttttcatcgaaaccttcggctgtgtacgttttacgtacaatcaactgctggaggcaaagatggaggagctggccaacaatgaagcaaagcaagggttgacgccagccaaactaaaaaaggagtatccttttttgaaggagaccgatagtttggcattggcgaatgcacaacggaatctggaccgagcgtttcgaaattactttcaaaagcgggctggctttccaaaaatgaaaaccaaaaaaagtatctggcaatcgtataccaccaataatcagcagcacaccatttattttgaagacgatcaaatcaagctgccaaagcttaaaacattggttcccgtaaaaaagcatcgggcgatcaaagggaagatcaaatcggcaacgatctcagcaaaaaacaacgaagagttttacatctcaatcctttgtttggaagagatcccgccattgccgaagcagcaagcctctgtcgctgttgtttatgatccgcagcagttggtcaaagccaaccagccgatacccatcacctgtgagcatgccatccaaacgaagcaaaagctgacgcgagcagaacgcaaacttcaggtgaaagcgacggcggtcaaacggaagaaaatccttttgacccaggcgcgaaattatcagaagctaaaaggaaaggtcgctcgcctttatcgttttcactgctgtcaaaagcgggaattcatcgatcaagtcagctaccatctcgtaaaacagtacgatacaatctatttggaacaaatcgcagaagatacggttttaaaagctggtcattacagcatcagtgattggcatcaattcgttcgcaaaatccagtacaaagcgcagtggtacggcaaagaactgcgttttgtcacgttggatatgcaggaccaacagaagctagaacggctctcaaacgaaatgagcagctgagccgcttgaactggaaggaacgccagggatcgcctagggtatagaaaaaatctttctgatttttgtttctaggaaccacgttcac

SEQ ID NO: 777 - RNA, 1091 nt, synthetic construct
  source 1..1091: mol_type = other RNA
atgaaagtgttaaaaggttatcgttttcggatttatccagacgaagaacaattgacattttttaggcaaacctttggctgtgtaagatttacatataatcaactattaatggcgagaaaaaacacagcgaattcggaagaaagtatgaaattaacccccgcagtattaaaaaaagactatccttttttaaagaagacagatagtctggctttggctaatgcacagcgtaacttagagcgagcgtacgcaaatttttttcaaggaagagcgagctatcctaaattaaaaaacaagaaaagcacgtggcaatcctatacaacaaataatcaaaaacatacgatttattttgttgatgaaaaactaaaacttcctaagttgaaaagtttgattcaagtgcatcagcatcgtgagattaaggggttgattcgttcagccacgatttcagcaaaaaacaatgaagaattttatgtatctttactgtgtttagaagaagtcactgctttaccgaaaaccaaaaaagctatcggtatttcatattgtccaaaacatttgatacatgtatctaagccgctcgatcacttagaaacgattgaagaacaaatgcaggaagacaggctgataaaagcaaaaagaaaacttcttttacgcgctaaaattgcgaaaaagcataaagtgaagctaaaagacgccaaaaattatcaaaagcaaaagcaaaaagtgcacaagttaattcaggaaaaagcctttagaaaaaaggactttattgaccagctgacattttcattagtcaaagagttcgattatatttttgtcgaaaagcaaccaagtaccgtcgatagtgaggagacgagtctatttaactctagtgattggtatctgttcatgcaaaaactaacgtataaaacacaatggtatggcaaaaaatatctagcgattgaaaagccagcgaatacagaaaattcgggacagatgattgaagaactaggaaagcaacgactcggcctttaatgtcaaagaactggaaggggctccagggatcgcctagggtatagaaaaaaggcaactttttgtttctaggaacaatcgctcac

SEQ ID NO: 778 - RNA, 1110 nt, synthetic construct
  source 1..1110: mol_type = other RNA
atgctaaaagcttttaaattccgtatgtatccgacagaagaacaaaaacagcaattgatccgtacttttggctgtgttcgatttacctataaccatttgctgaaagaacggcagaaaagttggcaacaaacaggagtggccgatttttcgctcacacctgctacgttaaaaaaagaatacccattcttaaaagaggtagacagtcttgctttagcaaatgcacaacttaatttggaccgagcttttcgcaattatttcaagggacgtgccagctttccaaagcttaaaacgaaaaaaagtatgtggcaatcttatacgacgaataatcaaactcatacggtctatctgaaaaacggtcacttaaaattaccaaaacaaaaagaactgatcaagataaaccagcaccgtccagtcgaaggcacgattcgttccgctacgatttctgctcgatataatgaagagttctatgtcgcactactttgtgatgtttcatcaataaaaaaagaatcttcagctaaatggattgggattgcctatcatccaaaaacattgatcgaaacatcgcagcccatagaagtaactttgccaaaatttgaccagacagaagaaaaacttcagcatgcacagcggaaattaagcgtaaaagtccgctccgctcaccatagaaagaccaggttagatcaggcaagcaattatcagaaacaaaagagaaaagtaatggatctttatctgaaacaaaagaaccagcgagaagattatcttgaacaattatctgggaaattggtcaaacaatatgactacttatttgtagaatcttttccaaaagaagaagcacatgctgatttttctattcatgactggcataaattaataacaaaattgcgttataagtcccaatggtataataaaaaatttctttttatcaataccgacggagcagaagaaagcaattctgtaagaaagagccaagtgttagaacaactaggcaggcattcggttatcaaggaataaaaaatgaatgaaactgacaggagcgttagggttcgccttgttaataaaaagtctgattgacttttgtttctaggaattttcttttgaagaaaagctcac

SEQ ID NO: 779 - RNA, 1110 nt, synthetic construct
  source 1..1110: mol_type = other RNA
atgctaaaagcttttaaattccgtatgtatccgacagaagaacaaaaacagcaattgatccgtacttttggctgtgttcgatttacctataaccatttgctgaaagaacggcagaaaagttggcaacaaacaggagtggccgatttttcgctcacacctgctacgttaaaaaaagaatacccattcttaaaagaggtagacagtcttgctttagcaaatgcacagcttaatttggaccgagcttttcgcaattatttcaagggacgtgccagcttcccaaagcttaaaacgaaaaaaagtatgtggcaatcttatacgacgaataatcaaactcatacggtctatctgaaaaacggtcacttaaaattaccaaaacaaaaagaactgatcaagataaaccagcaccgtccagtcgaaggcacgattcgttccgctacgatttctgctcgatataatgaagagttctatgtcgcactactttgtgatgtttcatcaataaaaaaagaatcttcagctaaatggattgggatcgcctatcatccaaaaacattgatcgaaacatcgcagcccatagaagtaactttgccaaaatttgaccagacagaagaaaaacttcagcatgcacagcggaaattaagcgtaaaagtccgctccgctcaccatagaaagaccaggttagatcaggcaagcaattatcagaaacaaaagagaaaagtaatggatctttatctgaaacaaaagaaccagcgagaagattatcttgaacaattatctgggaaattggtcaaacaatatgactacttatttgtagaatcttttccaaaagaagaagcacatgctgatttttctattcatgactggcataaattaataacaaaattgcgttataagtcccaatggtataataaaaaatttctttttatcaataccgacggagcagaagaaagcaattctgtaagaaagagccaagtgttagaacaactaggcaggcattcggttatcaaggaataaaaaatgaatgaaactgacaggagcgttagggttcgccttgttaataaaaagtctgattgacttttgtttctaggaattttcttttgaagaaaagctcac

SEQ ID NO: 780 - RNA, 1111 nt, synthetic construct
  source 1..1111: mol_type = other RNA
atgctaaaagcttttaaattccgtatgtatccgacagaagaacaaaaacagcaattgattcgtacttttggatgtgctcgatttacctataaccatttgctgaaaaagcggcagaaaagttggcaacaaacaggaatagccaatttttcgctcacacccgctacattaaaaaaagaatacccattcttaaaagaagtagacagtcttgctttagcaaatgcacagcttaatttggatcgggcttttcgcaattatttcaagggacgtgccagcttcccaaagcttaaaacgaaaaaaagtatgtggcaatcttatacgaccaacaaccaaacccgtacgatctatctggaaaatggctacttaaagttaccaaaacaaaaagaactaatcaagataaatcagcatcggccagttgaaggatcgattcgctccgctacgatttctgctcgatataatgaagaattttatgtcgcactactttgtgatgtttcgccagtaaaaaaagaatctttagctaaatggatcgggatcgcctatcatccgaagacattgatccaaacatctcgacctctagaagtaactttaccaaaatttcaccagacagaagaaaagctgcaacatgcacagcggaaattgaatgtgaaagtccgctccgctcaccatagaaagatcaggttagatcaggcaagcaattatcagaaacaaaagagaaaagtaatggatctttatctgaaacaaaagaaccagcgagaagattatcttgaacaattatctgggaaattggtcaaacaatatgactacttatttgtagaatcttttccaaaagaagaggcacatgctgatttttctattcacgactggcataaattaataacaaaattgcgttataagtcccaatggtataataaaaaatttcttttgatcaataccgacggagcagaagaaagcaattccgtaagaaagagccaagtagtagaaaaaatgggcagacattcggttatcaagggataaaaaatgaatgaaactgataggagcgttagggttagccttgttaataaaaagtcttaatgacttttgtttctaggaatttttcttttgaagaaaagctcac

SEQ ID NO: 781 - RNA, 1012 nt, synthetic construct
  source 1..1012: mol_type = other RNA
atgaaaaatttaaagggttatcgatttagaatttatcccaatgaagcacaaaaaaggttctttattgaaacgtttggttgtgttcgcttcatctataattattttctgaagttagatacagctgagcgcacaagtgaagagattattacgccagcgagtctcaaacgtgattatccttttttaaaaaagacggatagtctagcccttgcaaatgcgaagagaaatttagatagggcttttcaaaattactatcaacagcgtagtggctatcctaagttgaaaaataagagttctgtctggcaatcttacacgaccaataatcaaaacgggacagtacgtatagaggatggttatctgaaattgccaaagttaaaagaaaaaattcaaatatgcgaacatcgaaaaattactggcaaaattaaatcagtgactatttcagcgaagaataacgaggagttttatgcttcgattttgtgcgtggaaaccattgataagttcgagaaaacaggtaaaaaaatcagactttcttttgatgcgcatcaattagtccaacaagcgaaatatcgtgctgaagtgattgaacccattcaacatacgaaaggacgtctggcgtttttacaacgaagattaaaggtaaaggctcgggttgcgcgtaagcaaaatcggatattagccgactgtaagaattaccagaagcaaaaaaaacagtatgacaaattattgacacaccttaataatcagataaaagattatttgaatcatttatctgtcttttatattaaggaatatgatgtaatcgaaattgtcgaaccagaagataggtcttgtgctgaagatgctttattcaccagcaatgaatggcatcaattagttcgtttattgaaatataaagcacaatggtacggtaaagagattcaaatcataaattgtcaaaatatttaaaaaaataactggtaggggtgccagggttcgcctaggtaataattgatttgtttctaggaaaagtgcccac

SEQ ID NO: 782 - RNA, 1011 nt, synthetic construct
  source 1..1011: mol_type = other RNA
atgaaaaatttaaagggttatcgatttagaatttatcccaatgaagcacaaaaaaggttctttattgaaacgtttggttgtgttcgcttcatctataattattttctgaagttagatacagctgagcgcacaagtgaagagattattacgccagcgagtctcaaacgtgattatccttttttaaaaaagacggatagtctagcccttgcaaatgcgaagagaaatttagatagggcttttcaaaattactatcaacagcgtagtggctatcctaagttgaaaaataagagttctgtctggcaatcttacacgaccaataatcaaaacgggacagtacgtatagaggatggttatctgaaattgccaaagttaaaagaaaaaattcaaatatgcgaacatcgaaaaattactggcaaaattaaatcagtgactatttcagcgaagaataacgaggagttttatgcttcgattttgtgcgtggaaaccattgataagttcgagaaaacaggtaaaaaaatcagactttcttttgatgcgcatcaattagtccaacaagcgaaatatcgtgctgaagtgattgaacccattcaacatacgaaaggacgtctggcgtttttacaacgaagattaaaggtaaaggctcgggttgcgcgtaagcaaaatcggatattagccgactgtaagaattaccagaagcaaaaaaaacagtatgacaaattattgacacaccttaataatcagataaaagattatttgaatcatttatctgtcttttatattaaggaatatgatgtaatcgaaattgtcgaaccagaagataggtcttgtgctgaagatgctttattcaccagcaatgaatggcatcaattagttcgtttattgaaatataaagcacaatggtacggtaaagagattcaaatcataaattgtcaaaatatttaaaaaataactggtaggggtgccagggttcgcctaggtaataattgatttgtttctaggaaaagtgcccac

SEQ ID NO: 783 - RNA, 1096 nt, synthetic construct
  source 1..1096: mol_type = other RNA
atgctaaaagcctttaaatttcgaatctatcccactgagtcacaaaaacagtggttgatccaaacatttggttgtgtgcgtttcacttacaatcatttattaaaagccagacaggcgtattatttagaaacgaaagaaatcgattatacgctgacaccagcttctttaaaaaagcaatatccctttttaaaggaagtcgatagtttagccttagcgaatgcccaattaaacttggatcgtgcatttcgtaattattttaaaggacgcgcaagcttccccaaactgaaaaataaaaaaagtatttggcagtcgtatacgacaaacaatcaaaagggaacgatctatttagaagaaacatctatcaaactgccaaagttaaaagaaaaaatccgcatccatgcgcatcgtccgattgaaggaacgattcgctcagcgacgatctcgtctcgatacaatgagatcttttatgtctccttgctctgtgaagttccccaaaagacaatggaagcgtcaaataaatggatcgggatagcctatgatccagatcgtctagtggagatgtccaccccgcttgatatcgcgatccctaaattcaaacaagtcgatcaacaactccagcgagcaaagagaaaacttgtgatcaaaggacgagcagcacagcatcgacgcacacacgttgaaagagtaaaaaattatcaaaagcaaaaaaggaaaatcaaagacctttatttaaaacaaaaatttcaacgagaagactatttagaacaaatttcaggaacagtgatccgtcattatgattatttgtttgtcgaatcgatttcagcagattgtccggaaggtgatttttctatccaagactggcataagctattagcaaagctccaatataaatcgcaatggtatagcaaaaagttagtattgatcgatatgaaagaacaaacagatccttccacaaataaaaagagtctggaattagttgaaatcgggaaacaagtcctttttgaataaaaaaactggtaggggcgccagggttcgccttgctaataaaaaacatctattgtttttgtttctaggaatttctttaagagaagctcac

SEQ ID NO: 784 - RNA, 1240 nt, synthetic construct
  source 1..1240: mol_type = other RNA
attaagacattaaaggcttatagatttgcgctttatcctgacgaagcccaaaaacatttttttattcagacttttggctgcgttcgttttacgtataatatgctgttaacactacgacagcaagaaagtggcaaaactgttgaagaacgtacttcagcacgtttacaaaaacagaagatgacgccagctaagttaaaaaaagattatccttttttaaaagcaacagatagcttagctttggctaatgcacagcgtaatttggaaaaagcttttcaaaattattatcgcggtcgtgccagttatcccaagttaaaaagtaagaaaagtgcttggcagtcgtatacgacgaataatcaaggacatactatttacctagcagaagacggtttgaagcttcctaagttaaaaagcaaagttttagtgcatcaacatcgcagcgttgcagggaaaattcgttcagcaactatttcagctaaaaatcggcaagaattttatgtttctttattatgtgaagaagacattccggcattacccaaaacgggcagtgaaattgaaattgcctacgatccaacaggcttggtggtgacgaataaacctattgtggggatacccaccttttgccaaacccaagttctagaaaaactaaaaaaagcgcaacgccgacttagttgtcgggctaagagtgcgcaacgccgcaatgctaaactagaacaagcgaaaaactatcaaaagcaaaaatcccaggtgcaacaattgtatattcacaagctgaaacaaaaagaggatttcaccgaacaactttctattgctcttttgcgtcagtttgattgtattattatcacaaaaccgccagaattgcgggagaataaagaaagcaaagcggctaaaaccgtaaaaaaaagtaaacacaccactgttttcccaagttttgaggataattttactttaagtgattggaatcggttgcttttaaaattaaaatataaggccgagtggtatgaaaaagagctggtttttatttgtcctactaatggaaaataaaactggcacaggaattctagcgcactttctttataatgaattgatttaaactgatttaatcaagtgtttgccagcgaaatacgttacaaaaagaataactatttttgtaaaactggaaggagctccagggttcgccttgggtatataaaaagtgttgacacttttgtttctaggaatccgctcactaattatgattaac

SEQ ID NO: 785 - RNA, 1075 nt, synthetic construct
  source 1..1075: mol_type = other RNA
atgagcgtattaaaaggttataaatttcgcatctacccagatgaaaaacaaaaaaagttttttattgaaacgtttggttgtgttcgctttacatacaatcacttactaatggctagacacacaggtacggcaagaaatacgacgctaacgcctgcttcattgaagaaagaatatccttttttaaaaaaaacagacagtttagctttagcaaatgcccaaagaaatttggagcgagcgtttcgtaattatttcagtggtcgggctggttacccaaaattgaagacgaaaaaaagcacgtggcaatcgtatactacaaataatcagcaacatacggtttatttagaaggcgagtatttaaaagtaccgaaactaaaaagtctggtgccgattcatttgcatcgcgaagtgcgtggcacgattaaatcagtaacgatttctgccaaacgtaatcgtgaattttacgcatctattttatgtgttgaagaagtagaagagttgcctaaaacaaatgatttagtggggatttcttattgtccagagaatttgattcaaatttctgctaaaaaagaattaccacaaatcgatcaatctcatttagtgaaacaattagggaaagagcaaaagaaattgcaactaagagcaaaagttgctaaaaaacgtaaagtacgtttaattcatgcaaaaaactatcaaaaacaaaaagaacgcgtcttaaaattacgcgcaacaaaattggatcaaaaacgaaattttatcgatcagctcacaattaacttggtacgtgattttgattatttatttatcgaatccaaacctaagtttaaaaatgaaactggggagttttcagaagctgattggcaacaatttattcaacggattcaatataaaggccggtggtacggcaaagaaattcgttatattgaagtaaaagagttgaaaaatgaaaagtgtaaagaaatagaacgtttaggtcgtgcacaattgacttaatcagataagaactgaaagggacttcagggatcgcctagggtatagaaaaaatcttggcatttttgtttctaggaacactgtccac

SEQ ID NO: 786 - RNA, 1066 nt, synthetic construct
  source 1..1066: mol_type = other RNA
atgaaaatattaaaaggttatcggtttaaaatttatccgaatgaagagcagaaacgtttctttattcaaacatttggttgtgtgcgatttacgtataattatttgcttaaagcggccaaaaaacccgataatcgctctgaaggtaaggtaatcacgcctgcaatgctcaagcgtgattacccctttttaaaagcgacagatagcttagctttagcaaatgctgctagaaatttaaatcgcgcatttaaaaactattttagtggacgtagtggttaccctaagctcaaaaataaaaagagcgcatggcaatcttatacgactaataaccaaaatggcacagtagccattgaaggaaatcaattaaaattacctaaattaaaagagcgggtaatgatttgttgccatcgacctgttttaggaaccatcaaatcggtcacgatttctgctaaaaataatcaagaattttatgtatctttactttgtgttgaagaagttgacccattaccaaagaccaatcgtgagatacaaatctattttcatccagagaaattaattgctgatgatctagggcaattatccattcaacatcttgaacagacacaacaaaaaattaataaattaacgcaaagactagagttaaaagcgcggtgtgcacgtaagcgcaaggtacgtctatcgcaagctaaaaattatcaaaagctaaaaatgcgcctagctaaacatcagagcttacaacataatcagctgcaagattatttgaatcagctgtcaacgctattaattagaaagtatgatgtcattaatttcgttgaaccttcagtaagggatcaacaaagtgctgccaatgttcaagaagcgcacttatttagcctgaatgagtggcatcaattgatgagaatgctcaaatacaaagcgagttggtatggtaaagaatttaaagtggttttttcaacacaagcgtaaaagtcttaattttcgcaaaattaataaaattcaacaactggttggggcaccagggttcgcctaggttatataaaaacgtttgttttgtttctaggaagttcgc

SEQ ID NO: 787 - RNA, 1084 nt, synthetic construct
  source 1..1084: mol_type = other RNA
atgaatgtcttaaaaggttataggtttcgtatttatccaaataaagagcaacaagaattttttacgcaaacatttggctgtgtacgatttgtgtataatcatttactgatggcgcgaaaagaagaacactactctgctgagagtctaaaattaacgccagcctcattaaaagctacgtacccctttttaaaaaaaaccgatagtctggcattagcaaatgctcaacgtaatttagaccgcgcctttttgaattttttcaaagggcgtgcaggctatccaaatttaaaaagtaagaaaaaaacttggcagtcctatacgacaaataatcaaaaacatacgatctattttgaagaaggaaagctaaaagtgcctaagcttaagacgttgatcgacgtgcatcaacatcgtgaagtaaaaggacaaatcaaatccgcaacgatctcagctaaaaacagtgaagaatattatgtatccttgctttgtttagaagagattacggctttaccaaaaaccaagaaagtcgtaggcgttgcgtattgtcccaaacatttggtcagtgtttcttgtgggagagagcacttacctgaattaacgaaaagcacggttgaagaacgtttagctcgcgcacggcaaaagttggagttacgagcgaaaatagtgaaaaaacgtaaagtgcatcgggattgtgccaaaaattatcaaaaacaaaagcggcgagtagataagctttatctcactcgagcgtatcaaaagaatgattatattgataaattaacgttaaagttgatcgaacaatacgattatgtcttccttgagaaggaacctaattttgaaaagaattgttcatttactgaaactgactggcatgtatttatgcaaaaattacgctacaagggtaaatggtatggaaaagaattgcgtttgatcgacatagcaagtgatcaagaagaaaagagcgaaacacttgagcacttagggcgtacacaattttctaaatgactataagaactggataggggcgccagggatcgcctagggtatagaaaaaagctagtactttttgtttctaggaacaacagctcac

SEQ ID NO: 788 - RNA, 1111 nt, synthetic construct
  source 1..1111: mol_type = other RNA
atgctaaaagcttttaaattccgtatgtatccgacagaagaacaaaaacagcaattgattcgtacttttggatgtgctcgatttacctataaccatttgctgaaaaagcggcagaaaagttggcaacaaacaggagtggccgatttttcgctcacacccgctacattaaaaaaagaatacccattcttaaaagaagtagacagtcttgctttagcaaatgcacagcttaatttggaacgggcttttcgcaattatttcaagggacgtgccagcttcccaaagcttaaaacgaaaaaaagtatgtggcaatcttatacgaccaacaaccaaacccgtacgatctatctggaaaatggctacttaaagttaccaaaacaaaaagaactaatcaagataaatcagcatcggccagttgaaggatcgattcgctccgctacgatttctgctcgatataatgaagaattttatgtcgcactactttgtgatgtttcgccagtaaaaaaagaatctttagctaaatggatcgggatcgcctatcatccgaagacattgatccaaacatctcgacctctagaagtaactttaccaaaatttcaccaaacagaagaaaagctgcaacatgcacagcggaaattgaatgtgaaagtccgctccgctcaccatagaaagacaaggttagatcaggcaagcaattatcagaaacaaaagagaaaagtaatggatctttatctgaaacaaaagaaccagcgagaagattatcttgaacaattatctgggaaattggtcaaacaatatgactacttatttgtagaatcttttccaaaagaagaagcacatgctgatttttctattcatgactggcataaattaataacaaaattgcgttataagtcccaatggtataataaaaaatttcttttgatcaataccgacggagcagaagaaagcaattccgtaagaaagagccaagtagtagaagaaatgggcagacattcgcttatcaagggataaaaaatgaatgaaactgataggagcgttagggttcgccttgttaataaaaagtcttaatgacttttgtttctaggaatttttcttttgaagaaaagctcac

SEQ ID NO: 789 - RNA, 1012 nt, synthetic construct
  source 1..1012: mol_type = other RNA
atgaaaaatttaaagggttatcgatttagaatttatcccaatgaagcacaaaaaaggttctttattgaaacgtttggttgtgttcgcttcatctataattattttctgaagttagatacagctgagcgcacaagtgaagagattattacgccagcgagtctcaaacgtgattatccttttttaaaaaagacggatagtctagcccttgcaaatgcgaagagaaatttagatagggcttttcaaaattactatcaacagcgtagtggctatcctaagttgaaaaataagagttctgtctggcaatcttacacgaccaataatcaaaacgggacagtacgtatagaggatggttatctgaaattgccaaagttaaaagaaaaaattcaaatatgcgaacatcgaaaaattactggcaaaattaaatcagtgactatttcagcgaagaataacgaggagttttatgcttcgattttgtgcgtggaaaccattgataagttcgagaaaacaggtaaaaaaatcagactttcttttgatgcgcatcaattagtccaacaagcgaaatatcgtgctgaagtgattgaacccattcaacatacgaaaggacgtctggcgtttttacaacgaagattaaaggtaaaggctcgggttgcgcgtaagcaaaatcggatattagccgactgtaagaattaccagaagcaaaaaaaacagtatgacaaattattgacacaccttaataatcagataaaagattatttgaatcatttatctatcttttatattaaggaatatgatgtaatcgaaattgtcgaaccagaagataggtcttgtgctgaagatgctttattcaccagcaatgaatggcatcaattagttcgtttattgaaatataaagcacaatggtacggtaaagagattcaaatcataaattgtcaaaatatttaaaaaaataactggtaggggtgccagggttcgcctaggtaataattgatttgtttctaggaaaagtgcccac

SEQ ID NO: 790 - RNA, 1012 nt, synthetic construct
  source 1..1012: mol_type = other RNA
atgaaaaatttaaagggttatcgatttagaatttatcccaatgaagcacaaaaaaggttctttattgaaacgtttggttgtgttcgcttcatctataattattttctgaagttagatacagctgagcgcacaagtgaagagattattacgccagcgagtctcaaacgtgattatccttttttaaaaaagacggatagtctagcccttgcaaatgcgaagagaaatttagatagggcttttcaaaattactatcaacagcgtagtggctatcctaagttgaaaaataagagttctgtctggcaatcttacacgaccaataatcaaaacgggacagtacgtatagaggatggttatctgaaattgccaaagttaaaagaaaaaattcaaatatgcgaacatcgaaaaattactggtaaaattaaatcagtgactatttcagcgaagaataacgaggagttttatgcttcgattttgtgcgtggaaaccattgataagttcgagaaaacaggtaaaaaaatcagactttcttttgatgcgcatcaattagtccaacaagcgaaatatcgtgctgaagtgattgaacccattcagcatacgaaaggacgtctggcgtttttacaacgaagattaaaggtaaaggctcgggttgcgcgtaagcaaaatcggatattagccgactgtaagaattaccagaagcaaaaaaaacagtatgacaaattattgacacaccttaataatcagataaaagattatttgaatcatttatctatcttttatattaaggaatatgatgtaatcgaaattgtcgaaccagaagataggtcttgtgcggaagatgctttattcaccagcaatgaatggcatcaattagttcgtttattgaaatataaagcacaatggtacggtaaagagattcaaatcataaattgtcaaaatatttaaaaaaataactggtaggggtgccagggttcgcctaggtaataattgatttgtttctaggaaaagtgcccac

SEQ ID NO: 791 - RNA, 1012 nt, synthetic construct
  source 1..1012: mol_type = other RNA
atgaaaaatttaaagggttatcgatttagaatttatcccaatgaagcacaaaaaaggttctttattgaaacgtttggttgtgttcgcttcatctataattattttctgaagttagatacagctgagcgcacaagtgaagagattattacgccagcgagtctcaaacgtgattatccttttttaaaaaagacggatagtctagcccttgcaaatgcgaagagaaatttagatagggcttttcaaaattactatcaacagcgtagtggctatcctaagttgaaaaataagagttctgtctggcaatcttacacgaccaataatcaaaacgggacagtacgcatagaggatggttatctgaaattgccaaagttaaaagaaaaaattcaaatatgcgaacatcgaaaaattactggcaaaattaaatcagtgactatttcagcgaagaataacgaggagttttatgcttcgattttgtgcgtggaaaccattgataagttcgagaaaacaggtaaaaaaatcagactttcttttgatgcgcatcaattagtccaacaagcgaaatatcgtgctgaagtgattgaacccattcaacatacgaaaggacgtctggcgtttttacaacgaagattaaaggtaaaggctcgggttgcgcgtaagcaaaatcggatattagccgactgtaagaattaccagaagcaaaaaaaacagtatgacaaattattgacacaccttaataatcagataaaagattatttgaatcatttatctatcttttatattaaggaatatgatgtaatcgaaattgtcgaaccagaagataggtcttgtgctgaagatgctttattcaccagcaatgaatggcatcaattagttcgtttattgaaatataaagcacaatggtacggtaaagagattcaaatcataaattgtcaaaatatttaaaaaaataactggtaggggtgccagggttcgcctaggtaataattgatttgtttctaggaaaagtgcccac

SEQ ID NO: 792 - RNA, 1012 nt, synthetic construct
  source 1..1012: mol_type = other RNA
atgaaaaatttaaagggttatcgatttagaatttatcccaatgaagcacaaaaaaggttctttattgaaacgtttggttgtgttcgcttcatctataattattttctgaagttagatacagctgagcgcacaagtgaagagattattacgccagcgagtctcaaacgtgattatcctttttttaaaaagacggatagtctagcccttgcaaatgcgaagagaaatttagatagggcttttcaaaattactatcaacagcgtagtggctatcctaagttgaaaaataagagttctgtctggcaatcttacacgaccaataatcaaaacgggacagtacgtatagaggatggttatctgaaattgccaaagttaaaagaaaaaattcaaatatgcgaacatcgaaaaattactggcaaaattaaatcagtgactatttcagcgaagaataacgaggagttttatgcttcgattttgtgcgtggaaaccattgataagttcgagaaaacaggtaaaaaaatcagactttcttttgatgcgcatcaattagtccaacaagcgaaatatcgtgctgaagtgattgaacccattcaacatacgaaaggacgtctggcgtttttacaacgaagattaaaggtaaaggctcgggttgcgcgtaagcaaaatcggatattagccgactgtaagaattaccagaagcaaaaaaaacagtatgacaaattattgacacaccttaataatcagataaaagattatttgaatcatttatctatcttttatattaaggaatatgatgtaatcgaaattgtcgaaccagaagataggtcttgtgctgaagatgctttattcaccagcaatgaatggcatcaattagttcgtttattgaaatataaagcacaatggtacggtaaagagattcaaatcataaattgtcaaaatatttaaaaaaataactggtaggggtgccagggttcgcctaggtaataattgatttgtttctaggaaaagtgcccac

SEQ ID NO: 793 - RNA, 1012 nt, synthetic construct
  source 1..1012: mol_type = other RNA
atgaaaaatttaaagggttatcgatttagaatttatcccaatgaagcacaaaaaaggttctttattgaaacgtttggttgtgttcgcttcatctataattattttctgaagttagatacagctgagcgcacaagtgaagagattattacgccagcgagtctcaaacgtgattatccttttttaaaaaagacggatagtctagcccttgcaaatgcgaagagaaatttagatagggcttttcaaaattactatcaacagcgtagtggctatcctaagttgaaaaataagagttctgtctggcaatcttacacgaccaataatcaaaacgggacagtacgtatagaggatggttatctgaaattgccaaagttaaaagaaaaaattcaaatatgcgaacatcgaaaaattactggcaaaattaaatcagtgactatttcagcgaagaataacgaggagttttatgcttcgattttgtgcgtggaaaccattgataagttcgagaaaacaggtaaaaaaatcagactttcttttgatgcgcatcaattagtccaacaagcgaaatatcgtgctgaagtgattgaacccattcaacatacgaaaggacgtctggcgtttttacaacgaagattaaaggtaaaggctcgggttgcgcgtaatcaaaatcggatattagccgactgtaagaattaccagaagcaaaaaaaacagtatgacaaattattgacacaccttaataatcagataaaagattatttgaatcatttatctatcttttatattaaggaatatgatgtaatcgaaattgtcgaaccagaagataggtcttgtgctgaagatgctttattcaccagcaatgaatggcatcaattagttcgtttattgaaatataaagcacaatggtacggtaaagagattcaaatcataaattgtcaaaatatttaaaaaaataactggtaggggtgccagggttcgcctaggtaataattgatttgtttctaggaaaagtgcccac

SEQ ID NO: 794 - RNA, 1075 nt, synthetic construct
  source 1..1075: mol_type = other RNA
ctgagtgttttaaaagcatacaaatttcggatctatcctaatggacagcaaaaacaattcttcattgaaacgtttggttgtgttagatttacatacaatcaattattgaaagcaaaaatggatgaattggcaaacaaggaagtaaagttagggttaacaccagctaaattgaagaaagactatccgtttttaaaagaaacggatagtttagcattagcgaatgcacaacggaatctagaacgggcttttcggaattatttccaaaaacgggctggctttccaaaaatgaaaaccaaaaaaagtgtgtggcaatcatacacgacaaacaatcagcaacatacgatctattttgtcgacgatcaactcaagctgccgaaattgaaatcattggtaccggtgaaattgcatcgggaaatcaaaggaacgatcaaatcagcgactatctcagcaaaaaacgggactgaattttatgtatcgattttatgtttggaagaagttgaacctctgccaaaacaacaacagaatattgcactgatctttgatccgcaaatcctggtacaggccaaccattctttgccagtagcctgtacgcatgccttatcaacgctgcaaaaattagtgaaggcggaaaataagttaacgatcaaagccaaagcggtcaaacgcaagaagatcctcttgaacaatgcccgcaattatcaaaagcaaaaaggcaaagtggccaaactttatcggcttcatggctgtcaaaagcgggaatatattgatcaaatgagttaccacttagttaaacagtacgacacgatttttattgaaaaaatcaatgaagatatggatgtcgctggtaattatagtgtcagcgattggcaccaatttatccgtaaaatgcagtataaagccaaatggtatgggaaagagctgcattttgtccctttgtcggcaacggaaaaccaaaaaatgacagaattattgtcacagatgggctcttgatggtcaaaactggaaggaacgccagggttcgcctagggtatagaaaaagccaatagcggcttttgtttctaggaaccacgttcac

SEQ ID NO: 795 - RNA, 1104 nt, synthetic construct
  source 1..1104: mol_type = other RNA
atgaaggtgttgaaagcctacaaatttcgtctgtatccttcagcggagcaaaaagcctttttcatctttacatttggctgtgtacggttcacctacaaccatctgctgaaggaacggcaacaggaatatcagcgtactggttttctaggaaaaggacggacaccagcacagctaaaaaaagagtttccctttttaaaaaaaacggatagtttggcgttagcaaatgcccagctgaatcttgaccgcgcctatcgtaactattttcgcagtcaggcgggctttcccaaactgaaaaccaaaaaatccttatggcagtcttatacgactaataatcagcaggggaccattgacttggtagatgggcagctcaagttgccaaagctcaaggagcatatccccgttttggtacatcgagccgtcaagggtaaaattaaatcggctacgatttccgcgaaatacaacgaaatcttttatgtctcactgttatgcgaagaagaagtagcgccattgccgaaaactgagaagcaagtggcagttgtattttgtcaggaaattgggattcggacttcgcaaaagattctatatccaccatacgcagtagcgggactggaaagctccttagccaaagccgagcgtcgcttgcagatcaaagcaaccagcgctcgaaaacgtaaagtcaagttgatggatgcccgcaattatcaaaagcaaaaaaggcgcgtggcccaattgtatcagattcgctatcaacgcaagcgtgactatttagaaaaattatcattcgagctggtccaagcatttgatgttatttttatcggaaaagacagcatacaagaacagccgggaccctttgatcagcaagattggttattgtttctacaaaaacttgcctataaagcaaagtggtaccaaaagcaactcgtttttgtggaagtaccgcgtctgttgcaagaccctagtgaattagaacggacgggtaccgcgctactgaacaagcccaactggcaggggcgccagggatcgcctagggaatagaaaaagctcgcttttgtttctaggaaccatgcccactaattatgataaaccgagggaagtgctgtgcac

SEQ ID NO: 796 - RNA, 1090 nt, synthetic construct
  source 1..1090: mol_type = other RNA
gtgaaagtattaaaaggttataaatttcgtatttacccagatgaaaaacaaatacaatattttatacagactttcggctgtgtacgttttacctataaccagttgttacttgctcggcaaaaagctttgcaagaaggagagtataagacagacgtatctccggctaaattaaaactggactatccgtttttaaaaaagacggatagtctagctttagcgaacgcccaacgtaatttagaccgtgcttttaaaaattattttagtaaaagagcaggttatcctaaattaaaaacaaagaaaaacagctggcaaacttatacgacaaataaccagaaacatacaatttattttgttggtaatcagctaaaattacctaaattaaaaactttgattaacgtaaacctgcatagagaggttttaggtgaaattaaatcagcgacgatttctgctaaagataatcaactattttttgtttctattctctgcttagaagaagttactcctttacccaaaactgggaaatcaattgctatttcctattgtccaaagcatttagttcagatacctgcaactaattatctgcctgcttttaggcaggagaagctgcaatggcaactggataaagcgatgaaacgcttgaaagtccgagcaaaagcagcgaaaaatcgtaaggttttacttgaaaaagcaaaaaattatcaaaagcaaaaagtgaaagtacaaaaactgtatatggcaaaaaatgaacaaaaaaagaattacatgaaccaagtatcttatcgcttagtaagagactacgattatatttatttagaaaaaacaccaacttttatggagaacatgaatttttcagaaacagattggcatcattttttgcgcaaacttcaatataaagtacagtggtatggtaaaaaaattatctttgttgatgcagtagaaaatgtgagaacaaaagaaaactcgccattgaacgtttgaataaaacagttattagtcattatgagtgttaagaactggacggaacgccagggatcgcctaggggatataaaaaatctttttcgatttttgtttctaggaaatgctgttcac

SEQ ID NO: 797 - RNA, 1201 nt, synthetic construct
  source 1..1201: mol_type = other RNA
aaaatattaaaagcgtacaaatttcgtatttatccagatgaagcacaacaagaatttttcattaaaacttttggctgtgtgcgatttacttacaacacgttgttaaaattacggcagcaaaatccaagtgatgaaagtactttacccgaaaaaatgactggtgtttgggagaaaaaaacgacggctacgcccgctaagttaaaaagagattatccttttttaaaagagacagacagcttagccctagccaatgcccaacgaaatttaacgaaggcttttcaaaactattatcgtggtcgcgccagttatccgaagcttaagagtaaaaaaaacgcttggcaatcgtatacaacaaataaccaaggccacaccatttatctcaccaatgaaggattaaaactaccaaagttaaagagtaaagttcctattcatcaacaccgccaggtttgcggtaaaattcgttctgcgacgatttctgccaaaaatcggcaagagttttatgtttcattattatgtgaagaagaaataacagcattacccaaaacgggttttgatattaccatcacttatgaccccattaagctaattggcacgagtaaggttctttctgatcggcctaatttttgtcaacaacggctgttagtccaattaaaaaatgcgcaacgaaagctttattgtcggggaaaaagtgcgcaacggcgcaatgttaagttagagcaggctaaaaattatcaaaaacaaaaactacgcctccaaaagctctatatccatcaaatcaagcaaaaagaagattttatggaacaactttcaattgcgcttttacgtcaatttgatttggtgacggtaacgatgccaaaagcttttgagtcgctaagcgcaaatcactcagccgctattcaccaagactgttctgctaattataaaaatacagcagtcaattttacaataagggattggaatcgttttgtactaaaactcaaatataaagccaattggtatggaaaaaaactgatttttactgatcaggaaaaagtaatctgattaaaaaaatttctgctgcacttaaaaagtatttttaaaactggaaggagctccagggatcgccttgggtatataaaaagtgccactgcacttttgtttctaggaatccgctcactaattatgataaaccatgaacagcttcttttattagaagttggac

SEQ ID NO: 798 - RNA, 1010 nt, synthetic construct
  source 1..1010: mol_type = other RNA
atgagtgtcttaaaagcgtatcgctttagaatttatccaaatgaagaacaaaaacattttttcgtgacgacgtttggttgtgttcgatttacgtataatcatttacttgttgcgaggcaacagtcagaagggggaaaactaaccccagcggccttaaaaaaagactatccgtttttaaaagcgacggatagtctcgctttagccaatgcccaacgcaatctagagaaagcttttcgccgatactatacggggaaaagtgactatccgagtttaaagaataaatcgaatcctctacaatcttatacgacaaacaatcaaggacaaacgatttgtctttccgatggttatttaaaattacccaaattaaaaagtttggttgcagtgaattgccatcgtgaaatcaaaggaacgattaaatctgctacaatttcttcgagaaataacgaagaattctttgtctcttttttatgtgtggaagaggtagaaccactaccgaagacgttaaagaccattcatttggtctattcaccgaataaattattagaaagttctgaatatacaccgccgactttatgcaatcaagaacaattgcttgataaaatcgatcgcgcgcagcgaaagctgagagttcgtgggaagatcgcacgaaaacgccgagttcctctagcgtatgctaaaaattatcaaaaacaaaaagaaaaacttggtcgcttgcaactttcttgccgagagaaaaaagaaaattattttgatcaagtttcatatgcgattgttcgtcaatttgattttattcatgtgacaaaagagttgctgtttgaaacgttaccagatcaaccactctatttctctaaagcagattggcaaatgtttctaaagaagttagaatacaaggctgaatggtacgggaaagaacttacgtacgaataagtcgcagaactggaaggagctccagggatcgcctagggtatagaaaaagtctttgggcttttgtttctaggaatccgcctcac

SEQ ID NO: 799 - RNA, 1078 nt, synthetic construct
  source 1..1078: mol_type = other RNA
ctgggtgttttaaaagcatacaaatttcggatctatcctaatggacagcaaaaacagtttttcatcgaaaccttcggctgtgtacgttttacgtacaatcaactgctggaggcaaagatggaggagctggccaacaatgaagcaaagcaagggttgacgccagccaaactaaaaaaggagtatccttttttgaaggagaccgatagtttggcattggcgaatgcacaacggaatctggaccgagcgtttcgaaattactttcaaaagcgggctggctttccaaaaatgaaaaccaaaaaaagtatctggcaatcgtataccaccaataatcagcagcacaccatttattttgaagacgatcaaatcaagctgccaaagcttaaaacattggttcccgtaaaaaagcatcgggcgatcaaaggcaagatcaaatcggcaacgatctcagcaaaaaacaacgaagagttttacatctcgatcctttgtttggaagagatcccgccattgccgaagcagcaagcctctgtcgctgttgtttatgatccgcagcagttggtcaaagccaaccagccgatacccataacctgtgagcatgccatccaaacgaagcaaaagctgacgcgagcagaacgcaaacttcaggtgaaagcgacggcggtcaaacggaagaaaatccttttgacccaggcgcgaaattatcagaagctaaaaggaaaggtcgctcgcctttatcgttttcactgctgtcaaaagcgggaattcatcgatcaagtcagctaccatctcgtaaaacagtacgatacgatctatttggaacaaatcgcagaagatacggttttaaaagctggtcattacagcatcagtgattggcatcaattcgttcgcaaaatccagtacaaagcgcagtggtacggcaaagaactgcggtttgtcacgttggatacgcaggaccaacagaagctagaacggctctcaggcgaaatgagcagctgagccgcttgaactggaaggaacgccagggatcgcctagggtatagaaaaaatctttctgatttttgtttctaggaaccacgttcac

SEQ ID NO: 800 - RNA, 1078 nt, synthetic construct
  source 1..1078: mol_type = other RNA
ctgggtgttttaaaagcatacaaatttcggatctatcctaatggacagcaaaaacagtttttcatcgaaaccttcggctgtgtacgttttacgtacaatcaactgctggaggcaaagatggaggagctggccaacaatgaagcaaagcaagggttgacgccagccaaactaaaaaaagagtatccttttttgaaggagaccgatagtttggcattggcgaatgcacaacggaatctggaccgagcgtttcgaaattactttcaaaagcgggctggctttccaaaaatgaaaaccaaaaaaagtatctggcaatcgtataccaccaataatcagcagcacaccatttattttgaagacgatcaaatcaagctgccaaagcttaaaacattggttcccgtaaaaaagcatcgggcgatcaaaggcaagatcaaatcggcaacgatctcagcaaaaaacaacgaagagttttacatctcgatcctttgtttggaagagatcccgccattgccgaagcagcaagcctctgtcgctgttgtttatgatccgcagcagttggtcaaagccaaccagccgatacccatcacctgtgagcatgccatccaaacgaagcaaaagctgacgcgagcagaacgcaaacttcaggtgaaagcgacggcggtcaaacggaagaaaatccttttgacccaggcgcgaaattatcagaagctaaaaggaaaggtcgctcgcctttatcgttttcactgctgtcaaaagcgggaattcatcgatcaagtcagctaccatctcgtaaaacagtacgatacgatctatttggaacaaatcgcagaagatacggttttaaaagctggtcattacagcatcagtgattggcatcaattcgttcgtaaaatccagtacaaagcgcagtggtacggcaaagaactgcgttttgtcacgttggatacgcaggaccaacagaagctagaacggctctcaggcgaaatgagcagctgagccgcttgaactggaaggaacgccagggatcgcctaggttatagaaaaaatctttctgatttttgtttctaggaaccacgttcac

SEQ ID NO: 801 - RNA, 1078 nt, synthetic construct
  source 1..1078: mol_type = other RNA
ctgggtgttttaaaagcatacaaatttcggatctatcctaatggacagcaaaaacagtttttcatcgaaaccttcggctgtgtacgttttacgtacaatcaactgctggaggcaaagatggaggagctggccaacaatgaagcaaagcaagggttgacgccagccaaactaaaaaaagagtatccttttttgaaggagaccgatagtttggcattggcgaatgcacaacggaatctggaccgagcgtttcgaaattactttcaaaagcgggctggctttccaaaaatgaaaaccaaaaaaagtatctggcaatcgtatacaaccaataatcagcagcacaccatttattttgaagacgatcaaatcaagctgccaaagcttaaaacattggttcccgtaaaaaagcatcgggcgatcaaagggaagatcaaatcggcaacgatctcagcaaaaaacaacgaagagttttacatctcgatcctttgtttggaagagatcccgccattgccgaagcagcaagcctctgtcgctgttgtttatgatccgcagcagttggtcaaagccaaccagccgatacccatcacctgtgaacatgccatccaaacgaagcaaaagctgacgcgagcagaacgcaaacttcaggtgaaagcgacggcggtcaaacggaaaaaaatccttttgacccaggcgcgaaattatcagaagctaaaaggaaaggtcgctcgcctttatcgttttcactgctgtcaaaagcgggaattcatcgatcaagtcagctaccatctcgtaaaacagtacgatacgatctatttggaacaaatcgcagaagatacggttttaaaagctggtcattacagcatcagtgattggcatcaattcgttcgcaaaatccagtacaaagcgcagtggtacggcaaagaactgcgttttgtcacgttggatacgcaggaccaacagaagctagaacggctctcaggcgaaatgagcagctgagccgcttgaactggaaggaacgccagggatcgcctaggttatagaaaaaatctttctgatttttgtttctaggaaccacgttcac

SEQ ID NO: 802 - RNA, 1078 nt, synthetic construct
  source 1..1078: mol_type = other RNA
ctgggtgttttaaaagcatacaaatttcggatctatcctaatggacagcaaaaacagtttttcatcgaaaccttcggctgtgtacgttttacgtacaatcaactgctggaggcaaagatggaggagctggccaacaatgaagcaaagcaagggttgacgccagccaaactaaaaaaggagtatccttttttgaaggagaccgatagtttggcattggcgaatgcacaacggaatctggaccgagcgtttcgaaattactttcaaaagcgggctggctttccaaaaatgaaaaccaaaaaaagtatctggcaatcgtataccaccaataatcagcagcacaccatttattttgaagacgatcaaatcaagctgccaaagcttaaaacattggttcccgtaaaaaagcatcgggcgatcaaagggaagatcaaatcggcaacgatctcagcaaaaaacaacgaagagttttacatctcgatcctttgtttggaagagatcccgccattgccgaagcagcaagcctctgtcgctgttgtttatgatccgcagcagttggtcaaagccaaccagccgatacccatcacctgtgagcatgccatccaaacgaagcaaaagctgacgcgagcagaacgcaaacttcaggtgaaagcgacggcggtcaaacggaagaaaatccttttgacccaggcgcgaaattatcagaagctaaaaggaaaggtcgctcgcctttatcgttttcactgctgtcaaaagcgggaattcatcgatcaagtcagctaccatctcgtaaaacagtacgatacgatctatttggaacaaatcgcagaagatacggttttaaaagctggtcattacagcatcagtgattggcatcaattcgttcgcaaaatccagtacaaagcgcagtggtacggcaaagaactgcgttttgtcacgttggatacgcaggaccaacagaagctagaacggctctcaggcgaaatgagcagctgagccgcttgaactggaaggaacgccagggatcgcctagggtatagaaaaaatctttctgatttttgtttctaggaaccacgttcac

SEQ ID NO: 803 - RNA, 1078 nt, synthetic construct
  source 1..1078: mol_type = other RNA
ctgggtgttttaaaagcatacaaatttcggatctatcctaatggacagcaaaaacagtttttcatcgaaaccttcggctgtgtacgttttacgtacaatcaactgctggaggcaaagatggaggagctggccaacaatgaagcaaagcaagggttgacgccagccaaactaaaaaaggagtatccttttttgaaggagaccgatagtttggcattggcgaatgcacaacggaatctggaccgagcgtttcgaaattactttcaaaagcgggctggctttccaaaaatgaaaaccaaaaaaagtatctggcaatcgtataccaccaataatcagcagcacaccatttattttgaagacgatcaaatcaagctgccaaagcttaaaacattggttcccgtaaaaaagcatcgggcgatcaaagggaagatcaaatcggcaacgatctcagcaaaaaacaacgaagagttttacatctcgatcctttgtttggaagagatcccgccattgccgaagcagcaagcctctgtcgctgttgtttatgatccgcagcagttggtcaaagccaaccagccgatacccatcacctgtgagcatgccatccaaacgaagcaaaagctgacgcgagcagaacgcaaacttcaggtgaaagcgacggcggtcaaacggaagaaaatccttttaacccaggcgcgaaattatcagaagctaaaaggaaaggtcgctcgcctttatcgttttcactgctgtcaaaagcgggaattcatcgatcaagtcagctaccatctcgtaaaacagtacgatacgatctatttggaacaaatcgcagaagatacggttttaaaagccggtcattacagcatcagtgattggcatcaattcgttcgcaaaatccagtacaaagcgcagtggtacggcaaagaactgcgttttgtcacgttggatacgcaggaccaacagaagctagaacggctctcaggcgaaatgagcagctgagccgcttgaactggaaggaacgccagggatcgcctagggtatagaaaaaatctttctgatttttgtttctaggaaccacgttcac

SEQ ID NO: 804 - RNA, 1078 nt, synthetic construct
  source 1..1078: mol_type = other RNA
ctgggtgttttaaaagcatacaaatttcggatctatcctaatggacagcaaaaacagtttttcatcgaaaccttcggctgtgtacgttttacgtacaatcaactgctggaggcaaagatggaggagctggccaacaatgaagcaaagcaagggttgacgccagccaaactaaaaaaggagtatccttttttgaaggagaccgatagtttggcattggcgaatgcacaacggaatctggaccgagcgtttcgaaattactttcaaaagcgggctggctttccaaaaatgaaaaccaaaaaaagtatctggcaatcgtataccaccaataatcagcagcacaccatttattttgaagacgatcaaatcaagctgccaaagcttaaaacattggttcccgtaaaaaagcatcgggcgatcaaagggaagatcaaatcggcaacgatctcagcaaaaaacaacgaagagttttacatctcgatcctttgtttggaagagatcccgccattgccgaagcagcaagcctctgtcgctgttgtttatgatccgcagcagttggtcaaagccaaccagccgatacccatcacctgtgagcatgccatccaaacgaagcaaaagctgacgcgagcagaacgcaaacttcaggtgaaagcgacggcggtcaaacggaagaaaatccttttgacccaggcgcgaaattatcagaagctaaaaggaaaggtcgctcgcctttatcgttttcactgctgtcaaaagcgggaattcatcgatcaagtcagctaccatctcgtaaaacagtacgatacgatctatttggaacaaatcgcagaagatacggttttaaaagctggtcattacagcatcagtgattggcatcaattcgttcgcaaaatccagtacaaagcgcagtggtacggcaaagaactgcggtttgtcacgttggatacgcaggaccaacagaagctagaacggctctcaggcgaaatgagcagctgagtcgcttgaactggaaggaacgccagggatcgcctagggtatagaaaaaatctttctgatttttgtttctaggaaccacgttcac

SEQ ID NO: 805 - RNA, 1078 nt, synthetic construct
  source 1..1078: mol_type = other RNA
ctgggtgttttaaaagcatacaaatttcggatctatcctaatggacagcaaaaacagtttttcatcgaaaccttcggctgtgtacgttttacgtacaatcaactgctagaggcaaagatggaggagctggccaacaatgaagcaaagcaagggttgacgccagccaaactaaaaaaggagtatccttttttgaaggagaccgatagtttggcattggcgaatgcacaacggaatctggaccgagcgtttcgaaattactttcaaaagcgggctggctttccaaaaatgaaaaccaaaaaaagtatctggcaatcgtataccaccaataatcagcagcacaccatttattttgaagacgatcaaatcaagctgccaaagcttaaaacattggttcccgtaaaaaagcatcgggcgatcaaagggaagatcaaatcggcaacgatctcagcaaaaaacaacgaagagttttacatctcgatcctttgtttggaagagatcccgccattgccgaagcagcaagcctctgtcgctgttgtttatgatccgcagcagttggtcaaagccaaccagccgatacccatcacctgtgagcatgccatccaaacgaagcaaaagctgacgcgagcagaacgcaaacttcaagtgaaagcgacggcggtcaaacggaagaaaatccttttgacccaggcgcgaaattatcagaagctaaaaggaaaggtcgctcgcctttatcgttttcactgctgtcaaaagcgggaattcatcgatcaagtcagctaccatctcgtaaaacagtacgatacgatctatttggaacaaatcgcagaagatacggttttaaaagctggtcattacagcatcagtgattggcatcaattcgttcgtaaaatccagtacaaagcgcagtggtacggcaaagaactgcgttttgtcacgttggatacgcaggaccaacagaagctagaacggctctcaggcgaaatgagcagctgagccgcttgaactggaaggaacgccagggatcgcctagggtatagaaaaaatctttctgatttttgtttctaggaaccacgttcac

SEQ ID NO: 806 - RNA, 1078 nt, synthetic construct
  source 1..1078: mol_type = other RNA
ctgggtgttttaaaagcatacaaatttcggatctatcctaatggacagcaaaaacagtttttcatcgaaaccttcggctgtgtacgttttacgtacaatcaactgctggaggcaaagatggaggagctggccaacaatgaagcaaagcaagggttgacgccagccaaactaaaaaaagagtatccttttttgaaggagaccgatagtttggcattggcgaatgcacaacggaatctggaccgagcgtttcgaaattactttcaaaagcgggctggctttccaaaaatgaaaaccaaaaaaagtatctggcaatcgtataccaccaataatcagcagcacaccatttattttgaagacgatcaaatcaagctgccaaagcttaaaacattggtccccgtaaaaaagcatcgggcgatcaaagggaagatcaaatcggcaacgatctcagcaaaaaacaacgaagagttttacatctcgatcctttgtttggaagagatcccgccattgccgaagcagcaagcctctgtcgctgttgtttatgatccgcagcagttggtcaaagccaaccagccgatacccatcacctgtgaacatgccatccaaacgaagcaaaagctgacgcgagcagaacgcaaacttcaggtgaaagcgacggcggtcaaacggaaaaaaattcttttgacccaggcgcgaaattatcagaagctaaaaggaaaggtcgctcgcctttatcgttttcactgctgtcaaaagcgggaattcatcgaccaagtcagctaccatctcgtaaaacagtacgatacgatctatttggaacaaatcgcagaagatacggttttaaaagctggtcattacagcatcagtgattggcatcaattcgttcgcaaaatccagtacaaagcgcagtggtacggcaaagaactgcggtttgtcacgttggatacgcaggaccaacagaagctagaacggctctcaggcgaaatgagcagctgagccgcttgaactggaaggaacgccagggatcgcctagggtatagaaaaaatctttctgatttttgtttctaggaaccacgttcac

SEQ ID NO: 807 - RNA, 1078 nt, synthetic construct
  source 1..1078: mol_type = other RNA
ctgggtgttttaaaagcatacaaatttcggatctatcctaatggacagcaaaaacagtttttcatcgaaaccttcggctgtgtacgttttacgtacaatcaactgctggaggcaaagatggaggagctggccaacaatgaagcaaagcaagggttgacgccagccaaactaaaaaaggagtatccttttttgaaggagaccgatagtttggcattggcgaatgcacaacggaatctggaccgagcgtttcgaaattactttcaaaagcgggctggctttccaaaaatgaaaaccaaaaaaagtatctggcaatcgtataccaccaataatcagcagcacaccatttattttgaagacgatcaaatcaagctgccaaagcttaaaacattggttcccgtaaaaaagcatcgggcgatcaaagggaagatcaaatcggcaacgatctcagcaaaaaacaacgaagagttttacatctcgatcctttgtttggaagagatcccgccattgccgaagcagcaagcctctgtcgctgttgtttatgatccgcagcagttggtcaaagccaaccagccgatacccatcacctgtgagcatgccatccaaacgaagcaaaagctgacgcgagcagaacgcaaacttcaggtgaaagcgacggcggtcaaacggaagaaaatccttttgacccaggcgcgaaattatcagaagctaaaaggaaaggtcgctcgcctttatcgttttcactgctgtcaaaagcgggaattcatcgatcaagtcagctaccatctcgtaaaacagtacgatacgatctatttggaacaaatcgcagaagatacggttttaaaagctggtcattacagcatcagtgattggcatcaattcgttcgcaaaatccagtacaaagcgcagtggtacggcaaagaactgcgttttgtcacgttggatacgcaggaccaacagaagctagaacggctctcaggcgaaatgagcagctgagccgcttgaactggaaggaacgccagggatcgcctaggttatagaaaaaatctttctgatttttgtttctaggaaccacgttcac

SEQ ID NO: 808 - RNA, 1078 nt, synthetic construct
  source 1..1078: mol_type = other RNA
ctgggtgttttaaaagcatacaaatttcggatctatcctaatggacagcaaaaacagtttttcatcgaaaccttcggctgtgtacgttttacgtacaatcaactgctggaggcaaagatggaggagctggccaacaatgaagcaaagcaagggttgacgccagccaaactaaaaaaagagtatccttttttgaaggagaccgatagtttggcattggcgaatgcacaacggaatctggaccgagcgtttcgaaattactttcaaaagcgggctggctttccaaaaatgaaaaccaaaaaaagtatctggcaatcgtataccaccaataatcagcagcacaccatttattttgaagacgatcaaatcaagctgccaaagcttaaaacattggttcccgtaaaaaagcatcgggcgatcaaaggcaagatcaaatcggcaacgatctcagcaaaaaacaacgaagagttttacatctcgatcctttgtttggaagagatcccgccattgccgaagcagcaagcctctgtcgctgttgtttatgatccgcagcagttggtcaaagccaaccagccgatacccatcacctgtgagcatgccatccaaacgaagcaaaagctgacgcgagcagaacgcaaacttcaggtgaaagcgacggcggtcaaacggaagaaaatccttttgacccaggcgcgaaattatcagaagctaaaaggaaaggtcgctcgcctttatcgttttcactgctgtcaaaagcgggaattcatcgatcaagtcagctaccatctcgtaaaacagtacgatacgatctatttggaacaaatcgcagaagatacggttttaaaagctggtcattacagcatcagtgattggcatcaattcgttcgtaaaatccagtacaaagcgcagtggtacggcaaagaactgcgttttgttacgttggatacgcaggaccaacagaagctagaacggctctcaggcgaaatgagcagctgagccgcttgaactggaaggaacgccagggatcgcctagggtatagaaaaaatctttctgatttttgtttctaggaaccacgttcac

SEQ ID NO: 809 - RNA, 1078 nt, synthetic construct
  source 1..1078: mol_type = other RNA
ctgggtgttttaaaagcatacaaatttcggatctatcctaatggacagcaaaaacagtttttcatcgaaaccttcggctgtgtacgttttacgtacaatcaactgctggaggcaaagatggaggagctggccaacaatgaagcaaagcaagggttgacgccagccaaactaaaaaaggagtatccttttttgaaggagaccgatagtttggcattggcgaatgcacaacggaatctggaccgagcgtttcgaaattactttcaaaagcgggctggctttccaaaaatgaaaaccaaaaaaagtatctggcaatcgtataccaccaataatcagcagcacaccatttattttgaagacgatcaaatcaagctgccaaagcttaaaacattggttcccgtaaaaaagcatcgggcgatcaaagggaagatcaaatcggcaacgatctcagcaaaaaacaacgaagagttttacatctcgatcctttgcttggaagagatcccgccattgccgaagcagcaagcctctgtcgctgttgtttatgatccgcagcagttggtcaaagccaaccagccgatacccatcacctgtgagcatgccatccaaacgaagcaaaagctgacgcgagcagaacgcaaacttcaggtgaaagcgacggcggtcaaacggaagaaaatccttttgacccaggcgcgaaattatcagaagctaaaaggaaaggtcgctcgcctttatcgttttcactgctgtcaaaagcgggaattcatcgatcaagtcagctaccatctcgtaaaacagtacgatacaatctatttggaacaaatcgcagaagatacggttttaaaagctggtcattacagcatcagtgattggcatcaattcgttcgcaaaatccagtacaaagcgcagtggtacggcaaagaactgcggtttgtcacgttggatacgcaggaccaacagaagctagaacggctctcaggcgaaatgagcagctgagtcgcttgaactggaaggaacgccagggatcgcctagggtatagaaaaaatctttctgatttttgtttctaggaaccacgttcac

SEQ ID NO: 810 - RNA, 1104 nt, synthetic construct
  source 1..1104: mol_type = other RNA
gtgcttatgctaaaagcctttaaattccgaatttacccgactgcttcacaaaaagaatggttcatccaaaattttggttgtgtgcgttttacgtataaccatttgctaaaagcacgacaggaaagttatgcgagaacaggtgctatcgattattcgatgacacctgcaacattaaaaaaaaaatacgcatttttaaaatcagcagatagcttagcattagcaaatgcccaattaaatttagatcgcgcttttcgcaattatttcaatgggcgtgctagtttccctaaactgaagaacaaaaaaagtatgtggcagtcttatacaacaaataatcaaaaaggaacgatttatttggaagataagtacttgaaactgccgaaacaaaaagagctgatccaagtgagattacatcgtccggtcgaaggtgttatacggtcagcgacgatttcagcacggtataatgaaagtttctatgtttctctactttgtgaagtacaaatcgccggagtgccaactactaatcgatggctaggggtagcatatgatccaaagaaattggtggaaacttcatcaccagttgaggtacaaatgccattgttcaggcaaacgagagataagatgaaggttgccaagagaaaactggtgattaaaagtaaagcagctcaaaaaagaaaagttcgcttggaaaatgctagaaattatcagaaacaaaagagaaaagtaatggatctttatcagaaacaaaaattacaaaaagaagattacttggaaagagtatctggtaatttgatccgcaattatgattacttatttgttgaagctgttccatctgaactttcttcagccgattttcagttgcaagattggtataaattgattacaaaattgcgatataaagcgcagtggtacaataaaacattgctttttatcaatgtgaacgagcaattgaatgaaccacctgaaaaaaaaagtatggagttagaaaaaatcgggaaacaagtgatttttgaataatcgaactggtaggggtgccagggatcgccttgctaataaaaaacataacttgtttttgtttctaggaattttctttaaagaaaagctcac

SEQ ID NO: 811 - RNA, 1104 nt, synthetic construct
  source 1..1104: mol_type = other RNA
gtgcttatgctaaaagcctttaaattccgaatttacccgactgcttcacaaaaagaatggttcatccaaaattttggttgtgtgcgttttacgtataaccatttgctaaaagcacgacaggaaagttatgcgagaacaggtgccatcgattattcgatgacacctgcaacattaaaaaaaaaatacgcatttttaaaatcagcagatagcttagcattagcaaatgcccaattaaatttagatcgcgcttttcgcaattatttcaatgggcgtgctagtttccctaaactgaagaacaaaaaaagtatgtggcagtcttatacaacaaataatcaaaaaggaacgatttatttggaagataagtacttgaaactgccgaaacaaaaagagctgatccaagtgagattacatcgtccggtcgaaggtgttatacggtcagcgacgatttcagcacggtataatgaaagtttctatgtttctctactttgtgaagtacaaatcgccggagtgccaactactaatcgatggctaggggtagcatatgatccaaagaaattggtggaaacttcatcaccagttgaggtacaaatgccattgttcaggcaaacgagagataagatgaaggttgccaagagaaaactggtgattaaaagtaaagcagctcaaaaaagaaaagttcgcttggaaaatgctagaaattatcagaaacaaaagagaaaagtaatggatctttatcagaaacaaaaattacaaaaagaagattacttggaaagagtatctggtaatttgatccgcaattatgattacttatttgttgaagctgttccatctgaactttcttcagccgattttcagttgcaagattggtataaattgattacaaaattgcgatataaagcgcagtggtacaataaaacattgctttttatcaatgtgaacgagcaattgaatgaaccacctgaaaaaaaaagtatggagttagaaaaaatcgggaaacaagtgatttttgaataatcgaactggtaggggtgccagggatcgccttgctaataaaaaacataacttgtttttgtttctaggaattttctttaaagaaaagctcac

SEQ ID NO: 812 - RNA, 1075 nt, synthetic construct
  source 1..1075: mol_type = other RNA
ctgggtgttttaaaagcatacaaatttcggatctatcctaatggacagcaaaaacagttcttcatcgaaactttcggctgtgtacgcttcacgtataatcagctgctgaaagccaagatggatgaactggcgaacaaggaagtaaagttagggttaacaccagccaaattaaagaaagactatccgtttttaaaagagacggatagtttagcattagcgaatgcacaacggaatctggaacgggcgtttcggaattatttccaaaaacgagccggctttccaaaaatgaaaaccaaaaaaagtatttggcaatcgtataccaccaataatcaacaacatacgatctattttgtcgaagatcaactcaagctgccaaaattgaaatcattggttccggtgaagcagcatcgggcaatcaaaggaaccatcaaatcagcaacgatttccgcaaaaaacggtactgaattttatgtatcgattttatgcttggaagaagttgaaccattaccaaaaaaacaacagaagattgcactgatctttgatccgcaacttcttgtgcaagccaatcattcgttaccagtcgcatgcacccatgccttagcgacgctgcaaaaactagcgcgggctgagaataaactgacgatcaaagccaaggcggtcaagcgcaagaagattctcttgaacaatgcccgcaattatcaaaaacaaaaaggcaaagtagccaaactttatcggcttcacggctgtcaaaagcgggagtacattgatcagatgagctatcatttagtaaagcagtacgatacgatttatattgagaaaatcagtgaagatgcccaggtttctggtaactacacgattagcgactggcaccaatttgttcgcaaaatgcagtataaagccaaatggtacggaaaagagcttcattttgtcgctttatccgcaactgacaatcgaaaaatgcctgagttattggcccaaatgggttcttgatctaaaaaactggaagggacgccagggttcgcctagggtatagaaaaagccaatcacggtttttgtttctaggaaccacgtccac

SEQ ID NO: 813 - RNA, 1078 nt, synthetic construct
  source 1..1078: mol_type = other RNA
ctgggtgttttaaaagcatacaaatttcggatctatcctaatggacagcaaaaacagtttttcatcgaaaccttcggctgtgtacggtttacgtacaatcaactgctggaggcgaagatggaagagctggccaacaatgaagcaaagcaagggttgacgccagccaaactaaaaaaggagtatccttttttgaaggagaccgatagtttggcattggcgaatgcacaacggaatctggaccgagcgtttcgaaattactttcaaaagcgggctggctttccaaaaatgaaaaccaaaaaaagtatctggcaatcgtataccaccaataatcagcagcacaccatttattttgaagaggatcaaatcaagctgccaaagctcaaaacactggttcccgtaaaaaagcatcgggagatcaaagggaaaatcaaatcggcaacgatctcagcaaaaaataacgaagagttttacatctcgatcctttgtttggaagagatcacgccactcccgaaacagcaagcgtctatcgcggttgtttatgatccacagcagttggtcaaagccaaccagccggtacccatcacctgtgaacatgccatccaaacgaagcaaaagctgacacgagcagaacgcaaacttcaggtgaaagctacggcggtcaaacggaaaaaaatccttttgactcaggcacgaaattatcagaagctaaaaggaaaggtcgctcgcctttatcgttttcactgctgtcaaaagcgggaattcatcgatcaagtcagctaccatctcgtaaaacagtatgatacgatctatttggaacaaatcgcagaagatacggttttaaaagctggtcattacagcatcagtgattggcatcaattcgttcgcaaaatccagtacaaagcgcagtggtacggtaaagaactgcgttttgtcacgttggatacgcaggaccaacagaagctagaacggctctcaggcgaaatgagtagctgagccacttgaactggaaggaacgccagggatcgcctagggtatagaaaaaatctttaagatttttgtttctaggaaccacgttcac

SEQ ID NO: 814 - RNA, 1078 nt, synthetic construct
  source 1..1078: mol_type = other RNA
ctgggtgttttaaaagcatacaaatttcggatctatcctaatggacagcaaaaacagtttttcatcgaaaccttcggctgtgtacggtttacgtacaatcaactgctggaggcgaagatggaagagctggccaacaatgaagcaaagcaagggttgacgccagccaaactaaaaaaggagtatccttttttgaaggagaccgatagtttggcattggcgaatgcacaacggaatctggaccgagcgtttcgaaattactttcaaaagcgggctggctttccaaaaatgaaaaccaaaaaaagtatctggcaatcgtataccaccaataatcagcagcacaccatttattttgaagaggatcaaatcaagctgccaaagctcaaaacactggttcccgtaaaaaagcatcgggagatcaaagggaaaatcaaatcggcaacgatctcagcaaaaaataacgaagagttttacatctcgatcctttgtttggaagagatcacgccactcccgaaacagcaagcgtctatcgcggttgtttatgatccacagcagttggtcaaagccaaccagccggtacccatcacctgtgaacatgccatccaaacgaagcaaaagctgacacgagcagaacgcaaacttcaggtgaaagctacggcggtcaaacggaaaaaaatccttttgactcaggcacgaaattatcagaagctaaaaggaaaggtcgctcgcctttatcgttttcactgctgtcaaaagcgggaattcatcgatcaagtcagctaccatctcgtaaaacagtatgatacgatctatttggaacaaatcgcagaagatacggttttaaaagctggtcattacagcatcagtgattggcatcaattcgttcgcaaaatccagtacaaagcgcagtggtacggcaaagaactgcgttttgtcacgttggatacgcaggaccaacagaagctagaacggctctcaggcgaaatgagtagctgagccacttgaactggaaggaacgccagggatcgcctagggtatagaaaaaatctttaagatttttgtttctaggaaccacgttcac

SEQ ID NO: 815 - RNA, 1078 nt, synthetic construct
  source 1..1078: mol_type = other RNA
ctgggtgttttaaaagcatacaaatttcggatctatcctaatggacagcaaaaacagtttttcatcgaaactttcggctgtgtacggtttacgtacaatcaactgctggaggcgaagatggaagagctggccaacaatgaagcaaagcaagggttgacgccagccaaactaaaaaaggagtatccttttttgaaggagaccgatagtttggcattggcgaatgcacaacggaatctggatcgagcgtttcgaaattactttcaaaagcgggctggctttccaaaaatgaaaaccaaaaaaagtatctggcaatcgtataccaccaataatcagcagcacaccatttattttgaagaggatcaaatcaagctgccaaagcttaaaacactggttcccgtaaaaaagcatcgggagatcaaagggaaaatcaaatcggcaacgatctcagcaaaaaacaacgaagagttttacatctcgatcctttgtttggaagagatcacgccactcccgaaacagcaagcgtctatcgcggttgtttatgatccacagcagttggtcaaagccaaccagccggtacccatcacctgtgaacatgccatccaaacgaagcaaaagctgacacgagcagaacgcaaacttcaggtgaaagctacggcggtcaaacggaaaaaaatccttttgactcaggcacgaaattatcagaagctaaaaggaaaggtcgctcgcctttatcgttttcactgctgtcaaaagcgggaattcatcgatcaagtcagctaccatctcgtaaaacagtatgatacgatctatttggaacaaatcgcagaagatacggttttaaaagctggtcattacagcatcagtgattggcatcaattcgttcgtaaaatccagtacaaagcgcagtggtacggtaaagaactgcgttttgtcacgttggatacgcaggaccaacagaagctagaacggctctcaggcgaaatgagtagctgagccacttgaactggaaggaacgccagggatcgcctagggtatagaaaaaatctttaagatttttgtttctaggaaccacgttcac

SEQ ID NO: 816 - RNA, 1078 nt, synthetic construct
  source 1..1078: mol_type = other RNA
ctgggtgttttaaaagcatacaaatttcggatctatcctaatggacagcaaaaacagtttttcatcgaaaccttcggctgtgtacggtttacgtacaatcaactgctggaggcgaagatggaagagctggccaacaatgaagcaaagcaagggttgacgccagccaaactaaaaaaggagtatccttttttgaaggagaccgatagtttggcattggcgaatgcacaacggaatctggatcgagcgtttcgaaattactttcaaaagcgggctggctttccaaaaatgaaaaccaaaaaaagtatctggcaatcgtataccaccaataatcagcagcacaccatttattttgaagaggatcaaatcaagctgccaaagcttaaaacactggttcccgtaaaaaagcatcgggagatcaaagggaaaatcaaatcggcaacgatctcagcaaaaaacaacgaagagttttacatctcgatcctttgtttggaagagatcacgccactcccgaaacagcaagcgtctatcgcggttgtttatgatccacagcagttggtcaaagccaaccagccggtacccatcacctgtgaacatgccatccaaacgaagcaaaagctgacacgagcagaacgcaaacttcaggtgaaagctacggcggtcaaacggaaaaaaatccttttgactcaggcacgaaattatcagaagctaaaaggaaaggtcgctcgcctttatcgttttcactgctgtcaaaagcgggaattcatcgatcaagtcagctaccatctcgtaaaacagtatgatacgatctatttggaacaaatcgcagaagatacggttttaaaagctggtcattacagcatcagtgattggcatcaattcgttcgtaaaatccagtacaaagcgcagtggtacggtaaagaactgcgttttgtcacgttggatacgcaggaccaacagaagctagaacggctctcaggcgaaatgagtagctgagccacttgaactggaaggaacgccagggatcgcctagggtatagaaaaaatctttaagatttttgtttctaggaaccacgttcac

SEQ ID NO: 817 - RNA, 1078 nt, synthetic construct
  source 1..1078: mol_type = other RNA
ctgggtgttttaaaagcatacaaatttcggatctatcctaatggacagcaaaaacagtttttcatcgaaaccttcggctgtgtacggtttacgtacaatcaactgctggaggcgaagatggaagagctggccaacaatgaagcaaagcaagggttgacgccagccaaactaaaaaaggagtatccttttttgaaggagaccgatagtttggcattggcgaatgcacaacggaatctggaccgagcgtttcgaaattactttcaaaagcgggctggctttccaaaaatgaaaaccaaaaaaagtatctggcaatcgtataccaccaataatcagcaacacaccatttattttgaagaggatcaaatcaagctgccaaagctcaaaacactggttcccgtaaaaaagcatcgggagatcaaagggaaaatcaaatcggcaacgatctcagcaaaaaacaacgaagagttttacatctcgatcctttgtttggaagagatcacgccactcccgaaacagcaagcgtctatcgcggttgtttatgatccacagcagttggtcaaagccaaccagccggtacccatcacctgtgaacatgctatccaaacgaagcaaaagctgacacgagcagaacgcaaacttcaggtgaaagctacggcggtcaaacggaaaaaaatccttttgactcaggcacgaaattatcagaagctaaaaggaaaggtcgctcgcctttatcgttttcactgctgtcaaaagcgggaattcatcgatcaagtcagctaccatctcgtaaaacagtatgatacgatctatttggaacaaatcgcagaagatacggttttaaaagctggtcattacagcatcagtgattggcatcaattcgttcgcaaaatccagtacaaagcgcagtggtacggtaaagaactgcgttttgtcacgttggatacgcaggaccaacagaagctagaacggctctcaggcgaaatgagtagctgagccacttgaactggaaggaacgccagggatcgcctagggtatagaaaaaatctttaagatttttgtttctaggaaccacgttcac

SEQ ID NO: 818 - RNA, 1078 nt, synthetic construct
  source 1..1078: mol_type = other RNA
ctgggtgttttaaaagcatacaaatttcggatctatcctaatggacagcaaaaacagtttttcatcgaaaccttcggctgtgtacggtttacgtacaatcaactgctggaggcgaagatggaagagctggccaacaatgaagcaaagcaagggttgacgccagccaaactaaaaaaggagtatccttttttgaaggagaccgatagtttggcattggcgaatgcacaacggaatctggaccgagcgtttcgaaattactttcaaaagcgggctggctttccaaaaatgaaaaccaaaaaaagtatctggcaatcgtataccaccaataatcagcagcacaccatttattttgaagaggatcaaatcaagctgccaaagctcaaaacactggttcctgtaaaaaagcatcgggagatcaaagggaaaatcaaatcggcaacgatctcagcaaaaaacaacgaagagttttacatctcgatcctttgtttggaagagatcacgccactcccgaaacagcaagcgtctatcgcggttgtttatgatccacagcagttggtcaaagccaaccagccggtacccatcacctgtgaacatgccatccaaacgaagcaaaagctgacacgagcagaacgcaaacttcaggtgaaagctacggcggtcaaacggaaaaaaatccttttgactcaggcacgaaattatcagaagctaaaaggaaaggtcgctcgcctttatcgttttcactgctgtcaaaagcgggaattcatcgatcaagtcagctaccatctcgtaaaacagtatgatacgatctatttggaacaaatcgcagaagatacggttttaaaagctggtcattacagcatcagtgattggcatcaattcgttcgcaaaatccagtacaaagcgcagtggtacggtaaagaactgcgttttgtcacgttggatacgcaggaccaacagaagctagaacggctctcaggcgaaatgagtagctgagccacttgaactggaaggaacgccagggatcgcctagggtatagaaaaaatctttaagatttttgtttctaggaaccacgttcac

SEQ ID NO: 819 - RNA, 1078 nt, synthetic construct
  source 1..1078: mol_type = other RNA
ctgggtgttttaaaagcatacaaatttcggatctatcctaatggacagcaaaaacagtttttcatcgaaaccttcggctgtgtacggtttacgtacaatcaactgctggaggcgaagatggaagagctggccaacaatgaagcaaagcaagggttgacgccagccaaactaaaaaaggagtatccttttttgaaggagaccgatagtttggcattggcgaatgcacaacggaatctggatcgagcgtttcgaaattactttcaaaagcgggctggctttccaaaaatgaaaaccaaaaaaagtatctggcaatcgtataccaccaataatcagcagcacaccatttattttgaagaggatcaaatcaagctgccaaagcttaaaacactggttcccgtaaaaaagcatcgggagatcaaagggaaaatcaaatcggcaacgatctcagcaaaaaacaacgaagagttttacatctcgatcctttgtttggaagagatcacgccactcccgaaacagcaagcgtctatcgcggttgtttatgatccacagcagttggtcaaagccaaccagccggtacccatcacctgtgaacatgccatccaaacgaagcaaaagctgacacgagcagaacgcaaacttcaggtgaaagctacggcggtcaaacggaaaaaaatccttttgactcaggcacgaaattatcagaagctaaaaggaaaggtcgctcgcctttatcgttttcactgctgtcaaaagcgggaattcatcgatcaagtcagctaccatctcgtaaaacagtatgatacgatctatttggaacaaatcgcagaagatacggttttaaaagctggtcattacagcatcagtgattggcatcaattcgttcgcaaaatccagtacaaagcgcagtggtacggtaaagaactgcgttttgtcacgttggatacgcaggaccaacagaagctagaacggctctcaggcgaaatgagtagctgagccacttgaactggaaggaacgccagggatcgcctagggtatagaaaaaatctttaagatttttgtttctaggaaccacgttcac

SEQ ID NO: 820 - RNA, 1078 nt, synthetic construct
  source 1..1078: mol_type = other RNA
ctgggtgttttaaaagcatacaaatttcggatctatcctaatggacagcaaaaacagtttttcatcgaaaccttcggctgtgttcggtttacgtacaatcaactgctggaggcgaagatggaggagctggccaacaatgaagcaaagcaagggttgacgccagccaaactaaaaaaggagtatccttttttgaaggagaccgatagtttggcattggcgaatgcacaaaggaatctggaccgagcgtttcgaaattactttcaaaagcgggctggctttccaaaaatgaaaaccaaaaaaagtatttggcaatcgtatactacgaataatcagcagcacaccatttactttgaagaggatcaaatcaagctgccaaagctcaaaacactggttccagtaaaaaagcatcgggagatcaaagggaaaatcaaatcggcaacgatctcagcgaaaaacaatgaagagttttatatctcgattctttgtttggaagagatcacaccactcccgaaacagcaagcgtctatcgcggttgtttatgatccgcagcagctgatcaaagccaaccaatcggtaccggtcacttgtgagcatgcgatccaaacaaaacagaagctgacacgagcagaacgcaaacttcaggtgaaagctacggcggtcaaacggaaaaaaatccttttgactcaggcacggaattatcagaagctaaaaggaaaagtcgctcgcctctatcgttttcactgctgtcaaaagcgggaattcatcgatcaagtcagttatcatctcgtaaaacagtacgatacaatctatttggaacaaattgctgaagaaacggttctaaaagccggtcattacagcatcagcgattggcatcagtttgttcgcaaaatccagtacaaagcgcagtggtacggcaaagaactgcgttttgtcacgttggacacgcaggaccaacagaagctagagcggctctcaggcgaaatgagcagctgatctgcttgaactggaaggaacgccagggatcgcctagggtatagaaaaaatctttatgatttttgtttctaggaaccacgttcac

SEQ ID NO: 821 - RNA, 1078 nt, synthetic construct
  source 1..1078: mol_type = other RNA
ctgggtgttttaaaagcatacaaatttcggatctatcctaatggacagcaaaaacagtttttcatcgaaaccttcggctgtgttcggtttacgtacaatcaactgctggaggcgaagatggaggagctggccaacaatgaagcaaagcaagggttgacgccagccaaactaaaaaaggagtatccttttttgaaggagaccgatagtttggcattggcgaatgcacaaaggaatctggaccgagcgtttcgaaattactttcaaaagcgggctggctttccaaaaatgaaaaccaaaaaaagtatttggcaatcgtatactacgaataatcagcagcacaccatttactttgaagaggatcaaatcaagctgccaaagctcaaaacactggttccagtaaaaaagcatcgggagatcaaagggaaaatcaaatcggcaacgatctcagcgaaaaacaatgaagagttttatatctcgattctttgtttggaagagatcacaccactcccgaaacagcaagcgtctatcgcggttgtttatgatccgcagcagctgatcaaagccaaccaatcggtaccggtcacttgtgagcatgcgatccaaacaaaacagaagctgacacgagcagaacgcaaacttcaggtgaaagctacggcggtcaaacggaaaaaaatccttttgactcaggcacgaaattatcagaagctaaaaggaaaagtcgctcgcctctatcgttttcactgctgtcaaaagcgggaattcatcgatcaagtcagttatcatctcgtaaaacagtacgatacaatctatttggaacaaattgctgaagaaacggttctaaaagccggtcattacagcatcagcgattggcatcagtttgttcgcaaaatccagtacaaagcgcagtggtacggcaaagaactgcgttttgtcacgttggacacgcaggaccaacagaagctagagcggctctcaggcgaaatgagcagctgatctgcttgaactggaaggaacgccagggatcgcctagggtatagaaaaaatctttatgatttttgtttctaggaaccacgttcac

SEQ ID NO: 822 - RNA, 1078 nt, synthetic construct
  source 1..1078: mol_type = other RNA
ctgggtgttttaaaagcatacaaatttcggatctatcctaatggacagcaaaaacagtttttcatcgaaaccttcggctgtgttcggtttacgtacaatcaactgctggaggcgaagatggaggagctggccaacaatgaagcaaagcaagggttgacgccagccaaactaaaaaaggagtatccttttttgaaggagaccgatagtttggcattggcgaatgcacaaaggaatctggaccgagcgtttcgaaattactttcaaaagcgggctggctttccaaaaatgaaaaccaaaaaaagtatttggcaatcgtatactacgaataatcagcagcacaccatttactttgaagaggatcaaatcaagctgccaaagctcaaaacactggttccagtaaaaaagcatcgggagatcaaagggaaaatcaaatcggcaacgatctcagcgaaaaacaatgaagagttttatatctcgattctttgtttggaagagatcacaccactcccgaaacagcaagcgtctatcgcggttgtttatgatccgcagcagctgatcaaagccaaccaatcggtaccggtcacttgtgagcatgcgatccaaacaaaacagaagctgacacgagcagaacgcaaacttcaggtgaaagctacggcggtcaaacggaaaaaaatccttttgactcaggcacgaaattatcagaagctaaaaggaaaagtcgctcgcctctatcgttttcactgctgtcaaaagcgggaattcatcgatcaagtcagttatcatctcgtaaaacagtacgatacaatctatttggaacaaattgctgaagaaacggttctaaaagccggtcattacagcatcagcgattggcatcagtttgttcgcaaaatccagtacaaagcgcagtggtacggcaaagaactgcgttttgtcacgttggacacgcaagaccaacagaagctagagcggctctcaggcgaaatgagcagctgatctgcttgaactggaaggaacgccagggatcgcctagggtatagaaaaaatctttatgatttttgtttctaggaaccacgttcac

SEQ ID NO: 823 - RNA, 1078 nt, synthetic construct
  source 1..1078: mol_type = other RNA
ctgggtgttttaaaagcatacaaatttcggatctatcctaatggacagcaaaaacagtttttcatcgaaaccttcggctgtgttcggtttacgtacaatcaactgctggaggcgaagatggaggagctggccaacaatgaagcaaagcaagggttgacgccagccaaactaaaaaaggagtatccttttttgaaggagaccgatagtttggcattggcgaatgcacaaaggaatctggaccgagcgtttcgaaattactttcaaaagcgggctggctttccaaaaatgaaaaccaaaaaaagtatttggcaatcgtatactacgaataatcagcagcacaccatttactttgaagaggatcaaatcaagctgccaaagctcaaaacactggttccagtaaaaaagcatcgagaaatcaaagggaaaatcaaatcggcaacgatctcagcgaaaaacaatgaagagttttatatctcgattctttgtttggaagagatcacaccactcccgaaacagcaagcgtctatcgcagttgtttatgatccgcagcagctgatcaaagccaaccaatcggtaccggtcacttgtgagcatgcgatccaaacaaaacagaagctgacacgagcagaacgcaaacttcaggtgaaagctacggcggtcaaacggaaaaaaatccttttgactcaggcacggaattatcagaagctaaaaggaaaagtcgctcgcctctatcgttttcactgctgtcaaaagcgggaattcatcgatcaagtcagttatcatctcgtaaaacagtacgatacaatctatttggaacaaattgctgaagaaacggttctaaaagccggtcattacagcatcagcgattggcatcagtttgttcgcaaaatccagtacaaagcgcagtggtacggcaaagaactgcgttttgtcacgttggacacgcaggaccaacagaagctagagcggctctcaggcgaaatgagcagctgatctgcttgaactggaaggaacgccagggatcgcctagggtatagaaaaaatctttatgatttttgtttctaggaaccacgttcac

SEQ ID NO: 824 - RNA, 1078 nt, synthetic construct
  source 1..1078: mol_type = other RNA
ctgggtgttttaaaagcatacaaatttcggatctatcctaatggacagcaaaaacagtttttcatcgaaaccttcggctgtgttcggtttacgtacaatcaactgctggaggcgaagatggaggagctggccaacaatgaagcaaagcaagggttgacgccagccaaactaaaaaaggagtatccttttttgaaggagaccgatagtttggcattggcgaatgcacaaaggaatctggaccgagcgtttcgaaattactttcaaaagcgggctggctttccaaaaatgaaaaccaaaaaaagtatttggcaatcgtatactacgaataatcagcagcacaccatttactttgaagaggatcaaatcaagctgccaaagctcaaaacactggttccagtaaaaaagcatcgggaaatcaaagggaaaatcaaatcggcaacgatctcagcgaaaaacaatgaagagttttatatctcgattctttgtttggaagagatcacaccactcccgaaacagcaagcgtctatcgcagttgtttatgatccgcagcagctgatcaaagccaaccaatcggtaccggtcacttgtgagcatgcgatccaaacaaaacagaagctgacacgagcagaacgcaaacttcaggtgaaagctacggcggtcaaacggaaaaaaatccttttgactcaggcacgaaattatcagaagctaaaaggaaaagtcgctcgcctctatcgttttcactgctgtcaaaagcgggaattcatcgatcaagtcagttatcatctcgtaaaacagtacgatacgatctatttggaacaaattgctgaagaaacggttctaaaagccggtcattacagcatcagcgactggcatcagtttgttcgcaaaatccagtacaaggctcagtggtacggcaaagaactgcgttttgtcacgttggacacgcaggaccaacagaagctggaacggctctcaggcgaaatgagcagctgatccgcttgaactggaaggaacgccagggatcgcctagggtatagaaaaaatctttatgatttttgtttctaggaaccacgttcac

SEQ ID NO: 825 - RNA, 1078 nt, synthetic construct
  source 1..1078: mol_type = other RNA
ctgggtgttttaaaagcatacaaatttcggatctatcctaatggacagcaaaaacagtttttcatcgaaaccttcggctgtgttcggtttacgtacaatcaactgctggaggcgaagatggaggagctggccaacaatgaagcaaagcaagggttgacgccagccaaactaaaaaaggagtatccttttttgaaggagaccgatagtttggcattggcgaatgcacaaaggaatctggaccgagcgtttcgaaattactttcaaaagcgggctggctttccaaaaatgaaaaccaaaaaaagtatttggcaatcgtatactacgaataatcagcagcacaccatttactttgaagaggatcaaatcaagctgccaaagctcaaaacactggttccagtaaaaaagcatcgggaaatcaaagggaaaatcaaatcggcaacgatctcagcgaaaaacaatgaagagttttatatctcgattctttgtttggaagagatcacaccactcccgaaacagcaagcgtctatcgcagttgtttatgatccgcagcagctgatcaaagccaaccaatcggtaccggtcacttgtgagcatgcgatccaaacaaaacagaagctgacacgagcagaacgcaaacttcaggtgaaagctacggcggtcaaacggaaaaaaatccttttgactcaggcacgaaattatcagaagctaaaaggaaaagtcgctcgcctctatcgttttcactgctgtcaaaagcgggaattcatcgatcaagtcagttatcatctcgtaaaacagtacgatacgatctatttggaacaaattgctgaagaaacggttctaaaagccggtcattacagcatcagcgattggcatcagtttgttcgcaaaatccagtacaaagcgcagtggtacggcaaagaactgcgttttgtcacgttggacacgcaggaccaacagaagctagagcggctctcaggcgaaatgagcagctgatctgcttgaactggaaggaacgccagggatcgcctagggtatagaaaaaatctttatgatttttgtttctaggaaccacgttcac

SEQ ID NO: 826 - RNA, 1078 nt, synthetic construct
  source 1..1078: mol_type = other RNA
ctgggtgttttaaaagcatacaaatttcggatctatcctaatggacagcaaaaacagtttttcatcgaaaccttcggctgtgttcggtttacgtacaatcaactgctggaggcgaagatggaggagctggccaacaatgaagcaaagcaagggttgacgccagccaaactaaaaaaggagtatccttttttgaaggagaccgatagtttggcattggcgaatgcacaaaggaatctggaccgagcgtttcgaaattactttcaaaagcgggctggctttccaaaaatgaaaaccaaaaaaagtatttggcaatcgtatactacgaataatcagcagcacaccatttactttgaagaggatcaaatcaagctgccaaagctcaaaacactggttccagtaaaaaagcatcgggagatcaaagggaaaatcaaatcggcaacgatctcagcgaaaaacaatgaagagttttatatctcgattctttgtttggaagagatcacaccactcccgaaacagcaagcgtctatcgcggttgtttatgatccgcagcagctgatcaaagccaaccaatcggtaccggtcacttgtgagcatgcgatccaaacaaaacagaagctgacacgagcagaacgcaaacttcaggtgaaagctacggcggtcaaacggaaaaaaatccttttgactcaggcacgaaattatcagaagctaaaaggaaaagtcgctcgcctctatcgttttcactgctgtcaaaagcgggaattcatcgatcaagtcagttatcatctcgtaaaacagtacgatacaatctatttggaacaaattgctgaagaaacggttctaaaagccggtcattacagcatcagcgattggcatcagtttgttcgcaaaatccagtacaaagcgcagtggtacggcaaagaactgcgttttgtcacgttggacacgcaggaccaacagaagctagagcggctctcaggcgaaatgagcagctgatctgcttgaactggaaggaacgccagggatcgcctagggtatagaaaaaatctttctgatttttgtttctaggaaccacgttcac

SEQ ID NO: 827 - RNA, 1078 nt, synthetic construct
  source 1..1078: mol_type = other RNA
ctgggtgttttaaaagcatacaaatttcggatctatcctaatggacagcaaaaacagtttttcatcgaaaccttcggctgtgttcggtttacgtacaatcaactgctggaggcgaagatggaggagctggccaacaatgaagcaaagcaagggttgacgccagccaaactaaaaaaggagtatccttttttgaaggagaccgatagtttggcattggcgaatgcacaaaggaatctggaccgagcgtttcgaaattactttcaaaagcgggctggctttccaaaaatgaaaaccaaaaaaagtatttggcaatcgtatactacgaataatcagcagcacaccatttactttgaagaggatcaaatcaagctgccaaagctcaaaacactggttccagtaaaaaagcatcgggaaatcaaagggaaaatcaaatcggcaacgatctcagcgaaaaacaatgaagagttttatatctcgattctttgtttggaagagatcacaccactcccgaaacagcaagcgtctatcgcggttgtttatgatccgcagcagctgatcaaagccaaccaatcggtaccggtcacttgtgagcatgcgatccaaacaaaacagaagctgacacgagcagaacgcaaacttcaggtgaaagctacggcggtcaaacggaaaaaaatccttttgactcaggcacggaattatcagaagctaaaaggaaaagtcgctcgcctctatcgttttcactgctgtcaaaagcgggaattcatcgatcaagtcagttatcatctcgtaaaacagtacgatacaatctatttggaacaaattgctgaagaaacggttctaaaagccggtcattacagcatcagcgattggcatcagtttgttcgcaaaatccagtacaaagcgcagtggtacggcaaagaactgcgttttgtcacgttggacacgcaggaccaacagaagctagagcggctctcaggcgaaatgagcagctgatctgcttgaactggaaggaacgccagggatcgcctagggtatagaaaaaatctttatgatttttgtttctaggaaccacgttcac

SEQ ID NO: 828 - RNA, 1078 nt, synthetic construct
  source 1..1078: mol_type = other RNA
ctgggtgttttaaaagcatacaaatttcggatctatcctaatggacagcaaaaacagtttttcatcgaaaccttcggctgtgttcggtttacgtacaatcaactgctggaggcgaagatggaggagctggccaacaatgaagcaaagcaagggttgacgccagccaaactaaaaaaggagtatccttttttgaaggagaccgatagtttggcattggcgaatgcacaaaggaatctggaccgagcgtttcgaaattactttcaaaagcgggctggctttccaaaaatgaaaaccaaaaaaagtatttggcaatcgtatactacgaataatcagcagcacaccatttactttgaagaggatcaaatcaagctgccaaagctcaaaacactggttccagtaaaaaagcatcgggagatcaaagggaaaatcaaatcggcaacgatctcagcgaaaaacaatgaagagttttatatctcgattctttgtttggaagagatcacaccactcccgaaacagcaagcgtctatcgcggttgtttatgatccgcagcagctgatcaaagccaaccaatcggtaccggtcacttgtgagcatgcgatccaaacaaaacagaagctgacacgagcagaacgcaaacttcaggtgaaagctacggcggtcaaacggaaaaaaatccttttgactcaggcacggaattatcagaagctaaaaggaaaagtcgctcgcctctatcgttttcactgctgtcaaaagcgggaattcatcgatcaagtcagttatcatctcgtaaaacagtacgatacaatctatttggaacaaattgctgaagaaacggttctaaaagccggtcattacagcatcagcgattggcatcagtttgttcgcaaaatccagtacaaagcgcagtggtacggcaaagaactgcgttttgtcacgttggacacgcaggaccaacagaagctagagcggctctcaggcgaaatgagcagctgatctgcttgaactggaaggaacgccagggatcgcctagggtatagaaaaaatctttctgatttttgtttctaggaaccacgttcac

SEQ ID NO: 829 - RNA, 1110 nt, synthetic construct
  source 1..1110: mol_type = other RNA
atgctaaaagcttttaaattccgtatgtatccgacagaagaacaaaaacagcaattgatccgtacttttggctgtgttcgatttacctataaccatttgctgaaagaacggcagaaaagttggcaacaaacaggagtggccgatttttcgctcacacctgctacgttaaaaaaagaatacccattcttaaaagaggtagacagtcttgctttagcaaatgcacaacttaatttggaccgagcttttcgcaattatttcaagggacgtgccagctttccaaagcttaaaacgaaaaaaagtatgtggcaatcttatacgacgaataatcaaactcatacggtctatctgaaaagcggctacttaaaattaccaaaacaaaaagaactgatcaagataaaccagcaccgtccagtcgaaggcacgattcgttccgctacgatttctgctcgatataatgaagagttctatgtcgcactactttgtgatgtttcatcaataaaaaaagaatcttcagctaaatggattgggattgcctatcatccaaaaacattgatcgaaacatcgcagcccatagaagtaactttgccaaaatttgaccagacagaagaaaaacttcagcatgcacagcggaaattaagcgtaaaagtccgctccgctcaccatagaaagaccaggttagatcaggcaagcaattatcagaaacaaaagagaaaagtaatggatctttatctgaaacaaaagaaccagcgagaagattatcttgaacaattatctgggaaattggtcaaacaatatgactacttatttgtagaatcttttccaaaagaagaagcacatgctgatttttctattcatgactggcataaattaataacaaaattgcgttataagtcccaatggtataataaaaaatttctttttatcaataccgacggagcagaagaaagcaattctgtaagaaagagccaagtgttagaacaactaggcaggcattcggttatcaaggaataaaaaatgaatgaaactgacaggagcgttagggttcgccttgttaataaaaagtctgattgacttttgtttctaggaattttcttttgaagaaaagctcac

SEQ ID NO: 830 - RNA, 1096 nt, synthetic construct
  source 1..1096: mol_type = other RNA
atgctaaaagcctttaaatttcgaatctatcccactgattcacaaaaacagtggttgatccaaacatttggttgtgtgcgtttcacttacaatcatttattaaaagccagacaggcgtattatttagaaacacaagagatcgattatacgctgacaccagcttctttaaaaaagcaatatccgtttttaaaggaagtcgatagtttagccttagcgaatgcccaattaaacttggatcgtgcatttcgtaattattttaaaggacgcgcaagcttccccaaactaaaaaataaaaaaagtatttggcagtcgtatacgacgaataatcaaaaaggaacaatctatttagaagaaacatacctcaaattgccaaagctaaaagagaaaattcgcatccatgcacatcgtccgattgaaggaacgattcgttcagcaacgatctcatctcgatacaacgagatcttttatgtctccttgctctgtgaagttccccaaaagacgatgaaagcgtcaaataaatggatcgggatagcctatgatccagatcgtctagtggagatgtccacaccgcttgacatcacgatccctaaattcaaacaagtggatcaacagctcctgcgggcaaagagaaagcttgtgatcaaaggacgatcagcacagcatcgacgaacacacgttgaaagagtaaaaaattatcaaaagcaaaaaaggaaaatcaaagacctttatttaaaacaaaaatttcaacgagaagactatttggaacaaatttcaggaacggtgatccgtcattatgattatttgtttgtcgaatcgatttcagcagattgtccggaaggtgatttttctatccaagactggcacaagctattagcaaagctccaatataaatcgcaatggtatagcaaaaagttagtattgatcgatatgaaagaacaaacaaatccttccacaaacaaaaagagtctggaattagttgaaatcgggaagcaagtcctttttgaataaaaaaactggtaggggcgccagggttcgccttgctaataaaaaacatctattgtttttgtttctaggaatttctttcagagaagctcac

SEQ ID NO: 831 - RNA, 1096 nt, synthetic construct
  source 1..1096: mol_type = other RNA
atgctaaaagcctttaaatttcgaatctatcccactgattcacaaaaacagtggttgatccaaacatttggttgtgtgcgtttcacttacaatcatttattaaaagccagacaggcgtattatttagaaacacaagagatcgattatacgctgacaccagcttctttaaaaaagcaatatccgtttttaaaggaagtcgatagtttagccttagcgaatgcccaattaaacttggatcgtgcatttcgtaattattttaaaggacgcgcaagcttccccaaactaaaaaataaaaaaagtatttggcagtcgtatacgacgaataatcaaaaaggaaccatctatttagaagaaacatacctcaaattgccaaagctaaaagagaaaattcgcatccatgcacatcgtccgattgaaggaacgattcgttcagcaacgatctcatctcgatacaacgagatcttttatgtctccttgctctgtgaagttccccaaaagacgatgaaagcgtcaaataaatggatcgggatagcctatgatccagatcgtctagtggagatgtccacaccgcttgacatcacgatccctaaattcaaacaagtggatcaacagctcctgcgggcaaagagaaagcttgtgatcaaaggacgatcagcacagcatcgacgaacacacgttgaaagagtaaaaaattatcaaaagcaaaaaaggaaaatcaaagacctttatttaaaacaaaaatttcaacgagaagactatttggaacaaatttcaggaacggtgatccgtcattatgattatttgtttgtcgaatcgatttcagcagattgtccggaaggtgatttttctatccaagactggcacaagctattagcaaagctccaatataaatcgcaatggtatagcaaaaagttagtattgatcgatatgaaagaacaaacaaatccttccacaaacaaaaagagtctggaattagttgaaatcgggaagcaagtcctttttgaataaaaaaactggtaggggcgccagggttcgccttgctaataaaaaacatctattgtttttgtttctaggaatttctttcagagaagctcac

SEQ ID NO: 832 - RNA, 1096 nt, synthetic construct
  source 1..1096: mol_type = other RNA
atgctaaaagcctttaaatttcgaatctatcccactgattcacaaaaacagtggttgatccaaacatttggttgtgtgcgtttcacttacaatcatttattaaaagccagacaggcgtattatttagaaacacaagagatcgattatacgctgacaccagcttctttaaaaaagcaatatccgtttttaaaggaagtcgatagtttagccttagcaaatgcccaattaaacttggatcgtgcatttcgtaattattttaaaggacgcgcaagcttccccaaactaaaaaataaaaaaagtatttggcagtcgtatacgacgaataatcaaaaaggaacaatctatttagaagaaacatacctcaaattgccaaagctaaaagagaaaattcgcatccatgcacatcgtccgattgaaggaacgattcgttcagcaacgatctcatctcgatacaacgagatcttttatgtctccttgctctgtgaagttccccaaaagacgatgaaagcgtcaaataaatggatcgggatagcctatgatccagatcgtctagtggagatgtccacaccgcttgacatcacgatccctaaattcaaacaagtggatcaacagctcctgcgggcaaagagaaagcttgtgatcaaaggacgatcagcacagcatcgacgaacacacgttgaaagagtaaaaaattatcaaaagcaaaaaaggaaaatcaaagacctttatttaaaacaaaaatttcaacgagaagactatttggaacaaatttcaggaacggtgatccgtcattatgattatttgtttgtcgaatcgatttcagcagattgtccggaaggtgatttttctatccaagactggcacaagctattagcaaagctccaatataaatcgcaatggtatagcaaaaagttagtattgatcgatatgaaagaacaaacaaatccttccacaaacaaaaagagtctggaattagttgaaatcgggaagcaagtcctttttgaataaaaaaactggtaggggcgccagggttcgccttgctaataaaaaacatctattgtttttgtttctaggaatttctttcagagaagctcac

SEQ ID NO: 833 - RNA, 1012 nt, synthetic construct
  source 1..1012: mol_type = other RNA
atgaaaaatttaaagggttatcgatttagaatttatcccaatgaagcacaaaaaaggttctttattgaaacgtttggttgtgttcgcttcatctataattattttctgaagttagatacagctgagcgcacaagtgaagagattattacgccagcgagtctcaaacgtgattatccttttttaaaaaagacggatagtctagcccttgcaaatgcgaagagaaatttagatagggcttttcaaaattactatcaacagcgtagtggctatcctaagttgaaaaataagagttctgtctggcaatcttacacgaccaataatcaaaacgggacagtacgtatagaggatggttatctgaaattgccaaagttaaaagaaaaaattcaaatatgcgaacatcgaaaaattactggcaaaattaaatcagtgactatttcagcgaagaataacgaggagttttatgcttcgattttgtgcgtggaaaccattgataagttcgagaaaacaggtaaaaaaatcagactttcttttgatgcgcatcaattagtccaacaagcgaaatatcgtgctgaagtgattgaacccattcaacatacgaaaggacgtctggcgtttttacaacgaagattaaaggtaaaggctcgggttgcgcgtaagcaaaatcggatattagccgactgtaagaattaccagaagcaaaaaaaacagtatgacaaattattgacacaccttaataatcagataaaagattatttgaatcatttatctatcttttatattaaggaatatgatgtaatcgaaattgtcgaaccagaagataggtcttgtgctgaagatgctttattcaccagcaatgaatggcatcgattagttcgtttattgaaatataaagcacaatggtacggtaaagagattcaaatcataaattgtcaaaatatttaaaaaaataactggtaggggtgccagggttcgcctaggtaataattgatttgtttctaggaaaagtgcccac

SEQ ID NO: 834 - RNA, 1012 nt, synthetic construct
  source 1..1012: mol_type = other RNA
atgaaaaatttaaagggttatcgatttagaatttatcccaatgaagcacaaaaaaggttctttattgaaacgtttggttgtgttcgcttcatctataattattttctgaagttagatacagctgagcgcacaagtgaagagattattacgccagcgagtctcaaacgtgattatccttttttaaaaaagacggatagtctagcccttgcaaatgcgaagagaaatttagatagggcttttcaaaattactatcaacagcgtagtggctatcctaagttgaaaaataagagttctgtctggcaatcttacacgaccaataatcaaaacgggacagtacgtatagaggatggttatctgaaattgccaaagttaaaagaaaaaattcaaatatgcgaacatcgaaaaattactggcaaaattaaatcagtgactatttcagcgaagaataacgaggagttttatgcttcgattttgtgcgtggaaaccattgataagttcgagaaaacaggtaaaaaaatcagactttcttttgatgcgcatcaattagtccaacaaacgaaatatcgtgctgaagtgattgaacccattcagcatacgaaaggacgtctggcgtttttacaacgaagattaaaggtaaaggctcgggttgcgcgtaagcaaaatcggatattagccgactgtaagaattaccagaagcaaaaaaaacagtatgacaaattattgacacatcttaataatcagataaaagattatttgaatcatttatctatcttttatattaaggaatatgatgtaatcgaaattgtcgaaccagaagataggccttgtgctaaagatgatttattcaccagcaatgaatggcatcaattagttcgtttattgaaatataaagcacaatggtacggtaaagagattcaaatcataaattgtcaaaatatttaaaaaaataactggtaggggtgccagggttcgcctaggtaataattgatttgtttctaggaaaagtgcccac

SEQ ID NO: 835 - RNA, 1012 nt, synthetic construct
  source 1..1012: mol_type = other RNA
atgaaaaatttaaagggttatcgatttagaatttatcccaatgaagcacaaaaaaggttctttattgaaacgtttggttgtgttcgcttcatctataattattttctgaagttagatacagctgagcgcacaagtgaagagattattacgccagcgagtctcaaacgtgattatccttttttaaaaaagacggatagtctagcccttgcaaatgcgaagagaaatttagatagggcttttcaaaattactatcaacagcgtagtggctatcctaagttgaaaaataagagttctgtctggcaatcttacacgaccaataatcaaaacgggacagtacgtatagaggatggttatctgaaattgccaaagttaaaagaaaaaattcaaatatgcgaacatcgaaaaattactggcaaaattaaatcagtgactatttcagcgaagaataacgaggagttttatgcttcgattttgtgcgtggaaaccattgataagttcgagaaaacaggtaaaaaaatcagactttcttttgatgcgcatcaattagtccaacaagcgaaatatcatgctgaagtgattgaacccattcagcatacaaaaggacgtctggcgtttttacaacgaagattaaaggtaaaggctcgggttgcgcgtaagcaaaatcggatattagccgactgtaagaattaccagaagcaaaaaaaacagtatgacaaattattgacacaccttaataatcagataaaagattatttgaatcatttatctatcttttatattaaggaatatgatgtaatcgaaattgtcgaaccagaagataggtcttgtgctgaagatgctttattcaccagcaatgaatggcatcaattagttcgtttattgaaatataaagcacaatggtacggtaaagagattcaaatcataaattgtcaaaatatttaaaaaaataactggtaggggtgccagggttcgcctaggtaataattgatttgtttctaggaaaagtgcccac

SEQ ID NO: 836 - RNA, 1013 nt, synthetic construct
  source 1..1013: mol_type = other RNA
atgaaaaatttaaagggttatcgatttagaatttatcccaatgaagcacaaaaaaggttctttattgaaacgtttggttgtgttcgcttcatctataattattttctgaagttagatacagctgagcgcacaagtgaagagattattacgccagcgagtctcaaacgtgattatccttttttaaaaaagacggatagtctagcccttgcaaatgcgaagagaaatttagatagggcttttcaaaattactatcaacagcgtagtggctatcctaagttgaaaaataagagttctgtctggcaatcttacacgaccaataatcaaaacgggacagtacgtatagaggatggttatctgaaattgccaaagttaaaagaaaaaattcaaatatgcgaacatcgaaaaattactggcaaaattaaatcagtgactatttcagcgaagaataacgaggagttttatgcttcgattttgtgcgtggaaaccattgataagttcgagaaaacaggtaaaaaaatcagactttcttttgatgcgcatcaattagtccaacaagcgaaatatcatgctgaagtgattgaacccattcagcatacaaaaggacgtctggcgtttttacaacgaagattaaaggtaaaggctcgggttgcgcgtaagcaaaatcggatattagccgactgtaagaattaccagaagcaaaaaaaacagtatgacaaattattgacacaccttaataatcagataaaagattatttgaatcatttatctatcttttatattaaggaatatgatgtaatcgaaattgtcgaaccagaagataggtcttgtgctgaagatgctttattcaccagcaatgaatggcatcaattagttcgtttattgaaatataaagcacaatggtacggtaaagagattcaaatcataaattgtcaaaatatttaaaaaaaataactggtaggggtgccagggttcgcctaggtaataattgatttgtttctaggaaaagtgcccac

SEQ ID NO: 837 - RNA, 1104 nt, synthetic construct
  source 1..1104: mol_type = other RNA
gtgcttatgctaaaagcctttaaattccgaatttacccgactgcttcacaaaaagaatggttcatccaaaattttggttgtgtgcgttttacgtataaccatttgctaaaagcacgacaggaaagttatgcgagaacaggtgccatcgattattcgatgacacctgcaacattaaaaaaaaaatacgcatttttaaaatcagcagatagcttagcattagcaaatgcccaattaaatttagatcgcgcttttcgcaattatttcaatgggcgtgctagtttccctaaactgaagaacaaaaaaagtatgtggcagtcttatacaacaaataatcaaaaaggaacgatttatttggaagataagtacttgaaactgccgaaacaaaaagagctgatccaagtgagattacatcgtccggtcgaaggtgttatacggtcagcgacgatttcagcacggtataatgaaagtttctatgtttctctactttgtgaagtacaaatcgccggagtgccaactactaatcgatggctaggggtagcatatgatccaaagaaattggtggaaacttcatcaccagttgaggtacaaatgccattgttcaggcaaacgagagataagatgaaggttgccaagagaaaactggtgattaaaagtaaagcagctcaaaaaagaaaagttcgcttggaaaatgctagaaattatcagaaacaaaagagaaaagtaatggatctttatcaggaacaaaaattacaaaaagaagattacttggaaagagtatctggtaatttgatccgcaattatgattacttatttgttgaagctgttccatctgaactttcttcagccgattttcagttgcaagattggtataaattgattacaaaattgcgatataaagcgcagtggtacaataaaacattgctttttatcaatgtgaacgagcaattgaatgaaccacctgaaaaaaaaagtatggagttagaaaaaatcgggaaacaagtgatttttgaataatcgaactggtaggggtgccagggatcgccttgctaataaaaaacataacttgtttttgtttctaggaattttctttaaagaaaagctcac

SEQ ID NO: 838 - RNA, 1096 nt, synthetic construct
  source 1..1096: mol_type = other RNA
atgctaaaagcctttaaatttcgaatctatcccactgagtcacaaaaacagtggttgatccaaacatttggttgtgtgcgtttcacttacaatcatttattaaaagccagacaggcgtattatttagaaacgaaagaaatcgattatacgctgacaccagcttctttaaaaaagcaatatccgtttttaaaggaagtcgatagtttagccttagcgaatgcccaattaaacttggatcgtgcatttcgtaattattttaaaggacgcgcaagcttccccaaactgaaaaataaaaaaagtatttggcagtcgtatacgacaaacaatcaaaaaggaacgatctatttagaagaaacatctatcaaactgccaaagttaaaagaaaaaatccgcatccatgcgcatcgtccgattgaaggaacgattcgctcagcgacgatctcgtctcgatacaatgagattttttatgtctccttgctctgtgaagttccccaaaagacaatggaagcgtcaaataaatggatcgggatagcttatgatccagatcgtctagtggagatgtccaccccgcttgatatcgcgatccctaaattcaaacaagtcgatcaacaactccagcgagcaaagagaaaacttgtgatcaaaggacgagcagcacagcatcgacgagcacacgttgaaagagtgaaaaattatcaaaagcaaaaaagaaaaatcaaagacttgtatttaaaacaaaaatttcaacgagaagattattttgaacaaatttcaggaacagtgatccgtcattatgattatttgtttgtcgaatcaattccagcagattgtcgggaaggtgatttttctatccaagattggcacaagctattagcaaagctccaatacaaagcgcaatggtatagcaaaaagctagtattgatcgatatgaaagaacaaacgaatccttccacaactaaaaagagtctggaattagttgaaatcgggaaacaagtcctttttgaataataaaactggtaggggcgccagggttcgccttgtttataaaaaacatttattgtttttgtttctaggaatttctttcagaaaagctcac

SEQ ID NO: 839 - RNA, 1120 nt, synthetic construct
  source 1..1120: mol_type = other RNA
atgaaaaatttaaagggttatcgatttagaatttatcccaatgaagcacaaaaaaggttcttcattgaaacgtttggttgtgttcgctttatctacaattattttttgaagttagatacagctgagcgcacaagtgaagaggtaatcacgccagcaagtcttaagcgtgattatccctttttaaaaaagacggatagtctagcccttgcaaatgcgaagagaaatttagatagggcttttcaaaattactatcaacagcgtagtggctatcctaagctcaaaaataagagttctgcctggcaatcttacacgaccaataatcaaaatggtacggttcgcatagaggatggttatttgaaattgccaaagttaaaagaaaaaattcaaatatgcgaacatcggaaaattactggtaaaatcaagtcggtgaccatctcagccaaaaataatgaagagttttatgcttcaattttgtgtgtagaaactattgataaatttgagaaaacaggcaagaaaatcagactttctttcgatgaacatcaattagtcaaacaagcgaagtatcgtgctgaagtgattgaacccattcagcaaacgaaaggccgtcttgagtttttacaacgaaaattaaaggtaaaggctcgagttgctcgcaagcaaaatcgggtattagccgactgtaagaattaccaaaagcaaaaaaagcaatatgataaattattgacacaccttaataatcagataaaagattatttaaatcatttatccatcttttatattaaggaatatgatgtaatcgaaattgtcgaaccagaagataggtcttgtgctaaagatgatttattcaccagcaatgaatggcatcaattaactcgtttattaaaatacaaagcacaatggtacggtaaagagattcaaatcataaattgtcaaaatatttaaacaaaactaactggtaggggtgccagggttcgcctaggtaataattcatttgtttctaggaaatgtgcccactaattatgaaaaaccacaaaaaaatcagcctatttcgggctgatttttttatcggtctttaactggtagatttttgatggtcgtccaacaccacttgcacgttcac

SEQ ID NO: 840 - RNA, 1012 nt, synthetic construct
  source 1..1012: mol_type = other RNA
atgaaaaatttaaagggttatcgatttagaatttatcccaatgaagcacaaaaaaggttctttattgaaacgtttggttgtgttcgcttcatctataattattttctgaagttagatacagctgagcgcacaagtgaagagattattacgccagcgagtctcaaacgtgattatccttttttaaaaaagacggatagtctagcccttgcaaatgcgaagagaaatttagatagggcttttcaaaattactatcaacagcgtagtggctatcctaagttgaaaaataagagttctgtctggcaatcttacacgaccaataatcaaaacgggacagtacgtatagaggatggttatctgaaattgccaaagttaaaagaaaaaattcaaatatgcgaacatcgaaaaattactggcaaaattaaatcagtgactatttcagcgaagaataacgaggagttttatgcttcgattttgtgcgtggaaaccattgataagttcgagaaaacaggtaaaaaaatcagactttcttttgatgcgcatcaattagtccaacaagcgaaatatcgtgctgaagtgattgaacccattcagcatacgaaaggacgtctggcgtttttacaacgaagattaaaggtaaaggctcgggttgcgcgtaagcaaaatcggatattagtcgactgtaagaattaccagaagcaaaaaaaacagtatgacaaattattgacacatcttaataatcagataaaagattatttgaatcatttatctatcttttatattaaggaatatgatgtaatcgaaattgtcgaaccagaagataggccttgtgctaaagatgatttattcaccagcaatgaatggcatcaattagttcgtttattgaaatataaagcacaatggtacggtaaagagattcaaatcataaattgtcaaaatatttaaaaaaataactggtaggggtgccagggttcgcctaggtaataattgatttgtttctaggaaaagtgcccac

SEQ ID NO: 841 - RNA, 1074 nt, synthetic construct
  source 1..1074: mol_type = other RNA
gaagaacaaaaacagcaattgattcgtacttttggctgtgttcgatttacctataaccatttgctgaaagaacggcagaaaagttgacaacaaacaggagtggccgatttttcgctcacgcctgctacgttaaaaaaagaatacccattcttaaaagaggtagacagtcttgctttagcaaatgcacagcttaatttggaccgagcttttcgcaattatttcaagggacgtgccagctttccaaagcttaaaacgaaaaaaagtatgtggcaatcttatacgacgaataatcaaacccatacggtctatctgaaaaacggtcacttaaaattaccaaaacaaaaagaactgatcaagataaaccagcaccgtccagtcgaaggcacgattcgttccgctacgatttctgctcgatataatgaagagttctatgtcgcactactttgtgatgtttcatcaataaaaaaagaatcttcagctaaatggattgggattgcctatcatccaaaaacattgatcgaaacatcgcagcctatagaagtaactttgccaaaatttgaccagacagaagaaaaacttcagcatgcacagcggaaattaagcgtaaaagtccgctccgctcaccatagaaagaccaggttagataaggcaagcaattatcagaaacaaaagagaaaagtaatggatctttatctgaaacaaaagaaccagcgagaagattatcttgaacaattatctgggaaattggtcaaacaatatgactacttatttgtagaatcttttccaaaagaagaggcacatgctgatttttctattcatgactggcataaattaataacaaaattgcgttataagtcccaatggtataataaaaaatttcttttgatcaataccgacggagcagaagaaagcaattctgtaagaaagagccaagtgttagaacaactaggtaggcattcggtcatcaaggaataaaaaatgaatgaaactgacaggagcgttagggttcgccttgttaataaaaagtctgattgacttttgtttctaggaattttcttttgaagaaaagctcac

SEQ ID NO: 842 - RNA, 1120 nt, synthetic construct; identical to SEQ ID NO: 839
  source 1..1120: mol_type = other RNA

SEQ ID NO: 843 - RNA, 1099 nt, synthetic construct
  source 1..1099: mol_type = other RNA
atgctaaaagcctttaaattccgaatttacccgactactttacaaaagcaatggtttattcaaaattttggctgtgttcgttttacgtataactacttattaaaagttcgacaagaaagttacgctaaaacaggtgccatcgattatacggtgacacctgcctctttaaaaaagaagtatccatttttaaaaacagcagacagtttagccctagcaaacgcccaattaaatttggatcgtgcatttcgtaattattttaaaggtcgtgcaagttttcctaagttaaaaaataaaaaaagtatgtggcagtcttacacaaccaataatcaaaatggcaccatttatttagaaaagaattatttaaaactgccaaagcaaaaagaacgaattaaagtgaatcttcatcgtcctgttgaaggagttattcgttcagccacgatttcagctcgttataatgaggtgttttatgtctctttactttgtgaagtctctgctcaaaatttagagggttcaaatcgttggattggcgtagcatacgatccacaaaaattaattgaaacatcttctccactgaatgtgcaattaccattactaaagcaaacgcaagacagcataaagattgctcagagaaaattatggatcaaaagtaaagctgctcaaaaacgaaaagttcgtttagaaaaggctaagaactaccaaaaacaaaagagaaaagtcatggacctttatttgaagcaaaaataccaaaaggaagattatttggaacaactctcaggaaaactcatacgtcattatgattatttatttattgaagctgtgccaaatgattgcctgtcaacgaaattttcacttcaagactggtataaatttattcataaattaaggtataaagcgcattggtataataaatctttgcttttgattaacgtgaatgagcagtctcatctttcatgcaatcaaaaaagtgtaacattagaaaacatcggaaaacaaatgatgtttgacgaaatgaactagtaggagcactagggatcgccttgttaataaaaaacacacgatgtttttgtttctaggaattttctgtttagaaagagctcac

SEQ ID NO: 844 - RNA, 1012 nt, synthetic construct; identical to SEQ ID NO: 840
  source 1..1012: mol_type = other RNA

SEQ ID NO: 845 - RNA, 1012 nt, synthetic construct
  source 1..1012: mol_type = other RNA
atgaaaaatttaaagggttatcgatttagaatttatcccaatgaagcacaaaaaaggttctttattgaaacgtttggttgtgttcgcttcatctataattattttctgaagttagatacagctgagcgcacaagtgaagagattattacgccagcgagtctcaaacgtgattatccttttttaaaaaagacggatagcctagcccttgcaaatgcgaagagaaatttagatagggcttttcaaaattactatcaacagcgtagtggctatcctaagttgaaaaataagagttctgtctggcaatcttacacgaccaataatcaaaacgggacagtacgtatagaggatggttatctgaaattgccaaagttaaaagaaaaaattcaaatatgcgaacatcgaaaaattactggcaaaattaaatcagtgactatttcagcgaagaataacgaggagttttatgcttcgattttgtgcgtggaaaccattgataagttcgagaaaacaggtaaaaaaatcagactttcttttgatgcgcatcaattagtccaacaagcgaaatatcgtgctgaagtgattgaacccattcagcatacgaaaggacgtctggcgtttttacaacgaagattaaaggtaaaggctcgggttgcgcgtaagcaaaatcggatattagtcgactgtaagaattaccagaagcaaaaaaaacagtatgacaaattattgacacatcttaataatcagataaaagattatttgaatcatttatctatcttttatattaaggaatatgatgtaatcgaaattgtcgaaccagaagataggccttgtgctaaagatgatttattcaccagcaatgaatggcatcaattagttcgtttattgaaatataaagcacaatggtacggtaaagagattcaaatcataaattgtcaaaatatttaaaaaaataactggtaggggtgccagggttcgcctaggtaataattgatttgtttctaggaaaagtgcccac

SEQ ID NO: 846 - RNA, 1012 nt, synthetic construct; identical to SEQ ID NO: 840
  source 1..1012: mol_type = other RNA

SEQ ID NO: 847 - RNA, 1012 nt, synthetic construct
  source 1..1012: mol_type = other RNA
atgaaaaatttaaagggttatcgatttagaatttatcccaatgaagcacaaaaaaggttctttattgaaacgtttggttgtgttcgcttcatctataattattttctgaagttagatacagctgagcgcacaagtgaagagattattacgccagcgagtctcaaacgtgattatccttttttaaaaaagacggatagtctagcccttgcaaatgcgaaaagaaatttagatagggcttttcaaaattactatcaacagcgtagtggctatcctaagttgaaaaataagagttctgtctggcaatcttacacgaccaataatcaaaatgggacagtacgtatagaggatggttatctgaaattgccaaagttaaaagaaaaaattcaaatatgcgaacatcgaaaaattactggcaaaattaaatcagtgactatttcagcgaagaataacgaggagttttatgcttcgattttgtgcgtggaaaccattgataagttcgagaaaacaggtaaaaaaatcagactttcttttgatgcgcatcaattagtccaacaagcgaaatatcgtgctgaagtgattgaacccattcagcatacgaaaggacgtctggcgtttttacaacgaagattaaaggtaaaggctcgggttgcgcgtaagcaaaatcggatattagtcgactgtaagaattaccagaagcaaaaaaaacagtatgacaaattattgacacaccttaataatcagataaaagattatttgaatcatttatctatcttttatattaaggaatatgatgtaatcgaaattgtcgaaccagaagataggccttgtgctaaagatgatttattcaccagcaatgaatggcatcaattagttcgtttattgaaatataaagcacaatggtacggtaaagagattcaaatcataaattgtcaaaatatttaaaaaaataactggtaggggtgccagggttcgcctaggtaataattgatttgtttctaggaaaagtgcccac

SEQ ID NO: 848 - RNA, 1110 nt, synthetic construct
  source 1..1110: mol_type = other RNA
atgctaaaagcttttaaattccgtatgtatccgacagaagaacaaaaacagcaattgatccgtacttttggctgtgttcgatttacctataaccatttgctgaaagaacggcagaaaagttggcaacaaacaggagtggtcgatttttcgctcacgcctgctacgttaaaaaaagaatacccattcttaaaagaggtagacagtcttgctttagcaaatgcacagcttaatttggaccgagcttttcgcaattatttcaagggacgtgccagcttcccaaagcttaaaacgaaaaaaagtatgtggcaatcttatacgacaaataatcaaactcatacggtctatctgaaaaacggccacttaaaattaccaaaacaaaaagaactaatcaagataaaccagcaccgtccagtcgaaggcacgattcgttccgctacgatttctgctcgatataatgaagagttctatgtcgcactactttgtgatgtttcatcaataaaaaaagaatcgtcagctaaatggattgggattgcctatcatccaaaaacattgatcgaaacatcgcatcccatagaagtaactttaccaaaatttgaccagacagaagaaaaacttcagcatgcacagcggaaattaagcgtaaaagtccgctccgctcaccatagaaagaccaggttagatcaggcaagcaattatcagaaacaaaagagaaaagtaatggatctttatctgaaacaaaagaaccagcgagaagattatcttgaacaattatctgggaaattggtcaaacaatatgactacttatttgtagaatcttttccaaaagaagatgcacatgctgatttttctattcatgactggcataaattaataaaaaaattgcgttataagtcccaatggtataataaaaaatttcttttgatcaataccgacggagcagaagaaagcaattttgtaagaaagagccaagtgttagaacaactaggcaggcattcggtcattaaggaataaaaaatgaatgaaactgacaggagcgttagggttcgccttgttaataaaaagtctgattgacttttgtttctaggaattttcttttgaagaaaagctcac

SEQ ID NO: 849 - RNA, 1055 nt, synthetic construct
  source 1..1055: mol_type = other RNA
atggaagtattgaaagcatacaaatttcggctctatccaacacaacagcaacggcgtttctttattgaaacattcggctgtgtccgtttcacctataatacattgctgaaatatcgacaagaatcccacaaaccaaaaaatgtcaggctgacaccggctaggctaaaggaagattttccatttttgaaaaagaccgatagccttgccttggcaaatgcacagctcaacttggaacgggcatttcgcaattattataaaggacatgccggctatcctaaattgaaaaccaaacgctgtatctggcaatcctatacgacgaacaaccagcaccatacgatctattttcaagatggaaagctgaagctgccaaagctcaagacattggtttcattgaacaagcatcgtgaagtacctggtcagataaaatcggcgacgatctcggctaaaaacaaccgaatcttttatgtctcgatcctttgtaaagagaaagttgttccgctgccgctgaccaagcgatctgttagactgaatttttctaaaacctgcttagtagaagcttcagattcggaattgtctttccctgatttttcgcaagcggaaatcgaaggcaaattgcagaaagctgaacggaagctagccgttcgcgggaaagctgctcgtaatcgtcatatttctctttcacaagctaaaaactatcaaaagcagaaagaaaaagtcagaaatctgtatacccattattacgaacgtaaaaaaacgtatctcaatgaactgtcgatgcagatcatccgtacttatgacgaaatctatgtcgaaacaaacaacaaacgtgtcaatgcaacaggaccatttacttcttcagattggttccatttcattcaaaaactgaaatataaagcagtctggtatggtaagacagtctatctaaatgaagaaaaccgatcaaaaatcggctgatttataaaagcaataaaacatgaactggaaggagctccagggatcgcctagggtatagaaaaaatttaacaggaatttttgtttctaggaaagctgctcac

SEQ ID NO: 850 - RNA, 377 nt, synthetic construct
  source 1..377: mol_type = other RNA
gcttaagcagcataaaaagttatcgcaagcccagaattatcaaaaacaaaagcagcgtgtcaatcggttgtacgtccatcgccaaaaccaaaaaaacgcgctgtttgacaagttatcgatacatttagttcgagaatatgatcggatctatatccaaaacctgccatcacaggaagaatcagagaaaatattttattccactgattggcagcgttttttgaccaaactgtcttataaagctgaatggtatggaaaagagattatcctggacgagtaaagaacattcagatagaaatatgagaaaagctcaatataacttatgaagattacacacttattaaaaaagtgtgcagataaattcagatgtttatatgtgc

SEQ ID NO: 851 - RNA, 1092 nt, synthetic construct
  source 1..1092: mol_type = other RNA
gtgaaagtattaaaaggttataaatttcgtatttaccctaatgaaaaacaaatacaatattttatacagactttcggttgtgtccgttttacctataaccatttgttacatgctcggcaaaaagcattgcaagcaggggattatcagacacaagtctctccagctagtttgaaaagagactatccgtttttaaagaagacggatagtctagctttagctaatgcgcaacgcaatttagatcgtgcttttaagaactattttagtaaaagagcgggttatcctaagctgaaaacaaaaaaaaacaattggcagtcctatacgacaaataatcaaaagcacacgatttattttgttgggaatcagttaaagttgcctaaacttaaatcgctagttacggtaaatttgcatagaaaagtagcaggcgaaataaaatcagcaacagtttcggctcaaaataaccaaatgttttttgtttctcttctctgtttagaggagataaaccccttacctaaaaccggcacgaccattggtgttgcctactgtccagagaatttagtccaaatgtcagcagtcaatcgcttgcctgtctataagcaagagacacttcaatatcaattggataaagccattaaacgtttggaggttcgagcaaaagcagctaaaagacgtaaagtgctactcgagcaggcaaaaaattatcaaaaacaaaaaagtaaagttcaaaaactgtatatggcaaaaaacgatcagaaaaaaaactacatcgaccagttaacttatcgtttggtacatgattatgactgtatttgtttagaaaaacagccagaatttactgaaaatacaaaattctctgaaactgattggcaacattttttgcgtaaaatccaatataaagcgcgttggtatgataaacaacttgtatttgttgattctattgaaaaagaaaatgaaacaaaatgttttactattgaacaagtaggcaaaaaactaattaaccaataaaaaagttataagaactggaagggacgccagggatcgcctaggggatagaaaaaattttcattaatttttgtttctaggaatattgttcac

SEQ ID NO: 852 - RNA, 1092 nt, synthetic construct
  source 1..1092: mol_type = other RNA
gtgaaagtattaaaaggttataaatttcgtatttaccctaatgaaaaacaaatacaatattttatacagactttcggttgtgtccgttttacctataaccatttgttacatgctcggcaaaaagcattgcaagcaggggattatcagacacaagtctctccagctagtttgaaaagagactatccgtttttaaagaagacggatagtctagctttagctaatgcgcaacgcaatttagatcgtgcttttaagaactattttagtaaaagagcgggctatcctaagctgaaaacgaaaaaaaacaattggcagtcctatacgacaaataatcaaaagcacacgatttattttgttgggaatcagttaaagttgcctaaacttaaatcgctagttacggtaaatttgcatagaaaagtagcaggcgaaataaaatcagcaacagtttcggctcaaaataaccaaatgttttttgtttctcttctctgtttagaggagataaaccccttacctaaaaccggcacgaccattggtgttgcctactgtccagagaatttagtccaaatgtcagcagtcaatcgcttgcctgtctataagcaagagacacttcaatatcaattggataaagccattaaacgtttggaggttcgagcaaaagcagctaaaagacgtaaagtgctactcgagcaggcaaaaaattatcaaaaacaaaaaagtaaagttcaaaaactgtatatggcaaaaaacgatcagaaaaaaaactacatcgaccagttaacttatcgtttggtacatgattatgactgtatttgtttagaaaaacagccagaatttactgaaaatacaaaattctctgaaactgattggcaacattttttgcgtaaaatccaatataaagcgcgttggtatgataaacaacttgtatttgttgattctattgaaaaagaaaatgaaacaaaatgttttactattgaacaagtaggcaaaaaactaattaaccaataaaaaagttataagaactggaagggacgccagggatcgcctaggggatagaaaaaattttcattaatttttgtttctaggaatattgttcac

SEQ ID NO: 853 - RNA, 1092 nt, synthetic construct
  source 1..1092: mol_type = other RNA
gtgaaagtattaaaaggttataaatttcgtatttaccctaatgaaaaacaaatacaatattttatacagactttcggttgtgtccgttttacctataaccatttgttacatgctcggcaaaaagcattgcaagcaggggattatcagacacaagtctctccagctagtttgaaaagagactatccgtttttaaagaagacggatagtctagctttagctaatgcgcaacgcaatttagatcgtgcttttaagaactattttagtaaaagagcgggttatcctaagctgaaaacgaaaaaaaacaattggcagtcctatacgacaaataatcaaaagcacacgatttattttgttgggaatcagttaaagttgcctaaacttaaatcgctagttacggtaaatttgcatagaaaagtagcaggcgaaataaaatcagcaacagtttcggctcaaaataaccaaatgttttttgtttctcttctctgtttagaggagataaaccccttacctaaaaccggcacgaccattggtgttgcctactgtccagagaatttagtccaaatgtcagcagtcaatcgcttgcctgtctataagcaagagacacttcaatatcaattggataaagccattaaacgtttggaggttcgagcaaaagcagctaaaagacgtaaagtgctactcgagcaggcaaaaaattatcaaaaacaaaaaagtaaagttcaaaaactgtatatggcaaaaaacgatcagaaaaaaaactacatcgaccagttaacttatcgtttggtacatgattatgactgtatttgtttagaaaaacagccagaatttactgaaaatacaaaattctctgaaactgattggcaacattttttgcgtaaaatccaatataaagcgcgttggtatgataaacaacttgtatttgttgattctattgaaaaagaaaatgaaacaaaatgttttactattgaacaagtaggcaaaaaactaattaaccaataaaaaagttataagaactggaagggacgccagggatcgcctaggggatagaaaaaattttcattaatttttgtttctaggaatattgttcac

SEQ ID NO: 854 - RNA, 1096 nt, synthetic construct
  source 1..1096: mol_type = other RNA
atgctaaaagcctttaaatttcgaatctatcccactgattcacaaaaacagtggttgatccaaacatttggttgtgtgcgtttcacttacaatcatttattaaaagccagacaggcgtattatttagaaacacaagagatcgattatacgctgacaccagcttctttaaaaaagcaatatccgtttttaaaggaagtcgatagtttagccttagcgaatgcccaattaaacttggatcgtgcatttcgtaattattttaaaggacgcgcaagctttcccaaactaaaaaataaaaaaagtatttggcagtcgtatacgacgaataatcaaaaaggaacaatctatttagaagaaacatacctcaaattgccaaagctaaaagagaaaattcgcatccatgcccatcgtccgattgaaggaacgattcgttcagcaacgatctcatctcgatacaacgagatcttttatgtctccttgctctgtgaagttcccccaaagacgatgaaagcgtcaaataaatggatcgggatagcctatgatccagatcgtctagtggagatgtccacaccacttgacatcacgattccaaaattcaaacaagttgatcaacaactcctgcgggcaaagagaaagcttgtgatcaaaggacgatcagcacagcatcgacgcacacacgttgaaagagtaaaaaattatcaaaagcaaaaaaggaaaatcaaagacctttatttaaaacaaaaatttcaacgagaagactatttagaacaaatttcaggaacagtgattcgtcattatgattatttgtttgtcgaatcgatttcagcagattgtccggaaggcgatttttctatccaagactggcacaagctattagcaaagctccaatataaatcgcaatggtatagcaaaaagttagtattgatcgatatgaaagaacaaacaaatccttccacaaataaaaagagtctggaattaattgaaatcgggaagcaagtcctgtttgaataaaaaaactggtaggggcgccagggttcgccttgctaataaaaaacatctattgtttttgtttctaggaatttctttcagagaagctcac

SEQ ID NO: 855 - RNA, 1095 nt, synthetic construct
  source 1..1095: mol_type = other RNA
atgctaaaagcctttaaatttcgaatctatcccactgattcacaaaaacagtggttgatccaaacatttggttgtgtgcgtttcacttacaatcatttattaaaagccagacaggcgtattatttagaaacacaagagatcgattatacgctgacaccagcttctttaaaaaagcaatatccgtttttaaaggaagtcgatagtttagccttagcgaatgcccaattaaacttggatcgtgcatttcgtaattattttaaaggacgcgcaagctttcccaaactaaaaaataaaaaaagtatttggcagtcgtatacgacgaataatcaaaaaggaacaatctatttagaagaaacataccttaaattgccaaagctaaaagagaaaattcgcatccatgcccatcgtccgattgaaggaacgattcgttcagcaacgatctcatctcgatacaacgagatcttttatgtctccttgctctgtgaagttcccccaaagacgatgaaagcgtcaaataaatggatcgggatagcctatgatccagatcgtctagtggagatgtccacaccacttgacatcacgattccaaaattcaaacaagttgatcaacaactcctgcgggcaaagagaaagcttgtgatcaaaggacgatcagcacagcatcgacgcacacacgttgaaagagtaaaaaattatcaaaagcaaaaaaggaaaatcaaagacctttatttaaaacaaaaatttcaacgagaagactatttagaacaaatttcaggaacagtgattcgtcattatgattatttgtttgtcgaatcgatttcagcagattgtccggaaggcgatttttctatccaagactggcataagctattagcaaagctccaatataaatcgcaatggtatagcaaaaagttagtattgatcgatatgaaagaacaaacaaatccttccacaaataaaaagagtctggaattaattgaaatcgggaagcaagtcctgtttgaataaaaaactggtaggggcgccagggttcgccttgctaataaaaaacatctattgtttttgtttctaggaatttctttcagagaagctcac

SEQ ID NO: 856 - RNA, 1078 nt, synthetic construct
  source 1..1078: mol_type = other RNA
ctgggtgttttaaaagcatacaaatttcggatctatcctaatggacagcaaagacagtttttcatcgaaaccttcggctgtgtacgttttacgtacaatcaactgctggaggcaaagatggaggagctggccaacaatgaagcaaagcaagggttgacgccagccaaactaaaaaaagagtatccttttttgaaggagaccgatagtttggcattggcgaatgcacaacggaatctggaccgagcgtttcgaaattactttcaaaagcgggctggctttccaaaaatgaaaaccaaaaaaagtatctggcaatcgtataccaccaataatcagcagcacaccatttattttgaagacgatcaaatcaagctgccaaagcttaaaacattggttcccgtaaaaaagcatcgggcgatcaaaggcaagatcaaatcggcaacgatctcagcaaaaaacaacgaagagttttacatctcgatcctttgtttggaagagatcccgccattgccgaagcagcaagcctctgtcgctgttgtttatgatccgcagcagttggtcaaagccaaccagccgatacccatcacctgtgaacatgccatccaaacgaagcaaaagctgacgcgagcagaacgcaaacttcaggtgaaagcgacggcggtcaaacggaaaaaaatccttttgacccaggcgcgaaattatcagaagctaaaaggaaaggtcgctcgcctttatcgttttcactgctgtcaaaagcgggaattcatcgatcaagtcagctaccatctcgtaaaacagtacgatacgatctatttggaacaaatcgcagaagatacggttttaaaagctggtcattacagcatcagtgattggcatcaattcgttcgcaaaatccagtacaaagcgcagtggtacggcaaagaactgcgttttgtcacgttggatacgcaggaccaacagaagctagaacggctctcaggcgaaatgagcagctgagccgcttgaactggaaggaacgccagggatcgcctagggtatagaaaaaatctttctgatttttgtttctaggaaccacgttcac

SEQ ID NO: 857 - RNA, 1078 nt, synthetic construct
  source 1..1078: mol_type = other RNA
ctgggtgttttaaaagcatacaaatttcggatctatcctaatggacagcaaagacagtttttcatcgaaaccttcggctgtgtacgttttacgtacaatcaactgctggaggcaaagatggaggagctggccaacaatgaagcaaagcaagggttgacgccagccaaactaaaaaaggagtatccttttttgaaggagaccgatagtttggcattggcgaatgcacaacggaatctggaccgagcgtttcgaaattactttcaaaagcgggctggctttccaaaaatgaaaaccaaaaaaagtatctggcaatcgtataccactaataatcagcagcacaccatttattttgaagacgatcaaatcaagctgccaaagcttaaaacattggtcccagtaaaaaagcatcgggcgatcaaaggaaagatcaaatcggcaacgatctcagcaaaaaacaacgaagagttttacatctcgatcctttgtttggaagagatcccgccattgccgaagcagcaagcctctgtcgctgttgtttatgatccgcagcagttggtcaaagccaaccagccgatacccatcacctgtgaacatgccatccaaacgaagcaaaagctgacgcgagcagaacgcaaacttcaggtgaaagcgacggcggtcaaacggaagaaaatccttttgacccaggcgcgaaattatcagaagctaaaaggaaaggtcgctcgcctttatcgttttcactgctgtcaaaagcgggaattcatcgatcaagtcagctaccatctcgtaaaacagtacgatacgatctatttggaacaaatcgcagaagatacggttttaaaagctggtcattacagcatcagtgattggcatcaattcgttcgcaaaatccagtacaaagcgcagtggtacggcaaagaactgcgttttgtcacgttggatacgcaggaccaacagaagctagaacggctctcaggcgaaatgagcagctgagccgcttgaactggaaggaacgccagggatcgcctagggtatagaaaaaatctttctgatttttgtttctaggaaccacgttcac

SEQ ID NO: 858 - RNA, 1078 nt, synthetic construct
  source 1..1078: mol_type = other RNA
ctgggtgttttaaaagcatacaaatttcggatctatcctaatggacagcaaagacagtttttcatcgaaaccttcggctgtgtacgttttacgtacaatcaactgctagaggcaaagatggaggagctggccaacaatgaagcaaagcaagggttgacgccagccaaactaaaaaaggagtatccttttttgaaggagaccgatagtttggcattggcgaatgcacaacggaatctggaccgagcgtttcgaaattactttcaaaagcgggctggctttccaaaaatgaaaaccaaaaaaagtatctggcaatcgtataccaccaataatcagcagcacaccatttattttgaagacgatcaaatcaaactgccaaagcttaaaacattggttcccgtaaaaaagcatcgggcgatcaaaggcaagatcaaatcggcaacgatctcagcaaaaaacaacgaagagttttacatctcgatcctttgtttggaagagatcccgccattgccgaagcagcaagcctctgtcgctgttgtttatgatccgcagcagttggtcaaagccaaccagccgatacccatcacctgtgagcatgccatccaaacgaagcaaaagctgacgcgagcagaacgcaaacttcaggtgaaagcgacggcggtcaaacggaagaaaatccttttgacccaggcgcgaaattatcagaagctaaaaggaaaggtcgctcgcctttatcgttttcactgctgtcaaaagcgggaattcatcgatcaagtcagctaccatctcgtaaaacagtacgatacgatctatttggaacaaatcgcagaagatacggttttaaaagctggtcattacagcatcagtgattggcatcaattcgttcgtaaaatccagtacaaagcgcagtggtacggcaaagaactgcgttttgttacgttggatacgcaggaccaacagaagctagaacggctctcaggcgaaatgagcagctgagccgcttgaactggaaggaacgccagggatcgcctagggtatagaaaaaatctttctgatttttgtttctaggaaccacgttcac

SEQ ID NO: 859 - RNA, 1110 nt, synthetic construct
  source 1..1110: mol_type = other RNA
atgctaaaagcttttaaattccgtatgtatccgacagaagaacaaaaacagcaattgattcgtacttttggctgtgttcgatttacctataaccatttgctgaaagaacggcagaaaagttggcaacaaataggagtggccgatttttcgctcacgcctgctacgttaaaaaaagaatacccattcttaaaagaggtagacagtcttgctttagcaaatgcacagcttaatttggaccgagcttttcgcaattatttcaagggacgtgccagctttccaaagcttaaaacgaaaaaaagtatgtggcaatcttatacgacgaataatcaaacccatacggtctatctgaaaaacggtcacttaaaattaccaaaacaaaaagaactgatcaagataaaccagcaccgtccagtcgaaggcacgattcgttccgctacgatttctgctcgatataatgaagagttctatgtcgcactactttgtgatgtttcatcaataaaaaaagaatcttcagctaaatggattgggattgcctatcatccaaaaacattgatcgaaacatcgcagcccatagaagtaactttgccaaaatttgaccagacagaagaaaaacttcagcatgcacagcggaaattaagcgtaaaagtccgctccgctcaccatagaaagaccaggttagataaggcaagcaattatcagaaacaaaagagaaaagtaatggatctttatctgaaacaaaagaaccagcgagaagattatcttgaacaattatctgggaaattggtcaaacaatatgactacttatttgtagaatcttttccaaaagaagaggcacatgctgatttttctattcatgactggcataaattaataacaaaattgcgttataagtcccaatggtataataaaaaatttcttttgatcaataccgacggagcagaagaaagcaattctgtaagaaagagccaagtgttagaacaactaggtaggcattcggtcatcaaggaataaaaaatgaatgaaactgacaggagcgttagggttcgccttgttaataaaaagtctgattgacttttgtttctaggaattttcttttgaagaaaagctcac

SEQ ID NO: 860 - RNA, 1104 nt, synthetic construct
  source 1..1104: mol_type = other RNA
gtgcttatgctaaaagcctttaaattccgaatttacccgactgcttcacaaaaagaatggttcatccaaaattttggttgtgtgcgttttacgtataaccatttgctaaaagcacgacaggaaagttatgcgagaacaggtgccatcgattattcgatgacacctgcaacattaaaaaaaaaatacgcatttttaaaatcagcagatagcttagcattagcaaatgcccaattaaatttagatcgcgcttttcgcaattatttcaatgggcgtgctagtttccctaaactgaagaacaaaaaaagtatgtggcagtcttatacaacaaataatcaaaaaggaacgatttatttggaagataagtacttgaaactgccgaaacaaaaagagctgattcaagtgagattacatcgtccggtcgaaggtgttatacggtcagcgacgatttcagcacggtataatgaaagtttctatatttctctactttgtgaagtacaaatcgccggagtgccaactactaatcgatggctaggggtagcatatgatccaaagaaattggtggaaacttcatcaccagttgaggtacaaatgccattgttcaggcaaacgagagataagatgaaggttgccaagagaaaactggtgattaaaagtaaagcagctcaaaaaagaaaagctcgcttggaaaatgctagaaattatcagaaacaaaagagaaaagtaatggatctttatcagaaacaaaaattacaaaaagaagattacttggaaagagtatctggtaatttgatccgcaattatgattacttatttgttgaagctgttccatctgaactttcttcagccgattttcagttgcaagattggtataaattgattacaaaattgcgatataaagcgcagtggtacaataaaacattgctttttatcaatgtgaacgagcaattgaatgaaccacctgaaaaaaaaagtatggagttagaaaaaatcgggaaacaagtgatttttgaataatcgaactggtaggggtgccagggatcgccttgctaataaaaaacataacttgtttttgtttctaggaattttctttaaagaaaagctcac

SEQ ID NO: 861 - RNA, 1030 nt, synthetic construct
  source 1..1030: mol_type = other RNA
ttgaacgtattgaaggcctataaatttcgcatctatcccacgcttgagcagcaacagtttttcatcgagacttttgggtgcgtccgtttcacctacaatgtcttgctgaaaaatcgggagcatcaagaattgcgggagtatcctgaagaagcgctgacaccagcgaagttgaaacaggactatccttttctcaaaaaaaccgatagcctcgccttagccaacgctcagcgaaatcttgagcgggcgtttcgcaattattatgccggccgttgcagtcatcccaaattgaaaaccaaaaaagccatgtggcagtcttacactaccaacaatcaacaagggacgatccgcatcgaaaatagccagctgaaactgccgaaaatcaaaagcttggtcccccttcatcaacatcgtgaaatcaagggaaccatcaagtccgccaccatttctgccaaaaatctggaagagttctacgtgtctctcctttgcgaagagcaagtgcgccacttacccaaaaccaaacaaaagctgacgattcactattctcctggccagctcttgactaccgatcagcagctggatttaactgctttcgatcaggagcaattgaagcaaaaaatcgccaaggaagaacgtcgcttagaagttcggggtatcagtgctcgccgccgcttggtcaagcttaaggatgcgaaaaattatcaaaaacaaaaaaagcgggtcctggctttgcatcgccacaaacgcgctcgtcaagaagcctatatggatgaactctccttgcttttggtgaaggaatttgacacgatccacatcctcgccaccccgccacagtccactggcaattttagctactctgactggcaaaaattcttacaaaaactgacttataaagcccattggtatggcaaaacgctccaccatgaagccaccgccaagcaaggctgacacctatgaactggaagggactccagggatcgcctagggtatagaaaaaatcacgcatttttgtttctaggaagcagttgtccac

SEQ ID NO: 862 - RNA, 1047 nt, synthetic construct
  source 1..1047: mol_type = other RNA
ttgaaggttttgaaggcctataaatttcgaatctatccgacttctgagcaacgtcaattttttatcgaaacctttggatgcgttcgttttacgtataactccctgctaaaaaatcgggaatatcgtgatcttcgagatgatcctggcgagctgttaacccctgcaaagctgaaacaaaagcatccttttttgaaaaaaaccgacagtctggcgttagccaatgcccaacgaaatctggatcgagcctttcgcaactactatgccggtcgttgcagtcatcccaaattgaaaaccaaaaaggcgatgtggcaatcgtacactactaacaatcaacaagggacaattcgcattgaaaccggccgcttgaagctacccaagatcaaaacactgatcccgctgctgttgcatcgagaaatcaagggtgaaatcaagtctgcgactatttctgccaaaaacctcgaagaattctatgtttcccttttatgcgaagagcaagtggcacacctacccaagacaagccgtacaatcagtatccgtttttgtccccaacaattggttttggccgatgctccactctctggtcttggcttttgtcaaaaggagctgtccgaaaaactcctcaaagaagaacgacgcttggcaattcgagccctcagcgcccgccgccgattggtaaaactaaaggaagccaaaaattatcagaagcaaaaaaatcgcgtcatggatctccaacgccacaagcgggctcggcaaaaggcctatatggacgagctctcgttgaccttagtcaaagattttgatgagattattatttgctttgagccaaagcagtcagctgtagctttcaactggtcagattggcaaaagttcctgcaaaagttaaaatacaaagcacgttggtacggcaaaaccgtcaatctccaaaccctcagcaaaaatgcctgaactgataaatcagcagttgcttatgaactggaagggactccagggatcgcctagggtatagaaaaaatcacagtatttttgtttctaggaatcactgtccac

SEQ ID NO: 863 - RNA, 1240 nt, synthetic construct
  source 1..1240: mol_type = other RNA
attaagacattaaaggcttatagatttgcgctttatcctgacgaagcccaaaaacatttttttattcagacttttggctgcgttcgttttacgtataatatgctgttaacactacgacagcaagaaagtggcaaaactgttgaagaacgtacttcagcacgtttacaaaaacagaagatgacgccagctaagttaaaaaaagattatccttttttaaaagcaacagatagcttagctttggctaatgcacagcgtaatttggaaaaagcttttcaaaattattatcgcggtcgtgccagttatcccaagttaaaaagtaagaaaagtgcttggcagtcgtatacgacgaataatcaaggacatactatttacctagcagaagacggtttgaagcttcctaagttaaaaagcaaagttttagtgcatcaacatcgcagcgttgcagggaaaattcgttcagcaactatttcagctaaaaatcggcaagaattttatgtttctttattatgtgaagaagacattccggcattacccaaaacgggcagtgaaattgaaattgcctacgatccaacaggcttggtggtgacgaataaacctattgtggggatacccaccttttgccaaacccaagttctagaaaaactaaaaaaagcgcaacgccgacttagttgtcgggctaagagtgcgcaacgccgcaatgctaaactagaacaagcgaaaaactatcaaaagcaaaaatcccaggtgcaacaattgtatattcacaagctgaaacaaaaagaggatttcaccgaacaactttctattgctcttttgcgccagtttgattgtattattatcacaaaaccaccagaattgcgggagaataaagaaagcaaagcggctaaaaccgtaaaaaaaagtaaacacaccactgttttcccaagttttgaggataattttactttaagtgattggaatcggttgcttttaaaattaaaatataaggccgagtggtatgaaaaagagctggtttttatttgtcctactaatggaaaataaaactggcgcaggaagtctagcgcactttctttataatgaattgatttaaactgatttaatcaagtgtttgccagcgaaatacgttacaaaaagaataactatttttgtaaaactggaaggagctccagggttcgccttgggtatataaaaagtgttgacacttttgtttctaggaatccgctcactaattatgattaac

SEQ ID NO: 864 - RNA, 1014 nt, synthetic construct
  source 1..1014: mol_type = other RNA
atgaaaaatttaaagggttatcgatttagaatttatcccaatgaagcacaaaaaaggttctttattgaaacgtttggttgtgttcgcttcatctataattattttctgaagttagatacagctgagcgcacaagtgaagagattattacgccagcgagtctcaaacgtgattatccttttttaaaaaagacggatagtctagccctcgcaaatgcgaagagaaatttagatagggcttttcaaaattactatcaacagcgtagtggctatcctaagttgaaaaataagagttctgtctggcaatcttacacgaccaataatcaaaacgggacagtacgtatagaggatggttatctgaaattgccaaagttaaaagaaaaaattcaaatatgcgaacatcgaaaaattactggcaaaattaaatcagtgactatttcagcgaagaataacgaggagttttatgcttcgattttgtgcgtggaaaccattgataagttcgagaaaacaggtaaaaaaattagactttcttttgatacacatcaattagtccaacaagcgaaatatcgtgctgaagtgattgaacccattcagcatacgaaaggacgtctagcgtttttacaacgaagattaaaggtaaaggctcggggtgcacgtaagcaaaatcggatattagccgattgtaagaattaccagaagcaaaaaaaacagtatgacaaattattgacacaccttaataatcagataaaagattatttgaatcatttatctatcttttatattaaggaatatgatgtaatcgaaattgtcgaaccagaagataggtcttgtgctgaagatgctttattcacaagtaatgaatggcatcaattagttcgtttattgaagtataaagcacaatggtacggtaaagagattcaaatcataaattgtcaaaatatttaagcaaaaataactggtaggggtgccagggttcgcctaggtaataattgatttgtttctaggaaatgtgcccac

SEQ ID NO: 865 - RNA, 1012 nt, synthetic construct
  source 1..1012: mol_type = other RNA
atgaaaaatttaaagggttatcgatttagaatttatcccaatgaagcacaaaaaaggttctttattgaaacgtttggttgtgttcgcttcatctataattattttctgaagttagatacagctgagcgcacaagtgaagagattattactccagcgagtctcaagcgcgattatccttttttaaaaaagacggatagtctagcccttgcaaatgcgaaaagaaatctagatagggcttttcaaaattactatcaacagcgtagtggctatcctaagttgaaaaataagagttctgcctggcaatcttacacgaccaataatcaaaatggtacggttcgcatagaggatggttatttgaaattgccaaagttaaaagaaaaaattcagatatgcgaacatcggaaaattactggtaaaatcaagtcggtgaccatctcagccaaaaataatgaagagttttatgcttcaattttgtgtgtagaaactattgataaatttgagaaaacaggcaagaaaatcagactttctttcgatgaacatcaattagtcaaacaagcgaagtatcgtgctgaagtgattgaacccattcagcatacgaaaggacgtctggcgtttttacaacgaagattaaaggtaaaggctcgggttgcgcgtaagcaaaatcggatattagccgactgtaagaattaccagaagcaaaaaaaacagtatgacaaattattgacacaccttaataatcagataaaagattatttgaatcatttatctatcttttatattaaggaatatgatgtaatcgaaattgtcgaaccagaagataggtcttgtgctgaagatgctttattcaccagcaatgaatggcatcaattagttcgtttattgaaatataaagcacaatggtacggtaaagagattcaaatcataaattgtcaaaatatttaaaaaaataactggtaggggtgccagggttcgcctaggtaataattgatttgtttctaggaaaagtgcccac

SEQ ID NO: 866 - RNA, 1012 nt, synthetic construct
  source 1..1012: mol_type = other RNA
atgaaaaatttaaagggttatcgatttagaatttatcccaatgaagcacaaaaaaggttctttattgaaacgtttggttgtgttcgcttcatctataattattttctgaagttagatacagctgagcgcacaagtgaagagattattacgccagcgagtctcaaacgtgattatccttttttaaaaaagacggatagtctagcccttgcaaatgcgaagagaaatttagatagggcttttcaaaattactatcaacagcgtagtggctatcctaagttgaaaaataagagttctgtctggcaatcttacacgaccaataatcaaaacgggacagtacgtatagaggatggttatctgaaattgccaaagttaaaagaaaaaattcaaatatgcgaacatcgaaaaattactggcaaaattaaatcagtgactatttcagcgaagaataacgaggagttttatgcttcgattttgtgcgtggaaaccattgataagttcgagaaaacaggtaaaaaaatcagactttcttttgatgcgcatcaattagtccaacaagcgaaatatcgtgctgaagtgattgaacccattcaacatacgaaaggacgtctggcgtttttacaacgaagattaaaggtaaaggctcgggttgcgcgtaagcaaaatcggatattagccgactgtaagaattaccagaagcaaaaaaaacagtatgacaaattattgacacaccttaataatcagataaaagattatttgaatcatttatctgtcttttatattaaggaatatgatgtaatcgaaattgtcgaaccagaagataggtcttgtgctgaagatgctttattcaccagcaatgaatggcatcaattagttcgtttattgaaatataaagcacaatggtacggtaaagagattcaaatcataaattgtcaaaatattcaaaaaaataactggtaggggtgccagggttcgcctaggtaataattgatttgtttctaggaaaagtgcccac

SEQ ID NO: 867 - RNA, 1012 nt, synthetic construct
  source 1..1012: mol_type = other RNA
atgaaaaatttaaagggttatcgatttagaatttatcccaatgaagcacaaaaaaggttctttattgaaacgtttggttgtgttcgcttcatctataattattttctgaagttagatacagctgagcgcacaagtgaagagattattacgccagcgagtctcaaacgtgattatccttttttaaaaaagacggatagtctagcccttgcaaatgcgaaaagaaatttagatagggcttttcaaaattactatcaacagcgtagtggctatcctaagttgaaaaataagagttctgtctggcaatcttacacgaccaataatcaaaacgggacagtacgtatagaggatggttatctgaaattaccaaagttaaaagaaaaaattcaaatatgcgaacatcgaaaaattactggcaaaattaaatcagtgactatttcagcgaagaataacgaggagttttatgcttcgattttgtgcgtggaaaccattgataagttcgagaaaacaggtaaaaaaatcagactttcttttgatgcacatcaattagtccaacaagcgaaatatcgtgctgaagtgattgaacccattcagcatacgaaaggacgtctggcgtttttacaacgaagattaaaggtaaaggctcgggttgcgcgtaagcaaaatcggatattagtcgactgtaagaattaccagaagcaaaaaaaacagtatgacaaattattgacacatcttaataatcagataaaagattatttgaatcatttatctatcttttatattaaggaatatgatgtaatcgaaattgtcgaaccagaagatgggccttgtgctaaagatgatttattcaccagcaatgaatggcatcaattagttcgtttattgaaatataaagcacaatggtatggtaaagagattcaaatcataaattgtcaaaatatttaaaaaaataactggtaggggtgccagggttcgcctaggtaataattgatttgtttctaggaaaagtgcccac

SEQ ID NO: 868 - RNA, 1110 nt, synthetic construct
  source 1..1110: mol_type = other RNA
atgctaaaagcttttaaattccgtatgtatccgacagaagaacaaaaacagcaattgatccgtacttttggctgtgttcgatttacctataaccatttgctgaaagaacggcagaaaagttggcaacaaacaggagtggtcgatttttcgctcacgcctgctacgttaaaaaaagaatacccattcttaaaagaggtagacagtcttgctttagcaaatgcacagcttaatttggaccgagcttttcgcaattatttcaagggacgtgccagcttcccaaagcttaaaacgaaaaaaagtatgtggcaaacttatacgacgaataatcaaactcatacggtctatctgaaaaacggccacttaaaattaccaaaacaaaaagaactaatcaagataagccagcaccgtccagtcgaaggcacgattcgttccgctacgatttctgctcgatataatgaagagttctatgtcgcactactttgtgatgtttcatcaataaaaaaagaatcgtcagctaaatggattgggattgcctatcatccaaaaacattgatcgaaacatcgcatcccatagaagtaactttaccaaaatttgaccagacagaagaaaaacttcagcatgcacagcggaaattaagcgtaaaagtccgctccgctcaccatagaaagaccaggttagatcaggcaagcaattatcagaaacaaaagagaaaagtaatggatctttatctgaaacaaaagaaccagcgagaagattatcttgaacaattatctgggaaattggtcaaacaatatgactacttatttgtagaatcttttccaaaagaagatgcacatgctgatttttctattcatgactggcataaattaataacaaaattgcgttataagtcccaatggtataataaaaaatttcttttgatcaataccgacggagcagaagaaagcaattttgtaagaaagagccaagtgttagaacaactaggcaggcattcggtcattaaggaataaaaaatgaatgaaactgacaggagcgttagggttcgccttgttaataaaaagtctgattgacttttgtttctaggaattttcttttgaagaaaagctcac

SEQ ID NO: 869 - RNA, 1036 nt, synthetic construct
  source 1..1036: mol_type = other RNA
gtgtcttaaaagcttataaatttaaaatctatccaaatgaagcccaaaaagaattctttgttaaaacgtttggttgcgtacggttcacatacaatcatttgttaattgcacgttcacaaactgatggtaaaaaaatgacgccagcttcgctaaaaaaagagtatccatttctaaaagaaacagatagtctggctttagcgaatgcccagcgtaatttagaaacagcttttcgtcgttattacaccggaaaaagtgattacccaaagtttaagaataagtcaaacatttggcagtcgtacacgacgaataaccaaggtcagacgatttgtttaaccgatggcttgttgaaactaccgaagttaaaaacacgcatcgcggtaaatgaacatcgggagatcaaggggcaaattaagtcagcaacgatttctgccaaaaacaacgaagaattctatgtgtcgatcctctgtctagagtcgattgaggcgttaccgaaaacaacgttagaaattcaactgcgttactcgcccgaagaattgttagataatttgagtggtttaacgaccttaaattttgaccaagcagcaatcttatgcaaaatggctaaaatgaatcgtcgcttaaaattacgagggaaaatcgcacgaaaaaagaaagtaccacttgcttacgctaaaaattaccaaaaacaaaaagtaaaattaagtcgtttgcaagggcatcagaaagaaaagaaagaagattacttcaatcaactttcgtatactctcatccgcgacttcgatcgaatcacggtagataaagcaaaactatcggatcgttcggatgatgaaacggtgaactttaccaaagccgattggcaaacttttttacgaaagttacaatataaggctgattggtacggaaaagaaattatttatcaataaaaccaataactggatggagctccagagatcgcctagggtatagaaaaagtccagtacttttgtttctaggaatccgactcactaattatgaaaaaccgaaagaagcggaagaa

SEQ ID NO: 870 - RNA, 381 nt, synthetic construct
  source 1..381: mol_type = other RNA
ctgcacaattgaagcaagcccatccttttttaaaagaagtggatagtctggctttagccaatgcacagcgtaatctggagcgcgcatttcgtaattatcataacggacgggctggttaccccaagttaaaaagtaaaaagaacagctggcaatcgtatacgacaaataatcaaaagggcacgattcatttatcagaagggtacctcaaacttcctaagctaaaagaacgagtagcgcttaatcaacatcgtgaagtaaaaggtgaaattaaatctgcaacgatttctgcaaaaaacaatcaagaattttacgtttcattgctttgtttagaagaaattcctccattgaaaaaaacaggtgaagtcgttcatttgaactttg

SEQ ID NO: 871 - RNA, 1019 nt, synthetic construct
  source 1..1019: mol_type = other RNA
ttggtgctaaaagcttataaatttcgcatttatccaacaaatgagcaaaaggaatttttaattcaaacgtttggctgcgtgcgtttcacctataacacacttttgaagcaccatcagcaaaacggtggaggaaaaagtaaaaagttaacccctgccagtttgaaaaaggaatttttgtttttaaaggtgaccgatagtttggcgcttgccaatgcacagcaaaatttgaagcgcgcctttcaaaactattatcaaggtcggagtggctatccaaaattgaagttaaaaaaaagtgtttggcaatcctacactaccaataatcaaaaacagacaatctggttaaaagatgatttactgaaagttcctaaattaaaacagcccattgcggtccattgtcatcgcccagtcacaggtcaaattaaatcagctactattatggcaaaaaatggccagcaattctttgtctccttgttatgtgaagaacagataacgcctttacctaaaactaatgtaacgactaccttgcatttttcacctgatcagctcgtgagtggaagcgacttggtttttttccgcaccctttgtcaaaaaaacgttgaaaataagcttactaaggccaaacgtaaattagaaatcaaagctaaaagtgcgcagcaacgaggggtaaagttatcagcagcgcaaaattatcaaaaacaaaaagtaaaggtgcaacagttgtatcatcataaacagcaacaaaaaaaagcgtggatggatgaattatcccttcacttaattaaaaaatatgattttttatatatcaaagtacctcacaacattcaagagggcgtctttaccttgacagattggcaacattttttggtcaaactacaatataaagctacttggtatgataaaaaggttattttcgcagcagaaaaagtcatttgaaatacgctcacttattaactggaagggactccagtgatcgcctagggtatataaaagtctgactttgtttctaggaatccgtccac

SEQ ID NO: 872 - RNA, 1012 nt, synthetic construct
  source 1..1012: mol_type = other RNA
atgaaaaatttaaagggttatcgatttagaatttatcccaatgaagcacaaaaaaggttctttattgaaacgtttggctgtgttcgcttcatctataattattttctgaagttagatacagctgagcgcacaagtgaagagattattacgccagcgagtctcaaacgtgattatccttttttaaaaaagacggatagtctagcccttgcaaatgcgaagagaaatttagatagggcttttcaaaattactatcaacagcgtagtggctatcctaagttgaaaaataagagttctgtctggcaatcttacacgaccaataatcaaaacgggacagtacgtatagaggatggttatctgaaattgccaaagttaaaagaaaaaattcaaatatgcgaacatcgaaaaattactggcaaaattaaatcagtgactatttcagcgaagaataacgaggagttttatgcttcgattttgtgcgtggaaaccattgataagttcgagaaaacaggtaaaaaaatcagactttcttttgatgcgcatcaattagtccaacaagcgaaatatcgtgctgaagtgattgaacccattcaacatacgaaaggacgtctggcgtttttacaacgaagattaaaggtaaaggctcgggttgcgcgtaagcaaaatcggatattagccgactgtaagaattaccagaagcaaaaaaaacagtatgacaaattattgacacaccttaataatcagataaaagattatttgaatcatttatctatcttttatattaaggaatatgatgtaatcgaaattgtcgaaccagaagataggtcttgtgctgaagatgctttattcaccaacaatgaatggcatcaattagttcgtttattgaaatataaagcacaatggtacggtaaagagattcaaatcataaattgtcaaaatatttaaaaaaataactggtaggggtgccagggttcgcctaggtaataattgatttgtttctaggaaaagtgcccac

SEQ ID NO: 873 - RNA, 1012 nt, synthetic construct
  source 1..1012: mol_type = other RNA
atgaaaaatttaaagggttatcgatttagaatttatcccaatgaagcacaaaaaaggttctttattgaaacgtttggttgtgttcgcttcatctataattattttctgaagttagatacagctgagcgcacaagtgaagagattattacgccagcgagtctcaaacgtgattatccttttttaaaaaagacggatagtctagcccttgcaaatgcgaagagaaatttagatagggcttttcaaaattactatcaacagcgtagtggctatcctaagttgaaaaataagagttctgtctggcaatcttatacgaccaataatcaaaacgggacagtacgtatagaggatggttatctgaaattgccaaagttaaaagaaaaaattcaaatatgcgaacatcgaaaaattactggcaaaattaaatcagtgactatttcagcgaagaataacgaggagttttatgcttcgattttgtgcgtggaaaccattgataagttcgagaaaacaggtaaaaaaatcagactttcttttgatgcgcatcaattagtccaacaagcgaaatatcgtgctgaagtgattgaacccattcagcatacgaaaggacgtctggcgtttttacaacgaagattaaaggtaaaggctcgggttgcgcgtaagcaaaatcggatattagccgactgtaagaattaccagaagcaaaaaaaacagtatgacaaattattgacacaccttaataatcagataaaagattatttgaatcatttatctatcttttatattaaggaatatgatgtaatcgaaattgtcgaaccagaagataggtcttgtgctgaagatgctttattcaccaacaatgaatggcatcaattagttcgtttattgaaatataaagcacaatggtacggtaaagagattcaaatcataaattgtcaaaatatttaaaaaaataactggtaggggtgccagggttcgcctaggtaataattgatttgtttctaggaaaagtgcccac

SEQ ID NO: 874 - RNA, 1013 nt, synthetic construct
  source 1..1013: mol_type = other RNA
atgagtgttttaaaagcctatcgttttaaaatttacccagatgaagcgcagaaacaattttttgtggcgacctttggctgtgttcgctttacgtacaatcatttactcgttgctagccaacaaaaaaaggaacagaaattaacgccagcaaagctaaaaaaagagtatcctttcttaaaagaaaccgatagcctagcgttagcaaatgcccaacgaaatctagaaaaagcttttcgtcgttattttactgggaaaagtgatttccctaaatttaagcataaatcaaatccatggcagtcgtatacgaccaataaccaaggacacacgatttatttaaaagaagggcaattaaaactaccgaagttgaaaagtctagtcaaggtaaattatcatcgtgaaataacagggcagattaagtcggccacgatttcagccaaaaataataccgatttttatgtttcgatcttatgtgttgaagaaattccaagcttaccgcaaacgtcacaaagtattacgattgcgtattcgccaagtgaattgttagaaggctcgcagtcgttactgcaaattacttttaaccaagattctttagttactaaaattgataaagtgcaaaagaaactaaaaattcgtgccaaagtcgctcgtaaaaatcggattcctttagctgaagccaaaaattatcaaaaactcaaagaacgactagcacgtttgcaagtttctcaaaaagagaagaaagaagattttttcgatcagttgtcttactacctcgtttgtcactttgatcaaattatggtcgatgcaacaattattgaaaacaatcaagaagcgtgtaccgttgtttttacaaaagccgattggcattgtttttataaaaaattagtctataaaagtaattggtatggaaaaaaactaatcgatctcgattagtttaatgaactggaaggagctccagggatcgcccagggtatataaaaagttttcggacttttgtttctaggaatccgcctcac

SEQ ID NO: 875 - RNA, 235 nt, synthetic construct
  source 1..235: mol_type = other RNA
ttaccaacgttagatttaaatccgctaaatcaaaaaatagaaaaagaacaacttaaactcgtacgacgaaaaaaagtcgctcgtacacgcggcgtggcgttaagtgattccaaaaattatcaaaaacaaaaacaacgggttgagcaattggttttgactaaatcaaacaaaaagatcaatttttttgatcaactcacttggattcttgtgcaacaatttgacaaaattgccattt

SEQ ID NO: 876 - RNA, 387 nt, synthetic construct
  source 1..387: mol_type = other RNA
ccagctaaactaaaaaaggagtattcgtttttaaaagcgacggatagtttagctttggctaatgcgcaacgtaacttggaaaaagcctttcaaaattattatcgcggccatgctagttatccgaaactaaagagcaaaaaaagtgcgtggcagtcttatactacaaataatcaaggtcatactatttatcttgaaaaagatggcttgaagcttccaaagttaaaaagtaaagttttgttgcatcaacatcgtaatgtgacgggaaaaattcgctcggccactatctctgctaaaaatcggcaggaattttatgtttctttattatgtgaagaagatagtactgctttgccaaaaacaggtagcaaaattgaaattacctataatggg

SEQ ID NO: 877 - RNA, 1074 nt, synthetic construct
  source 1..1074: mol_type = other RNA
atgagcgtattaaaaggttataaatttcgcatctacccagatgaaaaacaaaaaaagttttttattgaaacgtttggttgtgtcagattcacatacaatcatttattaatggctagacaaacaggtgcagcgagaaatactacaatgacacctgcgtcattgaagaaagagtatccttttttaaagaaaacagacagtttagctttagcgaatgcccaaagaaatttagatcgagcatttcgtaattatttcagtggtcgggctggttacccaaaattgaaaacaaaaaaaagcacatggcaatcttatacaacaaataaccagcaacatacggtttatttagaaggtgaatatttaaaagttcccaagctaaaaagtctcgtgccggttcatttgcatcgtgaaatacgtggcaaaattaagtcagtgacgatttctgctaagcgcaatcgtgaattttatgcatctattttatgtgtagaagaagtagaagagttgccaaaaacaaatgatttagtaggcatttcatactgtccagaaaatctgattcaaatttctgcacagagagaattaccacaaatcgatcaatcccatttaattaaacaattagggaaagaacaaaagaaattgcaactaagagcaaaagttgcgaaaaaacgtaaagtacgtttaatcaatgccaaaaattatcaaaaacaaaaagaacgcgtcttgaaattacgcacgactaaattggatcaaaaaagaaattttatcgatcagctaacaattagtttggttcgcgattttgattatttatttattgaatctaaaccaaagtttcaaaatgaatctggagaattttcagaagctgattggcaacaatttattcaacgaatccaatacaaaggtcgttggtatggcaaagaagttcgttatattgaagtaaaagaattgaaaaatgaaaagtgtaaagaaatagaacgtttgggtcgtgcacaattgacctaaaccttaagaactgaaagggacttcagggatcgcctagggtatagaaaaaatcttcgcatttttgtttctaggaacactgtccac

SEQ ID NO: 878 - RNA, 1012 nt, synthetic construct
  source 1..1012: mol_type = other RNA
atgaaaaatttaaagggttatcgatttagaatttatcccaatgaagcacaaaaaaggttctttattgaaacgtttggttgtgttcgcttcatctataattattttctgaagttagatacagctgagcgcacaagtgaagagattattacgccagcgagtctcaaacgtgattatccttttttaaaaaagacggatagtctagcccttgcaaatgcgaagagaaatttagatagggcttttcaaaattactatcaacagcgtagtggctatcctaagttgaaaaataagagttctgtctggcaatcttacacgaccaataatcaaaacgggacagtacgtatagaggatggttatctgaaattgccaaagttaaaagaaaaaattcaaatatgcgaacatcgaaaaattactggcaaaattaaatcagtgactatttcagcgaagaataacgaggagttttatgcttcgattttgtgcgtggaaaccattgataagttcgagaaaacaggtaaaaaaatcagactttcttttgatgcgcatcaattagtccaacaagcgaaatatcgtgctgaagtgattgaacccattcagcatacgaaaggacgtctggcgtttttacaacgaagattaaaggtaaaggctcgggttgcgcgtaagcaaaatcggatattagtcgactgtaagaattaccagaagcaaaaaaaacagtatgacaaattattgacacaccttaataatcagataaaagattatttgaatcatttatctatcttttatattaaggaatatgatgtaatcgaaattgtcgaaccagaagataggtcttgtgctaaagatgatttattcaccagcaatgaatggcatcaattagttcgtttattgaaatataaagcacaatggtacggtaaagagattcaaatcataaattgtcaaaatatttaaaaaaataactggtaggggtgccagggttcgcctaggtaataattgatttgtttctaggaaaagtgcccac

SEQ ID NO: 879 - RNA, 1012 nt, synthetic construct
  source 1..1012: mol_type = other RNA
atgaaaaatttaaagggttatcgatttagaatttatcccaatgaagcacaaaaaaggttctttattgaaacgtttggttgtgttcgcttcatctataattattttctgaagttagatacagctgagcgcacaagtgaagagattattacgccagcgagtctcaaacgtgattatccttttttaaaaaagacggatagtctagcccttgcaaatgcgaagagaaatttagatagggcttttcaaaattactatcaacagcgtagtggctatcctaagttgaaaaataagagttctgtctggcaatcttacacgaccaataatcaaaacgggacagtacgtatagaggatggttatctgaaattgccaaagttaaaagaaaaaattcaaatatgcgaacatcgaaaaattactggcaaaattaaatcagtgactatttcagcgaagaataacgaggagttttatgctttgattttgtgcgtggaaaccattgataagttcgagaaaacaggtaaaaaaatcagactttcttttgatgcgcatcaattagtccaacaagcgaaatatcgtgctgaagtgattgaacccattcagcatacgaaaggacgtctggcgtttttacaacgaagattaaaggtaaaggctcgggttgcgcgtaagcaaaatcggatattagtcgactgtaagaattaccagaagcaaaaaaaacagtatgacaaattattgacacaccttaataatcagataaaagattatttgaatcatttatctatcttttatattaaggaatatgatgtaatcgaaattgtcgaaccagaagataggtcttgtgctaaagatgatttattcaccagcaatgaatggcatcaattagttcgtttattgaaatataaagcacaatggtacggtaaagagattcaaatcataaattgtcaaaatatttaaaaaaataactggtaggggtgccagggttcgcctaggtaataattgatttgtttctaggaaaagtgcccac

SEQ ID NO: 880 - RNA, 1234 nt, synthetic construct
  source 1..1234: mol_type = other RNA
attaaaatattaaaagcttataaatttgcgctttatcctgatgaagcgcaaaaaaaattttttattcaaacttttggctgtgttcgttttacttataacacgttattgacactgcggcagacaaactatcaagataatagcgaaacttttacaaatccagcttcagggcggttaaagacgcaaaagttaacgccagctaaactaaaaaaggagtattcgtttttaaaagcgacggatagtttagctttggctaatgcgcaacgtaacttggaaaaagcctttcaaaattattatcgcggccatgccagttatccgaaactaaagagcaaaaaaagtgcgtggcagtcttatactacaaataatcaaggtcatactatttatcttgaaaaagatggcttgaagcttccaaagttaaaaagtaaagttttgttgcatcaacatcgtaatgtgacgggaaaaattcgctcggccactatctctgctaaaaattggcaggaattttatgtttctttattatgtgaagaagatagtactgctttgccaaaaacaggtagcaaaattgaaattacctataatgggacaacactaattgagccaagtgtggcagtgcgcggcataccgacgctttgccaagtgcaacttttagcacagctaaaaaaagcgcagcggcgccttgccatccgagctaagagtgcacagcggcgcaatgtaaagttggaacaagctaaaaattatcaaaaacaaaaattgcgcctccaacaactatatatccgcaaaatgaagcaaaaagaagactttacagaacaactgtcgattgctcttgtgcgccaatttgattgtatcgtggtcacaatgccagcagcaggagacgatgaaacaaaaaacaagggcaacaaagcccttaaaacgcagaaaaataatcaaaataccccagttttgcaaaatattgaagagaaatttactttaagtgactggaatcgtctcctcttgaaattgaaatataaagccgattggtatgaaaaagagttagtcttttgttcaaagcaaaaagccaactaataattagaaaatttttttagtttaagagaatttgattgaaaaactatttctgacagataaaaaaagaaacactaactgcaaagtgtttcttttttaagaactggaaggggctccagggatcgccttgggtatataaaaagtgcatcagcacttttgtttctaggaatccgctcac

SEQ ID NO: 881 - RNA, 1028 nt, synthetic construct
  source 1..1028: mol_type = other RNA
aggaaagtgctaaaggcttacaagtttcgcatttatccaaccaaagcacagcaaaaatttttaattcaaacttttggttgcgttcgctttacgtacaatacgcttttaaaacagcgtcagttcaatacgattgaagcaagtaaaaagctgacacctgctgccttaaaaaaggaatttccttttttaaaattaaccgatagcttggcattagcaaatgcacaacgaaatttagcgcgcgcatttcaaaattattatcaaggtagaagtgggcatccaaaaatgaagctcaaaaaaagtacgtggcagtcttacaccacgaataatcagcaacagacaatctggttaaaggataacttattgaaggtacctaaattaaaacagcccattgccgttgtttgtcatcgaaaagtggtaggaaaaattaaatctgcaacaattactgcaaagaatttgcaacagttttatgtttcattattatgtgaagaagaagttggtcatttgcctaagactaaaactgaaattgaattacgttttgctccaaatcagcttgttgtaggcaatcaattaaaattttgtcgtcaactttgtgtaaatgaccttgaaaccaagttaaaaaaagccaaacgaaaattggaaataaaagccaaaagtgcacagcaacgcaaagtgagattggcagaggccaaaaactatcaaaaacaaaaattaaaggtacaaaaattgtaccatcataagcaacagcaaaaaaaagcgtggattgacgaactaacaatgcatctgattaaaaactatgattttttatatgttgaagtcccaaaaaatgggatagagggatcttttacgttggcggactggcaaagttttttagttaagttgcagtataaagccaattggtacgggaaaaaagtgatttttttaacagccgctaaaacggtgcgaaaaatcagttaaacagtttaactggaagggactccagggctcgcctaggggataaaaaagcttggctttgtttctaggaatccgttcac

SEQ ID NO: 882 - RNA, 1011 nt, synthetic construct
  source 1..1011: mol_type = other RNA
atgaaaaatttaaagggttatcgatttagaatttatcccaatgaagcacaaaaaaggttctttattgaaacgtttggttgtgttcgcttcatctataattattttctgaagttagatacagctgagcgcacaagtgaagagattattacgccagcgagtctcaaacgtgattatccttttttaaaaaagacggatagtctagcccttgcaaatgcgaagagaaatttagatagggcttttcaaaattactatcaacagcgtagtggctatcctaagttgaaaaataagagttctgtctggcaatcttacacgaccaataatcaaaacgggacagtacgtatagaggatggttatctgaaattgccaaagttaaaagaaaaaattcaaatatgcgaacatcgaaaaattactggcaaaattaaatcagtgactatttcagcgaagaataacgaggagttttatgcttcgattttgtgcgtggaaaccattgataagttcgagaaaacaggtaaaaaaatcagactttcttttgatgcgcatcaattagtccaacaagcgaaatatcgtgctgaagtgattgaacccattcagcatacgaaaggacgtctggcgtttttacaacgaagattaaaggtaaaggctcgggttgcgcgtaagcaaaatcggatattagtcgactgtaagaattaccagaagcaaaaaaaacagtatgacaaattattgacacatcttaataatcagataaaagattatttgaatcatttatctatcttttatattaaggaatatgatgtaatcgaaattgtcgaaccagaagataggccttgtgctaaagatgatttattcaccagcaatgaatggcatcaattagttcgtttattgaaatataaagcacaatggtacggtaaagagattcaaatcataaattgtcaaaatattaaaaaaataactggtaggggtgccagggttcgcctaggtaataattgatttgtttctaggaaaagtgcccac

SEQ ID NO: 883 - RNA, 1120 nt, synthetic construct
  source 1..1120: mol_type = other RNA
atgaaaaatttaaagggttatcgatttagaatttatcccaatgaagcacaaaaaaggttcttcattgaaacgtttggttgtgttcgctttatctacaattattttttgaagttagatacagctgagcgcacaagtgaagaggtaatcacgccagcaagtcttaagcgtgattatccctttttaaaaaagacggatagtctagcccttgcaaatgcgaagagaaatttagatagggcttttcaaaattactatcaacagcgtagtggctatcctaagctcaaaaacaagagttctgtctggcaatcttacacgaccaataatcaaaatggtacggttcgcatagaggatggttatttgaaattgccaaagttaaaagaaaaaattcaaatatgcgaacatcggaaaattactggtaaaatcaagtcggtgaccatctcagccaaaaataatgaagagttttatgcttcaattttgtgtgtagaaactattgataaatttgagaaaacaggcaagaaaatcagactttctttcgatgaacatcaattagtcaaacaagcgaagtatcgtgctgaagtgattgaacccattcagcaaacgaaaggccgtcttgagtttttacaacgaaaattaaaggtaaaggctcgagttgcccgcaagcaaaatcgggtattagccgactgtaagaattaccaaaagcaaaaaaagcaatatgataaattattgacacaccttaataatcagataaaagattatttaaatcatttatccatcttttatattaaggaatatgatgtaatcgaaattgtcgaaccagaagataggtcttgtgcgaaagatgctttattcaccagtaatgaatggcatcaattaactcgtttattaaaatacaaagcacaatggtacggtaaagagattcaaatcataaattgtcaaaatatttaaacaaaactaactggtaggggtgccagggttcgcctaggtaataattcatttgtttctaggaaatgtgcccactaattatgaaaaaccacaaaaaaatcagcctatttcgggctgatttttttatcggtctttaactggtagatttttgatggtcgtccaacaccacttgcacgttcac

SEQ ID NO: 884 - RNA, 1012 nt, synthetic construct
  source 1..1012: mol_type = other RNA
atgaaaaatttaaagggttatcgatttagaatttatcccaatgaagcacaaaaaaggttctttattgaaacgtttggttgtgttcgcttcatctataattattttctgaagttagatacagctgagcgcacaagtgaagagattattacgccagcgagtctcaaacgtgattatccttttttaaaaaagacggatagtctagcccttgcaaatgcgaagagaaatttagatagggcttttcaaaattactatcaacagcgtagtggctatcctaagttgaaaaataagagttctgtctggcaatcttacacgaccaataatcaaaacgggacagtacgtatagaggatggttatctgaaattgccaaagttaaaagaaaaaattcaaatatgcgaacatcgaaaaattactggcaaaattaaatcagtgactatttcagcgaataataacgaggagttttatgcttcgattttgtgcgtggaaaccattgataagttcgagaaaacaggtaaaaaaatcagactttcttttgatgcgcatcaattagtccaacaagcgaaatatcgtgctgaagtgattgaacccattcagcatacgaaaggacgtctggcgtttttacaacgaagattaaaggtaaaggctcgggttgcgcgtaagcaaaatcggatattagccgactgtaagaattaccagaagcaaaaaaaacagtatgacaaattattgacacaccttaataatcagataaaagattatttgaatcatttatctatcttttatattaaggaatatgatgtaatcgaaattgtcgaaccagaagataggtcttgtgctgaagatgctttattcaccagcaatgaatggcatcaattagttcgtttattgaaatataaagcacaatggtacggtaaagagattcaaatcataaattgtcaaaatatttaaaaaaataactggtaggggtgccagggttcgcctaggtaataattgatttgtttctaggaaaagtgcccac

SEQ ID NO: 885 - RNA, 1014 nt, synthetic construct
  source 1..1014: mol_type = other RNA
atgaaaaatttaaagggttatcgatttagaatttatcccaatgaagctcaaaaaaggttcttcattgaaacatttggttgtgttcgctttatctacaattattttttgaagttagatacagctgagcgcacaagtgaagaggtaatcacgccagcaagtcttaagcgtgattatccctttttaaaaaagacggatagtctagcccttgcaaatgcgaagagaaatttagatagggcttttcaaaattactatcaacagcgtagtggctatcctaagctcaaaaataagagttctgcctggcaatcttacacgaccaataatcaaaatggtacggttcgcatagaggatggttatttgaaattgccaaagttaaaagaaaaaattcaaatatgcgaacatcggaaaattactggtgaaatcaagtcggtgaccatctcagccaaaaataatgaagagttttatgcttcaattttgtgtgtagaaactattgataaatttgagaaaacaggcaagaaaatcagactttctttcgatgaacatcaattagtcaaacaagcgaagtatcgtgctgaagtgattgaacccattcagcaaacgaaaggccgtattgagtttttacaacgaaaattaaaggtaaaggctcgagttgcccgcaagcaaaatcgggtattagccgactgtaagaattaccaaaagcaaaaaaagcaatatgataaattattgacacatcttaataatcagataaaagattatttaaatcatttatccatcttttatattaaggaatatgatgtaatcgaaattgtcgaaccagaagataggtcttgtgcgaaagatgctttattcaccagtaatgaatggcatcaattaactcgtttattaaaatacaaagcacaatggtacggtaaagagattcaaatcataaattgtcaaaatatttaaacaaaactaactggtaggggtgccagggttcgcctaggtaataattcatttgtttctaggaaatgtgcccac

SEQ ID NO: 886 - RNA, 1091 nt, synthetic construct
  source 1..1091: mol_type = other RNA
atgaaagtgttaaaaggttatcgttttcggatttatccagacgaagaacaattgacattttttaggcaaacctttggctgtgtaagatttacatacaatcaactattaatggcgagaaaaaacacagcgaattcggaagaaagtatgaaattaacccccgcagcattaaaaaaagactatccttttttaaagaagactgatagtctggctttggctaatgcacagcgtaacttagagcgagcgtacgcaaatttttttcaaggaagagcgagctatcctaaattaaaaaacaagaaaagcacgtggcaatcctatacaacaaataatcaaaaacatacgatttattttgttgatgaaaaactaaaacttcctaagttgaaaagtttgattcaagtgcatcagcatcgtgagattaaggggttgattcgttcagccacgatttcagcaaaaaacaatgaagaattttatgtgtctttgctgtgtttagaagaagtcacttctttaccgaaaaccaaaaaagctatcggtatttcttattgtccgaaacatttgctccatgtatctaagccgctcgatcacttagaaacgatcgaagaacaaatgcaggaagacaggctgataaaagcaaaaagaaaactctttttacgcgctaaaattgcgaagaagcataaagtgaagctaaaagacgccaaaaattatcaaaagcaaaagcaaaaagtgcacaagttaattcaggaaaaagcctgtagaaaaaaggactttattgaccagctgacattttcattagtcaaagagttcgattatatttttgtcgaaaagcaaccaagtaccgccgatagtgaggagacgagtctatttacctctagtgattggtatctgttcatgcaaaaactaacgtataaaacacaatggtatggcaaaaaatatctggcgatagaaaagccagcgaatacagaaaattcgggacagatgattgaagaactaggaaagcaacgactcggcctttaatgtcaaagaactggaaggggctccagggatcgcctagggtataaaaaaaaggcaactttttgtttctaggaacaatcgctcac

SEQ ID NO: 887 - RNA, 1091 nt, synthetic construct
  source 1..1091: mol_type = other RNA
atgaaagtgttaaaaggttatcgttttcggatttatccagacgaagaacaattgacattttttaggcaaacctttggctgtgtaagatttacatacaatcaactattaatggcgagaaaaaacacagcgaattcggaagaaagtatgaaattaacccccgcagcattaaaaaaagactatccttttttaaagaagactgatagtctggctttggctaatgcacagcgtaacttagagcgagcgtacgcaaatttttttcaaggaagagcgagctatcctaaattaaaaaacaagaaaagcacgtggcaatcctatacaacaaataatcaaaaacatacgatttattttgttgatgaaaaactaaaacttcctaagttgaaaagtttgattcaagtgcatcagcatcgtgagattaaggggttgattcgttcagccacgatttcagcaaaaaacaatgaagaattttatgtgtctttgctgtgtttagaagaagtcacttctttaccgaaaaccaaaaaagctatcggtatttcttattgtccgaaacatttgctccatgtatctaagccgctcgatcacttagaaacgatcgaagaacaaatgcaggaagacaggctgataaaagcaaaaagaaaactctttttacgcgctaaaattgcgaagaagcataaagtgaagctaaaagacgccaaaaattatcaaaagcaaaagcaaaaagtgcacaagttaattcaggaaaaagcctgtagaaaaaaggactttattgaccagctgacattttcattagtcaaagagttcgattatatttttgtcgaaaaacaaccaagtaccgccgatagtgaggagacgagtctatttacctctagtgattggtatctgttcatgcaaaaactaacgtataaaacacaatggtatggcaaaaaatatctggcgatagaaaagccagcgaatacagaaaattcgggacagatgattgaagaactaggaaagcaacgactcggcctttaatgtcaaagaactggaaggggctccagggatcgcctagggtatagaaaaaaggcaactttttgtttctaggaacaatcgctcac

SEQ ID NO: 888 - RNA, 1091 nt, synthetic construct
  source 1..1091: mol_type = other RNA
atgaaagtgttaaaaggttatcgttttcggatttatccagacgaagaacaattgacattttttaggcaaacctttggctgtgttagatttacatataatcaactattaatggcgagaaaaaacacagcgaattcggaagaaagtatgaaattaacccccgcagcattaaaaaaagactatccttttttaaagaagacagatagtctggctttggctaatgcacagcgcaacttagagcgagcgtacgcaaatttttttcaaggaagagcgagctatcctaaattaaaaaacaagaaaagcacgtggcaatcctatacaacaaataatcaaaaacatacgatttattttgttgatgaaaaactaaaacttcctaagttgaaaagtttgattcaagtgcatcagcatcgtgagattaaggggttgattcgttcagccacgatttcagcaaaaaacaatgaagaattttatgtgtctttgctgtgtttagaagaagtcacttctttaccgaaaaccaaaaaagctatcggtatttcttattgtccgaaacatttgctccatgtatctaagccgctcgatcacttagaaacgatcgaagaacaaatgcaggaagacaggttgataaaagcaaaaagaaaactctttttacgcgctaaaattgcgaagaagcataaagtgaagctaaaagacgccaaaaattatcaaaagcaaaagcaaaaagtgcacaagttaattcaggaaaaagcctgtagaaaaaaggactttattgaccagctgacattttcattagtcaaagagttcgattatatttttgtcgaaaagcaaccaagtaccgccgatagtgaggagacgagtctatttacctctagtgattggtatctgttcatgcaaaaactaacgtataaaacacaatggtatggcaaaaaatatctggcgatagaaaagccagcgaatacagaaaattcgggacagatgattgaagaactaggaaagcaacgactcggcctttaatgtcaaagaactggaaggggctccagggatcgcctagggtatagaaaaaaggcaactttttgtttctaggaacaatcgctcac

SEQ ID NO: 889 - RNA, 1091 nt, synthetic construct
  source 1..1091: mol_type = other RNA
atgaaagtgttaaaaggttatcgttttcggatttatccagacgaagaacaattgacattttttaggcaaacctttggctgtgtaagatttacatataatcaactattaatggcgagaaaaaacacagcgaattcggaagaaagtatgaaattaacccccgcagcattaaaaaaagactatccttttttaaagaagacagatagtctggctttggctaatgcacagcgcaacttagagcgagcgtatgcaaatttttttcaaggaagagcgagctatcctagattaaaaaacaagaaaagcacgtggcaatcctatacaacaaataatcaaaaacatacgatttattttgttgatgaaaaactaaaacttcctaagttgaaaagtttgattcaagtgcatcagcatcgtgagattaagggattgattcgttcagccacgatttcagcaaaaaacaatgaagaattttatgtgtctttgctgtgtttagaagaagtcacttctttaccgaaaaccaaaaaagctatcggtatttcttattgtccgaaacatttgctccatgtatctaagccgctcgatcacttagaaacgatcgaagaacaaatgcaggaagacaggttgataaaagcaaaaagaaaactctttttacgcgctaaaattgcgaagaagcataaagtgaagctaaaagacgccaaaaattatcaaaagcaaaagcaaaaagtgcacaagttaattcaggaaaaagcctgtagaaaaaaggactttattgaccagctgacattttcattagtcaaagagttcgattatatttttgtcgaaaagcaaccaagtaccgccgatagtgaggagacgagtctatttacctctagtgattggtatctgttcatgcaaaaactaacgtataaaacacaatggtatggcaaaaaatatctggcgatagaaaagccagcgaatacagaaaattcgggacagatgattgaagaactaggaaagcaacgactcggcctttaatgtcaaagaactggaaggggctccagggatcgcctagggtatagaaaaaaggcaactttttgtttctaggaacaatcgctcac

SEQ ID NO: 890 - RNA, 1013 nt, synthetic construct
  source 1..1013: mol_type = other RNA
atgaaaaatttaaagggttatcgatttagaatttatcccaatgaagcaaaaaaaaaggttctttattgaaacgtttggttgtgttcgcttcatctataattattttctgaagttagatacagctgagcgcacaagtgaagagattattacgccagcgagtctcaaacgtgattatccttttttaaaaaagacggatagtctagcccttgcaaatgcgaagagaaatttagatagggcttttcaaaattactatcaacagcgtagtggctatcctaagttgaaaaataagagttctgtctggcaatcttacacgaccaataatcaaaacgggacagtacgtatagaggatggttatctgaaattgccaaagttaaaagaaaaaattcaaatatgcgaacatcgaaaaattactggcaaaattaaatcagtgactatttcagcgaagaataacgaggagttttatgcttcgattttgtgcgtggaaaccattgataagttcgagaaaacaggtaaaaaaatcagactttcttttgatgcgcatcaattagtccaacaagcgaaatatcgtgctgaagtgattgaacccattcaacatacgaaaggacgtctggcgtttttacaacgaagattaaaggtaaaggctcgggttgcgcgtaagcaaaatcggatattagccgactgtaagaattaccagaagcaaaaaaaacagtatgacaaattattgacacaccttaataatcagataaaagattatttgaatcatttatctatcttttatattaaggaatatgatgtaatcgaaattgtcgaaccagaagataggtcttgtgctgaagatgctttattcaccagcaatgaatggcatcaattagttcgtttattgaaatataaagcacaatggtacggtaaagagattcaaatcataaattgtcaaaatatttaaaaaaataactggtaggggtgccagggttcgcctaggtaataattgatttgtttctaggaaaagtgcccac

SEQ ID NO: 891 - RNA, 1014 nt, synthetic construct
  source 1..1014: mol_type = other RNA
atgaaaaatttaaagggttatcgatttagaatttatcccaatgaagcacaaaaaaggttcttcattgaaacgtttggttgtgttcgctttatctacaattattttttgaagttagatacagctgagcgcacaagtgaagaggtaatcacgccagcaagtcttaagcgtgattatccctttttaaaaaagacggatagtctagcccttgcaaatgcgaagagaaatttagatagggcttttcaaaattactatcaacagcgtagtggctatcctaagctcaaaaataagagttctgcctggcaatcttacacgaccaataatcaaaatggtacggttcgcatagaggatggttatttgaaattgccaaagttaaaagaaaaaattcagatatgtgaacatcgaaaaattactggtaaaatcaagtcggtgaccatctcagccaaaaataatgaagagttttatgcttcaattttgtgtgtagaaactattgataaatttgagaaaacaggtaaaaaaatcagactttcttttgatgcgcatcaattagtcaaacaagcgaaatatcgtgctgaagtgattgaacccattcagcaaacgaaaggccgtcttgagtttttacaacgaaaattaaaggtaaaggctcgagttgcccgcaagcaaaatcgggtattagccgactgtaagaattaccaaaagcaaaaaaagcaatatgataaattattgacacatcttaataatcagataaaagattatttaaatcatttatccatcttttatattaaggaatatgatgtaatcgaaattgtcgaaccagaagataggtcttgtgcgaaagatgcattattcaccagtaatgaatggcatcaattagttcgtttattaaaatacaaagcacaatggtacggtaaagagattcaaatcataaattgtaaaaatatttaaacaaaaacaactggtaggggtgccagggttcgcctaggtaataattgatttgtttctaggaaaagtgcccac

SEQ ID NO: 892 - RNA, 1019 nt, synthetic construct
  source 1..1019: mol_type = other RNA
ttggtgctaaaagcttataaatttcgcatttatccaacaaatgagcaaaaggaatttttaattcaaacgtttggctgcgtgcgtttcacctataacacacttttgaagcaccatcagcaaaacggtggaggaaaaagtaaaaagttaacccctgccagtttgaaaaaggaatttttgtttttaaaggtgaccgatagtttggcgcttgccaatgcacagcaaaatttgaagcgcgcctttcaaaactattatcaaggtcggagtggctatccaaaattgaagttaaaaaaaagtgtttggcaatcctacactaccaataatcaaaaacagacaatctggttaaaagatgatttactgaaagttcctaaattaaaacagcccattgcggtccattgtcatcgcccagtcacaggtcaaattaaatcagctactattatggcaaaaaatggccagcaattctttgtctccttgttatgtgaagaacagataacgcctttacctaaaactaatgtaacgactaccttgcatttttcacctgatcagctcgtgagtggaagcgacttggtttttttccgcaccctttgtcaaaaaaacgttgaaaataagcttactaaggccaaacgtaaattagaaatcaaagctaaaagtgcgcagcaacgaggggtgaagttatcagcagcgcaaaattatcaaaaacaaaaagtaaaggtgcaacagttgtatcatcataaacagcaacaaaaaaaagcgtggatggatgaattatcccttcacttaattaaaaaatatgattttttatatatcaaagtacctcacaacattcaagagggcgtctttaccttgacagattggcaacattttttggtcaaactacaatataaagctacttggtatgataaaaaggttattttcgcagcagaaaaagtcatttgaaatacgctcacttattaactggaagggactccagtgatcgcctagggtatataaaagtctgactttgtttctaggaatccgtccac

SEQ ID NO: 893 - RNA, 1086 nt, synthetic construct
  source 1..1086: mol_type = other RNA
gtgaaagtattaaaagcctataaatttcgtatttacccaaatgaagaacaaatacaatattttatacagactttcggatgcgtacgctttacctataatcagttactgtatactcgaaaaaaagccttgcaagaaggagactacgagactcggttgacacctgctcagttaaaaaaagattatccgtttttaaaacaaacggatagcctggctttggctaatgcacagcgtaatttagatcgagcgtttaaaaattacttcagtaaaagagcaggttaccctaaatggaaatcgaaaaaaagtagttggcaatcttataccactaataaccaaaaacatacgatttattttattggagaagagctaaaattacctaaacttaagtctttaataaaagtaaacttgcacagagaaattttaggagaaataaagtcagcgacgatttcggctaaaaataatcagttgttttttgtttcaattctgtgtttagaaaatgtagtgtctttaccgaaaacgggtaagtctataggaattgcttattgtcctgaaaacttagttcaaatgtcatctactaatgtttttttaaatcgtaaaagtaattcttattatcagctgaaaacagctaagaaaaaattggaacttcgggcaaggttagctaaaaagagaaaagtgttgttgagtcaggcaaaaaattatcaaaaacaaaaaagaaaagtccagaaattgtatatgaaaatagataatcaaaaaaacgattatattaaccaattaacttattatttggttaaaaactatgatcatatttatttggaaaaatatccgaaattcagtgaaaatgtacaattttcggaaactgattggcagcattttttaaggaaaatacagtataaagtaagttggtataataagcagctggtatttatagctcctaatacaaaagaaattgaagaaaaatgctttgctattgagcagttgggcagacagctaaccactagctaaaattgttaggaactggaaggaatgccagggatcgcctaggttatagaaaaaatctttatgatttttgtttctaggaatattgttcac

SEQ ID NO: 894 - RNA, 1172 nt, synthetic construct
  source 1..1172: mol_type = other RNA
atgaaggctctgaaagcttataaatacagactttatccaacctcaaaacaagaagagtttattcaaaaaacattttcttgtgttcgcttggtgtataatttaatgttacaagaccggattgatatctacaaagagatgcgaaaaaatcctcaacaaacgtttaaaatgccaacgccagctaaatataagaaacaataccctgtcctcagagaagttgatagtttagccttggcaaatgcacaagtttatttggatcgagcctttaaaaatttttatcgggaaaaagggatgggctttccaaaaaagaaaaagaaagaaacggtgcattcctacactacgaacaatcaacatggcacggtcaaaattttggataatcgttatttgaaagtacctaaattgaaatctttaattaaaatgaaggtacaccgccaaccgctgggggagataaaatctgtaactatttctatgagtgcgagtcacaattattatgtttccattttgtgtgaagcgccgattgaaacgaaaacaaagcaacaaaaaatggtgggaatttgtagcagtagggaaaaatttgcgctgctttcgaatggtgaaagcttcgaaaaaagctattgttcaaagcatttaaagcaaaaactacgtcaagaagaacgaaaattaaacaagcgtaaaatgattgctttggaaaaaggtgtcgatctttcgcaagcaaaaaattatcaaaaacaaaaaataaaagtcgcaaaaattcgcgaaaaaatagccaaccaacgaacggatattttaaacaaaattacaacggaattggtttcaagttacgatgttatttgtattgaaaaagcccatcacagtaatgagcggccgccaaaacatgatcgttctgaactggcttggtctttatttttagctaaattgttgtataaagcacaatggtatggcaaagaactcatttgtattgagtcagaggagatcgaaacagagttgtctttttctgaaagtacagaaaattcagagtatcttagaagccaaaaaatcttagaacgtggcttgtctaaacgagaaaccttataaatagaagaactgtagggactacagggatcgcctaggggatagaaaatgtacaccatgtgttgaaccatttatttctaggaagtcacattgggacagtccac

SEQ ID NO: 895 - RNA, 1172 nt, synthetic construct
  source 1..1172: mol_type = other RNA
atgaaggctctgaaagcttataaatacagactttatccaacctcaaaacaagaagagtttattcaaaaaacattttcttgtgttcgcttggtgtataatttaatgttacaagaccggattgatatctacaaagagatgcgaaaaaatcctcaacaaacgtttaaaatgccaacgccagctaaatataagaaacaataccctgtcctcagagaagttgatagtttagccttggcaaatgcacaagtttatttggatcgagcctttaaaaatttttatcgggaaaaagggatgggctttccaaaaaagaaaaagaaagaaacggtgcattcctacactacgaacaatcaacatggcacggtcaaaattttggataatcgttatttgaaggtacctaaattgaaatctttaattaaaatgaaggtacaccgccaaccgctgggggagataaaatctgtaactatttctatgagtgcgagtcacaattattatgtttccattttatgtgaagcgccgattgaaacgaaaacaaagcaacaaaaaatggtgggaatttgtagcagtagggaaaaatttgcgctgctttcgaatggtgaaagcttcgaaaaaagctattgttcaaagcatttaaagcaaaaactacgtcaagaagaacgaaaattaaacaagcgtaaaatgattgctttagaaaaaggtgtcgatctttcgcaagcaaaaaattatcaaaaacaaaaaataaaagtcgcaaaaattcgcgaaaaaatagccaaccaacgaacggatattttaaacaaaattacaacggaattggtttcaagttacgatgttatttgtattgaaaaagcccatcacagtaatgaacggccgccaaaacatgatcgttctgaactggcttggtctttatttttagctaaactgttgtataaagcacaatggtatggcaaagaactcatttgtattgagtcagaggagatagaaacagagttgtctttttctgaaagtacagaaaattcagagtatcttagaagccaaaaaatcttagaacgtggcttgtctaaacgagaaaccttataaatagaagaactgtagggactacagggatcgcctaggggatagaaaatgtacaccatgtgttgaaccatttgtttctaggaagtcacattgggacagtccac

SEQ ID NO: 896 - RNA, 1172 nt, synthetic construct; identical to SEQ ID NO: 895
  source 1..1172: mol_type = other RNA

SEQ ID NO: 897 - RNA, 1172 nt, synthetic construct
  source 1..1172: mol_type = other RNA
atgaaggctctgaaagcttataaatacagactttatccaacctcaaaacaagaagagtttattcaaaaaacattttcttgtgttcgcttggtgtataatttaatgttacaagaccggattgatatctacaaagagatgcgaaaaaatcctcaacaaacgtttaaaatgccaacgccagctaaatataagaaacaataccctgtcctcagagaagttgatagtttagccttggcaaatgcacaagtttatttggatcgagcctttaaaaatttttatcgggaaaaagggatgggctttccaaaaaagaaaaagaaagaaacggtgcattcctacactacgaacaatcaacatggcacggtcaaaattttggataatcgttatttgaaagtacctaaattgaaatctttaattaaaatgaaggtacaccgccaaccgctgggggagataaaatctgtaactatttctatgagtgcgagtcacaattattatgtttccattttgtgtgaagcaccgattgaaacgaaaacaaagcaacaaaaaatggtgggaatttgtagcagtagggaaaaatttgcgctgctttcgaatggtgaaagcttcgaaaaaagctattgttcaaagcatttaaagcaaaaactacgtcaagaagaacgaaaattaaacaagcgtaaaatgattgctttagaaaaaggtgtcgatctttcacaagcaaaaaattatcaaaaacaaaaaataaaagtcgcaaaaattcgcgaaaaaatagccaaccaacgaacggatattttaaacaaaattacaacggaattggtttcaagttacgatgttatttgtattgaaaaagcccatcacagtaatgagcggccgccaaaacatgatcgttctgaactggcttggtctttatttttagctaaattgttgtataaagcacaatggtatggcaaagaactcatttgtattgagtcagaggagatcgaaacagagttgtctttttctgaaagtacagaaaattcagagtatcttagaagccaaaaaatcttagaacgtggcttgtctaaacgagaaaccttataaatagaagaactgtagggactacagggatcgcctaggggatagaaaatgtacaccatgtgttgaaccatttatttctaggaagtcacattgggacagtccac

SEQ ID NO: 898 - RNA, 1172 nt, synthetic construct
  source 1..1172: mol_type = other RNA
atgaaggctctgaaagcttataaatacagactttatccaacctcaaaacaagaagagtttattcaaaaaacattttcttgtgttcgcttggtgtataatttaatgttacaagaccggattgatatctacaaagagatgcgaaaaaatcctcaacaaacgtttaaaatgccaacgccagctaaatataagaaacaataccctgtcctcagagaagttgatagtttagccttggcaaatgcacaagtttatttggatcgagcctttaaaaatttttatcgggaaaaagggatgggctttccaaaaaagaaaaagaaagaaacggtgcattcctacactacgaacaatcaacatggcacggtcaaaattttggataatcgttatttgaaagtacctaaattgaaatctttaattaaaatgaaggtacaccgccaaccgctgggggagataaaatctgtaactatttctatgagtgcgagtcacaattattatgtttccattttgtgtgaagcgccgattgaaacgaaaacaaagcaacaaaaaatggtgggaatttgtagcagtagggaaaaatttgcgctgctttcgaatggtgaaagcttcgaaaaaagctattgttcaaagcatttaaagcaaaaactacgtcaagaagaacgaaaattaaacaagcgtaaaatgattgctttggaaaaaggtgtcgatctttcacaagcaaaaaattatcaaaaacaaaaaataaaagtcgcaaaaattcgcgaaaaaatagccaaccaacgaacggatattttaaacaaaattacaacggaattggtttcaagttacgatgttatttgtattgaaaaagcccatcacagtaatgagcggccgccaaaacatgatcgttctgaactggcttggtctttatttttagctaaattgttgtataaagcacaatggtatggcaaagaactcatttgtattgagtcagaggagatcgaaacagagttgtctttttctgaaagtacagaaaattcagagtatcttagaagccaaaaaatcttagaacgtggcttgtctaaacgagaaaccttataaatagaagaactgtagggactacagggatcgcctaggggatagaaaatgtacaccatgtgttgaaccatttgtttctaggaagtcacattgggacagtccac

SEQ ID NO: 899 - RNA, 1172 nt, synthetic construct
  source 1..1172: mol_type = other RNA
atgaaggctctgaaagcttataaatacagactttatccaacctcaaaacaagaagagtttattcaaaaaacattttcttgtgttcgattggtgtataatttaatgttacaagaccggattgatatctacaaagagatgcgaaaaaatcctcaacaaacgtttaaaatgccaacgccagctaaatataagaaacaataccctgtcctcagagaagttgatagtttagccttggcaaatgcacaagtttatttggatcgagcctttaaaaatttttatcgggaaaaagggatgggatttccaaaaaagaaaaagaaagaaacggtgcattcctacactacgaacaatcaacatggcacggtcaaaattttggataatcgttatttgaaagtacctaaattgaaatctttaattaaaatgaaggtacaccgccaaccgctgggggagataaaatctgtaactatttctatgagtgcgagtcacaattattatgtttccattttgtgtgaagcgccgattgaaacgaaaacaaagcaacaaaaaatggtgggaatttgtagcagtagggaaaaatttgcgctgctttcgaatggtgaaagcttcgaaaaaagctattgttcaaagcatttaaagcaaaaactacgtcaagaagaacgaaaattaaacaagcgtaaaatgattgctttagaaaaaggtgtcgatctttcgcaagcaaaaaattatcaaaaacaaaaaataaaagtcgcaaaaattcgcgaaaaaatagccaaccaacggacggatattttaaacaaaattacaacggaattggtttcaagttacgatgttatttgtattgaaaaagcccatcacagtaatgagcggccgccaaaacatgatcgttctgaactagcttggtctttatttttagctaaactgttgtataaagcacaatggtatggcaaagaactcatttgtattgagtcagaggagatcgaaacagagttgtctttttctgaaagtacagaaaattcagagtatcttagaagccaaaaaatcttagaacgtggcttgtctaaacgagaaaccttataaatagaagaactgtagggactacagggatcgcctaggggatagaaaatgtacaccatgtgttgaaccatttgtttctaggaagtcacattgggacagtccac

SEQ ID NO: 900 - RNA, 1172 nt, synthetic construct
  source 1..1172: mol_type = other RNA
atgaaggctctgaaagcttataaatacagactttatccaacctcaaaacaagaagagtttattcaaaaaacattttcttgtgttcgcttggtgtataatttaatgttacaagaccggattgatatctacaaagagatgcgaaaaaatcctcaacaaacgtttaaaatgccaacgccagctaaatataagaaacaataccctgtccttagagaagttgatagtttagccttggcaaatgcacaagtttatttggatcgagcctttaaaaatttttatcgggaaaaagggatgggctttccaaaaaagaaaaagaaagaaacggtgcattcctacactacgaacaatcaacatggcacggtcaaaattttggataatcgttatttgaaggtacctaaattgaaatctttaattaaaatgaaggtacaccgccaaccgctgggggagataaaatctgtaactatttctatgagtgcgagtcacaattattatgtttccattttatgtgaagcgccgattgaaacgaaaacaaagcaacaaaaaatggtgggaatttgtagcagtagggaaaaatttgcgctgctttcgaatggtgaaagcttcgaaaaaagctattgttcaaagcatttaaagcaaaaactacgtcaagaagaacgaaaattaaacaagcgtaaaatgattgctttagaaaaaggtgtcgatctttcgcaagcaaaaaattatcaaaaacaaaaaataaaagtcgcaaaaattcgcgaaaaaatagccaaccaacgaacggatattttaaacaaaattacaacggaattggtttcaagttacgatgttatttgtattgaaaaagcccatcacagtaatgaacggccgccaaaacatgatcgttctgaactggcttggtctttatttttagctaaactgttgtataaagcacaatggtatggcaaagaactcatttgtattgagtcagaggagatagaaacagagttgtctttttctgaaagtacagaaaattcagagtatcttagaagccaaaaaatcttagaacgtggcttgtctaaacgagaaaccttataaatagaagaactgtagggactacagggatcgcctaggggatagaaaatgtacaccatgtgttgaaccatttgtttctaggaagtcacattgggacagtccac

SEQ ID NO: 901 - RNA, 1172 nt, synthetic construct
  source 1..1172: mol_type = other RNA
atgaaggctctgaaagcttataaatacagactttatccaacctcaaaacaagaagagtttattcaaaaaacattttcttgtgttcgcttggtgtataatttaatgttacaagaccggattgatatctacaaagagatgcgaaaaaatcctcaacaaacgtttaaaatgccaacgccagctaaatataagaaacaataccctgtcctcagagaagttgatagtttagccttggcaaatgcacaagtttatttggatcgagcctttaaaaatttttatcgggaaaaagggatgggctttccaaaaaagaaaaagaaagaaacggtgcattcctacactacgaacaatcaacatggcacggtcaaaattttggataatcgttatttgaaagtacctaaattgaaatctttaattaaaatgaaggtacaccgccaaccgctgggggagataaaatctgtaactatttctatgagtgcgagtcacaattattatgtttccattttgtgtgaagcgccgattgaaacgaaaacaaagcaacaaaaaatggtgggaatttgtagcagtagggaaaaatttgcgctgctttcgaatggtgaaagcttcgaaaaaagctattgttcaaagcatttaaagcaaaaactacgtcaagaagaacgaaaattaaacaagcgtaaaatgattgctttagaaaaaggtgtcgatctttcacaagcaaaaaattatcaaaaacaaaaaataaaagtcgcaaaaattcgcgaaaaaatagccaaccaacgaacggatattttaaacaaaattacaacggaattggtttcaagttacgatgttatttgtattgaaaaagcccatcacagtaatgagcggccgccaaaacatgatcgttctgaactggcttggtctttatttttagctaaactgttgtataaagcacaatggtatggcaaagaactcatttgtattgagtcagaggagatcgaaacagagttgtctttttctgaaagtacagaaaattcagagtatcttagaagccaaaaaatcttagaacgtggcttgtctaaacgagaaaccttataaatagaagaactgtagggactacagggatcgcctaggggatagaaaatgtacaccatgtgttgaaccatttatttctaggaagtcacattgggacagtccac

SEQ ID NO: 902 - RNA, 1172 nt, synthetic construct
  source 1..1172: mol_type = other RNA
atgaaggctctgaaagcttataaatacagactttatccaacctcaaaacaagaagagtttattcaaaaaacattttcttgtgttcgcttggtgtataatttaatgttacaagaccggattgatatctacaaagagatgcgaaaaaatcctcaacaaacgtttaaaatgccaacgccagctaaatataagaaacaataccctgtcctcagagaagttgatagtttagccttggcaaatgcacaagtttatttggatcgagcctttaagaatttttatcgggaaaaagggatgggctttccaaaaaagaaaaagaaagaaacggtgcattcctacactacgaacaatcaacatggcacggtcaaaattttggataatcgttatttgaaggtacctaaattgaaatctttaattaaaatgaaggtacaccgccaaccgctgggggagataaaatctgtaactatttctatgagtgcgagtcacaattattatgtttccattttatgtgaagcgccgattgaaacgaaaacaaagcaacaaaaaatggtgggaatttgtagcagtagggaaaaatttgcgctgctttcgaatggtgaaagcttcgaaaaaagctattgttcaaagcatttaaagcaaaaactacgtcaagaagaacgaaaattaaacaagcgtaaaatgattgctttagaaaaaggtgtcgatctttcgcaagcaaaaaattatcaaaaacaaaaaataaaagtcgcaaaaattcgcgaaaaaatagccaaccaacgaacggatattttaaacaaaattacaacggaattggtttcaagttacgatgttatttgtattgaaaaagcccatcacagtaatgaacggccgccaaaacatgatcgttctgaactggcttggtctttatttttagctaaactgttgtataaagcacaatggtatggcaaagaactcatttgtattgagtcagaggagatagaaacagagttgtctttttctgaaagtacagaaaattcagagtatcttagaagccaaaaaatcttagaacgtggcttgtctaaacgagaaaccttataaatagaagaactgtagggactacagggatcgcctaggggatagaaaatgtacaccatgtgttgaaccatttgtttctaggaagtcacattgggacagtccac

SEQ ID NO: 903 - RNA, 1172 nt, synthetic construct
  source 1..1172: mol_type = other RNA
atgaaggctctgaaagcttataaatacagactttatccaacctcaaaacaagaagagtttattcaaaaaacattttcttgtgttcgcttggtgtataatttaatgttacaagaccggattgatatctacaaagagatgcgaaaaaatcctcaacaaacgtttaaaatgccaacgccagctaaatataagaaacaataccctgtcctcagagaagttgatagtttagccttggcaaatgcacaagtttatttggatcgagcctttaaaaatttttatcgggaaaaagggatgggctttccaaaaaagaaaaagaaagaaacggtgcattcctacactacgaacaatcaacatggcacggtcaaaattttggataatcgttatttgaaagtacctaaattgaaatctttaattaaaatgaaggtacaccgccaaccgctgggggagataaaatctgtaactatttctatgagtgcgagtcacaattattatgtttccattttgtgtgaagcgccgattgaaacgaaaacaaagcaacaaaaaatggtgggaatttgtagcagtagggaaaaatttgcgctgctttcgaatggtgaaagcttcgaaaaaagctattgttcaaagcatttaaagcaaaaactacgtcaagaagaacgaaaattaaacaagcgtaaaatgattgctttggaaaaaggtgtcgatctttcacaagcaaaaaattatcaaaaacaaaaaataaaagtcgcaaaaattcgcgaaaaaatagccaaccaacgaacggatattttaaacaaaattacaacggaattggtttcaagttacgatgttatttgtattgaaaaagcccatcacagtaatgagcggccgccaaaacatgatcgttctgaactggcttggtctttatttttagctaaactgttgtataaagcacaatggtatggcaaagaactcatttgtattgagtcagaggagatagaaacagagttgtctttttctgaaagtacagaaaattcagagtatcttagaagccaaaaaatcttagaacgtggcttgtctaaacgagaaaccttataaatagaagaactgtagggactacagggatcgcctaggggatagaaaatgtacaccatgtgttgaaccatttgtttctaggaagtcacattgggacagtccac

SEQ ID NO: 904 - RNA, 1172 nt, synthetic construct
  source 1..1172: mol_type = other RNA
atgaaggctctgaaagcttataaatacagactttatccaacctcaaaacaagaagagtttattcaaaaaacattttcttgtgttcgcttggtgtataatttaatgttacaagaccggattgatatctacaaagagatgcgaaaaaatcctcaacaaacgtttaaaatgccaacgccagctaaatataagaaacaataccctgtcctcagagaagttgatagtttagctttggcaaatgcacaagtttatttggatcgagcctttaaaaatttttatcgggaaaaagggatgggctttccaaaaaagaaaaagaaagaaacggtgcattcctacactacgaacaatcaacatggcacggtcaaaattttggataatcgttatttgaaagtacctaaattgaaatctttaattaaaatgaaggtacaccgccaaccgctgggggagataaaatctgtaactatttctatgagtgcgagtcacaattattatgtttccattttgtgtgaagcgccgattgaaacgaaaacaaagcaacaaaaaatggtgggaatttgtagcagtagggaaaaatttgcgctgctttcgaatggtgaaagcttcgaaaaaagctattgttcaaagcatttaaagcaaaaactacgtcaagaagaacgaaaattaaacaagcgtaaaatgattgctttagaaaaaggtgtcgatctttcacaagcaaaaaattatcaaaaacaaaaaataaaagtcgcaaaaattcgcgaaaaaatagccaaccaacgaacggatattttaaacaaaattacaacggaattggtttcaagttacgatgttatttgtattgaaaaagcccatcacagtaatgagcggccgccaaaacatgatcgttctgaactggcttggtctttatttttagctaaactgttgtataaagcacaatggtatggcaaagaactcatttgtattgagtcagaggagatagaaacagagttgtctttttctgaaagtacagaaaattcagagtatcttagaagccaaaaaatcttagaacgtggcttgtctaaacgagaaaccttataaatagaagaactgtagggactacagggatcgcctaggggatagaaaatgtacaccatgtgttgaaccatttgtttctaggaagtcacattgggacagtccac

SEQ ID NO: 905 - RNA, 1172 nt, synthetic construct
  source 1..1172: mol_type = other RNA
atgaaggctctgaaagcttataaatacagactttatccaacctcaaaacaagaagagtttattcaaaaaacattttcttgtgttcgcttggtgtataatttaatgttacaagaccggattgatatctacaaagagatgcgaaaaaatcctcaacaaacgtttaaaatgccaacgccagctaaatataagaaacaataccctgtcctcagagaagttgatagtttagccttggcaaatgcacaagtttatttggatcgagcctttaaaaatttttatcgggaaaaagggatgggctttccaaaaaagaaaaagaaagaaacggtgcattcctacactacgaacaatcaacatggcacggtcaaaattttggataatcgttatttgaaagtacctaaattgaaatctttaattaaaatgaaggtacatcgccaaccgctgggggagataaaatctgtaactatttctatgagtgcgagtcacaattattatgtttccattttgtgtgaagcgccgattgaaacgaaaacaaagcaacaaaaaatggtgggaatttgtagcagtagggaaaaatttgcgctgctttcgaatggtgaaagcttcgaaaaaagctattgttcaaagcatttaaagcaaaaactacgtcaagaagaacgaaaattaaacaagcgtaaaatgattgctttagaaaaaggtgtcgatctttcgcaagcaaaaaattatcaaaaacaaaaaataaaagtcgcaaaaattcgcgaaaaaatagccaaccaacgaacggatattttaaacaaaattacaacggaattggtttcaagttacgatgttatttgtattgaaaaagcccatcacagtaatgaacggccgccaaaacatgatcgttctgaactggcttggtctttatttttagctaaactgttgtataaagcacaatggtatggcaaagaactcatttgtattgagtcagaggagatagaaacagagttgtctttttctgaaagtacagaaaattcagagtatcttagaagccaaaaaatcttagaacgtggcttgtctaaacgagaaaccttataaatagaagaactgtagggactacagggatcgcctaggggatagaaaatgtacaccatgtgttgaaccatttgtttctaggaagtcacattgggacagtccac

SEQ ID NO: 906 - RNA, 1172 nt, synthetic construct
  source 1..1172: mol_type = other RNA
atgaaggctctgaaagcttataaatacagactttatccaacctcaaaacaagaagagtttattcaaaaaacattttcttgtgttcgcttggtgtataatttaatgttacaagaccggattgatatctacaaagagatgcgaaaaaatcctcaacaaacgtttaaaatgccaacgccagctaaatataagaaacaataccctgtcctcagagaagttgatagtttagccttggcaaatgcacaagtttatttggatcgagcctttaaaaatttttatcgggaaaaagggatgggctttccaaaaaagaaaaagaaagaaacggtgcattcctacactacgaacaatcaacatggcacggtcaaaattttggataatcgttatttgaaagtacctaaattgaaatctttaattaaaatgaaggtacaccgccaaccgctgggggagataaaatctgtaactatttctatgagtgcgagtcacaattattatgtttccattttgtgtgaagcgccgattgaaacgaaaacaaagcaacaaaaaatggtgggaatttgtagcagtagggaaaaatttgcgctgctttcgaatggtgaaagcttcgaaaaaagctattgttcaaagcatttaaagcaaaaactacgtcaagaagaacgaaaattaaacaagcgtaaaatgattgctttagaaaaaggtgtcgatctttcgcaagcaaaaaattatcaaaaacaaaaaataaaagtcgcaaaaattcgcgaaaaaatagccaaccaacgaacggatattttaaacaaaattacaacggaattggtttcaagttatgatgttatttgtattgaaaaagcccatcacagtaatgagcggccgccaaaacatgatcgttcggaactggcttggtctttatttttagctaaactgttgtataaagcacaatggtatggcaaagaactcatttgtattgagtcagaggagatagaaacagagttgtctttttctgaaagtacagaaaattcagagtatcttagaagccaaaaaatcttagaacgtggcttgtctaaacgagaaaccttataaatagaagaactgtagggactacagggatcgcctaggggatagaaaatgtacaccatgtgttgaaccatttgtttctaggaagtcacattgggacagtccac

SEQ ID NO: 907 - RNA, 1172 nt, synthetic construct
  source 1..1172: mol_type = other RNA
atgaaggctctgaaagcttataaatacagactttatccaacctcaaaacaagaagagtttattcaaaaaacattttcttgtgttcgcttggtgtataatttaatgttacaagaccggattgatatctacaaagagatgcgaaaaaatcctcaacaaacgtttaaaatgccaacgccagctaaatataagaaacaataccctgtcctcagagaagttgatagtttagccttggcaaatgcacaagtttatttggatcgagcctttaaaaatttttatcgggaaaaagggatgggctttccaaaaaagaaaaagaaagaaacggtgcattcctatactacgaacaatcaacatggcacggtcaaaattttggataatcgttatttgaaagtacctaaattgaaatctttaattaaaatgaaggtacaccgccaaccgctgggggagataaaatctgtaactatttctatgagtgcgagtcacaattattatgtttccattttatgtgaagcgccgattgaaacgaaaacaaagcaacaaaaaatggtgggaatttgtagcagtagggaaaaatttgcgctgctttcgaatggtgaaagcttcgaaaaaagctattgttcaaagcatttaaagcaaaaactacgtcaagaagaacgaaaattaaacaagcgtaaaatgattgctttggaaaaaggtgtcgatctttcgcaagcaaaaaattatcaaaaacaaaaaataaaagtcgcaaaaattcgcgaaaaaatagccaaccaacgaacggatattttaaacaaaattacaacggaattggtttcaagttacgatgttatttgtattgaaaaagcccatcacagtaatgagcggccgccaaaacatgatcgttctgaactggcttggtctttatttttagctaaactgttgtataaagcacaatggtatggcaaagaactcatttgtattgagtcagaggagatcgaaacagagttgtctttttctgaaagtacagaaaattcagagtatcttagaagccaaaaaatcttagaacgtggcttgtctaaacgagaaaccttataaatagaagaactgtagggactacagggatcgcctaggggatagaaaatgtacaccatgtgttgaaccatttgtttctaggaagtcacattgggacagtccac

SEQ ID NO: 908 - RNA, 1172 nt, synthetic construct
  source 1..1172: mol_type = other RNA
atgaaggctctgaaagcttataaatacagactttatccaacctcaaaacaagaagagtttattcaaaaaacattttcttgtgttcgcttggtgtataatttaatgttacaagaccggattgatatctacaaagagatgcgaaaaaatcctcaacaaacgtttaaaatgccaacgccagctaaatataagaaacaataccctgtcctcagagaagttgatagtttagccttggcaaatgcacaagtttatttggatcgagcctttaaaaatttttatcgggaaaaagggatgggctttccaaaaaagaaaaagaaagaaacggtgcattcctacactacgaacaatcaacatggcacggtcaaaattttggataatcgttatttgaaagtacctaaattgaaatctttaattaaaatgaaggtacatcgccaaccgctgggggagataaaatctgtaactatttctatgagtgcgagtcacaattattatgtttccattttgtgtgaagcgccgattgaaacgaaaacaaagcaacaaaaaatggtgggaatttgtagcagtagggaaaaatttgcgctgctttcgaatggtgaaagcttcgaaaaaagctattgttcaaagcatttaaagcaaaaactacgtcaagaagaacgaaaattaaacaagcgtaaaatgattgctttagaaaaaggtgtcgatctttcgcaagcaaaaaattatcaaaaacaaaaaataaaagtcgcaaaaattcgcgaaaaaatagccaaccaacgaacggatattttaaacaaaattacaacggaattggtttcaagttacgatgttatttgtattgaaaaagcccatcacagtaatgagcggccgccaaaacatgatcgttctgaactggcttggtctttatttttagctaaactgttgtataaagcacaatggtatggcaaagaactcatttgtattgagtcagaggagatagaaacagagttgtctttttctgaaagtacagaaaattcagagtatcttagaagccaaaaaatcttagaacgtggcttgtctaaacgagaaaccttataaatagaagaactgtagggactacagggatcgcctaggggatagaaaatgtacaccatgtgttgaaccatttgtttctaggaagtcacattgggacagtccac

SEQ ID NO: 909 - RNA, 1172 nt, synthetic construct
  source 1..1172: mol_type = other RNA
atgaaggctctgaaagcttataaatacagactttatccaacctcaaaacaagaagagtttattcaaaaaacattttcttgtgttcgcttggtgtataatttaatgttacaagaccggattgatatctacaaagagatgcgaaaaaatcctcaacaaacgtttaaaatgccaacgccagctaaatataagaaacaataccctgtcctcagagaagttgatagtttagccttggcaaatgcacaagtttatttggatcgagcctttaaaaatttttatcgggaaaaagggatgggttttccaaaaaagaaaaagaaagaaacggtgcattcctacactacgaacaatcaacatggcacggtcaaaattttggataatcgttatttgaaagtacctaaattgaaatctttaattaaaatgaaggtacaccgccaaccgctgggggagataaaatctgtaactatttctatgagtgcgagtcacaattattatgtttccattttgtgtgaagcgccgattgaaacgaaaacaaagcaacaaaaaatggtgggaatttgtagcagtagggaaaaatttgcgctgctttcgaatggtgaaagcttcgaaaaaagctattgttcaaagcatttaaagcaaaaactacgtcaagaagaacgaaaattaaacaagcgtaaaatgattgctttggaaaaaggtgtcgatctttcgcaagcaaaaaattatcaaaaacaaaaaataaaagtcgcaaaaattcgcgaaaaaatagccaaccaacgaacggatattttaaacaaaattacaacggaattggtttcaagttacgatgttatttgtattgaaaaagcccatcacagtaatgagcggccgccaaaacatgatcgttctgaactggcttggtctttatttttagctaaattgttgtataaagcacaatggtatggcaaagaactcatttgtattgagtcagaggagatcgaaacagagttgtctttttctgaaagtacagaaaattcagagtatcttagaagccaaaaaatcttagaacgtggcttgtctaaacgagaaaccttataaatagaagaactgtagggactacagggatcgcctaggggatagaaaatgtacaccatgtgttgaaccatttatttctaggaagtcacattgggacagtccac

SEQ ID NO: 910 - RNA, 1172 nt, synthetic construct
  source 1..1172: mol_type = other RNA
atgaaggctctgaaagcttataaatacagactttatccaacctcaaaacaagaagagtttattcaaaaaacattttcttgtgttcgcttggtgtataatttaatgttacaagaccggattgatatctacaaagagatgcgaaaaaatcctcaacaaacgtttaaaatgccaacgccagctaaatataagaaacaataccctgtcctcagagaagttgatagtttagccttggcaaatgcacaagtttatttggatcgagcctttaaaaatttttatcgggaaaaagggatgggctttccaaaaaagaaaaagaaagaaacggtgcattcctacactacgaacaatcaacatggcacggtcaaaattttggataatcgttatttgaaagtacctaaattgaaatctttaattaaaatgaaggtacaccgccaaccgctgggggagataaaatctgtaactatttctatgagtgcgagtcacaattattatgtttccattttgtgtgaagcgccgattgaaacgaaaacaaagcaacaaaaaatggtgggaatttgtagcagtagggaaaaatttgcgctgctttcgaatggtgaaagcttcgaaaaaagctattgttcaaagcatttaaagcaaaaactacgtcaagaagaacgaaaattaaacaagcgtaaaatgattgctttggaaaaaggcgtcgatctttcacaagcaaaaaattatcaaaaacaaaaaataaaagtcgcaaaaattcgcgaaaaaatagccaaccaacgaacggatattttaaacaaaattacaacggaattggtttcaagttacgatgttatttgtattgaaaaagcccatcacagtaatgagcggccgccaaaacatgatcgttctgaactggcttggtctttatttttagctaaactgttgtataaagcacaatggtatggcaaagaactcatttgtattgagtcagaggagatagaaacagagttgtctttttctgaaagtacagaaaattcagagtatcttagaagccaaaaaatcttagaacgtggcttgtctaaacgagaaaccttataaatagaagaactgtagggactacagggatcgcctaggggatagaaaatgtacaccatgtgttgaaccatttgtttctaggaagtcacattgggacagtccac

SEQ ID NO: 911 - RNA, 1172 nt, synthetic construct
  source 1..1172: mol_type = other RNA
atgaaggctctgaaagcttataaatacagactttatccaacctcaaaacaagaagagtttattcaaaaaacattttcttgtgttcgcttggtgtataatttaatgttacaagaccggattgatatctacaaagagatgcgaaaaaatcctcaacaaacgtttaaaatgccaacgccagctaaatataagaaacaataccctgtcctcagagaagttgatagtttagctttggcaaatgcacaagtttatttggatcgagcctttaaaaatttttatcgggaaaaagggatgggctttccaaaaaagaaaaagaaagaaacggtgcattcctacactacgaacaatcaacatggcacggtcaaaattttggataatcgttatttgaaagtacctaaattgaaatctttaattaaaatgaaggtacaccgccaaccgctgggggagataaaatctgtaactatttctatgagtgcgagtcacaattattatgtttccattttgtgtgaagcgccgattgaaacgaaaacaaagcaacaaaaaatggtgggaatttgtagcagtagggaaaaatttgcgctgctttcgaatggtgaaagcttcgaaaaaagctattgttcaaagcatttaaagcaaaaactacgtcaagaagaacgaaaattaaacaagcgtaaaatgattgctttggaaaaaggcgtcgatctttcacaagcaaaaaattatcaaaaacaaaaaataaaagtcgcaaaaattcgcgaaaaaatagccaaccaacgaacggatattttaaacaaaattacaacggaattggtttcaagttacgatgttatttgtattgaaaaagcccatcacagtaatgagcggccgccaaaacatgatcgttctgaactggcttggtctttatttttagctaaactgttgtataaagcacaatggtatggcaaagaactcatttgtattgagtcagaggagatagaaacagagttgtctttttctgaaagtacagaaaattcagagtatcttagaagccaaaaaatcttagaacgtggcttgtctaaacgagaaaccttataaatagaagaactgtagggactacagggatcgcctaggggatagaaaatgtacaccatgtgttgaaccatttgtttctaggaagtcacattgggacagtccac

SEQ ID NO: 912 - RNA, 1172 nt, synthetic construct
  source 1..1172: mol_type = other RNA
atgaaggctctgaaagcttataaatacagactttatccaacctcaaaacaagaagagtttattcaaaaaacattttcttgtgttcgcttggtgtataatttaatgttacaagaccggattgatatctacaaagagatgcgaaaaaatcctcaacaaacgtttaaaatgccaacgccagctaaatataagaaacaataccctgtcctcagagaagttgatagtttagctttggcaaatgcacaagtttatttggatcgagcctttaaaaatttttatcgggaaaaagggatgggctttccaaaaaagaaaaagaaagaaacggtgcattcctacactacgaacaatcaacatggcacggtcaaaattttggataatcgttatttgaaagtacctaaattgaaatctttaattaaaatgaaggtacaccgccaaccgctgggggagataaaatctgtaactatttctatgagtgcgagtcacaattattatgtttccattttgtgtgaagcaccgattgaaacgaaaacaaagcaacaaaaaatggtgggaatttgtagcagtagggaaaaatttgcgctgctttcgaatggtgaaagcttcgaaaaaagctattgttcaaagcatttaaagcaaaaactacgtcaagaagaacgaaaattaaacaagcgtaaaatgattgctttagaaaaaggtgtcgatctttcacaagcaaaaaattatcaaaaacaaaaaataaaagtcgcaaaaattcgcgaaaaaatagccaaccaacgaacggatattttaaacaaaattacaacggaattggtttcaagttacgatgttatttgtattgaaaaagcccatcacagtaatgagcggccgccaaaacatgatcgttctgaactggcttggtctttatttttagctaaactgttgtataaagcacaatggtatggcaaagaactcatttgtattgagtcagaggagatagaaacagagttgtctttttctgaaagtacagaaaattcagagtatcttagaagccaaaaaatcttagaacgtggcttgtctaaacgagaaaccttataaatagaagaactgtagggactacagggatcgcctaggggatagaaaatgtacaccatgtgttgaaccatttgtttctaggaagtcacattgggacagtccac

SEQ ID NO: 913 - RNA, 1172 nt, synthetic construct
  source 1..1172: mol_type = other RNA
atgaaggctctgaaagcttataaatacagactttatccaacctcaaaacaagaagagtttattcaaaaaacattttcttgtgttcgcttggtgtataatttaatgttacaagaccggattgatatctacaaagagatgcgaaaaaatcctcaacaaacgtttaaaatgccaacgccagctaaatataagaaacaataccctgtcctcagagaagttgatagtttagccttggcaaatgcacaagtttatttggatcgagcctttaaaaatttttatcgggaaaaagggatgggctttccaaaaaagaaaaagaaagaaacggtgcattcctacactacgaacaatcaacatggcacggtcaaaattttggataatcgttatttgaaagtacctaaattgaaatctttaattaaaatgaaggtacaccgccaaccgctgggggagataaaatctgtaaccatttctatgagtgcgagtcacaattattatgtttccattttgtgtgaagcgccgattgaaacgaaaacaaagcaacaaaaaatggtgggaatttgtagcagtagggaaaaatttgcgctgctttcgaatggtgaaagcttcgaaaaaagctattgttcaaagcatttaaagcaaaaactacgtcaagaagaacgaaaattaaacaagcgtaaaatgattgctttggaaaaaggtgtcgatctttcgcaagcaaaaaattatcaaaaacaaaaaataaaagtcgcaaaaattcgcgaaaaaatagccaaccaacgaacggatattttaaacaaaattacaacggaattggtttcaagttacgatgttatttgtattgaaaaagcccatcacagtaatgagcggccgccaaaacatgatcgttctgaactggcttggtctttatttttagctaaattgttgtataaagcacaatggtatggcaaagaactcatttgtattgagtcagaggagatcgaaacagagttgtctttttctgaaagtacagaaaattcagagtatcttagaagccaaaaaatcttagaacgtggcttgtctaaacgagaaaccttataaatagaagaactgtagggactacagggatcgcctaggggatagaaaatgtacaccatgtgttgaaccatttatttctaggaagtcacattgggacagtccac

SEQ ID NO: 914 - RNA, 1172 nt, synthetic construct
  source 1..1172: mol_type = other RNA
atgaaggctctgaaagcttataaatacagactttatccaacctcaaaacaagaagagtttattcaaaaaacattttcttgtgttcgcttggtgtataatttaatgttacaagaccggattgatatctacaaagagatgcgaaaaaatcctcaacaaacgtttaaaatgccaacgccagctaaatataagaaacaataccctgtcctcagagaagttgatagtttagccttggcaaatgcacaagtttatttggatcgagcctttaaaaatttttatcgggaaaaagggatgggctttccaaaaaagaaaaagaaagaaacggtgcattcctacactacgaacaatcaacatggcacggtcaaaattttggataatcgttatttgaaagtacctaaattgaaatctttaattaaaatgaaggtacatcgccaaccgctgggggagataaaatctgtaactatttctatgagtgcgagtcacaattattatgtttccattttgtgtgaagcgccgattgaaacgaaaacaaagcaacaaaaaatggtgggaatttgtagcagtagggaaaaatttgcgctgctttcgaatggtgaaagcttcgaaaaaagctattgttcaaagcatttaaagcaaaaactacgtcaagaagaacgaaaattaaacaagcgtaaaatgattgctttggaaaaaggtgtcgatctttcgcaagcaaaaaattatcaaaaacaaaaaataaaagtcgcaaaaattcgcgaaaaaatagccaaccaacggacggatattttaaacaaaattacaacggaattggtttcaagttacgatgttatttgcattgaaaaagcccatcacagtaatgagcggccgccaaaacatgatcgttctgaactggcttggtctttatttttagctaaactgttgtataaagcacaatggtatggcaaagaactcatttgtattgagtcagaggagatcgaaacagagttgtctttttctgaaagtacagaaaattcagagtatcttagaagtcaaaaaatcttagaacgtggcttgtctaaacgagaaaccttataaatagaagaactgtagggactacagggatcgcctaggggatagaaaatgcacaccatgtgttgaaccatttgtttctaggaagtcacattgggacagtccac

SEQ ID NO: 915 - RNA, 1172 nt, synthetic construct
  source 1..1172: mol_type = other RNA
atgaaggctctgaaagcttataaatacagactttatccaacctcaaaacaagaagagtttattcaaaaaacattttcttgtgttcgcttggtgtataatttaatgttacaagaccggattgatatctacaaagagatgcgaaaaaatcctcaacaaacgtttaaaatgccaacgccagctaaatataagaaacaataccctgtcctcagagaagttgatagtttagccttggcaaatgcacaagtttatttggatcgagcctttaaaaatttttatcgggaaaaagggatgggctttccaaaaaagaaaaagaaagaaacggtgcattcctacactacgaacaatcaacatggcacggtcaaaattttggataatcgttatttgaaggtacctaaattgaaatctttaattaaaatgaaggtacaccgccaaccgctgggggagataaaatctgtaactatttctatgagtgcgagtcacaattattatgtttccattttatgtgaagcgccgattgaaacgaaaacaaagcaacaaaaaatggtgggaatttgtagcagtagggaaaaatttgcgctgctttcgaatggtgaaagcttcgaaaaaagctattgttcaaagcatttaaagcaaaaactacgtcaagaagaacgaaaattaaacaagcgtaaaatgattgctttagaaaaaggtgtcgatctttcgcaagcaaaaaattatcaaaaacaaaaaataaaagtcgcaaaaattcgcgaaaaaatagccaaccaacgaacggatattttaaacaaaattacaacggaattggtttcaagttacgatgttatttgtattgaaaaagcccatcacagtaatgaacggccgccaaaacatgatcgttctgaactggcttggtctttatttttagctaaactgttgtataaagcacaatggtatggcaaagaactcatttgtattgagtcagaggagatagaaacagagttgtctttttctgaaagtacagaaaattcagagtatcttagaagccaaaaaatcttagaacgtggcttgtctaaacgagaaaccttataaatagaagaactgtaggcactacagggatcgcctaggggatagaaaatgtacaccatgtgttgaaccatttgtttctaggaagtcacattgggacagtccac

SEQ ID NO: 916 - RNA, 1172 nt, synthetic construct
  source 1..1172: mol_type = other RNA
atgaaggctctgaaagcttataaatacagactttatccaacctcaaaacaagaagagtttattcaaaaaacattttcttgtgttcgcttggtgtataatttaatgttacaagaccggattgatatctacaaagagatgcgaaaaaatcctcaacaaacgtttaaaatgccaacgccagctaaatataagaaacaataccctgtcctcagagaagttgatagtttagccttggcaaatgcacaagtttatttggatcgagcctttaaaaatttttatcgggaaaaagggatgggctttccaaaaaagaaaaagaaagaaacggtgcattcctacactacgaacaatcaacatggcacggtcaaaattttggataatcgttatttgaaagtacctaaattgaaatctttaattaaaatgaaggtacaccgccaaccgctgggggagataaaatctgtaactatttctatgagtgcgagtcacaattattatgtttccattttgtgtgaagcgccgattgaaacgaaaacaaagcaacaaaaaatggtgggaatttgtagcagtagggaaaaatttgcgctgctttcgaatggtgaaagcttcgaaaaaagctattgttcaaagcatttaaagcaaaaactacgtcaagaagaacgaaaattaaacaagcgtaaaatgattgctttggaaaaaggtgtcgatctttcacaagcaaaaaattatcaaaaacaaaaaataaaagtcgcaaaaattcgcgaaaaaatagccaaccaacgaacggatattttaaacaaaattacaacggaattggtttcaagttacgatgttatttgtattgaaaaagcccatcacagtaatgagcggccgccaaaacatgatcgttctgaactggcttggtctttatttttagctaaattgttgtataaagcacaatggtatggcaaagaactcatttgtattgaatcagaggagatcgaaacagagttgtctttttctgaaagtacagaaaattcagagtatcttagaagccaaaaaatcttagaacgtggcttgtctaaacgagaaaccttataaatagaagaactgtagggactacagggatcgcctaggggatagaaaatgtacaccatgtgttgaaccatttgtttctaggaagtcacattgggacagtccac

SEQ ID NO: 917 - RNA, 1172 nt, synthetic construct
  source 1..1172: mol_type = other RNA
atgaaggctctgaaagcttataaatacagactttatccaacctcaaaacaagaagagtttattcaaaaaacattttcttgtgttcgcttggtgtataatttaatgttacaagaccggattgatatctacaaagagatgcgaaaaaatcctcaacaaacgtttaaaatgccaacgccagctaaatataagaaacaataccctgtcctcagagaagttgatagtttagccttggcaaatgcacaagtttatttggatcgagcctttaaaaatttttatcgggaaaaagggatgggctttcccaaaaagaaaaagaaagaaacggtgcattcctacactacgaacaatcaacatggcacggtcaaaattttggataatcgttatttgaaagtacctaaattgaaatctttaattaaaatgaaggtacaccgccaaccgctgggggagataaaatctgtaactatttctatgagtgcgagtcacaattattatgtttccattttgtgtgaagcgccgattgaaacgaaaacaaagcaacaaaaaatggtgggaatttgtagcagtagggaaaaatttgcgctgctttcgaatggtgaaagcttcgaaaaaagctattgttcaaagcatttaaagcaaaaactacgtcaagaagaacgaaaattaaacaagcgtaaaatgattgctttggaaaaaggtgtcgatctttcgcaagcaaaaaattatcaaaaacaaaaaataaaagtcgcaaaaattcgcgaaaaaatagccaaccaacgaacggatattttaaacaaaattacaacggaattggtttcaagttacgatgttatttgtattgaaaaagcccatcacagtaatgagcggccgccaaaacatgatcgttctgaactggcttggtctttatttttagctaaattgttgtataaagcacaatggtatggcaaagaactcatttgtattgagtcagaggagatcgaaacagagttgtctttttctgaaagtacagaaaattcagagtatcttagaagccaaaaaatcttagaacgtggcttgtctaaacgagaaaccttataaatagaagaactgtagggactacagggatcgcctaggggatagaaaatgtacaccatgtgttgaaccatttatttctaggaagtcacattgggacagtccac

SEQ ID NO: 918 - RNA, 1172 nt, synthetic construct
  source 1..1172: mol_type = other RNA
atgaaggctctgaaagcttataaatacagactttatccaacctcaaaacaagaagagtttattcaaaaaacattttcttgtgttcgcttggtgtataatttaatgttacaagaccggattgatatctacaaagagatgcgaaaaaatcctcaacaaacgtttaaaatgccaacgccagctaaatataagaaacaataccctgtcctcagagaagttgatagtttagccttggcaaatgcacaagtttatttggatcgagcctttaaaaatttttatcgggaaaaagggatgggctttccaaaaaagaaaaagaaagaaacggtgcattcctacactacgaacaatcaacatggcacggtcaaaattttggataatcgttatttgaaggtacctaaattgaaatctttaattaaaatgaaggtacaccgccaaccgctgggggagataaaatctgtaactatttctatgagtgcgagtcacaattattatgtttccattttgtgtgaagcgccgattgaaacgaaaacaaagcaacaaaaaatggtgggaatttgtagcagtagggaaaaatttgcgctgctttcgaatggtgaaagcttcgaaaaaagctattgttcaaagcatttaaagcaaaaactacgtcaagaagaacgaaaattaaacaagcgtaaaatgattgctttagaaaaaggtgtcgatctttcgcaagcaaaaaattatcaaaaacaaaaaataaaagtcgcaaaaattcgcgaaaaaatagccaaccaacgaacggatattttaaacaaaattacaacggaattggtttcaagttacgatgttatttgtattgaaaaagcccatcacagtaatgaacggccgccaaaacatgatcgttctgaactggcttggtctttatttttagctaaactgttgtataaagcacaatggtatggcaaagaactcatttgtattgagtcagaggagatagaaacagagttgtctttttctgaaagtacagaaaattcagagtatcttagaagccaaaaaatcttagaacgtggcttgtctaaacgagaaaccttataaatagaagaactgtagggactacagggatcgcctaggggatagaaaatgtacaccatgtgttgaaccatttgtttctaggaagtcacattgggacagtccac

SEQ ID NO: 919 - RNA, 1172 nt, synthetic construct
  source 1..1172: mol_type = other RNA
atgaaggctctgaaagcttataaatacagactttatccaacctcaaaacaagaagagtttattcaaaaaacattttcttgtgttcgcttggtgtataatttaatgttacaagaccggattgatatctacaaagagatgcgaaaaaatcctcaacaaacgtttaaaatgccaacgccagctaaatataagaaacaataccctgtcctcagagaagttgatagtttagccttggcaaatgcacaagtttatttggatcgagcctttaaaaatttttatcgggaaaaagggatgggctttccaaaaaagaaaaagaaagaaacggtgcattcctacactacgaacaatcaacatggcacggtcaaaattttggataatcgttatttgaaggtacctaaattgaaatctttaattaaaatgaaggtacaccgccaaccgctgggggagataaaatctgtaactatttctatgagtgcgagtcacaattattatgtttccattttatgtgaagcgccgattgaaacgaaaacaaagcaacaaaaaatggtgggaatttgtagcagtagggaaaaatttgcgctgctttcgaatggtgaaagcttcgaaaaaagctattgttcaaagcatttaaagcaaaaactacgtcaagaagaacgaaaattaaacaagcgtaaaatgattgctttagaaaaaggtgtcgatctttcgcaagcaaaaaattatcaaaaacaaaaaataaaagtcgcaaaaattcgcgaaaaaatagccaaccaacgaacggatattttaaacaaaattacaacggaattggtttcaagttacgatgttatttgtattgaaaaagcccatcacagtaatgaacggccgccaaaacatgatcgttctgaactggcttggtctttatttttagctaaactgttgtataaagcacaatggtatggcaaagaactcatttgtattgagtcagaggagatagaaacagagttgtctttttctgaaagtacagaaaattcagagtatcttagaagccaaaaaatcttagaacgtggcttgtctaaacgagaaaccttataaatagaagaactgtagggactacagggatcgcctaagggatagaaaatgtacaccatgtgttgaaccatttgtttctaggaagtcacattgggacagtccac

SEQ ID NO: 920 - RNA, 1172 nt, synthetic construct; identical to SEQ ID NO: 894
  source 1..1172: mol_type = other RNA

SEQ ID NO: 921 - RNA, 1172 nt, synthetic construct
  source 1..1172: mol_type = other RNA
atgaaggctctgaaagcttataaatacagactttatccaacctcaaaacaagaagagtttattcaaaaaacattttcttgtgttcgcttggtgtataatttaatgttacaagaccggattgatatctacaaagagatgcgaaaaaatcctcaacaaacgtttaaaatgccaacgccagctaaatataagaaacaataccctgtcctcagagaagttgatagtttagccttggcaaatgcacaagtttatttggatcgagcctttaaaaatttttatcgggaaaaagggatgggctttccaaaaaagaaaaagaaagaaacggtgcattcctacactacgaacaatcaacatggcacggtcaaaattttggataatcgttatttgaaagtacctaaattgaaatctttaattaaaatgaaggtacaccgccaaccgctgggggagataaaatctgtaactatttctatgagtgcgagtcacaattattatgtttccattttgtgtgaagcgccgattgaaacgaaaacaaagcaacaaaaaatggtgggaatttgtagcagtagggaaaaatttgcgctgctttcgaatggtgaaagcttcgaaaaaagctattgttcaaagcatttaaagcaaaaactacgtcaagaagaacgaaaattaaacaagcgtaaaatgattgctttggaaaaaggtgtcgatctttcgcaagcaaaaaattatcaaaaacaaaaaataaaagtcgcaaaaattcgcgaaaaaatagccaaccaacgaacggatattttaaacaaaattacaacggaattggtttcaagttacgatgttatttgtattgaaaaagcccatcacagtaatgagcggccgccaaaacatgatcgttctgaactggcttggtctttatttttagctaaattgttgtataaagcacaatggtatggcaaagaactcatttgtattgagtcagaggagatcgaaacagagttgtctttttctgaaagtacagaaaattcagagtatcttagaagccaaaaaatcttagaacgtggcttgtctaaacgagaaaccttataaatagaagaactgtagggactacagggatcgcctaggggatagaaaatgtacaccatgtgttgaaccatttgtttctaggaagtcacattgggacagtccac

SEQ ID NO: 922 - RNA, 1172 nt, synthetic construct
  source 1..1172: mol_type = other RNA
atgaaggctctgaaagcttataaatacagactttatccaacctcaaaacaagaagagtttattcaaaaaacattttcttgtgttcgcttggtgtataatttaatgttacaagaccggattgatatctacaaagagatgcgaaaaaatcctcaacaaacgtttaaaatgccaacgccagctaaatataagaaacaataccctgtcctcagagaagttgatagtttagccttggcaaatgcacaagtttatttggatcgagcctttaaaaatttttatcgggaaaaagggatgggctttccaaaaaagaaaaagaaagaaaccgtgcattcctacactacgaacaatcaacatggcacggtcaaaattttggataatcgttatttgaaagtacctaaattgaaatctttaattaaaatgaaggtacaccgccaaccgctgggggagataaaatctgtaactatttctatgagtgcgagtcacaattattatgtttccattttgtgtgaagcgccgattgaaacgaaaacaaagcaacaaaaaatggtgggaatttgtagcagtagggaaaaatttgcgctgctttcgaatggtgaaagcttcgaaaaaagctattgttcaaagcatttaaagcaaaaactacgtcaagaagaacgaaaattaaacaagcgtaaaatgattgctttggaaaaaggtgtcgatctttcacaagcaaaaaattatcaaaaacaaaaaataaaagtcgcaaaaattcgcgaaaaaatagccaaccaacgaacggatattttaaacaaaattacaacggaattggtttcaagttacgatgttatttgtattgaaaaagcccatcacagtaatgagcggccgccaaaacatgatcgttctgaactggcttggtctttatttttagctaaattgttgtataaagcacaatggtatggcaaagaactcatttgtattgagtcagaggagatcgaaacagagttgtctttttctgaaagtacagaaaattcagagtatcttagaagccaaaaaatcttagaacgtggcttgtctaaacgagaaaccttataaatagaagaactgtagggactacagggatcgcctaggggatagaaaatgtacaccatgtgttgaaccatttatttctaggaagtcacattgggacagtccac

SEQ ID NO: 923 - RNA, 1172 nt, synthetic construct
  source 1..1172: mol_type = other RNA
atgaaggctctgaaagcttataaatacagactttatccaacctcaaaacaagaagagtttattcaaaaaacattttcttgtgttcgcttggtgtataatttaatgttacaagaccggattgatatctacaaagagatgcgaaaaaatcctcaacaaacgtttaaaatgccaacgccagctaaatataagaaacaataccctgtcctcagagaagttgatagtttagccttggcaaatgcacaagtttatttggatcgagcctttaaaaatttttatcgggaaaaagggatgggctttccaaaaaagaaaaagaaagaaacggtgcattcctacactacgaacaatcaacatggcacggtcaaaattttggataatcgttatttgaaggtacctaaattgaaatctttaattaaaatgaaggtacatcgccaaccgctgggggagataaaatctgtaactatttctatgagtgcgagtcacaattattatgtttccattttgtgtgaagcgccgattgaaacgaaaacaaagcaacaaaaaatggtgggaatttgtagcagtagggaaaaatttgcgctgctttcgaatggtgaaagcttcgaaaaaagctattgttcaaagcatttaaagcaaaaactacgtcaagaagaacgaaaattaaacaagcgtaaaatgattgctttagaaaaaggtgtcgatctttcgcaagcaaaaaattatcaaaaacaaaaaataaaagtcgcaaaaattcgcgaaaaaatagccaaccaacgaacggatattttaaacaaaattacaacggaattggtttcaagttacgatgttatttgtattgaaaaagcccatcacagtaatgagcggccgccaaaacatgatcgttctgaactggcttggtctttatttttagctaaactgttgtataaagcacaatggtatggcaaagaactcatttgtattgagtcagaggagatagaaacagagttgtctttttctgaaagtacagaaaattcagagtatcttagaagccaaaaaatcttagaacgtggcttgtctaaacgagaaaccttataaatagaagaactgtagggactacagggatcgcctaggggatagaaaatgtacaccatgtgttgaaccatttatttctaggaagtcacattgggacagtccac

SEQ ID NO: 924 - RNA, 1172 nt, synthetic construct
  source 1..1172: mol_type = other RNA
atgaaggctctgaaagcttataaatacagactttatccaacctcaaaacaagaagagtttattcaaaaaacattttcttgtgttcgcttggtgtataatttaatgttacaagaccggattgatatctacaaagagatgcgaaaaaatcctcaacaaacgtttaaaatgccaacgccagctaaatataagaaacaataccctgtcctcagagaagttgatagtttagccttggcaaatgcacaagtttatttggatcgagcctttaaaaatttttatcgggaaaaagggatgggctttccaaaaaagaaaaagaaagaaacggtgcattcctacactacgaacaatcaacatggcacggtcaaaattttggataatcgttatttgaaggtacctaaattgaaatctttaattaaaatgaaggtacaccgccaaccgctgggggagataaaatctgtaactatttctatgagtgcgagtcacaattattatgtttccattttatgtgaagcgccgattgaaacgaaaacaaagcaacaaaaaatggtgggaatttgtagcagtagggaaaaatttgcgctgctttcgaatggtgaaagcttcgaaaaaagctattgttcaaagcatttaaagcaaaaactacgtcaagaagaacgaaaattaaacaagcgtaaaatgattgctttagaaaaaggtgtcgatctttcgcaagcaaaaaattatcaaaaacaaaaaataaaagtcgcaaaaattcgcgaaaaaatagccaaccaacgaacggatattttaaacaaaattaccacggaattggtttcaagttacgatgttatttgtattgaaaaagcccatcacagtaatgaacggccgccaaaacatgatcgttctgaactggcttggtctttatttttagctaaactgttgtataaagcacaatggtatggcaaagaactcatttgtattgagtcagaggagatagaaacagagttgtctttttctgaaagtacagaaaattcagagtatcttagaagccaaaaaatcttagaacgtggcttgtctaaacgagaaaccttataaatagaagaactgtagggactacagggatcgcctaggggatagaaaatgtacaccatgtgttgaaccatttgtttctaggaagtcacattgggacagtccac

SEQ ID NO: 925 - RNA, 1172 nt, synthetic construct
  source 1..1172: mol_type = other RNA
atgaaggctctgaaagcttataaatacagactttatccaacctcaaaacaagaagagtttattcaaaaaacattttcttgtgttcgcttggtgtataatttaatgttacaagaccggattgatatctacaaagagatgcgaaaaaatcctcaacaaacgtttaaaatgccaacgccagctaaatataagaaacaataccctgtcctcagagaagttgatagtttagccttggcaaatgcacaagtttatttggatcgagcctttaaaaatttttatcgggaaaaagggatgggctttccaaaaaagaaaaagaaagaaacggtgcattcctacactacgaacaatcaacatggcacggtcaaaattttggataatcgttatttgaaggtacctaaattgaaatctttaattaaaatgaaggtacaccgccaaccgctgggggagataaaatctgtaactatttctatgagtgcgagtcacaattattatgtttccattttatgtgaagcgcctattgaaacgaaaacaaagcaacaaaaaatggtgggaatttgtagcagtagggaaaaatttgcgctgctttcgaatggtgaaagcttcgaaaaaagctattgttcaaagcatttaaagcaaaaactacgtcaagaagaacgaaaattaaacaagcgtaaaatgattgctttagaaaaaggtgtcgatctttcgcaagcaaaaaattatcaaaaacaaaaaataaaagtcgcaaaaattcgcgaaaaaatagccaaccaacgaacggatattttaaacaaaattacaacggaattggtttcaagttacgatgttatttgtattgaaaaagcccatcacagtaatgaacggccgccaaaacatgatcgttctgaactggcttggtctttatttttagctaaactgttgtataaagcacaatggtatggcaaagaactcatttgtattgagtcagaggagatagaaacagagttgtctttttctgaaagtacagaaaattcagagtatcttagaagccaaaaaatcttagaacgtggcttgtctaaacgagaaaccttataaatagaagaactgtagggactacagggatcgcctaggggatagaaaatgtacaccatgtgttgaaccatttgtttctaggaagtcacattgggacagtccac

SEQ ID NO: 926 - RNA, 1172 nt, synthetic construct
  source 1..1172: mol_type = other RNA
atgaaggctctgaaagcttataaatacagactttatccaacctcaaaacaagaagagtttattcaaaaaacattttcttgtgttcgcttggtgtataatttaatgttacaagaccggattgatatctacaaagagatgcgaaaaaatcctcaacaaacgtttaaaatgccaacgccagctaaatataagaaacaataccctgtcctcagagaagttgatagtttagccttggcaaatgcacaagtttatttggatcgagcctttaaaaatttttatcgggaaaaagggatgggctttccaaaaaagaaaaagaaagaaacggtgcattcctacactacgaacaatcaacatggcacggtcaaaattttggataatcgttatttgaaagtacctaaattgaaatctttaattaaaatgaaggtacaccgccaaccgctgggggagataaaatctgtaactatttctatgagtgcgagtcacaattattatgtttccattttatgtgaagcgccgattgaaacgaaaacaaagcaacaaaaaatggtgggaatttgtagcagtagggaaaaatttgcgctgctttcgaatggtgaaagcttcgaaaaaagctattgttcaaagcatttaaagcaaaaactacgtcaagaagaacgaaaattaaacaagcgtaaaatgattgctttggaaaaaggtgtcgatctttcgcaagcaaaaaattatcaaaaacaaaaaataaaagtcgcaaaaattcgcgaaaaaatagccaaccaacgaacggatattttaaacaaaattacaacggaattggtttcaagttacgatgttatttgtattgaaaaagcccatcacagtaatgagcggccgccaaaacatgatcgttctgaactggcttggtctttatttttagctaaactgttgtataaagcacaatggtatggcaaagaactcatttgtattgagtcagaggagatagaaacagagttgtctttttctgaaagtacagaaaattcagagtatcttagaagccaaaaaatcttagaacgtggcttgtctaaacgagaaaccttataaatagaagaactgtagggactacagggatcgcctaggggatagaaaatgtacaccatgtgttgaaccatttgtttctaggaagtcacattgggacagtccac

SEQ ID NO: 927 - RNA, 1172 nt, synthetic construct
  source 1..1172: mol_type = other RNA
atgaaggctctgaaagcttataaatacagactttatccaacctcaaaacaagaagagtttattcaaaaaacattttcttgtgttcgcttggtgtataatttaatgttacaagaccggattgatatctacaaagagatgcgaaaaaatcctcaacaaacgtttaaaatgccaacgccagctaaatataagaaacaataccctgtcctcagagaagttgatagtttagccttggcaaatgcacaagtttatttggatcgagcctttaaaaatttttatcgggaaaaagggatgggctttccaaaaaagaaaaagaaagaaacggtgcattcctacactacgaacaatcaacatggcacggtcaaaattttggataatcgttatttgaaagtacctaaattgaaatctttaattaaaatgaaggtacaccgccaaccgctgggggagataaaatctgtaactatttctatgagtgcgagtcacaattattatgtttccattttgtgtgaagcgccgattgaaacgaaaacaaagcaacaaaaaatggtgggaatttgtagcagtagggaaaaatttgcgctgctttcgaatggtgaaagcttcgaaaaaagctattgttcaaagcatttaaagcaaaaactacgtcaagaagaacgaaaattaaacaagcgtaaaatgattgctttggaaaaaggtgtcgatctttcgcaagcaaaaaattatcaaaaacaaaaaataaaagtcgcaaaaattcgcgaaaaaatagctaaccaacgaacggatattttaaacaaaattacaacggaattggtttcaagttacgatgttatttgtattgaaaaagcccatcacagtaatgagcggccgccaaaacatgatcgttctgaactggcttggtctttatttttagctaaattgttgtataaagcacaatggtatggcaaagaactcatttgtattgagtcagaggagatcgaaacagagttgtctttttctgaaagtacagaaaattcagagtatcttagaagccaaaaaatcttagaacgtggcttgtctaaacgagaaaccttataaatagaagaactgtagggactacagggatcgcctaggggatagaaaatgtacaccatgtgttgaaccatttatttctaggaagtcacattgggacagtccac

SEQ ID NO: 928 - RNA, 1172 nt, synthetic construct
  source 1..1172: mol_type = other RNA
atgaaggctctgaaagcttataaatacagactttatccaacctcaaaacaagaagagtttattcaaaaaacattttcttgtgttcgcttggtgtataatttaatgttacaagaccggattgatatctacaaagagatgcgaaaaaatcctcaacaaacgtttaaaatgccaacgccagctaaatataagaaacaataccctgtcctcagagaagttgatagtttagccttggcaaatgcacaagtttatttggatcgagcctttaaaaatttttatcgggaaaaagggatgggctttccaaaaaagaaaaagaaagaaacggtgcattcctacactacgaacaatcaacatggcacggtcaaaattttggataatcgttatttgaaagtacctaaattgaaatctttaattaaaatgaaggtacaccgccaaccgctgggggagataaaatctgtaactatttctatgagtgcgagtcacaattattatgtttccattttgtgtgaagcgccgattgaaacgaaaacaaagcaacaaaaaatggtgggaatttgtagcagtagggaaaaatttgcgctgctttcgaatggtgaaagcttcgaaaaaagctattgttcaaagcatttaaagcaaaaattacgtcaagaagaacgaaaattaaacaagcgtaaaatgattgctttggaaaaaggtgtcgatctttcgcaagcaaaaaattatcaaaaacaaaaaataaaagtcgcaaaaattcgcgaaaaaatagccaaccaacgaacggatattttaaacaaaattacaacggaattggtttcaagttacgatgttatttgtattgaaaaagcccatcacagtaatgagcggccgccaaaacatgatcgttctgaactggcttggtctttatttttagctaaattgttgtataaagcacaatggtatggcaaagaactcatttgtattgagtcagaggagatcgaaacagagttgtctttttctgaaagtacagaaaattcagagtatcttagaagccaaaaaatcttagaacgtggcttgtctaaacgagaaaccttataaatagaagaactgtagggactacagggatcgcctaggggatagaaaatgtacaccatgtgttgaaccatttatttctaggaagtcacattgggacagtccac

SEQ ID NO: 929 - RNA, 1172 nt, synthetic construct
  source 1..1172: mol_type = other RNA
atgaaggctctgaaagcttataaatacagactttatccaacctcaaaacaagaagagtttattcaaaaaacattttcttgtgttcgcttggtgtataatttaatgttacaagaccggattgatatctacaaagagatgcgaaaaaatcctcaacaaacgtttaaaatgccaacgccagctaaatataagaaacaataccctgtcctcagagaagttgatagtttagccttggcaaatgcacaagtttatttggatcgagcctttaaaaatttttatcgggaaaaagggatgggctttccaaaaaagaaaaagaaagaaacggtgcattcctacactacgaacaatcaacatggcacggtcaaaattttggataatcgttatttgaaggtacctaaattgaaatctttaattaaaatgaaggtacaccgccaaccgctgggggagataaaatctgtaactatttctatgagtgcgagtcacaattattatgtttccattttatgtgaagcgccgattgaaacgaaaacaaagcaacaaaaaatggtgggaatttgtagcagtagggaaaaatttgcgctgctttcgaatggtgaaagcttcgaaaaaagctattgttcaaagcatttaaagcaaaaactacgtcaagaagaacgaaaattaaataagcgtaaaatgattgctttagaaaaaggtgtcgatctttcgcaagcaaaaaattatcaaaaacaaaaaataaaagtcgcaaaaattcgcgaaaaaatagccaaccaacgaacggatattttaaacaaaattacaacggaattggtttcaagttacgatgttatttgtattgaaaaagcccatcacagtaatgaacggccgccaaaacatgatcgttctgaactggcttggtctttatttttagctaaactgttgtataaagcacaatggtatggcaaagaactcatttgtattgagtcagaggagatagaaacagagttgtctttttctgaaagtacagaaaattcagagtatcttagaagccaaaaaatcttagaacgtggcttgtctaaacgagaaaccttataaatagaagaactgtagggactacagggatcgcctaggggatagaaaatgtacaccatgtgttgaaccatttgtttctaggaagtcacattgggacagtccac

SEQ ID NO: 930 - RNA, 1172 nt, synthetic construct
  source 1..1172: mol_type = other RNA
atgaaggctctgaaagcttataaatacagactttatccaacctcaaaacaagaagagtttattcaaaaaacattttcttgtgttcgattggtgtataatttaatgttacaagaccggattgatatctacaaagagatgcgaaaaaatcctcaacaaacgtttaaaatgccaacgccagctaaatataagaaacaataccctgtcctcagagaagttgatagtttagccttggcaaatgcacaagtttatttggatcgagcctttaaaaatttttatcgggaaaaagggatgggctttccaaaaaagaaaaagaaagaaacggtgcattcctacactacgaacaatcaacatggcacggtcaaaattttggataatcgttatttgaaagtacctaaattgaaatctttaattaaaatgaaggtacaccgccaaccgctgggggagataaaatctgtaactatttctatgagtgcgagtcacaattattatgtttccattttgtgtgaagcgccgattgaaacgaaaacaaagcaacaaaaaatggtgggaatttgtagcagtagggaaaaatttgcgctgctttcgaatggtgaaagcttcgaaaaaagctattgttcaaagcatttaaagcaaaaactacgtcaagaagaacgaaaattaaacaagcgtaaaatgattgctttagaaaaaggtgtcgatctttcgcaagcaaaaaattatcaaaaacaaaaaataaaagtcgcaaaaattcgcgaaaaaatagccaaccaacggacggatattttaaacaaaattacaacggaattggtttcaagttacgatgttatttgtattgaaaaagcccatcacagtaatgagcggccgccaaaacatgatcgttctgaactagcttggtctttatttttagctaaactgttgtataaagcacaatggtatggcaaagaactcatttgtattgagtcagaggagatcgaaacagagttgtctttttctgaaagtacagaaaattcagagtatcttagaagccaaaaaatcttagaacgtggcttgtctaaacgagaaaccttataaatagaagaactgtagggactacagggatcgcctaggggatagaaaatgtacaccatgtgttgaaccatttgtttctaggaagtcacattgggacagtccac

SEQ ID NO: 931 - RNA, 1172 nt, synthetic construct
  source 1..1172: mol_type = other RNA
atgaaggctctgaaagcttataaatacagactttatccaacctcaaaacaagaagagtttattcaaaaaacattttcttgtgttcgcttggtgtataatttaatgttacaagaccggattgatatctacaaagagatgcgaaaaaatcctcaacaaacgtttaaaatgccaacgccagctaaatataagaaacaataccctgtcctcagagaagttgatagtttagccttggcaaatgcacaagtttatttggatcgagcctttaaaaatttttatcgggaaaaagggatgggctttccaaaaaagaaaaagaaagaaacggtgcattcctacaccacgaacaatcaacatggcacggtcaaaattttggataatcgttatttgaaagtacctaaattgaaatctttaattaaaatgaaggtacaccgccaaccgctgggggagataaaatctgtaactatttctatgagtgcgagtcacaattattatgtttccattttgtgtgaagcgccgattgaaacgaaaacaaagcaacaaaaaatggtgggaatttgtagcagtagggaaaaatttgcgctgctttcgaatggtgaaagcttcgaaaaaagctattgttcaaagcatttaaagcaaaaactacgtcaagaagaacgaaaattaaacaagcgtaaaatgattgctttggaaaaaggtgtcgatctttcgcaagcaaaaaattatcaaaaacaaaaaataaaagtcgcaaaaattcgcgaaaaaatagccaaccaacgaacggatattttaaacaaaattacaacggaattggtttcaagttacgatgttatttgtattgaaaaagcccatcacagtaatgagcggccgccaaaacatgatcgttctgaactggcttggtctttatttttagctaaattgttgtataaagcacaatggtatggcaaagaactcatttgtattgagtcagaggagatcgaaacagagttgtctttttctgaaagtacagaaaattcagagtatcttagaagccaaaaaatcttagaacgtggcttgtctaaacgagaaaccttataaatagaagaactgtagggactacagggatcgcctaggggatagaaaatgtacaccatgtgttgaaccatttatttctaggaagtcacattgggacagtccac

SEQ ID NO: 932 - RNA, 1172 nt, synthetic construct
  source 1..1172: mol_type = other RNA
atgaaggctctgaaagcttataaatacagactttatccaacctcaaaacaagaagagtttattcaaaaaacattttcttgtgttcgcttggtgtataatttaatgttacaagaccggattgatatctacaaagagatgcgaaaaaatcctcaacaaacgtttaaaatgccaacgccagctaaatataagaaacaataccctgtcctcagagaagttgatagtttagccttggcaaatgcacaagtttatttggatcgagcctttaaaaatttttatcgggaaaaagggatgggctttccaaaaaagaaaaagaaagaaacggtgcattcctacactacgaacaatcaacatggcacggtcaaaattttggataatcgttatttgaaagtacctaaattgaaatctttaattaaaatgaaggtacaccgccaaccgctgggggagataaaatctgtaactatttctatgagtgcgagtcacaattattatgtttccattttgtgtgaagcgccgattgaaacgaaaacaaagcaacaaaaaatggtgggaatttgtagcagtagggaaaaatttgcgctgctttcgaatggtgaaagcttcgaaaaaagctattgttcaaagcatttaaagcaaaaactacgtcaagaagaacgaaaattaaacaagcgtaaaatgattgctttagaaaaaggtgtcgatctttcgcaagcaaaaaattatcaaaaacaaaaaataaaagtcgcaaaaattcgcgaaaaaatagccaaccaacgaacggatattttaaacaaaattacaacggaattggtttcaagttacgatgttatttgtattgaaaaagcccatcacagtaatgagcggccgccaaaacatgatcgttctgaactggcttggtctttatttttagctaaactgttgtataaagcacaatggtatggcaaagaactcatttgtattgagtcagaggagatcgaaacagagttgtctttttctgaaagtacagaaaattcagagtatcttagaagccaaaaaatcttagaacgtggcttgtctaaacgagaaaccttataaatagaagaactgtagggactacagggatcgcctaggggatagaaaatgtacaccatgtgttgaaccatttgtttctaggaagtcacattgggacagtccac

SEQ ID NO: 933 - RNA, 1172 nt, synthetic construct
  source 1..1172: mol_type = other RNA
ttgaaggctctgaaagcttataaatacagactttatccaacctcaaaacaagaagagtttattcaaaaaacattttcttgtgttcgcttggtgtataatttaatgttacaagaccggattgatatctacaaagagatgcgaaaaaatcctcaacaaacgtttaaaatgccaacgccagctaaatataagaaacaataccctgtcctcagagaagttgatagtttagccttggcaaatgcacaagtttatttggatcgagcctttaaaaatttttatcgggaaaaagggatgggctttccaaaaaagaaaaagaaagaaacggtgcattcctacactacgaacaatcaacatggcacggtcaaaattttggataatcgttatttgaaagtacctaaattgaaatctttaattaaaatgaaggtacaccgccaaccgctgggggagataaaatctgtaactatttctatgagtgcgagtcacaattattatgtttccattttgtgtgaagcgccgattgaaacgaaaacaaagcaacaaaaaatggtgggaatttgtagcagtagggaaaaatttgcgctgctttcgaatggtgaaagcttcgaaaaaagctattgttcaaagcatttaaagcaaaaactacgtcaagaagaacgaaaattaaacaagcgtaaaatgattgctttggaaaaaggtgtcgatctttcgcaagcaaaaaattatcaaaaacaaaaaataaaagtcgcaaaaattcgcgaaaaaatagccaaccaacgaacggatattttaaacaaaattacaacggaattggtttcaagttacgatgttatttgtattgaaaaagcccatcacagtaatgagcggccgccaaaacatgatcgttctgaactggcttggtctttatttttagctaaattgttgtataaagcacaatggtatggcaaagaactcatttgtattgagtcagaggagatcgaaacagagttgtctttttctgaaagtacagaaaattcagagtatcttagaagccaaaaaatcttagaacgtggcttgtctaaacgagaaaccttataaatagaagaactgtagggactacagggatcgcctaggggatagaaaatgtacaccatgtgttgaaccatttatttctaggaagtcacattgggacagtccac

SEQ ID NO: 934 - RNA, 1172 nt, synthetic construct
  source 1..1172: mol_type = other RNA
atgaaggctctgaaagcttataaatacagactttatccaacctcaaaacaagaagagtttattcaaaaaacattttcttgtgttcgcttggtgtataatttaatgttacaagaccggattgatatctacaaagagatgcgaaaaaatcctcaacaaacgtttaaaatgccaacgccagctaaatataagaaacaataccctgtcctcagagaagttgatagtttagccttggcaaatgcacaagtttatttggatcgagcctttaaaaatttttatcgggaaaaagggatgggctttccaaaaaagaaaaagaaagaaacggtgcattcctacactacgaacaatcaacatggcacggtcaaaattttggataatcgttatttgaaagtacctaaattgaaatctttaattaaaatgaaggtacaccgccaaccgctgggggagataaaatctgtaactatttctatgagtgcgagtcacaattattatgtttccattttgtgtgaagcgccgattgaaacgaaaacaaagcaacaaaaaatggtgggaatttgtagcagtagggaaaaatttgcgctgctttcgaatggtgaaagcttcgaaaaaagctattgttcaaagcatttaaaacaaaaactacgtcaagaagaacgaaaattaaacaagcgtaaaatgattgctttggaaaaaggtgtcgatctttcgcaagcaaaaaattatcaaaaacaaaaaataaaagtcgcaaaaattcgcgaaaaaatagccaaccaacgaacggatattttaaacaaaattacaacggaattggtttcaagttacgatgttatttgtattgaaaaagcccatcacagtaatgagcggccgccaaaacatgatcgttctgaactggcttggtctttatttttagctaaattgttgtataaagcacaatggtatggcaaagaactcatttgtattgagtcagaggagatcgaaacagagttgtctttttctgaaagtacagaaaattcagagtatcttagaagccaaaaaatcttagaacgtggcttgtctaaacgagaaaccttataaatagaagaactgtagggactacagggatcgcctaggggatagaaaatgtacaccatgtgttgaaccatttatttctaggaagtcacattgggacagtccac

SEQ ID NO: 935 - RNA, 1172 nt, synthetic construct
  source 1..1172: mol_type = other RNA
atgaaggctctgaaagcttataaatacagactttatccaacctcaaaacaagaagagtttattcaaaaaacattttcttgtgttcgcttggtgtataatttaatgttacaagaccggattgatatctacaaagagatgcgaaaaaatcctcaacaaacgtttaaaatgccaacgccagctaaatataagaaacaataccctgtcctcagagaagttgatagtttagccttggcaaatgcacaagtttatttggatcgagcctttaaaaatttttatcgggaaaaagggatgggctttccaaaaaagaaaaagaaagaaacggtgcattcctacactacgaacaatcaacatggcacggtcaaaattttggataatcgttatttgaaagtacctaaattgaaatctttaattaaaatgaaggtacaccgccaaccgctgggggagataaaatctgtaactatttctatgagtgcgagtcacaattattatgtttccattttgtgtgaagcgccgattgaaacgaaaacaaagcaacaaaaaatggtgggaatttgtagcagtagggaaaaatttgcgctgctttcgaatggtgaaagcttcgaaaaaagctattgttcaaagcatttaaagcaaaaactacgtcaagaagaacgaaaattaaacaagcgtaaaatgattgctttggaaaaaggtgtcgatctttcacaagcaaaaaattatcaaaaacaaaaaataaaagtcgcaaaaattcgcgaaaaaatagccaaccaacgaacggatattttaaacaaaattacaacggaattggtttcaagttacgatgttatttgtattgaaaaagcccatcacagtaatgagcggccgccaaaacatgatcgttctgaactggcttggtctttatttttagctaaattgttgtataaagcacaatggtatggcaaagaactcatttgtattgagtcagaggagatcgaaacagagttgtctttttctgaaagtacagaaaattcagagtatcttagaagccaaaaaatcttagaacgtggcttgtctaaacgagaaaccttataaatagaagaactgtagggactacagggatcgcctaggggatagaaaatgtacaccatgtgttgaaccatttatttctaggaagtcacattgggacagtccac

SEQ ID NO: 936 - RNA, 1172 nt, synthetic construct
  source 1..1172: mol_type = other RNA
atgaaggctctgaaagcttataaatacagactttatccaacctcaaaacaagaagagtttattcaaaaaacattttcttgtgttcgcttggtgtataatttaatgttacaagaccggattgatatctacaaagagatgcgaaaaaatcctcaacaaacgtttaaaatgccaacgccagctaaatataagaaacaataccctgtcctcagagaagttgatagtttagccttggcaaatgcacaagtttatttggatcgagcctttaaaaatttttatcgggaaaaagggatgggctttccaaaaaagaaaaagaaagaaacggtgcattcctacactacgaacaatcaacatggcacggttaaaattttggataatcgttatttgaaggtacctaaattgaaatctttaattaaaatgaaggtacaccgccaaccgctgggggagataaaatctgtaactatttctatgagtgcgagtcacaattattatgtttccattttatgtgaagcgccgattgaaacgaaaacaaagcaacaaaaaatggtgggaatttgtagcagtagggaaaaatttgcgctgctttcgaatggtgaaagcttcgaaaaaagctattgttcaaagcatttaaagcaaaaactacgtcaagaagaacgaaaattaaacaagcgtaaaatgattgctttagaaaaaggtgtcgatctttcgcaagcaaaaaattatcaaaaacaaaaaataaaagtcgcaaaaattcgcgaaaaaatagccaaccaacgaacggatattttaaacaaaattacaacggaattggtttcaagttacgatgttatttgtattgaaaaagcccatcacagtaatgaacggccgccaaaacatgatcgttctgaactggcttggtctttatttttagctaaactgttgtataaagcacaatggtatggcaaagaactcatttgtattgagtcagaggagatagaaacagagttgtctttttctgaaagtacagaaaattcagagtatcttagaagccaaaaaatcttagaacgtggcttgtctaaacgagaaaccttataaatagaagaactgtagggactacagggatcgcctaggggatagaaaatgtacaccatgtgttgaaccatttgtttctaggaagtcacattgggacagtccac

SEQ ID NO: 937 - RNA, 1172 nt, synthetic construct
  source 1..1172: mol_type = other RNA
atgaaggctctgaaagcttataaatacagactttatccaacctcaaaacaagaagagtttattcaaaaaacattttcttgtgttcgtttggtgtataatttaatgttacaagaccggattgatatctacaaagagatgcgaaaaaatcctcaacaaacgtttaaaatgccaacgccagctaaatataagaaacaataccctgtcctcagagaagttgatagtttagctttggcaaatgcacaagtttatttggatcgagcctttaaaaatttttatcgggaaaaagggatgggctttccaaaaaagaaaaagaaagaaacggtgcattcctacactacgaacaatcaacatggcacggtcaaaattttggataatcgttatttgaaagtacctaaattgaaatctttaattaaaatgaaggtacaccgccaaccgctgggggagataaaatctgtaactatttctatgagtgcgagtcacaattattatgtttccattttgtgtgaagcgccgattgaaacgaaaacaaagcaacaaaaaatggtgggaatttgtagcagtagggaaaaatttgcgctgctttcgaatggtgaaagcttcgaaaaaagctattgttcaaagcatttaaagcaaaaactacgtcaagaagaacgaaaattaaacaagcgtaaaatgattgctttggaaaaaggcgtcgatctttcacaagcaaaaaattatcaaaaacaaaaaataaaagtcgcaaaaattcgcgaaaaaatagccaaccaacgaacggatattttaaacaaaattacaacggaattggtttcaagttacgatgttatttgtattgaaaaagcccatcacagtaatgagcggccgccaaaacatgatcgttctgaactggcttggtctttatttttagctaaactgttgtataaagcacaatggtatggcaaagaactcatttgtattgagtcagaggagatagaaacagagttgtctttttctgaaagtacagaaaattcagagtatcttagaagccaaaaaatcttagaacgtggcttgtctaaacgagaaaccttataaatagaagaactgtagggactacagggatcgcctaggggatagaaaatgtacaccatgtgttgaaccatttgtttctaggaagtcacattgggacagtccac

SEQ ID NO: 938 - RNA, 1172 nt, synthetic construct
  source 1..1172: mol_type = other RNA
atgaaggctctgaaagcttataaatacagactttatccaacctcaaaacaagaagagtttattcaaaaaacattttcttgtgttcgcttggtgtataatttaatgttacaagaccggattgatatctacaaagagatgcgaaaaaatcctcaacaaacgtttaaaatgccaacgccagctaaatataagaaacaataccctgtcctcagagaagttgatagtttagccttggcaaatgcacaagtttatttggatcgagcctttaaaaatttttatcgggaaaaagggatgggctttccaaaaaagaaaaagaaagaaacggtgcattcctacactacgaacaatcaacatggcacggtcaaaatcttggataatcgttatttgaaagtacctaaattgaaatctttaattaaaatgaaggtacatcgccaaccgctgggggagataaaatctgtaactatttctatgagtgcgagtcacaattattatgtttccattttgtgtgaagcgccgattgaaacgaaaacaaagcaacaaaaaatggtgggaatttgtagcagtagggaaaaatttgcgctgctttcgaatggtgaaagcttcgaaaaaagctattgttcaaagcatttaaagcaaaaactacgtcaagaagaacgaaaattaaacaagcgtaaaatgattgctttagaaaaaggtgtcgatctttcgcaagcaaaaaattatcaaaaacaaaaaataaaagtcgcaaaaattcgcgaaaaaatagccaaccaacgaacggatattttaaacaaaattacaacggaattggtttcaagttacgatgttatttgtattgaaaaagcccatcacagtaatgaacggccgccaaaacatgatcgttctgaactggcttggtctttatttttagctaaactgttgtataaagcacaatggtatggcaaagaactcatttgtattgagtcagaggagatagaaacagagttgtctttttctgaaagtacagaaaattcagagtatcttagaagccaaaaaatcttagaacgtggcttgtctaaacgagaaaccttataaatagaagaactgtagggactacagggatcgcctaggggatagaaaatgtacaccatgtgttgaaccatttgtttctaggaagtcacattgggacagtccac

SEQ ID NO: 939 - RNA, 1111 nt, synthetic construct
  source 1..1111: mol_type = other RNA
atgctaaaagcttttaaattccgtatgtatccgacagaagaacaaaaacagcaattgattcgtacttttggatgtgctcgatttacctataaccatttgctgaaaaagcggcagaaaagttggcaacaaacaggagtagccaatttttcgctcacacccgctacattaaaaaaagaatacccattcttaaaagaagtagacagtcttgctttagcaaatgcacagcttaatttggatcgggcttttcgcaattatttcaagggacgtgccagcttcccaaagcttaaaacgaaaaaaagtatgtggcaatcttatacgaccaacaaccaaacccgtacgatctatctggaaaatggctacttaaagttaccaaaacaaaaagaactaatcaagataaatcagcatcggccagttgaaggatcgattcgctccgctacgatttctgctcgatataatgaagaattttatgtcgcactactttgtgatgtttcgccagtaaaaaaagaatctttagctaaatggatcgggatcgcctatcatccgaagacattgatccaaacatctcgacctctagaagtaactttaccaaaatttcaccagacagaagaaaagctgcaacatgcacagcggaaattgaatgtgaaagtccgctccgctcaccatagaaagatcaggttagatcaggcaagcaattatcagaaacaaaagagaaaagtaatggatctttatctgaaacaaaagaaccagcgagaagattatcttgaacaattatctgggaaattggtcaaacaatatgactacttatttgtagaatcttttccaaaagaagaggcacatgctgatttttctattcacgactggcataaattaataacaaaattgcgttataagtcccaatggtataataaaaaatttcttttgatcaataccgacggagcagaagaaagcaattccgtaagaaagagccaagtagtagaaaaaatgggcagacattcggttatcaagggataaaaaatgaatgaaactgataggagcgttagggttagccttgttaataaaaagtcttaatgacttttgtttctaggaatttttcttttgaagaaaagctcac

SEQ ID NO: 940 - RNA, 1111 nt, synthetic construct
  source 1..1111: mol_type = other RNA
atgctaaaagcttttaaattccgtatgtatccgacagaagaacaaaaacagcaattgattcgtacttttggatgtgctcgatttacctataaccatttgctgaaaaagcggcagaaaagttggcaacaaacaggagtagccaatttttcgctcacacccgctacattaaaaaaagaatacccattcttaaaagaagtagacagtcttgctttagcaaatgcacagcttaatttggatcgggcttttcgcaattatttcaagggacgtgccagcttcccaaaacttaaaacgaaaaaaagtatgtggcaatcttatacgaccaacaaccaaacccgtacgatctatctggaaaatggctacttaaagttaccaaaacaaaaagaactaatcaagataaatcagcatcggccagttgaaggatcgattcgctccgctacgatttctgctcgatataatgaagaattttatgtcgcactactttgtgatgtttcgccagtaaaaaaagaatctttagctaaatggatcgggatcgcctatcatccgaagacattgatccaaacatctcgacctctagaagtaactttaccaaaatttcaccagacagaagaaaagctgcaacatgcacagcggaaattgaatgtgaaagtccgctccgctcaccatagaaagatcaggttagatcaggcaagcaattatcagaaacaaaagagaaaagtaatggatctttatctgaaacaaaagaaccagcgagaagattatcttgaacaattatctgggaaattggtcaaacaatatgactacttatttgtagaatcttttccaaaagaagaggcacatgctgatttttctattcacgactggcataaattaataacaaaattgcgttataagtcccaatggtataataaaaaatttcttttgatcaataccgacggagcagaagaaagcaattccgtaagaaagagccaagtagtagaaaaaatgggcagacattcggttatcaagggataaaaaatgaatgaaactgataggagcgttagggttagccttgttaataaaaagtcttaatgacttttgtttctaggaatttttcttttgaagaaaagctcac

SEQ ID NO: 941 - RNA, 1111 nt, synthetic construct
  source 1..1111: mol_type = other RNA
atgctaaaagcttttaaattccgtatgtatccgacagaagaacaaaaacagcaattgattcgtacttttggatgtgctcgatttacctataaccatttgctgaaaaagcggcagaaaagttggcaacaaacaggagtagccaatttttcgctcacacccgctacattaaaaaaagaatacccattcttaaaagaagtagacagtcttgctttagcaaatgcacagcttaatttggatcgggcttttcgcaattatttcaagggacgtgccagcttcccaaagcttaaaacgaaaaaaagtatgtggcaatcttatacgaccaacaaccaaacccgtacgatctatctggaaaatggctacttaaagttaccaaaacaaaaagaactaatcaagataaatcagcatcggccagttgaaggatcgattcgctccgctacgatttctgctcgatataatgaagaattttatgtcgcactactttgtgatgtttcgccagtaaaaaaagaatctttagctaaatggatcgggatcgcctatcatccgaagacattgatccaaacatctcgacctctagaagtaactttaccaaaatttcaccagacagaagaaaagctgcaacatgcacagcggaaattgaatgtgaaagtccgctccgctcaccatagaaagatcaggttagatcaggcaagcaattatcagaaacaaaagagaaaagtaatggatctttatctgaaacaaaagaaccagcgagaagactatcttgaacaattatctgggaaattggtcaaacaatatgactacttatttgtagaatcttttccaaaagaagaggcacatgctgatttttctattcacgactggcataaattaataacaaaattgcgttataagtcccaatggtataataaaaaatttcttttgatcaataccgacggagcagaagaaagcaattccgtaagaaagagccaagtagtagaaaaaatgggcagacattcggttatcaagggataaaaaatgaatgaaactgataggagcgttagggttagccttgttaataaaaagtcttaatgacttttgtttctaggaatttttcttttgaagaaaagctcac

SEQ ID NO: 942 - RNA, 1111 nt, synthetic construct
  source 1..1111: mol_type = other RNA
atgctaaaagcttttaaattccgtatgtatccgacagaagaacaaaaacagcaattgattcgtacttttggatgtgctcgatttacctataaccatttgctgaaaaagcggcagaaaagttggcaacaaacaggagtagccaatttttcgctcacacccgctacattaaaaaaagaatacccattcttaaaagaagtagacagtcttgctttagcaaatgcacagcttaatttggatcgggcttttcgcaattatttcaagggacgtgccagcttcccaaagcttaaaacgaaaaaaagtatgtggcaatcttatacgaccaacaaccaaacccgtacgatctatctggaaaatggttacttaaagttaccaaaacaaaaagaactaatcaagataaatcagcatcggccagttgaaggatcgattcgctccgctacgatttctgctcgatataatgaagaattttatgtcgcactactttgtgatgtttcgccagtaaaaaaagaatctttagctaaatggatcgggatcgcctatcatccgaagacattgatccaaacatctcgacctctagaagtaactttaccaaaatttcaccagacagaagaaaagctgcaacatgcacagcggaaattgaatgtgaaagtccgctccgctcaccatagaaagatcaggttagatcaggcaagcaattatcagaaacaaaagagaaaagtaatggatctttatctgaaacaaaagaaccagcgagaagattatcttgaacaattatctgggaaattggtcaaacaatatgactacttatttgtagaatcttttccaaaagaagaggcacatgctgatttttctattcacgactggcataaattaataacaaaattgcgttataagtcccaatggtataataaaaaatttcttttgatcaataccgacggagcagaagaaagcaattccgtaagaaagagccaagtagtagaaaaaatgggcagacattcggttatcaagggataaaaaatgaatgaaactgataggagcgttagggttagccttgttaataaaaagtcttaatgacttttgtttctaggaatttttcttttgaagaaaagctcac

SEQ ID NO: 943 - RNA, 1111 nt, synthetic construct
  source 1..1111: mol_type = other RNA
atgctaaaagcttttaaattccgtatgtatccgacagaagaacaaaaacagcaattgattcgtacttttggatgtgctcgatttacctataaccatttgctgaaaaagcggcagaaaagttggcaacaaacaggagtagccaatttttcgctcacacccgctacattaaaaaaagaatacccattcttaaaagaagtagacagtcttgctttagcaaatgcacagcttaatttggatcgggcttttcgcaattatttcaagggacgtgccagcttcccaaagcttaaaacgaaaaaaagtatgtggcaatcttatacgaccaacaaccaaacccgtacgatctatctggaaaatggctacttaaagttaccaaaacaaaaagaactaatcaagataaatcagcatcggccagttgaaggatcgattcgctccgctacgatttctgctcgatataatgaagaattttatgtcgcactactttgtgatgtttcgccagtaaaaaaagaatctttagctaaatggatcgggatcgcctatcatccgaagacattgatccaaacatctcgccctctagaagtaactttaccaaaatttcaccagacagaagaaaagctgcaacatgcacagcggaaattgaatgtgaaagtccgctccgctcaccatagaaagatcaggttagatcaggcaagcaattatcagaaacaaaagagaaaagtaatggatctttatctgaaacaaaagaaccagcgagaagattatcttgaacaattatctgggaaattggtcaaacaatatgactacttatttgtagaatcttttccaaaagaagaggcacatgctgatttttctattcacgactggcataaattaataacaaaattgcgttataagtcccaatggtataataaaaaatttcttttgatcaataccgacggagcagaagaaagcaattccgtaagaaagagccaagtagtagaaaaaatgggcagacattcggttatcaagggataaaaaatgaatgaaactgataggagcgttagggttagccttgttaataaaaagtcttaatgacttttgtttctaggaatttttcttttgaagaaaagctcac

SEQ ID NO: 944 - RNA, 1111 nt, synthetic construct
  source 1..1111: mol_type = other RNA
atgctaaaagcttttaaattccgtatgtatccgacagaagaacaaaaacagcaattgattcgtacttttggatgtgctcgatttacctataaccatttgctgaaaaagcggcagaaaagttggcaacaaacaggagtagccaatttttcgctcacacccgctacattaaaaaaagaatacccattcttaaaagaagtagacagtcttgctttagcaaatgcacagcttaatttggatcgggcttttcgcaattatttcaagggacgtgccagcttcccaaagcttaaaacgaaaaaaagtatgtggcaatcttatacgaccaacaaccaaacccgtacgatctatctggaaaatggctacttaaagttaccaaaacaaaaagaactaatcaagataaatcagcatcggccagttgaaggatcgattcgctccgctacgatttctgctcgatataatgaagaattttatgtcgcactactttgtgatgtttcgccagtaaaaaaagaatctttagctaaatggatcgggatcgcctatcatccgaagacattgatccaaacatctcgacctctagaagtaactttaccaaaatttcaccagacagaagaaaagctgcaacatgcacagcggaaattgaatgtgaaagtccgctccgctcaccatagaaagatcaggttagatcaggcaagcaattatcagaaacaaaagagaaaagtaatggatctttatctgaaacaaaagaaccagcgagaagattatcttgaacaattatctgggaaattggtcaaacaatatgactacttatttgtagaatcttttccaaaagaagaggcacatgctgatttttctattcatgactggcataaattaataacaaaattgcgttataagtcccaatggtataataaaaaatttcttttgatcaataccgacggagcagaagaaagcaattccgtaagaaagagccaagtagtagaaaaaatgggcagacattcggttatcaagggataaaaaatgaatgaaactgataggagcgttagggttagccttgttaataaaaagtcttaatgacttttgtttctaggaatttttcttttgaagaaaagctcac

SEQ ID NO: 945 - RNA, 1117 nt, synthetic construct
  source 1..1117: mol_type = other RNA
acatagatgctaaaagcttttaaattccgtatgtatccgacagaagaacaaaaacagcaattgattcgtacttttggatgtgctcgatttacctataaccatttgctgaaaaagcggcagaaaagttggcaacaaacaggagtagccaatttttcgctcacacccgctacattaaaaaaagaatacccattcttaaaagaagtagacagtcttgctttagcaaatgcacagcttaatttggatcgggcttttcgcaattatttcaagggacgtgccagcttcccaaagcttaaaacgaaaaaaagtatgtggcaatcttatacgaccaacaaccaaacccgtacgatctatctggaaaatggctacttaaagttaccaaaacaaaaagaactaatcaagataaatcagcatcggccagttgaaggatcgattcgctccgctacgatttctgctcgatataatgaagaattttatgtcgcactactttgtgatgtttcgccagtaaaaaaagaatctttagctaaatggatcgggatcgcctatcatccgaagacattgatccaaacatctcgacctctagaagtaactttaccaaaatttcaccagacagaagaaaagctgcaacatgcacagcggaaattgaatgtgaaagtccgctccgctcaccatagaaagatcaggttagatcaggcaagcaattatcagaaacaaaagagaaaagtaatggatctttatctgaaacaaaagaaccagcgagaagattatcttgaacaattatctgggaaattggtcaaacaatatgactacttatttgtagaatcttttccaaaagaagaggcacatgctgatttttctattcacgactggcataaattaataacaaaattgcgttataagtcccaatggtataataaaaaatttcttttgatcaataccgacggagcagaagaaagcaattccgtaagaaagagccaagtagtagaaaaaatgggcagacattcggttatcaagggataaaaaatgaatgaaactgataggagcgttagggttagccttgttaataaaaagtcttaatgacttttgtttctaggaatttttcttttgaagaaaagtaagc

SEQ ID NO: 946 - RNA, 1133 nt, synthetic construct
  source 1..1133: mol_type = other RNA
acatagatgctaaaagcttttaaattccgtatgtatccgacagaagaacaaaaacagcaattgattcgtacttttggatgtgctcgatttacctataaccatttgctgaaaaagcggcagaaaagttggcaacaaacaggagtagccaatttttcgctcacacccgctacattaaaaaaagaatacccattcttaaaagaagtagacagtcttgctttagcaaatgcacagcttaatttggatcgggcttttcgcaattatttcaagggacgtgccagcttcccaaagcttaaaacgaaaaaaagtatgtggcaatcttatacgaccaacaaccaaacccgtacgatctatctggaaaatggctacttaaagttaccaaaacaaaaagaactaatcaagataaatcagcatcggccagttgaaggatcgattcgctccgctacgatttctgctcgatataatgaagaattttatgtcgcactactttgtgatgtttcgccagtaaaaaaagaatctttagctaaatggatcgggatcgcctatcatccgaagacattgatccaaacatctcgacctctagaagtaactttaccaaaatttcaccagacagaagaaaagctgcaacatgcacagcggaaattgaatgtgaaagtccgctccgctcaccatagaaagatcaggttagatcaggcaagcaattatcagaaacaaaagagaaaagtaatggatctttatctgaaacaaaagaaccagcgagaagattatcttgaacaattatctgggaaattggtcaaacaatatgactacttatttgtagaatcttttccaaaagaagaggcacatgctgatttttctattcacgactggcataaattaataacaaaattgcgttataagtcccaatggtataataaaaaatttcttttgatcaataccgacggagcagaagaaagcaattccgtaagaaagagccaagtagtagaaaaaatgggcagacattcggttatcaagggataaaaaatgaatgaaactgataggagcgttagggttagccttgttaataaaaagtcttaatgacttttgtttctaggaatttttctggctctttgtcaataaggactgatgagttgtgc

SEQ ID NO: 947 - RNA, 1111 nt, synthetic construct
  source 1..1111: mol_type = other RNA
atgctaaaagcttttaaattccgtatgtatccgacagaagaacaaaaacagcaattgattcgtacttttggatgtgctcgatttacctataaccatttgctgaaaaagcggcagaaaagttggcaacaaacaggagtagccaatttttcgctcacacccgctacattaaaaaaagaatacccattcttaaaagaagtagacagtcttgctttagcaaatgcacagcttaatttggatcgggcttttcgcaattatttcaagggacgtgccagcttcccaaagcttaaaacgaaaaaaagtatgtggcaatcttatacgaccaacaaccaaactcgtacgatctatctggaaaatggctacttaaagttaccaaaacaaaaagaactaatcaagataaatcagcatcggccagttgaaggatcgattcgctccgctacgatttctgctcgatataatgaagaattttatgtcgcactactttgtgatgtttcgccagtaaaaaaagaatctttagctaaatggatcgggatcgcctatcatccgaagacattgatccaaacatctcgacctctagaagtaactttaccaaaatttcaccagacagaagaaaagctgcaacatgcacagcggaaattgaatgtgaaagtccgctccgctcaccatagaaagatcaggttagatcaggcaagcaattatcagaaacaaaagagaaaagtaatggatctttatctgaaacaaaagaaccagcgagaagattatcttgaacaattatctgggaaattggtcaaacaatatgactacttatttgtagaatcttttccaaaagaagaggcacatgctgatttttctattcacgactggcataaattaataacaaaattgcgttataagtcccaatggtataataaaaaatttcttttgatcaataccgacggagcagaagaaagcaattccgtaagaaagagccaagtagtagaaaaaatgggcagacattcggttatcaagggataaaaaatgaatgaaactgataggagcgttagggttagccttgttaataaaaagtcttaatgacttttgtttctaggaatttttcttttgaagaaaagctcac

SEQ ID NO: 948 - RNA, 1111 nt, synthetic construct
  source 1..1111: mol_type = other RNA
atgctaaaagcttttaaattccgtatgtatccgacagaagaacaaaaacagcaattgattcgtacttttggatgtgctcgatttacctataaccatttgctgaaaaagcggcagaaaagttggcaacaaacaggagtagccaatttttcgctcacacccgctacattaaaaaaagaatacccattcttaaaagaagtagacagtcttgctttagcaaatgcacagcttaatttggatcgggcttttcgcaattatttcaagggacgtgccagcttcccaaagcttaaaacgaaaaaaagtatgtggcaatcttatacgaccaacaaccaaacccgtacgatctatctggaaaatggctacttaaagttaccaaaacaaaaagaactaatcaagataaatcagcatcggccagttgaaggatcgattcgctccgctacgatttctgctcgatataatgaagaattttatgtcgcactactttgtgatgtttcgccagtaaaaaaagaatctttagctaaatggatcgggatcgcctatcatccgaagacattgatccaaacatctcgacctctagaagtaactttaccaaaatttcaccagacagaagaaaagctgcaacatgcacagcggaaattaaatgtgaaagtccgctccgctcaccatagaaagatcaggttagatcaggcaagcaattatcagaaacaaaagagaaaagtaatggatctttatctgaaacaaaagaaccagcgagaagattatcttgaacaattatctgggaaattggtcaaacaatatgactacttatttgtagaatcttttccaaaagaagaggcacatgctgatttttctattcacgactggcataaattaataacaaaattgcgttataagtcccaatggtataataaaaaatttcttttgatcaataccgacggagcagaagaaagcaattccgtaagaaagagccaagtagtagaaaaaatgggcagacattcggttatcaagggataaaaaatgaatgaaactgataggagcgttagggttagccttgttaataaaaagtcttaatgacttttgtttctaggaatttttcttttgaagaaaagctcac

SEQ ID NO: 949 - RNA, 1111 nt, synthetic construct; identical to SEQ ID NO: 939
  source 1..1111: mol_type = other RNA

SEQ ID NO: 950 - RNA, 1172 nt, synthetic construct
  source 1..1172: mol_type = other RNA
atgaaggctctgaaagcttataaatacagactttatccaacctcaaaacaagaagagtttattcaaaaaacattttcttgtgttcgcttggtgtataatttaatgttacaagaccggattgatatctacaaagagatgcgaaaaaatcctcaacaaacgtttaaaatgccaacgccagctcaatataagaaacaataccctgtcctcagagaagttgatagtttagccttggcaaatgcacaagtttatttggatcgagcctttaaaaatttttatcgggaaaaagggatgggctttccaaaaaagaaaaagaaagaaacggtgcattcctacactacgaacaatcaacatggcacggtcaaaattttggataatcgttatttgaaagtacctaaattgaaatctttaattaaaatgaaggtacaccgccaaccactgggggagataaaatctgtaactatttctatgagtgcgagtcacaattattatgtttccattttgtgtgaagcgccggttgaaacaaaaacaaagcaacaaaaaatggtgggaatttgtagcagtagggaaaaatttgcgctgctttcgaatggtgaaagcttcgaaaaaagctattgttcaaagcatttaaagcaaaaactacgtcaagaagaacgaaaattaaacaagcgtaagatgattgctttagaaaaaggtgtcgatctttcacaagcaaaaaattatcaaaaacaaaaaataaaagtcgcaaaaattcgcgaaaaaatagccaaccaacgaacggatattttaaacaaaattacaacggaattggtttcaagttacgatgttatttgtattgaaaaagcccatcacagtaatgagcggccgccaaaacatgatcgttctgaactggcttggtctttatttttagctaaactgttgtataaagcacaatggtatggcaaagaactcatttgtattgagtcagaggagatcgaaacagagttgtctttttctgaaagtacagaaaattcagagtatcttagaagccaaaaaatcttagaacgtggcttgtctaaacgagaaaccttataaatagaagaactgtagggactacagggatcgcctaggggatagaaaatgtacaccatgtgttgaaccatttgtttctaggaagtcacattgagacagtccac

SEQ ID NO: 951 - RNA, 1072 nt, synthetic construct
  source 1..1072: mol_type = other RNA
ctgagtgttttaaaagcatacaaatttcggatctatcctacagaggaacaaaagcagttctttatccaaacgtttggttgcgtacgcttcacctataatcaattgctaaaagcaaagatggaagaacttactacaaatgcagaaaaagaaaaactaacacctgcaaaattaaaaaaagagtatccttttttaaaagagaccgacagtttggcactggccaacgcccagcgcaatttggaacgggcttttcgcaactattttcaaaagcgagcaggctttcctaaactgaagacgaaaaagaatatttggcaatcgtatacgacaaacaatcaacaacatacgatctacttggtcgatgatcagttgaaattgcctaaattgaaatcattcgttgcagtcaagcgtcatcggccaatcaatggtcagattaaatcggcgacgatttctgcaagaaacaatactgaattttatatttcgattctttgcatcgaagaaattcagcccttgccgaagaaccaacgaaagattgccttggtttatcatccagaagtgttggtagaggccaatgcacagttaccctttatcagtaccaatgccatcaaatctcaacaaaggctggcccgtgcagaacgaaaactaaatgtgaaagcaaaagctgtcaaacgaaaaaaaatggtgcttagtcatgctcgtaattatcaaaaacaaaaaggaaaagtttctcagctatatcgagcgcatcgtgatcaaaaaaaagaatacatcgatcaagtaacctttcatctggtcaaacaatacgatacgatttttttggaacggctgatcgatgagacttgtagatctacagggaatttttcagtcagcgactggcatcagtttattcgtaaaatcacgtacaaagcagagtggtacggcaaagaagtccgatttatttctttgtcggccaaagagtgtcaaaaaatgacgcaaatgttgcgtgtaatcgaaagtgaaacgaactgggaggagcgccagggatcgcctaggggatagaaaaaatctttggatttttgtttctaggaattctgctcac

SEQ ID NO: 952 - RNA, 1072 nt, synthetic construct
  source 1..1072: mol_type = other RNA
ctgagtgttttaaaagcatacaaatttcggatctatcctacagaggaacaaaagcagttctttatccaaacgtttggttgcgtacgcttcacctataatcaattgctaaaagcaaagatggaagaacttactacaaatgcagaaaaagaaaaactaacacctgcaaaattaaaaaaagagtatccttttttaaaagagaccgacagtttggcactggccaacgcccagcgtaatttggaacgggcttttcgcaactattttcaaaagcgagcaggctttcctaaactgaagacgaaaaagaatatttggcaatcgtatacgacaaacaatcaacaacatacgatctacttggtcgatgatcagttgaaattgcctaaattgaaatcattcgttgcagtcaagcgtcatcggccaatcaatggtcagattaaatcggcgacgatttctgcaagaaacaatactgaattttatatttcgattctttgcatcgaagaaattcagcccttgccgaagaaccaacgaaagattgccttggtttatcatccagaagtgttggtagaggccaatgcacagttaccctttatcagtaccaatgccatcaaatctcaacaaaggctggcccgtgcagaacgaaaactaaatgtgaaagcaaaagctgtcaaacgaaaaaaaatggtgcttagtcatgctcgtaattatcaaaaacaaaaaggaaaagtttctcagctatatcgagcgcatcgtgatcaaaaaaaagaatacatcgatcaagtaacctttcatctggtcaaacaatacgatacgatttttttggaacggctgatcgatgagacttgtagatctacagggaatttttcagtcagcgactggcatcagtttattcgtaaaatcacgtacaaagcagagtggtacggcaaagaagtccgatttatttctttgtcggccaaagagtgtcaaaaaatgacgcaaatgttgcgtgtaatcgaaagtgaaacgaactgggaggagcgccagggatcgcctaggggatagaaaaaatctttggatttttgtttctaggaattctgctcac

SEQ ID NO: 953 - RNA, 1072 nt, synthetic construct
  source 1..1072: mol_type = other RNA
ctgagtgttttaaaagcatacaaatttcggatctatcctacagaggaacaaaagcagttctttatccaaacgtttggttgcgtacgcttcacctataatcaattgctaaaagcaaagatggaagaacttactacaaatgcagaaaaagaaaaactaacacctgcaaaattaaaaaaagagtatccttttttaaaagagaccgacagtttggcactggccaacgcccagcgcaatttggaacgagcttttcgcaactattttcaaaagcgagcaggctttcctaaactgaagacgaaaaagaatatttggcaatcgtatacgacaaacaatcaacaacatacgatctacttggtcgatgatcagttgaaattgcctaaattaaaatcattcgttgcagtcaagcgtcatcggccaatcaatggtcagattaaatcggcgacgatttctgcaagaaacaatactgaattttatatttcgattctttgcatcgaagaaattcagcccttgccgaagaaccaacgaaagattgccttggtttatcatccagaagtgttggtagaggccaatgcacagttaccctttatcagtaccaatgccatcaaatctcaacaaaggctggcccgtgcagaacgaaaactaaatgtgaaagcaaaagctgtcaaacgaaaaaaaatggtgcttagtcatgctcgtaattatcaaaaacaaaaaggaaaagtttctcagctatatcgagcgcatcgtgatcaaaaaaaagaatacatcgatcaagtaacctttcatctggtcaaacaatacgatacgatttttttggaacggctgatcgatgagacttgtagatctacagggaatttttcagtcagcgactggcatcagtttattcgtaaaatcacgtacaaagcagagtggtacggcaaagaagtccgatttatttctttgtcggccaaagagtgtcaaaaaatgacgcaaatgttgcgtgtaatcgaaagtgaaacgaactgggaggagcgccagggatcgcctaggggatagaaaaaatctttggatttttgtttctaggaattctgctcac

SEQ ID NO: 954 - RNA, 1072 nt, synthetic construct
  source 1..1072: mol_type = other RNA
ctgagtgttttaaaagcatacaaatttcggatctatcctacagaggaacaaaagcagttctttatccaaacgtttggttgcgtacgcttcacctataatcaattgctaaaagcaaagatggaagaacttactacaaatgcagaaaaagaaaaactaacacctgcaaaattaaaaaaagagtatccttttttaaaagagaccgacagtttggcactggccaacgctcagcgcaatttggaacgggcttttcgcaactattttcaaaagcgagcaggctttcctaaactgaagacgaaaaagaatatttggcaatcgtatacgacaaacaatcaacaacatacgatctacttggtcgatgatcagttgaaattgcctaaattgaaatcattcgttgcagtcaagcgtcatcggccaatcaatggtcagattaaatcggcgacgatttctgcaagaaacaatactgaattttatatttcgattctttgcatcgaagaaattcagcccttgccgaagaaccaacgaaagattgccttggtttatcatccagaagtgttggtagaggccaatgcacagttaccctttatcagtaccaatgccatcaaatctcaacaaaggctggcccgtgcagaacgaaaactaaatgtgaaagcaaaagctgtcaaacgaaaaaaaatggtgcttagtcatgctcgtaattatcaaaaacaaaaaggaaaagtttctcagctatatcgagcgcatcgtgatcaaaaaaaagaatacatcgatcaagtaacctttcatctggtcaaacaatacgatacgatttttttggaacggctgatcgatgagacttgtagatctacagggaatttttcagtcagtgactggcatcagtttattcgtaaaatcacgtacaaagcagagtggtacggcaaagaagtccgatttatttctttgtcggccaaagagtgtcaaaaaatgacgcaaatgttgcgtgtaatcgaaagtgaaacgaactgggaggagcgccagggatcgcctaggggatagaaaaaatctttggatttttgtttctaggaattctgctcac

SEQ ID NO: 955 - RNA, 1072 nt, synthetic construct
  source 1..1072: mol_type = other RNA
ctgagtgttttaaaagcatacaaatttcggatctatcctacagaggaacaaaagcagttctttatccaaacgtttggttgcgtacgcttcacctataatcaattgctaaaagcaaagatggaagaacttactacaaatgcagaaaaagaaaaactaacacctgcaaaattaaaaaaagagtatccttttttaaaagagaccgacagtttggcactggccaacgctcagcgcaatttggaacgggcttttcgcaactattttcaaaagcgagcaggctttcctaaactgaagacgaaaaagaatatttggcaatcgtatacgacaaacaatcaacaacatacgatctacttggtcgatgatcagttgaaattgcctaaattgaaatcattcgttgcagtcaagcgtcatcggccaatcaatggtcagattaaatcggcgacgatttctgcaagaaacaatactgaattttatatttcgattctttgcatcgaagaaattcagcccttgccgaagaaccaacgaaagattgccttggtttatcatccagaagtgttggtagaggccaatgcacagttaccctttatcagtaccaatgccatcaaatctcaacaaagactggcccgtgcagaacgaaaactaaatgtgaaagcaaaagctgtcaaacgaaaaaaaatggtgcttagtcatgctcgtaattatcaaaaacaaaaaggaaaagtttctcagctatatcgagcgcatcgtgatcaaaaaaaagaatacatcgatcaagtaacctttcatctggtcaaacaatacgatacgatttttttggaacggctgatcgatgagacttgtagatctacagggaatttttcagtcagcgactggcatcagtttattcgtaaaatcacgtacaaagcagagtggtacggcaaagaagtccgatttatttctttgtcggccaaagagtgtcaaaaaatgacgcaaatgttgcgtgtaatcgaaagtgaaacgaactgggaggagcgccagggatcgcctaggggatagaaaaaatctttggatttttgtttctaggaattctgctcac

SEQ ID NO: 956 - RNA, 1072 nt, synthetic construct
  source 1..1072: mol_type = other RNA
ctgagtgttttaaaagcatacaaatttcggatctatcctacagaggaacaaaagcagttctttatccaaacgtttggttgcgtacgcttcacctataatcaattgctaaaagcaaagatggaagaacttactacaaatgcagaaaaagaaaaactaacacctgcaaaattaaaaaaagagtatccttttttaaaagagaccgacagtttggcactggccaacgcccagcgcaatttggaacgggcttttcgcaactattttcaaaagcgagcaggctttcctaaactgaagacgaaaaagaatatttggcaatcgtatacgacaaacaatcaacaacatacgatctacttggtcgatgatcagttgaaattgcctaaattgaaatcattcgttgcagtcaagcgtcatcggccaatcaatggtcagattaaatcggcgacgatttctgcaagaaacaatactgaattttatatttcgattctttgcatcgaagaaattcagcccttgccgaagaaccaacgaaagattgccttggtttatcatccagaagtgttggtagaggccaatgcacagttaccctttatcagtaccaatgccatcaaatctcaacaaagactggcccgtgcagaacgaaaactaaatgtgaaagcaaaagctgtcaaacgaaaaaaaatggtgcttagtcatgctcgtaattatcaaaaacaaaaaggaaaagtttctcagctatatcgagcgcatcgtgatcaaaaaaaagaatacatcgatcaagtaacctttcatctggtcaaacaatacgatacgatttttttggaacggctgatcgatgagacttgtagatctacagggaatttttcagtcagtgactggcatcagtttattcgtaaaatcacgtacaaagcagagtggtacggcaaagaagtccgatttatttctttgtcggccaaagagtgtcaaaaaatgacgcaaatgttgcgtgtaatcgaaagtgaaacgaactgggaggagcgccagggatcgcctaggggatagaaaaaatctttggatttttgtttctaggaattctgctcac

SEQ ID NO: 957 - RNA, 1072 nt, synthetic construct
  source 1..1072: mol_type = other RNA
ctgagtgttttaaaagcatacaaatttcggatctatcctacagaggaacaaaagcagttctttatccaaacgtttggttgcgtacgcttcacctataatcaattgctaaaagcaaagatggaagaacttactacaaatgcagaaaaagaaaaactaacacctgcaaaattaaaaaaagagtatccttttttaaaagagaccgacagtttggcactggccaacgcccagcgcaatttggaacgggcttttcgcaactattttcaaaagcgagcaggctttcctaaactgaagacgaaaaagaatatttggcaatcgtatacgacaaacaatcaacaacatacgatctacttggtcgatgatcagttgaaattgcctaaattgaaatcattcgttgcagtcaagcgtcatcggccaatcaatggtcagattaaatcggcgacgatttctgcaagaaacaatactgaattttatatttcgattctttgcatcgaagaaattcagcccttgccgaagaaccaacgaaagattgccttggtttatcatccagaagtgttggtagaggccaatgcacagttaccctttatcagtaccaatgccatcaaatctcaacaaaggctggctcgtgcagaacgaaaactaaatgtgaaagcaaaagctgtcaaacgaaaaaaaatggtgcttagtcatgctcgtaattatcaaaaacaaaaaggaaaagtttctcagctatatcgagcgcatcgtgatcaaaaaaaagaatacatcgatcaagtaacctttcatctggtcaaacaatacgatacgatttttttggaacggctgatcgatgagacttgtagatctacagggaatttttcagtcagcgactggcatcagtttattcgtaaaatcacgtacaaagcagagtggtacggcaaagaagtccgatttatttctttgtcggccaaagagtgtcaaaaaatgacgcaaatgttgcgtgtaatcgaaagtgaaacgaactgggaggagcgccagggatcgcctaggggatagaaaaaatctttggatttttgtttctaggaattctgctcac

SEQ ID NO: 958 - RNA, 1111 nt, synthetic construct
  source 1..1111: mol_type = other RNA
atgctaaaagcttttaaattccgtatgtatccgacagaagaacaaaaacagcaattgattcgtacttttggatgtgctcgatttacctataaccatttgctgaaaaagcggcagaaaagttggcaacaaacaggagtagccaatttttcgctcacacccgctacattaaaaaaagaatacccattcttaaaagaagtagacagtcttgctttagcaaatgcacagcttaatttggatcgggcttttcgcaattatttcaagggacgtgccagcttcccaaagcttaaaacgaaaaaaagtatgtggcaatcttatacgaccaacaaccaaacccgtacgatctatctggaaaatggctacttaaagttaccaaaacaaaaagaactaatcaaaataaatcagcatcggccagttgaaggatcgattcgctccgctacgatttctgctcgatataatgaagaattttatgtcgcactactttgtgatgtttcgccagtaaaaaaagaatctttagctaaatggatcgggatcgcctatcatccgaagacattgatccaaacatctcgacctctagaagtaactttaccaaaatttcaccaaacagaagaaaagctgcaacatgcacagcggaaattgaatgtgaaagtccgctccgctcaccatagaaagacaaggttagatcaggcaagcaattatcagaaacaaaagagaaaagtaatggatctttatctgaaacaaaagaaccagcgagaagattatcttgaacaattatctgggaaattggtcaaacaatatgactacttatttgtagaatcttttccaaaagaagaagcacatgctgatttttctattcatgactggcataaattaataacaaaattgcgttataagtcccaatggtataataaaaaatttcttttgatcaataccgacggagcagaagaaagcaattccgtaagaaagagccaagtagtagaagaaatgggcagacattcgcttatcaagggataaaaaatgaatgaaactgataggagcgttagggttcgccttgttaataaaaagtcttaatgacttttgtttctaggaatttttcttttgaagaaaagctcac

SEQ ID NO: 959 - RNA, 1111 nt, synthetic construct
  source 1..1111: mol_type = other RNA
atgctaaaagcttttaaattccgtatgtatccgacagaagaacaaaaacagcaattgattcgtacttttggatgtgctcgatttacctataaccatttgctgaaaaagcggcagaaaagttggcaacaaacaggagtagccaatttttcgctcacacccgctacattaaaaaaagaatacccattcttaaaagaagtagacagtcttgctttagcaaatgcacagcttaatttggaccgggcttttcgcaattatttcaagggacgtgccagcttcccaaagcttaaaacgaaaaaaagtatgtggcaatcttatacgaccaacaaccaaacccgtacgatctatctggaaaatggctacttaaagttaccaaaacaaaaagaactaatcaagataaatcagcatcggccagttgaaggatcgattcgctccgctacgatttctgctcgatataatgaagaattttatgtcgcactactttgtgatgtttcgccagtaaaaaaagaatctttagctaaatggattgggatcgcctatcatccgaagacattgatccaaacatctcgacctctagaagtaactttaccaaaatttcaccagacagaagaaaagctgcaacatgcacagcggaaattgaatgtgaaagtccgctccgctcaccatagaaagaccaggttagatcaggcaagcaattatcagaaacaaaagagaaaagtaatggatctttatctgaaacaaaagaaccagcgagaagattatcttgaacaattatctgggaaattggtcaaacaatatgactacttatttgtagaatcttttccaaaagaagaagcacatgctgatttttctattcatgactggcataaattaataacaaaattgcgttataagtcccaatggtataataaaaaatttcttttgatcaataccgacggagcagaagaaagcaattccgtaagaaagagccaagtagtagaagaaatgggcagacattcgcttatcaagggataaaaaatgaatgaaactgataggagcgttagggttcgccttgttaataaaaagtcttaatgacttttgtttctaggaatttttcttttgaagaaaagctcac

SEQ ID NO: 960 - RNA, 1111 nt, synthetic construct
  source 1..1111: mol_type = other RNA
atgctaaaagcttttaaattccgtatgtatccgacagaagaacaaaaacagcaattgattcgtacttttggatgtgctcgatttacctataaccatttgctgaaaaagcggcagaaaagttggcaacaaacaggagtagccaatttttcgctcacacccgctacattaaaaaaagaatacccattcttaaaagaagtagacagtcttgctttagcaaatgcacagcttaatttggatcgggcttttcgcaattatttcaagggacgtgccagcttcccaaagcttaaaacgaaaaaaagtatgtggcaatcttatacgaccaacaaccaaacccgtacgatctatctggaaaatggctacttaaagttaccaaaacaaaaagaactaatcaagataaatcagcatcggccagttgaaggatcgattcgctccgctacgatttctgctcgatataatgaagaattttatgtcgcactactttgtgatgtttcgccagtaaaaaaagaatctttagctaaatggattgggatcgcctatcatccgaagacattgatccaaacatctcgacctctagaagtaactttaccaaaatttcaccagacagaagaaaagctgcaacatgcacagcggaaattgaatgtgaaagtccgctccgctcaccatagaaagaccaggttagatcaggcaagcaattatcagaaacaaaagagaaaagtaatggatctttatctgaaacaaaagaaccagcgagaagattatcttgaacaattatctgggaaattggtcaaacaatatgactacttatttgtagaatcttttccaaaagaagaagcacatgctgatttttctattcatgactggcataaattaataacaaaattgcgttataagtcccaatggtataataaaaaatttcttttgatcaataccgacggagcagaagaaagcaattccgtaagaaagagccaagtagtagaagaaatgggcagacattcgcttatcaagggataaaaaatgaatgaaactgataggagcgttagggttcgccttgttaataaaaagtcttaatgacttttgtttctaggaatttttcttttgaagaaaagctcac

SEQ ID NO: 961 - RNA, 1172 nt, synthetic construct
  source 1..1172: mol_type = other RNA
atgaaggctctgaaagcttataaatacagactttatccaacctcaaaacaagaagagtttattcaaaaaacattttcttgtgttcgcttggtgtataatttaatgttacaagaccggattgatatctacaaagagatgcgaagaaatcctcaacaaacgtttaaaatgccaacgccagctaaatataagaaacaataccctgtcctcagagaagttgatagtttagccttggcaaatgcacaagtttatttggatcgagcctttaaaaatttttatcgggaaaaagggatgggctttccaaaaaagaaaaagaaagaaacggtgcattcctacactacgaacaatcaacatggcacggtcaaaattttggataatcgttatttgaaagtacctaaattgaaatctttaattaaaatgaaggtacaccgccaaccgctgggggagataaaatctgtaactatttctatgagtgcgagtcacaattattatgtttccattttgtgtgaagcaccgattgaaacgaaaacaaagcaacaaaaaatggtgggaatttgtagcagtagggaaaaatttgcgctgctttcgaatggtgaaagcttcgaaaaaagctattgttcaaagcatttaaagcaaaaactacgtcaagaagaacgaaaattaaacaagcgtaaaatgattgctttagaaaaaggtgtcgatctttcacaagcaaaaaattatcaaaaacaaaaaataaaagtcgcaaaaattcgcgaaaaaatagccaaccaacgaacggatattttaaacaaaattacaacggaattggtttcaagttacgatgttatttgtattgaaaaagcccatcacagtaatgagcggccgccaaaacatgatcgttctgaactggcttggtctttatttttagctaaactgttgtataaagcacaatggtatggcaaagaactcatttgtattgagtcagaggagatcgaaacagagttgtctttttctgaaagtacagaaaattcagagtatcttagaagccaaaaaatcttagaacgtggcttgtctaaacgagaaaccttataaatagaagaactgtagggactacagggatcgcctaggggatagaaaatgtacaccatgtgttgaaccatttgtttctaggaagtcacattgggacagtccac

SEQ ID NO: 962 - RNA, 1172 nt, synthetic construct
  source 1..1172: mol_type = other RNA
atgaaggctctgaaagcttataaatacagactttatccaacctcaaaacaagaacagtttattcaaaaaacattttcttgtgttcgcttggtgtataatttaatgttacaagaccggattgatatctacaaagagatgcgaaaaaatcctcaacaaacgtttaaaatgccaacgccagctaaatataagaaacaataccctgtcctcagagaagttgatagtttagccttggcaaatgcacaagtttatttggatcgagcctttaaaaatttttatcgggaaaaagggatgggctttccaaaaaagaaaaagaaagaaacggtgcattcctacactacgaacaatcaacatggcacggtcaaaattttggataatcgttatttgaaagtacctaaattgaaatctttaattaaaatgaaggtacaccgccaaccgctgggggagataaaatctgtaactatttctatgagtgcgagtcacaattattatgtttccattttgtgtgaagcgccgattgaaacgaaaacaaagcaacaaaaaatggtgggaatttgtagcagtagggaaaaatttgcgctgctttcgaatggtgaaagcttcgaaaaaagctattgttcaaagcatttaaagcaaaaactacgtcaagaagaacgaaaattaaacaagcgtaaaatgattgctttggaaaaaggtgtcgatctttcacaagcaaaaaattatcaaaaacaaaaaataaaagtcgcaaaaattcgcgaaaaaatagccaaccaacgaacggatattttaaacaaaattacaacggaattggtttcaagttacgatgttatttgtattgaaaaagcccatcacagtaatgagcggccgccaaaacatgatcgttctgaactggcttggtctttatttttagctaaactgttgtataaagcacaatggtatggcaaagaactcatttgtattgagtcagaggagatagaaacagagttgtctttttctgaaagtacagaaaattcagagtatcttagaagccaaaaaatcttagaacgtggcttgtctaaacgagaaaccttataaatagaagaactgtagggactacagggatcgcctaggggatagaaaatgtacaccatgtgttgaaccatttgtttctaggaagtcacattgggacagtccac

SEQ ID NO: 963 - RNA, 1172 nt, synthetic construct
  source 1..1172: mol_type = other RNA
atgaaggctctgaaagcttataaatacagactttatccaacctcaaaacaagaacagtttattcaaaaaacattttcttgtgttcgcttggtgtataatttaatgttacaagaccggattgatatctacaaagagatgcgaaaaaatcctcaacaaacgtttaaaatgccaacgccagctaaatataagaaacaataccctgtcctcagagaagttgatagtttagccttggcaaatgcacaagtttatttggatcgagcctttaaaaatttttatcgggaaaaagggatgggctttccaaaaaagaaaaagaaagaaacggtgcattcctacactacgaacaatcaacatgggacggtcaaaattttggataatcgttatttgaaagtacctaaattgaaatctttaattaaaatgaaggtacaccgccaaccgctgggggagataaaatctgtaactatttctatgagtgcgagtcacaattattatgtttccattttgtgtgaagcgccgattgaaacgaaaacaaagcaacaaaaaatggtgggaatttgtagcagtagggaaaaatttgcgctgctttcgaatggtgaaagcttcgaaaaaagctattgttcaaagcatttaaagcaaaaactacgtcaagaagaacgaaaattaaacaagcgtaaaatgattgctttagaaaaaggtgtcgatctttcacaagcaaaaaattatcaaaaacaaaaaataaaagtcgcaaaaattcgcgaaaaaatagccaaccaacgaacggatattttaaacaaaattacaacggaattggtttcaagttacgatgttatttgtattgaaaaagcccatcacagtaatgagcggccgccaaaacatgatcgttctgaactggcttggtctttatttttagctaaactgttgtataaagcacaatggtatggcaaagaactcatttgtattgagtcagaggagatcgaaacagagttgtctttttctgaaagtacagaaaattcagagtatcttagaagccaaaaaatcttagaacgtggcttgtctaaacgagaaaccttataaatagaagaactgtagggactacagggatcgcctaggggatagaaaatgtacaccatgtgttgaaccatttgtttctaggaagtcacattgagacagtccac

SEQ ID NO: 964 - RNA, 1172 nt, synthetic construct
  source 1..1172: mol_type = other RNA
atgaaggctctgaaagcttataaatacagactttatccaacctcaaaacaagaagagtttattcaaaaaacattttcttgtgttcgcttggtgtataatttaatgttacaagaccggattgatatctacaaagagatgcgaaaaaatcctcaacaaacgtttaaaatgccaacgccagctaaatataagaaacaataccctgtcctcagagaagttgatagtttagctttggcaaatgcacaagtttatttggatcgagcctttaaaaatttttatcgggaaaaagggatgggctttccaaaaaagaaaaagaaagaaacggtgcattcctacactacgaacaatcaacatggcacggtcaaaattttggataatcgttatttgaaagtacctaaattgaaatctttaattaaaatgaaggtacaccgccaaccgctgggggagataaaatctgtaactatttctatgagtgcgagtcacaattattatgtttccattttgtgtgaagcgccggttgaaacgaaaacaaagcaacaaaaaatggtgggaatttgtagcagtagggaaaaatttgcgctgctttcgaatggtgaaagcttcgaaaaaagctattgttcaaagcatttaaagcaaaaactacgtcaagaagaacgaaaattaaacaagcgtaaaatgattgctttagaaaaaggtgtcgatctttcacaagcaaaaaattatcaaaaacaaaaaataaaagtcgcaaaaattcgcgaaaaaatagccaaccaacgaacggatattttaaacaaaattacaacggaattggtttcaagttacgatgttatttgtattgaaaaagcccatcacagtaatgagcggccgccaaaacatgatcgttctgaactggcttggtctttatttttagctaaactgttgtataaagcacaatggtatggcaaagaactcatttgtattgagtcagaggagatagaaacagagttgtctttttctgaaagtacagaaaattcagagtatcttagaagccaaaaaatcttagaacgtggcttgtctaaacgagaaaccttataaatagaagaactgtagggactacagggatcgcctaggggatagaaaatgtacaccatgtgttgaaccatttgtttctaggaagtcacattgggacagtccac

SEQ ID NO: 965 - RNA, 1172 nt, synthetic construct
  source 1..1172: mol_type = other RNA
atgaaggctctgaaagcttataaatacagactttatccaacctcaaaacaagaagagtttattcaaaaaacattttcttgtgttcgcttggtgtataatttaatgttacaagaccggattgatatctacaaagagatgcgaaaaaatcctcaacaaacgtttaaaatgccaacgccagctaaatataagaaacaataccctgtcctcagagaagttgatagtttagccttggcaaatgcacaagtttatttggatcgagcctttaaaaatttttatcgggaaaaagggatgggctttccaaaaaagaaaaagaaagaaacggtgcattcctacactacgaacaatcaacatggcacggtcaaaattttggataatcgttatttgaaagtacctaaattgaaatctttaattaaaatgaaggtacaccgccaaccactgggggagataaaatctgtaactatttctatgagtgcgagtcacaattattatgtttccattttgtgtgaagcgccggttgaaacgaaaacaaagcaacaaaaaatggtgggaatttgtagcagtagggaaaaatttgcgctgctttcgaatggtgaaagcttcgaaaaaagctattgttcaaagcatttaaagcaaaaactacgtcaagaagaacgaaaattaaacaagcgtaaaatgattgctttagaaaaaggtgtcgatctttcgcaagcaaaaaattatcaaaaacaaaaaataaaagtcgcaaaaattcgcgaaaaaatagccaaccaacgaacggatattttaaacaaaattacaacggaattggtttcaagttacgatgttatttgtattgaaaaagcccatcacagtaatgagcggccgccaaaacatgatcgttcggaattggcttggtctttatttttagctaaactgttgtataaagcacaatggtatggcaaagaactcatttgtattgagtcagaggagatcgaaacagagttgtctttttctgaaagtacagaaaattcagagtatcttagaagccaaaaaatcttagaacgtggcttgtctaaacgagaaaccttataaatagaagaactgtagggactacagggatcgcctaggggatagaaaatgcacaccatgtgttgaaccatttgtttctaggaagtcatattgggacagtccac

SEQ ID NO: 966 - RNA, 1172 nt, synthetic construct
  source 1..1172: mol_type = other RNA
atgaaggctctgaaagcttataaatacagactttatccaacctcaaaacaagaagagtttattcaaaaaacattttcttgtgttcgcttggtgtataatttaatgttacaagaccggattgatatctacaaagagatgcgaaaaaatcctcaacaaacgtttaaaatgccaacgccagctaaatataagaaacaataccctgtcctcagagaagttgatagtttagccttggcaaatgcacaagtttatttggatcgagcctttaaaaatttttatcgggaaaaagggatgggctttccaaaaaagaaaaagaaagaaacggtgcattcctacactacgaacaatcaacatggcacggtcaaaattttggataatcgttatttgaaagtacctaaattgaaatctttaattaaaatgaaggtacaccgccaaccactgggggagataaaatctgtaactatttctatgagtgcgagtcacaattattatgtttccattttgtgtgaagcgccggttgaaacaaaaacaaagcaacaaaaaatggtgggaatttgtagcagtagggaaaaatttgcgctgctttcgaatggtgaaagcttcgaaaaaagctattgttcaaagcatttaaagcaaaaactacgtcaagaagaacgaaaattaaacaagcgtaaaatgattgctttagaaaaaggtgtcgatctttcacaagcaaaaaattatcaaaaacaaaaaataaaagtcgcaaaaattcgcgaaaaaatagccaaccaacgaacggatattttaaacaaaattacaacggaattggtttcaagttacgatgttatttgtattgaaaaagcccatcacagtaatgagcggccgccaaaacatgatcgttctgaactggcttggtctttatttttagctaaactgttgtataaagcacaatggtatggcaaagaactcatttgtattgagtcagaggagatcgaaacagagttgtctttttctgaaagtacagaaaattcagagtatcttagaagccaaaaaatcttagaacgtggcttgtctaaacgagaaaccttataaatagaagaactgtagggactacagggatcgcctaggggatagaaaatgtacaccatgtgttgaaccatttgtttctaggaagtcacattgagacagtccac

SEQ ID NO: 967 - RNA, 1172 nt, synthetic construct
  source 1..1172: mol_type = other RNA
atgaaggctctgaaagcttataaatacagactttatccaacctcaaaacaagaagagtttattcaaaaaacattttcttgtgttcgcttggtgtataatttaatgttacaagaccggattgatatctacaaagagatgcgaaaaaatcctcaacaaacgtttaaaatgccaacgccagctaaatataagaaacaataccctgtcctcagagaagttgatagtttagccttggcaaatgcacaagtttatttggatcgagcctttaaaaatttttatcgggaaaaagggatgggctttccaaaaaagaaaaagaaagaaacggtgcattcctacactacgaataatcaacatggcacggtcaaaattttggataatcgttatttgaaagtacctaaattgaaatctttaattaaaatgaaggtacaccgccaaccactgggggagataaaatctgtaactatttctatgagtgcgagtcacaattattatgtttccattttgtgtgaagcgccggttgaaacgaaaacaaagcaacaaaaaatggtgggaatttgtagcagtagggaaaaatttgcgctgctttcgaatggtgaaagcttcgaaaaaagctattgttcaaagcatttaaagcaaaaactacgtcaagaagaacgaaaattaaacaagcgtaaaatgattgctttagaaaaaggtgtcgatctttcgcaagcaaaaaattatcaaaaacaaaaaataaaagtcgcaaaaattcgcgaaaaaatagccaaccaacgaacggatattttaaacaaaattacaacggaattggtttcaagttacgatgttatttgtattgaaaaagcccatcacagtaatgagcggccgccaaaacatgatcgttcggaattggcttggtctttatttttagctaaactgttgtataaagcacaatggtatggcaaagaactcatttgtattgagtcagaggagatcgaaacagagttgtctttttctgaaagtacagaaaattcagagtatcttagaagccaaaaaatcttagaacgtggcttgtctaaacgagaaaccttataaatagaagaactgtagggactacagggatcgcctaggggatagaaaatgcacaccatgtgttgaaccatttgtttctaggaagtcatattgggacagtccac

SEQ ID NO: 968 - RNA, 1172 nt, synthetic construct
  source 1..1172: mol_type = other RNA
atgaaggctctgaaagcttataaatacagactttatccaacctcaaaacaagaagagtttattcaaaaaacattttcttgtgttcgcttggtgtataatttaatgttacaagaccggattgatatctacaaagagatgcgaaaaaatcctcaacaaacgtttaaaatgccaacgccagctaaatataagaaacaataccctgtcctcagagaagttgatagtttagccttggcaaatgcacaagtttatttggatcgagcctttaaaaatttttatcgggaaaaagggatgggctttccaaaaaagaaaaagaaagaaacggtgcattcctacactacgaacaatcaacatggcacggtcaaaattttggataatcgttatttgaaagtacctaaattgaaatctttaattaaaatgaaggtacaccgccaaccgctgggggagataaaatctgtaactatttctatgagtgcgagtcacaattattatgtttccattttgtgtgaagcgccggttgaaacaaaaacaaagcaacaaaaaatggtgggaatttgtagcagtagggaaaaatttgcgctgctttcgaatggtgaaagcttcgaaaaaagctattgttcaaagcatttaaagcaaaaactacgtcaagaagaacgaaaattaaacaagcgtaaaatgattgctttggaaaaaggtgtcgatctttcgcaagcaaaaaattatcaaaaacaaaaaataaaagtcgcaaaaattcgcgaaaaaatagccaaccaacgaacggatattttaaacaaaattacaacggaattggtttcaagttacgatgttatttgtattgaaaaagcccatcacagtaatgagcggccgccaaaacatgatcgttctgaactggcttggtctttatttttagctaaactgttgtataaagcacaatggtatggcaaagaactcatttgtattgagtcagaggagatcgaaacagagttgtctttttctgaaagtacagaaaattcagagtatcttagaagccaaaaaatcttagaacgtggcttgtctaaacgagaaaccttataaatagaagaactgtagggactacagggatcgcctaggggatagaaaatgtacaccatgtgttgaaccatttgtttctaggaagtcacattgagacagtccac

SEQ ID NO: 969 - RNA, 1172 nt, synthetic construct
  source 1..1172: mol_type = other RNA
atgaaggctctgaaagcttataaatacagactttatccaacctcaaaacaagaagagtttattcaaaaaacattttcttgtgttcgcttggtgtataatttaatgttacaagaccggattgatatctacaaagagatgcgaaaaaatcctcaacaaacgtttaaaatgccaacgccagctaaatataagaaacaataccctgtcctcagagaagttgatagtttagccttggcaaatgcacaagtttatttggatcgagcctttaaaaatttttatcgggaaaaagggatgggctttccaaaaaagaaaaagaaagaaacggtgcattcctacactacgaacaatcaacatggtacggtcaaaattttggataatcgttatttgaaagtacctaaattgaaatctttaattaaaatgaaggtacaccgccaaccactgggggagataaaatctgtaactatttctatgagtgcgagtcacaattattatgtttccattttgtgtgaagcgccggttgaaacgaaaacaaagcaacaaaaaatggtgggaatttgtagcagtagggaaaaatttgcgctgctttcgaatggtgaaagcttcgaaaaaagctattgttcaaagcatttaaagcaaaaactacgtcaagaagaacgaaaattaaacaagcgtaaaatgattgctttagaaaaaggtgtcgatctttcgcaagcaaaaaattatcaaaaacaaaaaataaaagtcgcaaaaattcgcgaaaaaatagccaaccaacgaacggatattttaaacaaaattacaacggaattggtttcaagttacgatgttatttgtattgaaaaagcccatcacagtaatgagcggccgccaaaacatgatcgttcggaattggcttggtctttatttttagctaaactgttgtataaagcacaatggtatggcaaagaactcatttgtattgagtcagaggagatcgaaacagagttgtctttttctgaaagtacagaaaattcagagtatcttagaagccaaaaaatcttagaacgtggcttgtctaaacgagaaaccttataaatagaagaactgtagggactacagggatcgcctaggggatagaaaatgcacaccatgtgttgaaccatttgtttctaggaagtcatattgggacagtccac

SEQ ID NO: 970 - RNA, 1172 nt, synthetic construct
  source 1..1172: mol_type = other RNA
atgaaggctctgaaagcttataaatacagactttatccaacctcaaaacaagaagagtttattcaaaaaacattttcttgtgttcgcttggtgtataatttaatgttacaagaccggattgatatctacaaagagatgcgaaaaaatcctcaacaaacgtttaaaatgccaacgccagctaaatataagaaacaataccctgtcctcagagaagttgatagtttagccttggcaaatgcacaagtttatttggatcgagcctttaaaaatttttatcgggaaaaagggatgggctttccaaaaaagaaaaagaaagaaacggtgcattcctacactacgaacaatcaacatggcacggtcaaaattttggataatcgttatttgaaagtacctaaattgaaatctttaattaaaatgaaggtacaccgccaaccactgggggagataaaatctgtaactatttctatgagtgcgagtcacaattattatgtttccattttgtgtgaagcgccggttgaaacgaaaacaaagcaacaaaaaatggtgggaatttgtagcagtagggaaaaatttgcgctgctttcgaatggtgaaagcttcgaaaaaagctattgttcaaagcatttaaagcaaaaactacgtcaagaagaacgaaaattaaacaagcgtaaaatgattgctttggaaaaaggcgtcgatctttcacaagcaaaaaattatcaaaaacaaaaaataaaagtcgcaaaaattcgcgaaaaaatagccaaccaacgaacggatattttaaacaaaattacaacggaattggtttcaagttacgatgttatttgtattgaaaaagcccatcacagtaatgagcggccgccaaaacatgatcgttctgaactggcttggtctttatttttagctaaactgttgtataaagcacaatggtatggcaaagaactcatttgtattgagtcagaggagatagaaacagagttgtctttttctgaaagtacagaaaattcagagtatcttagaagccaaaaaatcttagaacgtggcttgtctaaacgagaaaccttataaatagaagaactgtagggactacagggatcgcctaggggatagaaaatgtacaccatgtgttgaaccatttgtttctaggaagtcacattgggacagtccac

SEQ ID NO: 971 - RNA, 1172 nt, synthetic construct
  source 1..1172: mol_type = other RNA
atgaaggctctgaaagcttataaatacagactttatccaacctcaaaacaagaagagtttattcaaaaaacattttcttgtgttcgcttggtgtataatttaatgttacaagaccggattgatatctacaaagagatgcgaaaaaatcctcaacaaacgtttaaaatgccaacgccagctaaatataagaaacaataccctgtcctcagagaagttgatagtttagccttggcaaatgcacaagtttatttggatcgagcctttaaaaatttttatcgggaaaaagggatgggctttccaaaaaagaaaaagaaagaaacggtgcattcctacactacgaataatcaacatggcacggtcaaaattttggataatcgttatttgaaagtacctaaattgaaatctttaattaaaatgaaggtacaccgccaaccactgggggagataaaatctgtaactatttctatgagtgcgagtcacaattattatgtttccattttgtgtgaagcgccggttgaaacgaaaacaaagcaacaaaaaatggtgggaatttgtagcagtagggaaaaatttgcgctgctttcgaatggtgaaagcttcgaaaaaagctattgttcaaagcatttaaagcaaaaactacgtcaagaagaacgaaaattaaacaagcgtaaaatgattgctttagaaaaaggtgtcgatctttcacaagcaaaaaattatcaaaaacaaaaaataaaagtcgcaaaaattcgcgaaaaaatagccaaccaacgaacggatattttaaacaaaattacaacggaattggtttcaagttacgatgttatttgtattgaaaaagcccatcacagtaatgagcggccgccaaaacatgatcgttctgaactggcttggtctttatttttagctaaactgttgtataaagcacaatggtatggcaaagaactcatttgtattgagtcagaggagatcgaaacagagttgtctttttctgaaagtacagaaaattcagagtatcttagaagccaaaaaatcttagaacgtggcttgtctaaacgagaaaccttataaatagaagaactgtagggactacagggatcgcctaggggatagaaaatgtacaccatgtgttgaaccatttgtttctaggaagtcacattgagacagtccac

SEQ ID NO: 972 - RNA, 1172 nt, synthetic construct
  source 1..1172: mol_type = other RNA
atgaaggctctgaaagcttataaatacagactttatccaacctcaaaacaagaagagtttattcaaaaaacattttcttgtgttcgcttggtgtataatttaatgttacaagaccggattgatatctacaaagagatgcgaaaaaatcctcaacaaacgtttaaaatgccaacgccagctaaatataagaaacaataccctgtcctcagagaagttgatagtttagccttggcaaatgcacaagtttatttggatcgagcctttaaaaatttttatcgggaaaaagggatgggctttccaaaaaagaaaaagaaagaaacggtgcattcctacactacgaacaatcaacatggcacggtcaaaattttggataatcgttatttgaaagtacctaaattgaaatctttaattaaaatgaaggtacaccgccaaccactgggggagataaaatctgtaactatttctatgagtgcgagtcacaattattatgtttccattttgtgtgaagcgccggttgaaacgaaaacaaagcaacaaaaaatggtgggaatttgtagcagtagggaaaaatttgcgctgctttcgaatggtgaaagcttcgaaaaaagctattgttcaaagcatttaaagcaaaaactacgtcaagaagaacgaaaattaaacaagcgtaaaatgattgctttagaaaaaggtgtcgatctttcacaagcaaaaaattatcaaaaacaaaaaataaaagtcgcaaaaattcgcgaaaaaatagccaaccaacgaacggatattttaaacaaaattacaacggaattggtttcaagttacgatgttatttgtattgaaaaagcccatcacagtaatgagcggccgccaaaacatgatcgttctgaactggcttggtctttatttttagctaaactgttgtataaagcacaatggtatggcaaagaactcatttgtattgagtcagaggagatcgaaacagagttgtctttttctgaaagtacagaaaattcagagtatcttagaagccaaaaaatcttagaacgtggcttgtctaaacgagaaaccttataaatagaagaactgtagggactacagggatcgcctaggggatagaaaatgtacaccatgtgttgaaccatttgtttctaggaagtcacattgagacagtccac

SEQ ID NO: 973 - RNA, 1172 nt, synthetic construct
  source 1..1172: mol_type = other RNA
atgaaggctctgaaagcttataaatacagactttatccaacctcaaaacaagaagagtttattcaaaaaacattttcttgtgttcgcttggtgtataatttaatgttacaagaccggattgatatctacaaagagatgcgaaaaaatcctcaacaaacgtttaaaatgccaacgccagctaaatataagaaacaataccctgtcctcagagaagttgatagtttagccttggcaaatgcacaagtttatttggatcgagcctttaaaaatttttatcgggaaaaagggatgggctttccaaaaaagaaaaagaaagaaacggtgcattcctacactacgaacaatcaacatggcacggtcaaaattttggacaatcgttatttgaaagtacctaaattgaaatctttaattaaaatgaaggtacaccgccaaccactgggggagataaaatctgtaactatttctatgagtgcgagtcacaattattatgtttccattttgtgtgaagcgccggttgaaacaaaaacaaagcaacaaaaaatggtgggaatttgtagcagtagggaaaaatttgcgctgctttcgaatggtgaaagcttcgaaaaaagctattgttcaaagcatttaaagcaaaaactacgtcaagaagaacgaaaattaaacaagcgtaaaatgattgctttagaaaaaggtgtcgatctttcacaagcaaaaaattatcaaaaacaaaaaataaaagtcgcaaaaattcgcgaaaaaatagccaaccaacgaacggatattttaaacaaaattacaacggaattggtttcaagttacgatgttatttgtattgaaaaagcccatcacagtaatgagcggccgccaaaacatgatcgttctgaactggcttggtctttatttttagctaaactgttgtataaagcacaatggtatggcaaagaactcatttgtattgagtcagaggagatcgaaacagagttgtctttttctgaaagtacagaaaattcagagtatcttagaagccaaaaaatcttagaacgtggcttgtctaaacgagaaaccttataaatagaagaactgtagggactacagggatcgcctaggggatagaaaatgtacaccatgtgttgaaccatttgtttctaggaagtcacattgagacagtccac

SEQ ID NO: 974 - RNA, 1172 nt, synthetic construct
  source 1..1172: mol_type = other RNA
atgaaggctctgaaagcttataaatacagactttatccaacctcaaaacaagaagagtttattcaaaaaacattttcttgtgttcgcttggtgtataatttaatgttacaagaccggattgatatctacaaagagatgcgaaaaaatcctcaacaaacgtttaaaatgccaacgccagctaaatataagaaacaataccctgtcctcagagaagttgatagtttagccttggcaaatgcacaagtttatttggatcgagcctttaaaaatttttatcgggaaaaagggatgggctttccaaaaaagaaaaagaaagaaacggtgcattcctacactacgaacaatcaacatggcacggtcaaaattttggataatcgttatttgaaagtacctaaattgaaatctttaattaaaatgaaggtacaccgccaaccgctgggggagataaaatctgtaactatttctatgagtgcgagtcacaattattatgtttccattttgtgtgaagcgccgattgaaacgaaaacaaagcaacaaaaaatggtgggaatttgtagcagtagggaaaaatttgcgctgatttcgaatggtgaaagcttcgaaaaaagctattgttcaaagcatttaaagcaaaaactacgtcaagaagaacgaaaattaaacaagcgtaaaatgattgctttggaaaaaggtgtcgatctttcgcaagcaaaaaattatcaaaaacaaaaaataaaagtcgcaaaaattcgcgaaaaaatagccaaccaacgaacggatattttaaacaaaattacaacggaattggtttcaagttacgatgttatttgtattgaaaaagcccatcacagtaatgagcggccgccaaaacatgatcgttctgaactggcttggtctttatttttagctaaattgttgtataaagcacaatggtatggcaaagaactcatttgtattgagtcagaggagatcgaaacagagttgtctttttctgaaagtacagaaaattcagagtatcttagaagccaaaaaatcttagaacgtggcttgtctaaacgagaaaccttataaatagaagaactgtagggactacagggatcgcctaggggatagaaaatgtacaccatgtgttgaaccatttatttctaggaagtcacattgggacagtccac

SEQ ID NO: 975 - RNA, 1111 nt, synthetic construct
  source 1..1111: mol_type = other RNA
atgctaaaagcttttaaattccgtatgtatccgacagaagaacaaaaacagcaattgattcgtacttttggatgtgctcgatttacctataaccatttgctgaaaaagcggcagaaaagttggcaacaaacaggagtagccaatttttcgctcacacccgctacattaaaaaaagaatacccattcttaaaagaagtagacagtcttgctttagcaaatgcacagcttaatttggatcgggcttttcgcaattatttcaagggacgtgccagcttcccaaagcttaaaacgaaaaaaagtatgtggcaatcttatacgaccaacaaccaaacccgtacgatctatctggaaaatggctacttaaagttaccaaaacaaaaagaactaatcaagataaatcagcatcggccagttgaaggatcgattcgctccgctacgatttctgctcgatataatgaagaattttatgtcgcactactttgtgatgtttcgccagtaaaaaaagaatctttagctaaatggatcgggatcgtctatcatccgaagacattgatccaaacatctcgacctctagaagtaactttaccaaaatttcaccagacagaagaaaagctgcaacatgcacagcggaaattgaatgtgaaagtccgctccgctcaccatagaaagatcaggttagatcaggcaagcaattatcagaaacaaaagagaaaagtaatggatctttatctgaaacaaaagaaccagcgagaagattatcttgaacaattatctgggaaattggtcaaacaatatgactacttatttgtagaatcttttccaaaagaagaggcacatgctgatttttctattcacgactggcataaattaataacaaaattgcgttataagtcccaatggtataataaaaaatttcttttgatcaataccgacggagcagaagaaagcaattccgtaagaaagagccaagtagtagaaaaaatgggcagacattcggttatcaagggataaaaaatgaatgaaactgataggagcgttagggttagccttgttaataaaaagtcttaatgacttttgtttctaggaatttttcttttgaagaaaagctcac

SEQ ID NO: 976 - RNA, 1111 nt, synthetic construct
  source 1..1111: mol_type = other RNA
atgctaaaagcttttaaattccgtatgtatccgacagaagaacaaaaacagcaattgattcgtacttttggatgtgctcgatttacctataaccatttgctgaaaaagcggcagaaaagttggcaacaaacaggagtagccaatttttcgcttacacccgctacattaaaaaaagaatacccattcttaaaagaagtagacagtcttgctttagcaaatgcacagcttaatttggatcgggcttttcgcaattatttcaagggacgtgccagcttcccaaagcttaaaacgaaaaaaagtatgtggcaatcttatacgaccaacaaccaaacccgtacgatctatctggaaaatggctacttaaagttaccaaaacaaaaagaactaatcaaaataaatcagcatcggccagttgaaggatcgattcgctccgctacgatttctgctcgatataatgaagaattttatgtcgcactactttgtgatgtttcgtcagtaaaaaaagaatctttagctaaatggatcgggatcgcctatcatccgaagacattgatccaaacatctcgtcctctagaagtaactttaccaaaatttcaccagacagaagaaaagctgcaacatgcacagcggaaattgaatgtgaaagtccgctccgctcaccatagaaagatcaggttagatcaggcaagcaattatcagaaacaaaagagaaaagtaatggatctttatctgaaacaaaagaaccagcgagaagattatcttgaacaattatctgggaaattggtcaaacaatatgactacttatttgtagaatcttttccaaaagaagaagcacatgctgatttttctattcatgactggcataaattaataacaaaattgcgttataagtcccaatggtataataaaaaatttcttttgatcaataccgacggagcagaagaaagcaattccgtaagaaagagccaagtagtagaagaaatgggcagacattcggttatcaagggataaaaaatgaatgaaactgataggagcgttagggttcgccttgttaataaaaagtcttaatgacttttgtttctaggaatttttcttttgaagaaaagctcac

SEQ ID NO: 977 - RNA, 1111 nt, synthetic construct
  source 1..1111: mol_type = other RNA
atgctaaaagcttttaaattccgtatgtatccgacagaagaacaaaaacagcaattgattcgtacttttggatgtgctcgatttacctataaccatttgctgaaaaagcggcagaaaagttggcaacaaacaggagtagccaatttttcgcttacacccgctacattaaaaaaagaatacccattcttaaaagaagtagacagtcttgctttagcaaatgcacagcttaatttggatcgggcttttcgcaattatttcaagggacgtgccagcttcccaaagcttaaaacgaaaaaaagtatgtggcaatcttatacgaccaacaaccaaacccgtacgatctatctggaaaatggctacttaaagttaccaaaacaaaaagaactaatcaaaataaatcagcatcggccagttgaaggatcgattcgctccgctacgatttctgctcgatataatgaagaattttatgtcgcactactttgtgatgtttcgtcagtaaaaaaagaatctttagctaaatggatcgggatcgcctatcatccgaagacattgatccaaacatctcgtcctctagaagtaactttaccaaaatttcaccagacagaagaaaagctgcaacatgcacagcggaaattgaatgtgaaagtccgctccgctcaccatagaaagatcaggttagatcaggcaagcaattatcagaaacaaaagagaaaagtaatggatctttatctgaaacaaaagaaccagcgagaagattatcttgaacaattatctgggaaattggtcaaacaatatgactacttatttgtagaatcttttccaaaagaagaagcacatgctgatttttctattcatgactggcataaattaataacaaaattgcgttataagtcccaatggtataataaaaaatttcttttgatcaataccgacggagcagaagaaagcaattccgtaagaaagagccaagtagtagaagaaatgggcagacattcggttatcaagggataaaaaatgaatggaactgataggagcgttagggttcgccttgttaataaaaagtcttaatgacttttgtttctaggaatttttcttttgaagaaaagctcac

SEQ ID NO: 978 - RNA, 1111 nt, synthetic construct
  source 1..1111: mol_type = other RNA
atgctaaaagcttttaaattccgtatgtatccgacagaagaacaaaaacagcaattgattcgtacttttggatgtgctcgatttacctataaccatttgctgaaaaagcggcagaaaagttggcaacaaacaggagtagccaatttttcgcttacacccgctacattaaaaaaagaatacccattcttaaaagaagtagacagtcttgctttagcaaatgcacagcttaatttggatcgggcttttcgcaattatttcaagggacgtgccagcttcccaaagcttaaaacgaaaaaaagtatgtggcaatcttatacgaccaacaaccaaacccgtacgatctatctggaaaatggctacttaaagttaccaaaacaaaaagaactaatcaaaataaatcagcatcggccagttgaaggatcgattcgctccgctacgatttctgctcgatataatgaagaattttatgtcgcactactttgtgatgtttcgtcagtaaaaaaagaatctttagctaaatggatcgggatcgcctatcatccgaagacattgatccaaacatctcgtcctctagaagtaactttaccaaaatttcaccagacagaagaaaagctgcaacatgcacagcgaaaattgaatgtgaaagtccgctccgctcaccatagaaagatcaggttagatcaggcaagcaattatcagaaacaaaagagaaaagtaatggatctttatctgaaacaaaagaaccagcgagaagattatcttgaacaattatctgggaaattggtcaaacaatatgactacttatttgtagaatcttttccaaaagaagaagcacatgctgatttttctattcatgactggcataaattaataacaaaattgcgttataagtcccaatggtataataaaaaatttcttttgatcaataccgacggagcagaagaaagcaattccgtaagaaagagccaagtagtagaagaaatgggcagacattcggttatcaagggataaaaaatgaatggaactgataggagcgttagggttcgccttgttaataaaaagtcttaatgacttttgtttctaggaatttttcttttgaagaaaagctcac

SEQ ID NO: 979 - RNA, 1111 nt, synthetic construct
  source 1..1111: mol_type = other RNA
atgctaaaagcttttaaattccgtatgtatccgacagaagaacaaaaacagcaattgattcgtacttttggatgtgctcgatttacctataaccatttgctgaaaaagcggcagaaaagttggcaacaaacaggagtagccaatttttcgcttacacccgctacattaaaaaaagaatacccattcttaaaagaagtagacagtcttgctttagcaaatgcacagcttaatttggatcgggcttttcgcaattatttcaagggacgtgccagcttcccaaagcttaaaacgaaaaaaagtatgtggcaatcttatacgaccaacaaccaaacccgtacgatctatctggaaaatggctacttaaagttaccaaaacaaaaagaactaatcaaaataaatcagcatcggccagttgaaggatcgattcgctccgctacgatttctgctcgatataatgaagaattttatgtcgcactactttgtgatgtttcgtcagtaaaaaaagaatctttagctaaatggatcgggatcgcctatcatccgaagacattgatccaaacatctcgtcctctagaagtaactttaccaaaatttcaccagacagaagaaaagctgcaacatgcacagcggaaattgaatgtgaaagtccgctccgctcaccatagaaagatcaggttagatcaggcaagcaattatcagaaacaaaagagaaaagtaatggatctttatctgaaacaaaagaaccagcgagaagattatcttgaacaattatctgggaaattggtcaaacaatatgactacttatttgtagaatcttttccaaaagaagaagcacatgctgatttttctattcatgactggcataaattaataacaaaattgcgttataagtcccaatggtataataaaaaatttcttttgatcaataccgacggagcagaagaaagcaattccgtaagaaagagtcaagtagtagaagaaatgggcagacattcggttatcaagggataaaaaatgaatgaaactgataggagcgttagggttcgccttgttaataaaaagtcttaatgacttttgtttctaggaatttttcttttgaagaaaagctcac

SEQ ID NO: 980 - RNA, 1111 nt, synthetic construct
  source 1..1111: mol_type = other RNA
atgctaaaagcttttaaattccgtatgtatccgacagaagaacaaaaacagcaattgattcgtacttttggatgtgctcgatttacctataaccatttgctgaaaaagcggcagaaaagttggcaacaaacaggagtagccaatttttcgcttacacccgctacattaaaaaaagaatacccattcttaaaagaagtagacagtcttgctttagcaaatgcacagcttaatttggatcgggcttttcgcaattatttcaagggacgtgccagcttcccaaagcttaaaacgaaaaaaagtatgtggcaatcttatacgaccaacaaccaaacccgtacgatctatctggaaaatggctacttaaagttaccaaaacaaaaagaactaatcaaaataaatcagcatcggccagttgaaggatcgattcgctccgctacgatttctgctcgatataatgaagaattttatgttgcactactttgtgatgtttcgtcagtaaaaaaagaatctttagctaaatggatcgggatcgcctatcatccgaagacattgatccaaacatctcgtcctctagaagtaactttaccaaaatttcaccagacagaagaaaagctgcaacatgcacagcggaaattgaatgtgaaagtccgctccgctcaccatagaaagatcaggttagatcaggcaagcaattatcagaaacaaaagagaaaagtaatggatctttatctgaaacaaaagaaccagcgagaagattatcttgaacaattatctgggaaattggtcaaacaatatgactacttatttgtagaatcttttccaaaagaagaagcacatgctgatttttctattcatgactggcataaattaataacaaaattgcgttataagtcccaatggtataataaaaaatttcttttgatcaataccgacggagcagaagaaagcaattccgtaagaaagagccaagtagtagaagaaatgggcagacattcggttatcaagggataaaaaatgaatgaaactgataggagcgttagggttcgccttgttaataaaaagtcttaatgacttttgtttctaggaatttttcttttgaagaaaagctcac

SEQ ID NO: 981 - RNA, 1111 nt, synthetic construct
  source 1..1111: mol_type = other RNA
atgctaaaagcttttaaattccgtatgtatccgacagaagaacaaaaacagcaattgattcgtacttttggatgtgctcgatttacctataaccatttgctgaaaaagcggcagaaaagttggcaacaaacaggagtagccaatttttcgcttacacccgctacattaaaaaaagaatacccattcttaaaagaagtagacagtcttgctttagcaaatgcacagcttaatttggatcgggcttttcgcaattatttcaagggacgtgccagcttcccaaagcttaaaacgaaaaaaagtatgtggcaatcttatacgaccaacaaccaaacccgtacgatctatctggaaaatggctacttaaagttaccaaaacaaaaagaactaatcaaaataaatcagcatcggccagttgaaggatcgattcgctccgctacgatttctgctcgatataatgaagaattttatgtcgcactactttgtgatgtttcgtcagtaaaaaaagaatctttagctaaatggatcgggatcgcctatcatccgaagacattgatccaaacatctcgtcctctagaagtaactttaccaaaatttcaccagacagaagaaaagctgcaacatgcacagcggaaattgaatgtgaaagtccgctccgctcaccatagaaagatcaggttagatcaggcaagcaattatcagaaacaaaagagaaaagtaatggatctttatctgaaacaaaagaaccagcgagaagattatcttgaacaattatctgggaaattggtcaaacaatatgactacttatttgtagaatcttttccaaaagaagaagcacatgctgatttttctattcatgactggcataaattaataacaaaattgcgttataagtcccaatggtataataaaaaatttcttttgatcaataccgacggagcagaagaaagcaattccgtaagaaagagccaagtagtagaagaaatgggcagacattcggttatcaagggataaaaaatgaatgaaactgataggagcgttagggttcgccttgttaataaaaagtcttaatgacttttgtttctaggaatttttcttttgaaaaaaagctcac

SEQ ID NO: 982 - RNA, 1078 nt, synthetic construct
  source 1..1078: mol_type = other RNA
ctgggtgttttaaaagcatacaaatttcggatctatcctaatggacagcaaaaacagtttttcatcgaaaccttcggctgtgtacgttttacgtacaatcaactgctagaggcaaagatggaggagctggccaacaatgaagcaaagcaagggttgacgccagccaaactaaaaaaggagtatccttttttgaaggagaccgatagtttggcattggcgaatgcacaacggaatctggaccgagcgtttcgaaattactttcaaaagcgggctggctttccaaaaatgaaaaccaaaaaaagtatctggcaatcgtataccaccaataatcagcagcacaccatttattttgaagacgatcaaatcaagctgccaaagcttaaaacattggttcccgtaaaaaagcatcgggcgatcaaagggaagatcaaatcggcaacgatctcagcaaaaaacaacgaagagttttacatctcgatcctttgtttggaagagatctcgccattgccgaagcagcaagcctctgtcgctgttgtttatgatccgcagcagttggtcaaagccaaccagccgatacccatcacctgtgagcatgccatccaaacgaagcaaaagctgacgcgagcagaacgcaaacttcaggtgaaagcgacggcggtcaaacggaagaaaatccttttgacccaggcgcgaaattatcagaagctaaaaggaaaggtcgctcgcctttatcgttttcactgctgtcaaaagcgggaattcatcgatcaagtcagctaccatctcgtaaaacagtacgatacgatctatttggaacaaatcgcagaagatacggttttaaaagctggtcattacagcatcagtgattggcatcaattcgttcgcaaaatccagtacaaagcgcagtggtacggcaaagaactgcgttttgtcacgttggatacgcaggaccaacagaagctagaacggctctcaggcgaaatgagcagctgagccgcttgaactggaaggaacgccagggatcgcctagggtatagaaaaaatctttctgatttttgtttctaggaaccacgttcac

SEQ ID NO: 983 - RNA, 1078 nt, synthetic construct
  source 1..1078: mol_type = other RNA
ctgggtgttttaaaagcatacaaatttcggatctatcctaatggacagcaaaaacagtttttcatcgaaaccttcggctgtgtacgttttacgtacaatcaactgctagaggcaaagatggaggagctggccaacaatgaagcaaagcaagggttgacgccagccaaactaaaaaaggagtatccttttttgaaggagaccgatagtttggcattggcgaatgcacaacggaatctggaccgagcgtttcgaaattactttcaaaagcgggctggctttccaaaaatgaaaaccaaaaaaagtatctggcaatcgtataccaccaataatcagcagcacaccatttattttgaagacgatcaaatcaagctgccaaagcttaaaacattggttcccgtaaaaaagcatcgggcgatcaaagggaagatcaaatcggcaacgatctcagcaaaaaacaacgaagagttttacatctcgatcctttgtttggaagagatctcgccattgccgaagcagcaagcctctgtcgctgttgtttatgatccgcagcagttggtcaaagccaaccagccgatacccatcacctgtgaacatgccatccaaacgaagcaaaagctgacgcgagcagaacgcaagcttcaggtgaaagcgacggcggtcaaacggaaaaaaatccttttgacccaggcgcgaaattatcagaagctaaaaggaaaggtcgctcgcctttatcgttttcactgctgtcaaaagcgggaattcatcgatcaagtcagctaccatcttgtaaaacagtacgatacgatctatttggaacaaatcgcagaagatacggttttaaaagctggtcattacagcatcagtgattggcatcaattcgttcgtaaaatccagtacaaagcgcagtggtacggcaaagaactgcgttttgttacgttggatacgcaggaccaacagaagctagaacggctctcaggcgaaatgagcagctgagccgcttgaactggaaggaacgccagggatcgcctagggtatagaaaaaatctttctgatttttgtttctaggaaccacgttcac

SEQ ID NO: 984 - RNA, 1078 nt, synthetic construct
  source 1..1078: mol_type = other RNA
ctgggtgttttaaaagcatacaaatttcggatctatcctaatggacagcaaaaacagtttttcatcgaaaccttcggctgtgtacgttttacgtacaatcaactgctagaggcaaagatggaggagctggccaacaatgaagcaaagcaagggttgacgccagccaaactaaaaaaggagtatccttttttgaaggagaccgatagtttggcattggcgaatgcacaacggaatctggaccgagcgtttcgaaattactttcaaaagcgggctggctttccaaaaatgaaaaccaaaaaaagtatctggcaatcgtataccaccaataatcagcagcacaccatttattttgaagacgatcaaatcaagctgccaaagcttaaaacattggttcccgtaaaaaagcatcgggcgatcaaagggaagatcaaatcggcaacgatctcagcaaaaaacaacgaagagttttacatctcgatcctttgtttggaagagatctcgccattgccgaagcagcaagcctctgtcgctgttgtttatgatccgcagcagttggtcaaagccaaccagccgatacccatcacctgtgaacatgccatccaaacgaagcaaaagctgacgcgagcagaacgcaagcttcaggtgaaagcgacggcggtcaaacggaaaaaaatccttttgacccaggcgcgaaattatcagaagctaaaaggaaaggtcgctcgcctttatcgttttcactgctgtcaaaagcgggaattcatcgatcaagtcagctaccatctcgtaaaacagtacgatacgatctatttggaacaaatcgcagaagatacggttttaaaagctggtcattacagcatcagtgattggcatcaattcgttcgtaaaatccagtacaaagcgcagtggtacggcaaagaactgcgttttgttacgttggatacgcaggaccaacagaagctagaacggctctcaggcgaaatgagcagctgagccgcttgaactggaaggaacgccagggatcgccttgggtatagaaaaaatctttctgatttttgtttctaggaaccacgttcac

SEQ ID NO: 985 - RNA, 1078 nt, synthetic construct
  source 1..1078: mol_type = other RNA
ctgggtgttttaaaagcatacaaatttcggatctatcctaatggacagcaaaaacagtttttcatcgaaaccttcggctgtgtacgttttacgtacaatcaactgctagaggcaaagatggaggagctggccaacaatgaagcaaagcaagggttgacgccagccaaactaaaaaaggagtatccttttttgaaggagaccgatagtttggcattggcgaatgcacaacggaatctggaccgagcgtttcgaaattactttcaaaagcgggctggctttccaaaaatgaaaaccaaaaaaagtatctggcaatcgtataccaccaataatcagcagcacaccatttattttgaagacgatcaaatcaagctgccaaagcttaaaacattggttcccgtaaaaaagcatcgggcgatcaaagggaagatcaaatcggcaacgatctcagcaaaaaacaacgaagagttttacatctcgatcctttgtttggaagagatctcgccattgccgaagcagcaagcctctgtcgctgttgtttatgatccgcagcagttggtcaaagccaaccagccgatacccatcacctgtgaacatgccatccaaacgaagcaaaagctgacgcgagcagaacgcaagcttcaggtgaaagcgacggcggtcaaacggaaaaaaatccttttgacccaggcgcgaaattatcagaagctaaaaggaaaggtcgctcgcctttatcgttttcactgctgtcaaaagcgggaattcatcgatcaagtcagctaccatctcgtaaaacagtacgatacgatctatttggaacaaatcgcagaagatacggttttaaaagctggtcattacagcatcagtgattggcatcaattcgttcgtaaaatccagtacaaagcgcagtggtacggcaaagaactgcgttttgttacgttggatacgcaggaccaacagaagctagaacggctctcaggcgaaatgagcagctgagccgcttgaactggaaggaacgccagggatcgcctagggtatagaaaaaatctttctgatttttgtttctaggaaccacgttcac

SEQ ID NO: 986 - RNA, 1078 nt, synthetic construct
  source 1..1078: mol_type = other RNA
ctgggtgttttaaaagcatacaaatttcggatctatcctaatggacagcaaaaacagtttttcatcgaaaccttcggctgtgtacgttttacgtacaatcaactgctggaggcaaagatggaggagctggccaacaatgaagcaaagcaagggttgacgccagccaaactaaaaaaggagtatccttttttgaaggagaccgatagcttggcattggcgaatgcacaacggaatctggaccgagcgtttcgaaattactttcaaaagcgggctggctttccaaaaatgaaaaccaaaaaaagtatctggcaatcgtataccaccaataatcagcagcacaccatttattttgaagacgatcaaatcaagctgccaaagcttaaaacattggttcccgtaaaaaagcatcgggcgatcaaagggaagatcaaatcggcaacgatctcagcaaaaaacaacgaagagttttacatctcgatcctttgtttggaagagatctcgccattgccgaagcagcaagcctctgtcgctgttgtttatgatccgcagcagttggtcaaagccaaccagccgatacccatcacctgtgagcatgccatccaaacgaagcaaaagctgacgcgagcagaacgcaaacttcaggtgaaagcgacggcggtcaaacggaagaaaatccttttgacccaggcgcgaaattatcagaagctaaaaggaaaggtcgctcgcctttatcgttttcactgctgtcaaaagcgggaattcatcgatcaagtcagctaccatctcgtaaaacagtacgatacgatctatttggaacaaatcgcagaagatacggttttaaaagctggtcattacagcatcagtgattggcatcaattcgttcgtaaaatccagtacaaagcgcagtggtacggcaaagaactgcgttttgttacgttggatacgcaggaccaacagaagctagaacggctctcaggcgaaatgagcagctgagccgcttgaactggaaggaacgccagggatcgcctagggtatagaaaaaatctttctgatttttgtttctaggaaccacgttcac

SEQ ID NO: 987 - RNA, 1078 nt, synthetic construct
  source 1..1078: mol_type = other RNA
ctgggtgttttaaaagcatacaaatttcggatctatcctaatggacagcaaaaacagtttttcatcgaaaccttcggctgtgtacgttttacgtacaatcaactgctagaggcaaagatggaggagctggccaacaatgaagcaaagcaagggttgacgccagccaaactaaaaaaggagtatccttttttgaaggagaccgatagtttggcattggcgaatgcacaacggaatctggaccgagcgtttcgaaattactttcaaaagcgggctggctttccaaaaatgaaaaccaaaaaaagtatctggcaatcgtataccaccaataatcagcagcacaccatttattttgaagacgatcaaatcaagctgccaaagcttaaaacattggttcccgtaaaaaagcatcgggcgatcaaagggaagatcaaatcggcaacgatctcagcaaaaaacaacgaagagttttacatctcgatcctttgtttggaagagatctcgccattgccgaagcagcaagcctctgtcgctgttgtttatgatccgcagcagttggtcaaagccaaccagccgatacccatcacctgtgaacatgccatccaaacgaagcaaaagctgacgcgagcagaacgcaagcttcaggtgaaagcgacggcggtcaaacggaaaaaaatccttttgacccaggcgcgaaattatcagaagctaaaaggaaaggtcgctcgcctttatcgttttcactgctgtcaaaagcgggaattcatcgatcaagtcagctaccatctcgtaaaacagtacgatacaatctatttggaacaaatcgcagaagatacggttttaaaagctggtcattacagcatcagtgattggcatcaattcgttcgcaaaatccagtacaaagcgcagtggtacggcaaagaactgcgttttgtcacgttggatacgcaggaccaacagaagctagaacggctctcaggcgaaatgagcagctgagtcgcttgaactggaaggaacgccagggatcgcctagggtatagaaaaaatctttctgatttttgtttctaggaaccacgttcac

SEQ ID NO: 988 - RNA, 1078 nt, synthetic construct
  source 1..1078: mol_type = other RNA
ctgggtgttttaaaagcatacaaatttcggatctatcctaatggacagcaaaaacagttttttatcgaaaccttcggctgtgtacgttttacgtacaatcaactgctagaggcaaagatggaggagctggccaacaatgaagcaaagcaagggttgacgccagccaaactaaaaaaggagtatccttttttgaaggagaccgatagtttggcattggcgaatgcacaacggaatctggaccgagcgtttcgaaattactttcaaaagcgggctggctttccaaaaatgaaaaccaaaaaaagtatctggcaatcgtataccaccaataatcagcagcacaccatttattttgaagacgatcaaatcaagctgccaaagcttaaaacattggttcccgtaaaaaagcatcgggcgatcaaagggaagatcaaatcggcaacgatctcagcaaaaaataacgaagagttttacatctcgatcctttgtttggaagagatctcgccattgccgaagcagcaagcctctgtcgctgttgtttatgatccgcagcagttggtcaaagccaaccagccgatacccatcacctgtgaacatgccatccaaacgaagcaaaagctgacgcgagcagaacgcaagcttcaggtgaaagcgacggcggtcaaacggaaaaaaatccttttgacccaggcgcgaaattatcagaagctaaaaggaaaggtcgctcgcctttatcgttttcactgctgtcaaaagcgggaattcatcgatcaagtcagctaccatctcgtaaaacagtacgatacgatctatttggaacaaatcgcagaagatacggttttaaaagctggtcattacagcatcagtgattggcatcaattcgttcgtaaaatccagtacaaagcgcagtggtacggcaaagaactgcgttttgttacgttggatacgcaggaccaacagaagctagaacggctctcaggcgaaatgagcagctgagccgcttgaactggaaggaacgccagggatcgcctagggtatagaaaaaatctttctgatttttgtttctaggaaccacgttcac

SEQ ID NO: 989 - RNA, 1078 nt, synthetic construct
  source 1..1078: mol_type = other RNA
ctgggtgttttaaaagcatacaaatttcggatctatcctaatggacagcaaaaacagtttttcatcgaaaccttcggctgtgtacgttttacgtacaatcaactgctggaggcaaagatggaggagctggccaacaatgaagcaaagcaagggttgacgccagccaaactaaaaaaggagtatccttttttgaaggagaccgatagtttggcattggcgaatgcacaacggaatctggaccgagcgtttcgaaattactttcaaaagcgggctggctttccaaaaatgaaaaccaaaaaaagtatctggcaatcgtataccaccaataatcagcagcacaccatttattttgaagacgatcaaatcaagctgccaaagcttaaaacattggttcccgtaaaaaagcatcgggcgatcaaagggaagatcaaatcggcaacgatctcagcaaaaaacaacgaagagttttacatctcgatcctttgtttggaagagatctcgccattgccgaagcagcaagcctctgtcgctgttgtttatgatccgcagcagttggtcaaagccaaccagccgatacccatcacctgtgagcatgccatccaaacgaagcaaaagctgacgcgagcagaacgcaaacttcaggtgaaagcgacggcggtcaaacggaagaaaatccttttgacccaggcgcgaaattatcagaagctaaaaggaaaggtcgctcgcctttatcgttttcactgctgtcaaaagcgggaattcatcgatcaagtcagctaccatctcgtaaaacagtacgatacgatctatttggaacaaatcgcagaagatacggttttaaaagctggtcattacagcatcagtgattggcatcaattcgttcgtaaaatccagtacaaagcgcagtggtacggcaaagaactgcgttttgttacgttggatacgcaggaccaacagaagctagaacggctctcaggcgaaatgagcagctgagccgcttgaactggaaggaacgccagggatcgcctagggtatagaaaaaatctttctgatttttgtttctaggaaccacgttcac

SEQ ID NO: 990 - RNA, 1172 nt, synthetic construct
  source 1..1172: mol_type = other RNA
atgaaggctctgaaagcttataaatacagactttatccaacctcaaaacaagaagagtttattcaaaaaacattttcttgtgttcgcttggtgtataatttaatgttacaagaccggattgatatctacaaagagatgcgaaaaaatcctcaacaaacgtttaaaatgccaacgccagctaaatataagaaacaataccctgtcctcagagaagttgatagtttagccttggcaaatgcacaagtttatttggatcgagcctttaaaaatttttatcgggaaaaagggatgggctttccaaaaaagaaaaagaaagaaacggtgcattcctacactacaaacaatcaacatggcacggtcaaaattttggataatcgttatttgaaagtacctaaattgaaatctttaattaaaatgaaggtacaccgccaaccgctgggggagataaaatctgtaactatttctatgagtgcgagtcacaattattatgtttccattttgtgtgaagcgccgattgaaacgaaaacaaagcaacaaaaaatggtgggaatttgtagcagtagggaaaaatttgcgctgctttcgaatggtgaaagcttcgaaaaaagctattgttcaaagcatttaaagcaaaaactacgtcaagaagaacgaaaattaaacaagcgtaaaatgattgctttggaaaaaggtgtcgatctttcgcaagcaaaaaattatcaaaaacaaaaaataaaagtcgcaaaaattcgcgaaaaaatagccaaccaacgaatggatattttaaacaaaattacaacggaattggtttcaagttacgatgttatttgtattgaaaaagcccatcacagtaatgaacggccgccaaaacatgatcgttctgaactggcttggtctttatttttagctaaactgttgtataaagcacaatggtatggcaaagaactcatttgtattgagtcagaggagatcgaaacagagttgtctttttctgaaagtacagaaaattcagagtatcttagaagccaaaaaatcttagaacgtggcttgtctaaacgagaaaccttataaatagaagaactgtagggactacagggatcgcctaggggatagaaaatgtacaccatgtgttgaaccatttgtttctaggaagtcacattgggacagtccac

SEQ ID NO: 991 - RNA, 1172 nt, synthetic construct
  source 1..1172: mol_type = other RNA
atgaaggctctgaaagcttataaatacagactttatccaacctcaaaacaagaagagtttattcaaaaaacattttcttgtgttcgcttggtgtataatttaatgttacaagaccggattgatatctacaaagagatgcgaaaaaatcctcaacaaacgtttaaaatgccaacgccagctaaatataagaaacaataccctgtcctcagagaagttgatagtttagccttggcaaatgcacaagtttatttggatcgagcctttaaaaatttttatcgggaaaaagggatgggctttccaaaaaagaaaaagaaagaaacggtgcattcctacactacgaacaatcaacatggcacggtcaaaattttggataatcgttatttgaaagtacctaaattgaaatctttaattaaaatgaaggtacaccgccaaccgctgggggagataaaatctgtaactatttctatgagtgcgagtcacaattattatgtttccattttgtgtgaagcgccgattgaaacgaaaacaaagcaacaaaaaatggtgggaatttgtagcagtagggaaaaatttgcgctgctttcgaatggtgaaagcttcgaaaaaagctattgttcaaagcatttaaagcaaaaattacgtcaagaagaacgaaaattaaacaagcgtaaaatgattgctttggaaaaaggtgtcgatctttcgcaagcaaaaaattatcaaaaacaaaaaataaaagtcgcaaaaattcgcgaaaaaatagccaaccaacgaatggatattttaaacaaaattacaacggaattggtttcaagttacgatgttatttgtattgaaaaagcccatcacagtaatgaacggccgccaaaacatgatcgttctgaactggcttggtctttatttttagctaaactgttgtataaagcacaatggtatggcaaagaactcatttgtattgagtcagaggagatcgaaacagagttgtctttttctgaaagtacagaaaattcagagtatcttagaagccaaaaaatcttagaacgtggcttgtctaaacgagaaaccttataaatagaagaactgtagggactacagggatcgcctaggggatagaaaatgtacaccatgtgttgaaccatttgtttctaggaagtcacattgggacagtccac

SEQ ID NO: 992 - RNA, 1172 nt, synthetic construct
  source 1..1172: mol_type = other RNA
atgaaggctctgaaagcttataaatacagactttatccaacctcaaaacaagaagagtttattcaaaaaacattttcttgtgttcgcttggtgtataatttaatgttacaagaccggattgatatctacaaagagatgcgaaaaaatcctcaacaaacgtttaaaatgccaacgccagctaaatataagaaacaataccctgtcctcagagaagttgatagtttagccttggcaaatgcacaagtttatttggatcgagcctttaaaaatttttatcgggaaaaagggatgggctttccaaaaaagaaaaagaaagaaacggtgcattcctacactacgaacaatcaacatggcacggtcaaaattttggataatcgttatttgaaagtacctaaattgaaatctttaattaaaatgaaggtacaccgccaaccgctgggggagataaaatctgtaactatttctatgagtgcgagtcacaattattatgtttccattttgtgtgaagcgccgattgaaacgaaaacaaagcaacaaaaaatggtgggaatttgtagcagtagggaaaaatttgcgctgctttcgaatggtgaaagcttcgaaaaaagctattgttcaaagcatttaaagcaaaaattacgtcaagaagaacgaaaattaaacaagcgtaaaatgattgctttggaaaaaggtgtcgatctttcgcaagcaaaaaattatcaaaaacaaaaaataaaagtcgcaaaaattcgcgaaaaaatagccaaccaacgaatggatattttaaacaaaattacaacggaattggtttcaagttacgatgttatttgtattgaaaaagcccatcacagtaatgaacggccgccaaaacatgatcgttctgaactggcttggtctttatttttagctaaactgttgtataaagcacaatggtatggcaaagaactcatttgtattgagtcagaggagatcgaaacagagttgtctttttctgaaagtacagaaaattcagagtatcttagaagccaaaaaatcttagaacgtggcttgtctaaacgagaaaccttataaatagaagaactgtagggactacagggatcgcctaggggatagaaagtgtacaccatgtgttgaaccatttgtttctaggaagtcacattgggacagtccac

SEQ ID NO: 993 - RNA, 1172 nt, synthetic construct
  source 1..1172: mol_type = other RNA
atgaaggctctgaaagcttataaatacagactttatccaacctcaaaacaagaagagtttattcaaaaaacattttcttgtgttcgcttggtgtataatttaatgttacaagaccggattgatatctacaaagagatgcgaaaaaatcctcaacaaacgtttaaaatgccaacgccagctaaatataagaaacaataccctgtcctcagagaagttgatagtttagccttggcaaatgcacaagtttatttggatcgagcctttaaaaatttttatcgggaaaaagggatgggctttccaaaaaagaaaaagaaagaaacggtgcattcctacactacaaacaatcaacatggcacggtcaaaattttggataatcgttatttgaaagtacctaaattgaaatctttaattaaaatgaaggtacaccgccaaccgctgggggagataaaatctgtaactatttctatgagtgcgagtcacaattattatgtttccattttgtgtgaagcgccgattgaaacgaaaacaaagcaacaaaaaatggtgggaatttgtagcagtagggaaaaatttgcgctgctttcgaatggtgaaagcttcgaaaaaagctattgttcaaagcatttaaagcaaaaactacgtcaagaagaacgaaaattaaacaagcgtaaaatgattgctttggaaaaaggtgtcgatctttcgcaagcaaaaaattatcaaaaacaaaaaataaaagtcgcaaaaattcgcgaaaaaatagccaaccaacgaatggatattttaaacaaaattacaacggaattggtttcaagttacgatgttatttgtattgaaaaagcccatcacagtaatgaacggccgccaaaacatgatcgttctgaactggcttggtctttatttttagctaaactgttgtataaagcacaatggtatggcaaagaactcatttgtattgagtcagaggagatcgaaacagagttgtctttttctgaaagtacagaaaattcagagtatcttagaagccaaaaaatcttagaacgtggcttgtctaaacgagaaaccttataaatagaagaactgtagggactacagggatcgcctaggggatagaaagtgtacaccatgtgttgaaccatttgtttctaggaagtcacattgggacagtccac

SEQ ID NO: 994 - RNA, 1172 nt, synthetic construct
  source 1..1172: mol_type = other RNA
atgaaggctctgaaagcttataaatacagactttatccaacctcaaaacaagaagagtttattcaaaaaacattttcttgtgttcgcttggtgtataatttaatgttacaagaccggattgatatctacaaagagatgcgaaaaaatcctcaacaaacgtttaaaatgccaacgccagctaaatataagaaacaataccctgtcctcagagaagttgatagtttagccttggcaaatgcacaagtttatttggatcgagcctttaaaaatttttatcgggaaaaagggatgggctttccaaaaaagaaaaagaaagaaacggtgcattcctacactacgaacaatcaacatggcacagtcaaaattttggataatcgttatttgaaagtacctaaattgaaatctttaattaaaatgaaggtacaccgccaaccgctgggggagataaaatctgtaactatttctatgagtgcgagtcacaattattatgtttccattttgtgtgaagcgccgattgaaacgaaaacaaagcaacaaaaaatggtgggaatttgtagcagtagggaaaaatttgcgctgctttcgaatggtgaaagcttcgaaaaaagctattgttcaaagcatttaaagcaaaaactacgtcaagaagaacgaaaattaaacaagcgtaaaatgattgctttagaaaaaggtgtcgatctttcgcaagcaaaaaattatcaaaaacaaaaaataaaagtcgcaaaaattcgcgaaaaaatagccaaccaacgaatggatattttaaacaaaattacaacggaattggtttcaagttacgatgttatttgtattgaaaaagcccatcacagtaatgaacggccgccaaaacatgatcgttctgaactggcttggtctttatttttagctaaactgttgtataaagcacaatggtatggcaaagaactcatttgtattgagtcagaggagatcgaaacagagttgtctttttctgaaagtacagaaaattcagagtatcttagaagccaaaaaatcttagaacgtggcttgtctaaacgagaaaccttataaatagaagaactgtagggactacagggatcgcctaggggatagaaaatgtacaccatgtgttgaaccatttgtttctaggaagtcacattgggacagtccac

SEQ ID NO: 995 - RNA, 1172 nt, synthetic construct
  source 1..1172: mol_type = other RNA
atgaaggctctgaaagcttataaatacagactttatccaacctcaaaacaagaagagtttattcaaaaaacattttcttgtgttcgcttggtgtataatttaatgttacaagaccggattgatatctacaaagagatgcgaaaaaatcctcaacaaacgtttaaaatgccaacgccagctaaatataagaaacaataccctgtcctcagagaagttgatagtttagccttggcaaatgcacaagtttatttggatcgagcctttaaaaatttttatcgggaaaaagggatgggctttccaaaaaagaaaaagaaagaaacggtgcattcctacactacaaacaatcaacatggcacggtcaaaattttggataatcgttatttgaaagtacctaaattgaaatctttaattaaaatgaaggtacaccgccaaccgctgggggagataaaatctgtaactatttctatgagtgcgagtcacaattattatgtttccattttgtgtgaagcgccgattgaaacgaaaacaaagcaacaaaaaatggtgggaatttgtagcagtagggaaaaatttgcgctgctttcgaatggtgaaagcttcgaaaaaagctattgttcaaagcatttaaagcaaaaactacgtcaagaagaacgaaaattaaacaagcgtaaaatgattgctttggaaaaaggtgtcgatctttcgcaagcaaaaaattatcaaaaacaaaaaataaaagtcgcaaaaattcgcgaaaaaatagccaaccaacgaatggatattttaaacaaaattacaacggaattggtttcaagttacgatgttatttgtattgaaaaagcccatcacagtaatgaacggccgccaaaacatgatcgttctgaactggcttggtctttatttttagctaaactgttgtataaagcacaatggtatggcaaagaactcatttgtattgagtcagaggagatagaaacagagttgtctttttctgaaagtacagaaaattcagagtatcttagaagccaaaaaatcttagaacgtggcttgtctaaacgagaaaccttataaatagaagaactgtagggactacagggatcgcctaggggatagaaaatgtacaccatgtgttgaaccatttgtttctaggaagtcacattgggacagtccac

SEQ ID NO: 996 - RNA, 1172 nt, synthetic construct; identical to SEQ ID NO: 995
  source 1..1172: mol_type = other RNA

SEQ ID NO: 997 - RNA, 1172 nt, synthetic construct
  source 1..1172: mol_type = other RNA
atgaaggctctgaaagcttataaatacagactttatccaacctcaaaacaagaagagtttattcaaaaaacattttcttgtgttcgcttggtgtataatttaatgttacaagaccggattgatatctacaaagagatgcgaaaaaatcctcaacaaacgtttaaaatgccaacgccagctaaatataagaaacaataccctgtcctcagagaagttgatagtttagccttggcaaatgcacaagtttatttggatcgagcctttaaaaatttttatcgggaaaaagggatgggctttccaaaaaagaaaaagaaagaaacggtgcattcctacactacgaacaatcaacatggcacggtcaaaattttggataatcgttatttgaaagtacctaaattgaaatctttaattaaaatgaaggtacatcgccaaccgctgggggagataaaatctgtaactatttctatgagtgcgagtcacaattattatgtttccattttgtgtgaagcgccgattgaaacgaaaacaaagcaacaaaaaatggtgggaatttgtagcagtagggaaaaatttgcgctgctttcgaatggtgaaagcttcgaaaaaagctattgttcaaagcatttaaagcaaaaactacgtcaagaagaacgaaaattaaacaagcgtaaaatgattgctttagaaaaaggtgttgatctttcgcaagcaaaaaattatcaaaaacaaaaaataaaagtcgcaaaaattcgcgaaaaaatagccaaccaacgaacggatattttaaacaaaattacaacggaattggtttcaaattacgatgttatttgtattgaaaaagcccatcacagtaatgagcggccgccaaaacatgatcgttctgaactggcttggtctttatttttagctaaactgttgtataaagcacaatggtatggcaaagaactcatttgtattgagtcagaggagatagaaacagagttgtctttttctgaaagtacagaaaattcagagtatcttagaagccaaaaaatcttagaacgtggcttgtctaaacgagaaaccttataaatagaagaactgtagggactacagggatcgcctaggggatagaaaatgtacaccatgtgttgaaccatttgtttctaggaagtcacattgggacagtccac

SEQ ID NO: 998 - RNA, 1172 nt, synthetic construct
  source 1..1172: mol_type = other RNA
atgaaggctctgaaagcttataaatacagactttatccaacctcaaaacaagaagagtttattcaaaaaacattttcttgtgttcgcttggtgtataatttaatgttacaagaccggattgatatctacaaagagatgcgaaaaaatcctcaacaaacgtttaaaatgccaacgccagctaaatataagaaacaataccctgtcctcagagaagttgatagtttagccttggcaaatgcacaagtttatttggatcgagcctttaaaaatttttatcgggaaaaagggatgggctttccaaaaaagaaaaagaaagaaacggtgcattcctacactacgaacaatcaacatggcacggtcaaaattttggataatcgttatttgaaagtacctaaattgaaatctttaattaaaatgaaggtacatcgccaaccgctgggggagataaaatctgtaactatttctatgagtgcgagtcacaattattatgtttccattttgtgtgaagcgccgattgaaacgaaaacaaagcaacaaaaaatggtgggaatttgtagcagtagggaaaaatttgcgctgctttcgaatggtgaaagcttcgaaaaaagctattgttcaaagcatttaaagcaaaaactacgtcaagaagaacgaaaattaaacaagcgtaaaatgattgctttagaaaaaggtgttgatctttcgcaagcaaaaaattatcaaaaacaaaaaataaaagtcgcaaaaattcgcgaaaaaatagccaaccaacgaacggatattttaaacaaaattacaacggaattggtttcaaattacgatgttatttgtattgaaaaagcccatcacagtaatgagcggccgccaaaacatgatcgttctgaactggcttggtctttatttttagctaaactgttgtataaagcacaatggtatggcaaagaactcatttgtattgagtcagaggagatcgaaacagagttgtctttttctgaaagtacagaaaattcagagtatcttagaagccaaaaaatcttagaacgtggcttgtctaaacgagaaaccttataaatagaagaactgtagggactacagggatcgcctaggggatagaaaatgtacaccatgtgttgaaccatttgtttctaggaagtcacattgggacagtccac

SEQ ID NO: 999 - RNA, 1075 nt, synthetic construct; identical to SEQ ID NO: 785
  source 1..1075: mol_type = other RNA

SEQ ID NO: 1000 - RNA, 1301 nt, synthetic construct
  source 1..1301: mol_type = other RNA
atggaacaactaaaagcatacaaattcagaatctatccaacagaggaacaagaaatcttctttgccaaatcttttggttgtgtccgtaaggtctacaatctaatgcttgatgaccgaaaaaaggcgtatgaagaagttaaaaatgattcttctaaaaaaatgacttttccgacaccagctaaatacaagaaagaatttccgtttttgaaagaaattgatagccttgctttagccaatgcccaacttaatttagataaagcatacaagaatttttttcgggataaatccgttggatttccacgtttcaaaagtaagaaaaatcctgttcagagttatacaacgaataatcaaaatggtacaattgctttgattgatagtaaattcataaaagttcctaaattgaaatcattaataagaattaagcttcatagacaaccaaaagggatgattaaatctgctacaatctcacggcattctagcggtaaatactatatttctttgttatgtaaagaagaaattagcgagttacctaaaaccaattctgccattggtattgacttaggtattacagactttgcgattctttcagatggacaaaaaattgataataataaattcacgtccaaaatggaaaagaaattaaaacgtgaacaacgtaagttgtcaagacgagcattattagccaaacaaaaaggtatcaatctatttgaagctaaaaattaccaaaaacaaaaacgcaaagtagctagattacatgaaaaagtaatgaatcaacgtactgattttctgaataagttaagtacagaaattatcaaaaatcacgatattatctgtattgaagacttaaacgtaaaaggtatgttgcgaaatcataaattagctaaaagtatttctgatgtttcttggtcaaagtttgtgactaaattacaatacaaggctgactggtatggacgaaaaatcatcaaagtagataaatgatttccgtctagtcagatttgttcagagtgcggacataaagatggcaagaaatcgctcgatattcgagaatggacttgtcctgtttgtcatactcatcatgaccgtgatatcaacgctagtatcaatatactgatcgaaggtctaagaatacaaacttcagcttaggcacaatcaaaaaaccgtaggaactacggggatagcttggtaaataagagaaaccgctgttagtgaagaaataagctatcaagtatgctctattcccaagaagctcccacttcaagcgttaagaaccgttaggtttagctaagtggtgagtagttcac

SEQ ID NO: 1001 - RNA, 1078 nt, synthetic construct
  source 1..1078: mol_type = other RNA
ctgggtgttttaaaagcatacaaatttcggatctatcctaatggacagcaaaaacagtttttcatcgaaaccttcggctgtgtacgttttacgtacaatcaactgctggaggcaaagatggaggagctggccaacaatgaagcaaagcaagggttgacgccagccaaactaaaaaaggagtatccttttttgaaggagaccgatagtttggcattggcgaatgcacaacggaatctggaccgagcgtttcgaaattactttcaaaagcgggctggctttccaaaaatgaaaaccaaaaaaagtatctggcaatcgtataccaccaataatcagcagcacaccatttattttgaagacgatcaaatcaagctgccaaagcttaaaacattggttcccgtaaaaaagcatcgggcgatcaaagggaagatcaaatcggcaacgatctcagcaaaaaacaacgaagagttttacatctcgatcctttgtttggaagagatcccgccattgccgaagcagcaagcctctgtcgctgttgtttatgatccgcagcagttggtcaaagccaaccagccggtacccatcacctgtgaacatgccatccaaacgaagcaaaagctgacgcgagcagaacgcaaacttcaggtgaaagcgacggcggtcaaacggaaaaaaatccttttgacccaggcgcgaaattatcagaagctaaaaggaaaggtcgctcgcctttatcgttttcactgctgtcaaaagcgggaattcatcgatcaagtcagctaccatctcgtaaaacagtacgatacgatctatttggaacaaatcgcagaagatacggttttaaaagctggtcattacagcatcagtgattggcatcaattcgttcgcaaaatccagtacaaagcgcagtggtacggcaaagaactgcggtttgtcacgttggatacgcaggaccaacagaagctagaacggctctcaggcgaaatgagcagctgagccgcttgaactggaaggaacgccagggatcgcctagggtatagaaaaaatctttctgatttttgtttctaggaaccacgttcac

SEQ ID NO: 1002 - RNA, 1078 nt, synthetic construct
  source 1..1078: mol_type = other RNA
ctgggtgttttaaaagcatacaaatttcggatctatcctaatggacagcaaaaacagtttttcatcgaaaccttcggctgtgtgcgttttacgtacaatcaactgctggaggcaaagatggaggagctggccaacaatgaagcaaagcaagggttgacgccagccaaactaaaaaaggagtatccttttttgaaggagaccgatagtttggcattggcaaatgcacaacggaatctggaccgagcgtttcgaaattactttcaaaagcgggctggctttccaaaaatgaaaaccaaaaaaagtatctggcaatcgtataccaccaataatcagcagcacaccatttattttgaagacgatcaaatcaagctgccaaagcttaaaacattggttcccgtaaaaaagcatcgggcgatcaaagggaagatcaaatcggcaacgatctcagcaaaaaacaacgaagagttttacatctcgatcctttgtttggaagagatcccgccattgccgaagcagcaagcctctgtcgctgttgtttatgatccgcagcagttggtcaaagccaaccagccagtccccatcacctgtgaacatgctatccaaacgaagcaaaagctgacgcgagcagaacgcaaacttcaggtgaaagctacggcggtcaaacggaaaaaaatccttttgactcaggcgcgaaattatcagaagctaaaaggaaaggtcgctcgcctttatcgttttcactgctgtcaaaagcgggaattcatcgatcaagtcagctaccatctcgtaaaacagtacgatacgatctatttggaacaaatcgctgaagatacggttttaaaagctggtcattacagcatcagtgattggcatcaattcgttcgcaaaatccagtacaaagcgcagtggtacggcaaagaactgcgttttgtcacgttggatacgcaagaccaacagaagctagaacggctctcaggcgaaatgagcagctgagccgcttgaactggaaggaacgccagggatcgcctagggtatagaaaaaatctttctgatttttgtttctaggaaccacgttcac

SEQ ID NO: 1003 - RNA, 1172 nt, synthetic construct
  source 1..1172: mol_type = other RNA
atgaaggctctgaaagcttataaatacagactttatccaacctcaaaacaagaagagtttattcaaaaaacattttcttgtgttcgcttggtgtataatttaatgttacaagaccggattgatatctacaaagagatgcgaaaaaatcctcaacaaacgtttaaaatgccaacgccagctaaatataagaaacaataccctgtcctcagagaagttgatagtttagccttggcaaatgcacaagtttatttggatcgagcctttaaaaatttttatcgggaaaaagggatgggctttccaaaaaagaaaaagaaagaaacggtgcattcctacactacgaacaatcaacatggcacggtcaaaattttggataatcgttatttgaaagtacctaaattgaaatctttaattaaaatgaaggtacaccgccaaccgctgggggagataaaatctgtaactatttctatgagtgcgagtcacaattattatgtttccattttatgtgaagcgccgattgaaacgaaaacaaagcaacaaaaaatggtgggaatttgtagcagtagggaaaaatttgcgctgctttcgaatggtgaaagcttcgaaaaaagctattgttcaaagcatttaaagcaaaaactacgtcaagaagaacgaaaattaaacaagcgtaaaatgattgttttagaaaaaggtgtcgatctttcacaagcaaaaaattatcaaaaacaaaaaataaaagtcgcaaaaattcgcgaaaaaatagccaaccaacgaacggatattttaaacaaaattacaacggaattggtttcaagttacgatgttatttgtattgaaaaagcccatcacagtaatgagcggccgccaaaacatgatcgttctgaactggcttggtctttatttttagctaaattgttgtataaagcacaatggtatggcaaagaactcatttgtattgagtcagaggagatcgaaacagagttgtctttttctgaaagtacagaaaattcagagtatcttagaagccaaaaaatcttagaacgtggcttgtctaaacgagaaaccttataaatagaagaactgtagggactacagggatcgcctaggggatagaaaatgtacaccatgtgttgaaccatttgtttctaggaagtcacattgggacagtccac

SEQ ID NO: 1004 - RNA, 1172 nt, synthetic construct
  source 1..1172: mol_type = other RNA
atgaaggctctgaaagcttataaatacagactttatccaacctcaaaacaagaagagtttattcaaaaaacattttcttgtgttcgcttggtgtataatttaatgttacaagaccggattgatatctacaaagagatgcgaaaaaatcctcaacaaacgtttaaaatgccaacgccagctaaatataagaaacaataccctgtcctcagagaagttgatagtttagccttggcaaatgcacaagtttatttggatcgagcctttaaaaatttttatcgggaaaaagggatgggctttccaaaaaagaaaaagaaagaaacggtgcattcctacactacgaacaatcaacatgggacggtcaaaattttggataatcgttatttgaaagtacctaaattgaaatctttaattaaaatgaaggtacaccgccaaccgctgggggagataaaatctgtaactatttctatgagtgcgagtcacaattattatgtttccattttatgtgaagcgccgattgaaacgaaaacaaagcaacaaaaaatggtgggaatttgtagcagtagggaaaaatttgcgctgctttcgaatggtgaaagcttcgaaaaaagctattgttcaaagcatttaaagcaaaaactacgtcaagaagaacgaaaattaaacaagcgtaaaatgattgttttagaaaaaggtgtcgatctttcacaagcaaaaaattatcaaaaacaaaaaataaaagtcgcaaaaattcgcgaaaaaatagccaaccaacgaacggatattttaaacaaaattacaacggaattggtttcaagttacgatgttatttgtattgaaaaagcccatcacagtaatgagcggccgccaaaacatgatcgttctgaactggcttggtctttatttttagctaaattgttgtataaagcacaatggtatggcaaagaactcatttgtattgagtcagaggagatcgaaacagagttgtctttttctgaaagtacagaaaattcagagtatcttagaagccaaaaaatcttagaacgtggcttgtctaaacgagaaaccttataaatagaagaactgtagggactacagggatcgcctaggggatagaaaatgtacaccatgtgttgaaccatttgtttctaggaagtcacattgggacagtccac

SEQ ID NO: 1005 - RNA, 1111 nt, synthetic construct
  source 1..1111: mol_type = other RNA
atgctaaaagcttttaaattccgtatgtatccgacagaagaacaaaaacagcaattgattcgtacttttggatgtgctcgatttacctataaccatttgctgaaaaagcggcagaaaagttggcaacaaacaggagtagccaatttttcgctcacacccgctacattaaaaaaagaatacccattcttaaaagaagtagacagtcttgctttagcaaatgcacagcttaatttggatcgggcttttcgcaattatttcaagggacgtgccagcttcccaaagcttaaaacgaaaaaaagtatgtggcaatcttatacgaccaacaaccaaacccgtacgatctatatggaaaatggctacttaaagttaccaaaacaaaaagaactaatcaagataaatcagcatcggccagttgaaggatcgattcgctccgctacgatttctgctcgatataatgaagaattttatgtcgcactactttgtgatgtttcgccagtaaaaaaagaatctttagctaaatggatcgggatcgcctatcatccgaagacattgatccaaacatctcgacctctagaagtaactttaccaaaatttcaccagacagaagaaaagctgcaacatgcacagcggaaattgaatgtgaaagtccgctccgctcactatagaaagatcaggttagatcaggcaagcaattatcagaaacaaaagagaaaagtaatggatctttatctgaaacaaaagaaccagcgagaagattatcttgaacaattatctgggaaattggtcaaacaatatgactacttatttgtagaatcttttccaaaagaagaggcacatgctgatttttctattcacgactggcataaattaataacaaaattgcgttataagtcccaatggtataataaaaaatttcttttgatcaataccgacggagcagaagaaagcaattccgtaagaaagagccaagtagtagaaaaaatgggcagacattcggttatcaagggataaaaaatgaatgaaactgataggagcgttagggttagccttgttaataaaaagtcttaatgacttttgtttctaggaatttttcttttgaagaaaagctcac

SEQ ID NO: 1006 - RNA, 1172 nt, synthetic construct
  source 1..1172: mol_type = other RNA
atgaaggctctgaaagcttataaatacagactttatccaacctcaaaacaaaaagagtttattcaaaaaacattttcttgtgttcgcttggtgtataatttaatgttacaagaccggattgatatctacaaagagatgcgaaaaaatcctcaacaaacgtttaaaatgccaacgccagctaaatataagaaacaataccctgtcctcagagaagttgatagtttagccttggcaaatgcacaagtttatttggatcgagcctttaaaaatttttatcgggaaaaagggatgggctttccaaaaaagaaaaagaaagaaacggtgcattcctacactacgaacaatcaacatggcacggtcaaaattttggataatcgttatttgaaagtacctaaattgaaatctttaattaaaatgaaggtacaccgccaaccgctgggggagataaaatctgtaactatttctatgagtgcgagtcacaattattatgtttccattttgtgtgaagcgccgattgaaacgaaaacaaagcaacaaaaaatggtgggaatttgtagcagtagggaaaaatttgcgctgctttcgaatggtgaaagcttcgaaaaaagctattgttcaaagcatttaaagcaaaaactacgtcaagaagaacgaaaattaaacaagcgtaaaatgattgctttggaaaaaggtgtcgatctttcacaagcaaaaaattatcaaaaacaaaaaataaaagtcgcaaaaattcgcgaaaaaatagccaaccaacgaacggatattttaaacaaaattacaacggaattggtttcaagttacgatgttatttgtattgaaaaagcccatcacagtaatgagcggccgccaaaacatgatcgttctgaactggcttggtctttatttttagctaaattgttgtataaagcacaatggtatggcaaagaactcatttgtattgagtcagaggagatcgaaacagagttgtctttttctgaaagtacagaaaattcagagtatcttagaagccaaaaaatcttagaacgtggcttgtctaaacgagaaaccttataaatagaagaactgtagggactacagggatcgcctaggggatagaaaatgtacaccatgtgttgaaccatttgtttctaggaagtcacattgggacagtccac

SEQ ID NO: 1007 - RNA, 1242 nt, synthetic construct
  source 1..1242: mol_type = other RNA
atgaaggtattaaaggcgtataaatacagactttaccctacttcattgcaagaggagttcattaaaaaaactttttcttgtgtacggcttgtgtataaccttttattacaggagagaattcagctgtataaagaactgaaagaaaatccagatttaaaagtaaaaatgccaacaccagctcaatataaaaaagagtatccttgtttaaaggaagtggatagtttagcattggcaaatgcacaggtttacttggatcgagcgttcaaaaaatttcatagagaaaaagcagttggttttcctaagctaaagcaaaagaaaaacgctgtttgctcctacacaacgaataatcaaaatggtacaattaaaatcattgatgagaagtatttaaaagtgcctaagctaaaatcgttgatgaaaatgaagatgcatcgtccagtaatagggaaaataaagtcagcgacaatttctttgactcccagcaataagtatttcgtttcaatcttgtgtgaagaagaaattccggcagttgagaagacgcattttgcaatcgggatcacattaggcgcttctgaatttgctgtattatcaaatggcagacgttttgacaatgataaatatacaaaggaatttgaacggcggatcacgagagaagaaagaaaactgaggcgacgtaaagaaattgcaaaaataaaaggaacagatctttctcagcaaaaaaactaccagaaacaaaaagtgaaagttgtaaaaatgcgggaaaagttgatgaatcaacgaattgattttctaaataaaatcacgacagaaatcgttagaaagtatgacttgatttgtatagaagatattcatcaagcagatttttatagaaataataaactacatcgaggcgttacggatgtttcttgggccttgtttgtttcaaagttagaatataaagcatcgtggtataacaaaagattgattaaggtttccgtgtgccacaaatgttctgaacattcagataatacccggataagtaaactattttttcatgagataaacgaaaaaaagggcaggcaagatccagaaacagcggccagtattcaggtactgacacagggattaaaagaagcaactgtcaatgactaagtaaaaaaaactgtagggactacagggttagcctagggcatataagatagatatagcgtttagtcgatcatttgtctttttctaggaaatttctagttaatagaaatagttcac

SEQ ID NO: 1008 - RNA, 1242 nt, synthetic construct
  source 1..1242: mol_type = other RNA
atgaaggtattaaaggcgtataaatacagactttaccctacttcattgcaagaggagttcattaaaaaaactttttcttgtgtacggcttgtgtataaccttttattacaggagagaattcagctgtataaagaactgaaagaaaatccagatttaaaagtaaaaatgccaacaccagctcaatataaaaaagagtatccttgtttaaaggaagtggatagtttagcattggcaaatgcacaggtttacttggatcgagcgttcaaaaaatttcatagagaaaaagcagttggttttcctaagctaaagcaaaagaaaaacgctgtttgctcctacacaacgaataatcaaaatggtacaattaaaatcattgatgagaagtatttaaaagtgcctaagctaaaatcgttgatgaaaatgaagatgcatcgtccagtaatagggaaaataaagtcagcgacaatttctttgactcccagcaataagtatttcgtttcaatcttgtgtgaagaagaaattccggcagttgagaagacgcattttgcaatcgggatcacattaggcgcttctgaatttgctgtattatcaaatggcagacgttttgacaatgataaatatacaaaggaatttgaacggcggatcacgagagaagaaagaaaactgaggcgacgtaaagaaattgcaaaaataaaaggaacagatctttctcagcaaaaaaactaccagaaacaaaaagtgaaagttgtaaaaatgcgggaaaagttgatgaatcaacgaattgattttctaaataaaatcacgacagaaatcgttagaaagtatgacttgatttgtatagaagatattcatcaagcagatttttatagaaataataaactacatcgaggcgttacggatgtttcttgggccttgtttgtttcaaagttagaatataaagcatcgtggtataacaaaagattgattaaggtttccgtgtgccacaaatgttctgaacattcagataatacccggataagtaaactattttttcatgagataaacgaaaaaaagggcaggcaagatccagaaacagctgccagtattcaggtactgacacagggattaaaagaagcaactgtcaatgactaagtaaaaaaaactgtagggactacagggttagcctagggcatataagatagatatagcgtttagtcgatcatttgtctttttctaggaaatttctagttaatagaaatagttcac

SEQ ID NO: 1009 - RNA, 1172 nt, synthetic construct
  source 1..1172: mol_type = other RNA
atgaaggctctgaaagcttataaatacagactttatccaacctcaaaacaagaagagtttattcaaaaaacattttcttgtgttcgcttggtgtataatttaatgttacaagaccggattgatatctacaaagagatgcgaaaaaatcctcaacaaacgtttaaaatgccaacgccagctaaatataagaaacattaccctgtcctcagagaagttgatagtttagccttggcaaatgcacaagtttatttggatcgagcctttaaaaatttttatcgggaaaaagggatgggctttccaaaaaagaaaaagaaagaaaccgtgcattcctacactacgaacaatcaacatggcacggtcaaaattttggataatcgttatttgaaagtacctaaattgaaatctttaattaaaatgaaggtacaccgccaaccgctgggggagataaaatctgtaactatttctatgagtgcgagtcacaattattatgtttccattttgtgtgaagcgccgattgaaacgaaaacaaagcaacaaaaaatggtgggaatttgtagcagtagggaaaaatttgcgctgctttcgaatggtgaaagcttcgaaaaaagctattgttcaaagcatttaaagcaaaaactacgtcaagaagaacgaaaattaaacaagcgtaaaatgattgctttagaaaaaggtgtcgatctttcgcaagcaaaaaattatcaaaaacaaaaaataaaagtcgcaaaaattcgcgaaaaaatagccaaccaacgaacggatattttaaacaaaattacaacggaattggtttcaagttacgatgttatttgtattgaaaaagcccatcacagtaatgagcggccgccaaaacatgatcgttctgaactggcttggtctttatttttagctaaactgttgtataaagcacaatggtatggcaaagaactcatttgtattgagtcagaggagatcgaaacagagttgtctttttctgaaagtacagaaaattcagagtatcttagaagccaaaaaatcttagaacgtggcttgtctaaacgagaaaccttataaatagaagaactgtagggactacagggatcgcctaggggatagaaaatgtacaccatgtgttgaaccatttgtttctaggaagtcacattgggacagtccac

SEQ ID NO: 1010 - RNA, 1172 nt, synthetic construct
  source 1..1172: mol_type = other RNA
atgaaggctctgaaagcttataaatacagactttatccaacctcaaaacaagaagagtttattcaaaaaacattttcttgtgttcgcttggtgtataatttaatgttacaagaccggattgatatctacaaagagatgcgaaaaaatcctcaacaaacgtttaaaatgccaacgccagctaaatataagaaacattaccctgtcctcagagaagttgatagtttagccttggcaaatgcacaagtttatttggatcgagcctttaaaaatttttatcgggaaaaagggatgggctttccaaaaaagaaaaagaaagaaacggtgcattcctacactacgaacaatcaacatggcacggtcaaaattttggataatcgttatttgaaagtacctaaattgaaatctttaattaaaatgaaggtacaccgccaaccgctgggggagataaaatctgtaactatttctatgagtgcgagtcacaattattatgtttccattttgtgtgaagcgccgattgaaacgaaaacaaagcaacaaaaaatggtgggaatttgtagcagtagggaaaaatttgcgctgctttcgaatggtgaaagcttcgaaaaaagctattgttcaaagcatttaaagcaaaaactacgtcaagaagaacgaaaattaaacaagcgtaaaatgattgctttagaaaaaggtgtcgatctttcgcaagcaaaaaattatcaaaaacaaaaaataaaagtcgcaaaaattcgcgaaaaaatagccaaccaacggacggatattttaaacaaaattacaacggaattggtttcaagttacgatgttatttgtattgaaaaagcccatcacagtaatgagcggccgccaaaacatgatcgttctgaactagcttggtctttatttttagctaaactgttgtataaagcacaatggtatggcaaagaactcatttgtattgagtcagaggagatcgaaacagagttgtctttttctgaaagtacagaaaattcagagtatcttagaagccaaaaaatcttagaacgtggcttgtctaaacgagaaaccttataaatagaagaactgtagggactacagggatcgcctaggggatagaaaatgtacaccatgtgttgaaccatttgtttctaggaagtcacattgggacagtccac

SEQ ID NO: 1011 - RNA, 1172 nt, synthetic construct
  source 1..1172: mol_type = other RNA
atgaaggctctgaaagcttataaatacagactttatccaacctcaaaacaagaacagtttattcaaaaaacattttcttgtgttcgcttggtgtataatttaatgttacaagagcggattgatatctacaaagagatgcgaaaaaatcctcaacaaacgtttaaaatgccaacgccagctaaatataagaaacaataccctgtcctcagagaagttgatagtttagccttggcaaatgcacaagtttatttggatcgagcctttaaaaatttttatcgggaaaaagggatgggctttccaaaaaagaaaaagaaagaaacggtgcattcctacactacgaacaatcaacatggcacggtcaaaattttggataatcgttatttgaaagtacctaaattgaaatctttaattaaaatgaaggtacaccgccaaccgctgggggagataaaatctgtaactatttctatgagtgcgagtcacaattattatgtttccattttgtgtgaagcgccgattgaaacgaaaacaaagcaacaaaaaatggtgggaatttgtagcagtagggaaaaatttgcgctgctttcgaatggtgaaagcttcgaaaaaagctattgttcaaagcatttaaagcaaaaactacgtcaagaagaacgaaaattaaacaagcgtaaaatgattgctttggaaaaaggtgtcgatctttcacaagcaaaaaattatcaaaaacaaaaaataaaagtcgcaaaaattcgcgaaaaaatagccaaccaacgaacggatattttaaacaaaattacaacggaattggtttcaagttacgatgttatttgtattgaaaaagcccatcacagtaatgagcggccgccaaaacatgatcgttctgaactggcttggtctttatttttagctaaactgttgtataaagcacaatggtatggcaaagaactcatttgtattgagtcagaggagatagaaacagagttgtctttttctgaaagtacagaaaattcagagtatcttagaagccaaaaaatcttagaacgtggcttgtctaaacgagaaaccttataaatagaagaactgtagggactacagggatcgcctaggggatagaaaatgtacaccatgtgttgaaccatttgtttctaggaagtcacattgggacagtccac

SEQ ID NO: 1012 - RNA, 1086 nt, synthetic construct
  source 1..1086: mol_type = other RNA
gtgaaagtattaaaagcttataaatttcgtatttatccaaatgaagaacaaatacaatattttatacagactttcggttgtgtacgttttacttataatcagttgttgtatgcccgaaaaaaagccctacaagcaggagattatgtgacacgactgactcctgctcaattaaaaaaagactatccgtttttaaaacaaacggatagtctagctttagctaatgctcagcgtaatttagatcgagcgtttaaaaattattttagtaaaagagcgggctatcctaaatggaagtcgaaaaaaagtcattggcaatcttataccacaaataatcaaaaacatacaatttattttattggggaagaattaaagttacctaaacttaagtctttagtaaaagccaatttgcatagagaaattttgggcgaaataaagtcagcgacgatttcagctaaaaacaatcaattgttttttgtttcaattctgtgtttagaaaacgtgatgtctttacccaaaacgggtgagtctataggagttgcttattgttctgaaaacttagttcaaatgtcatctacgaatgtttttcttagtcgtaaaagtaattcttactatcagttgaaaacagctaagaaaagattggaacttcgagcaaagttagcaaaaaaaagaaaagtgttgttgagtcaggccaaaaattatcaaaagcaaaaaaggaaagtccagaaattgtatatgataattgataaccaaaaaaacgattatattaaccaattaacttatttcttagtgaaaaactatgattatatctatttggaaaagcatccgaaattcagtgaaaatgcaaaattttcggaaactgattggcaacatcttttaaggaaaatacagtataaagtaagttggtataataagcagctggcatttgttgcccctgacacaaaagaaagtgaagagaagtgctttactattgagcaattgggcagacagctaactactagttaaaattattaggaactggaaggagcgccagggatcgcctagggtatagaaaaaatctttatgatttttgtttctaggaatattgctcac

SEQ ID NO: 1013 - RNA, 1243 nt, synthetic construct
  source 1..1243: mol_type = other RNA
atgaaggtattaaaggcgtataaatatagactttaccctacttcattacaagaagagtttatcaaaaaaacattttcttgtgtcagacttgtgcataatcttttattacaggaaagaattcaactgtataaacaattgaaagaaaaccctgatctaaacgttaaactaccgacacctgctcaatacaaaaaagagcatccttgtttaagggaagtggacagtttggccttatcaaatgcgcaggtatacttagatcgagcatttaaaaaatttcatcgagaaaaatcagtaggctttcccaagttaaaacaaaaaaagaatgctgttaactcttatacaacaaataatcaaaatggtacagtgaaaattattgatggaaaatatttgaaggtacctaaattaaaatcgttgataaaaatgaaaatgcatcggccggtaatagggaaaataaagtcagcaacgatttctttaactcccagcaataaatatttcgtttcaatcttgtgtgaagaagaaattccaactgttgaaaaaacacattcggctatcgggataactttaggtgtttcagaatttgcggtattatcaaatggcagacgcattgataatgataaatacacaaaagagtttgaacaacggatcacgagagaagaaagaaagttgatgcggcgtaaggaaattgcgaaatctaaaggaacagaactctcccaacagaaaaactatcagaaacaaaaattaaaaatagtaaaaatgcgggaaaaattaatgaatcagcgcattgattttctgaataaaatcacgacagaaattgttagaaagtatgatttgatttgtatcgaagatattcagcaagccgatttttatagaaataataagttgcatcgaggagttacagatgtttcgtgggcattatttgtctcgaagttagaatataaagcatcttggtataacaaacggctgatcaaagtttctgcatgcggaaaatgttctgaacattcagataataaagaactaagtcaaatattttttcaagatattaatacgaaaaaaagtaaaaatgatccagaaacagccgctagtgttcaagtcttgattcgaggcttacaagaagttgtgcaatagtcactggagataaagaactgtagggactacagggatagcctagggtatataagatagatatagcgtttattcgatcatttatctttttctaggaaatttctagcgaatagagatagttcac

SEQ ID NO: 1014 - RNA, 1243 nt, synthetic construct
  source 1..1243: mol_type = other RNA
atgaaggtattaaaggcgtataaatatagactttaccctacttcattacaagaagagtttatcaaaaaaacattttcttgtgtcagacttgtgcataatcttttattacaggaaagaattcaactgtataaacaattgaaagaaaaccctgatctaaacgttaaactaccgacacctgctcaatacaaaaaagagcatccttgtttaagggaagtggacagtttggccttatcaaatgcgcaggtatacttagatcgagcatttaaaaaatttcatcgagaaaaatcagtaggctttcccaagttaaaacaaaaaaagaatgctgttaactcttatacaacaaataatcaaaatggtacagtgaaaattattgatggaaaatatttgaaggtacctaaattaaaatcgttgataaaaatgaaaatgcatcggccggtaatagggaaaataaagtcagcaacgatttctttaactcccagcaataaatatttcgtttcaatcttgtgtgaagaagaaattccaactgttgaaaaaacacattcggctatcgggataactttaggtgtttcagaatttgcggtattatcaaatggcagacgcattgataatgataaatacacaaaagagtttgaacaacggatcacgagagaagaaagaaagttgatgcggcgtaaggaaattgcgaaatctaaaggaacagaactttcccaacagaaaaactatcagaaacaaaaattaaaaatagtaaaaatgcgggaaaaattaatgaatcagcgcatcgattttctgaataaaatcacgacagaaattgttagaaagtatgatttgatttgtatcgaagatattcagcaagccgatttttatagaaataataagttgcatcgaggagttacagatgtttcgtgggcattatttgtctcgaagttagaatataaagcatcttggtataacaaacggctgatcaaagtttctgcatgcggaaaatgttctgaacattcagataataaagaactaagtcaaatattttttcaagatattaatacgaaaaaaagtaaaaatgatccagaaacagccgctagtgttcaagtcttgattcgaggcttacaagaagttgtgcaatagtcactggagataaagaactgtagggactacagggatagcctagggtatataagatagatatagcgtttattcgatcatttatctttttctaggaaatttctagcgaatagagatagttcac

SEQ ID NO: 1015 - RNA, 1241 nt, synthetic construct
  source 1..1241: mol_type = other RNA
atgaaggtattaaaggcgtataaatacagactttaccctactctgctgcaagaagaattcataaaaaaaacgttctcttgtgttcgacttgtacataatcttttattacaggaaagaattcaactttataaggaactgaaaaataatcctgatttaaaagtgaagttgccaacaccggctcaatataaaaaagagcatccttgtttaaaggaagtggatagtttggcattatcaaatgcgcaggtttacttggaccgtgctttcaaaaaatttcatagagaaaaaacggtgggttttcctaggttaaaacaaaagaaaaacgctgtcacatcttacacaacgaataatcaaaatgggacaattaaaattattgacgaaaaatatttaaaagtacctaaactgaaatcgttgattaaaatgaaattgcatcgtccggtaatagggaaaataaagtcagcaacaatttctttgaccccgagtaataagtattttgtttcgattctttgtgaagaggagattcctaaagttgaaaagacatattcagcaatcgggataacattaggagcttcggaatttgctgtattatcaaatggtaaacgtatcgataatgataaatttacaaaagaatttgaacagcgaatcactagagaggaaagaaaattaacacgtcgaaaagaaattgctaaatcaaaaaacacagaattgtcacagcaaaaaaattatcagaagcaaaaactgaaagttgcaaaaatgcgggaaaagttaatgaatcaacgaatcgattttctgaataaaatcacgacagaaattgttagacaatatgatttgatttgtatagaagatattcatcaagcagactttttcagaaattcaaaattgcatcgaggggtttcagatgtttcttgggcactatttgtatcaaaacttgaatataaagcagcatggtataagaaaagattgatcaaagtttcagcatgcggaaaatgttcggaacattcagataatagtttggtgagccaaatattcactcaagatatcaatgagaaaaaagggcagcatgatcctgagactgctgctagtattcaagtcttgatacaaggattgaaagatacaaaagccaattaaaaaatgaagaactgtagggactacagggatagcctagggtatataagatagatatagcgtttagtcgatcatttatctttttctaggaaatttctagttaaatagaaatagttcac

SEQ ID NO: 1016 - RNA, 1230 nt, synthetic construct
  source 1..1230: mol_type = other RNA
atgaaggttttaaaggcttataagtatcggctttatcctactttagctcaggaggagtttattaaaaagactttttcttgtgtacgctttgtgtataatttgttgttgcaggatcggatttctctttataaagcacttaaagaaaatccaagtctgaccgtcaaattaccgacgcctgctcattataaaaaagagcatccttttttaaaggaagttgatagtttggctttagcaaatgcacaggtttatctggatcgagcatttaaaaaatttcatcgagaaaaatcggtgggttttcctaaattaaaacaaaaaaaagattctgtttcttcttatacaacgaacaatcagaatggcacgatcaaaatcattgatgacaagtatgtaaaagtacctaagctaaagtccgtagtgaaagtaaaaatgcatcgtccgttaaaagggaaaataaagtcagcaacaatttcgctaacacctagtcataagtatttcatttcgatcctttgtgaggaagaagttccatcggtagctaaaacttattcagctattggaatcacattaggtacttctgaatttgcggtattgtcaaatggtagacgtatcgataatgataaatacaccaaagccttcaaacagcggatcgcaagggaagaaagaaagctgacaaggcgtaaggaaattgccaaattaaaaggagtagaattatcccagcaaaagaactatcaaaagcaaaagctgaaagtagctaagatgcgggaaaaactaatgaaccaacggacggattttctaaataagattacaacagaaatcgttcaaaaatacgatgtgatttgtatagaagatatccagcagtcagatatttatagaaatagtaaactgcattgtggtatttcagatgtctcatgggctatgttcgtttcaaaattagaatataaagctacatggtataataaacgactaatcaaggtttctatgtgcaatgaatgttctgaacattcagataataacaagcgaagcaacttattcattcaggatatcgacaaacaaaaggggcagtgtgatcctgaaacagctgctagcattcaagtgctgaataaaggattaagcagctaaaaatagcaaagaactgtagggactacagggttagcctagggtatataagatagatatagcgttgattcgatcatttgtctttttctaggaaatttctattaaatagaaatagttcac

SEQ ID NO: 1017 - RNA, 1238 nt, synthetic construct
  source 1..1238: mol_type = other RNA
atgaaagtactgaaggcttacaagtacagactttatcctaacccattgcaagaagagtttataagaaagacgttttcttgtgttcgacttgtgcataatcttttactacaagaccgtgtagaaatataccgaaaattgaaaaaagattctaagcttaaaataaaatacccaacacctgcgaaatataaaaaagactatccgttcctaaaagaagttgatagtttagcattatctaatgcacaagtccatttggatcgggcttttaagaactttcataaaaataaatcggttggttttcctaagttgaggcagagaaaagattctgtttcatcttacacaacgaataatcaaaatggaaccattaaaatacttgattctaaatatttaaaagttcccaagttgaaaacactgattaaaatgaaggttcatcgtccgttaacaggtgaaataaagtctgcaacgatttctttgagtcctagtaaaaaatattttgtttctttgctttgtgaggaagaaattcctaaagcgcctaaaacctattccgcagttgggataacgttaggaacatctgagtttgctattttgtctaatggtcagcgaattgataatgataaatatacgcaaaattttcagattcgcttgaaaagagaggaaaaaaaattaatacgcagaaaagaaatagcccagtcaaaaaaaatggatatttctcaacaaaaaaattatcaaaagcaaaagttaaaaattgctaaaatgcatgaaaaactaatgaatcaaagaatagacttcttgaataaaattacaactgaaattgtaaccaaatacgatgttatttgtgtagaagatattcataaagaagatttttttagaaatagtaagctaaatagaggaatcacggacgtatcttgggcgatgttcatttcgaagctggaatacaaagcgctttggtataataaaaaaattattaaagtatctgcttgtcaagattctagcgtaatcgttgaagaaactgaaagtaaattatttacgccagatgtaaataagaaaaaagcactagaagatcccgaaatagcagcaagtgttcaagttctttcgatgggattaaatgaagcaatagctaattgattttatgaactgtagggactacagggatagcctagggtatataagatagatatagcgattaaattcgatcatttatctttttctaggaaatttctattttaatagaaatagttcac

SEQ ID NO: 1018 - RNA, 1172 nt, synthetic construct
  source 1..1172: mol_type = other RNA
atgaaggctctgaaagcttataaatacagactttatccaacctcaaaacaagaagagtttattcaaaaaacattttcttgtgttcgcttggtgtataatttaatgttacaagaccggattgatatctacaaagagatgcgaaaaaatcctcaacaaacgtttaaaatgccaacgccagctaaatataagaaacaataccctgtcctcagagaagttgatagtttagccttggcaaatgcacaagtttatttggatcgagcctttaaaaatttttatcgggaaaaagggatgggctttccaaaaaagaaaaagaaagaaacggtgcattcctacactacgaacaatcaacatggcacggtcaaaattttggataatcgttatttgaaagtacctaaattgaaatctttaattaaaatgaaggtacaccgccaaccgctgggggagataaaatctgtaactatttctatgagtgcgagtcacaattattatgtttccattttgtgtgaagcgccgattgaaacgaaaacaaagcaacaaaaaatggtgggaatttgtagcagtagggaaaaatttgcgctgctttcgaatggtgaaagcttcgaaaaaagctattgttcaaagcatttaaagcaaaaactacgtcaagaagaacgaaaattaaacaagcgtaaaatgattgctttagaaaaaggtgtcgatctttcgcaagcaaaaaattatcaaaaacaaaaaataaaagtcgcaaaaattcgcgaaaaaatagccaaccaacgaacggatattttaaacaaaattacaacggaattggtttcaagttatgatgttatttgtattgaaaaagcccatcacagtaatgagcggccgccaaaacatgatcgttcggaactggcttggtctttatttttagctaaactgttgtataaagcacaatggtatggcaaaaaactcatttgtattgagtcagaggagatagaaacagagttgtctttttctgaaagtacagaaaattcagagtatcttagaagccaaaaaatcttagaacgtggcttgtctaaacgagaaaccttataaatagaagaactgtagggactacagggatcgcctaggggatagaaaatgtacaccatgtgttgaaccatttgtttctaggaagtcacattgggacagtccac

SEQ ID NO: 1019 - RNA, 1172 nt, synthetic construct
  source 1..1172: mol_type = other RNA
atgaaggctctgaaagcttataaatacagactttatccaacctcaaaacaagaagagtttattcaaaaaacattttcttgtgttcgcttggtgtataatttaatgttacaagaccggattgatatctacaaagagatgcgaaaaaatcctcaacaaacgtttaaaatgccaacgccagctaaatataagaaacaataccctgtcctcagagaagttgatagtttagccttggcaaatgcacaagtttatttggatcgagcctttaaaaatttttatcgggaaaaagggatgggctttccaaaaaagaaaaagaaagaaacggtgcattcctacactacgaacaatcaacatggcacggtcaaaattttggataatcgttatttgaaagtacctaaattgaaatctttaattaaaatgaaggtacaccgccaaccgctgggggagataaaatctgtaactatttctatgagtgcgagtcacaattattatgtttccattttgtgtgaagcgccgattgaaacgaaaacaaagcaacaaaaaatggtgggaatttgtagcagtagggaaaaatttgcgctgctttcgaatggtgaaagcttcgaaaaaagctattgttcaaagcatttaaagcaaaaactacgtcaagaagaacgaaaattaaacaagcgtaaaatgattgctttagaaaaaggtgtcgatctttcgcaagcaaaaaattatcaaaaacaaaaaataaaagtcgcaaaaattcgcgaaaaaatagccaaccaacgaacggatattttaaacaaaattacaacggaattggtttcaagttatgatgttatttgtattgaaaaagcccatcacagtaatgagcggccgccaaaacatgatcgttcggaactggcttggtctttatttttagctaaactgttgtataaagcacaatggtatggcaaaaaactcatttgtattgagtcagaggagatagaaacagagttgtctttttctgaaagtacagaaaattcagagtatcttagaagccaaaaaatcttagaacgtggcttgtctaaacgagaaaccttataaatagaagaactgtagggactacagggatcgcctaggggatagaaaatgtacaccatgtgtcgaaccatttgtttctaggaagtcacattgggacagtccac

SEQ ID NO: 1020 - RNA, 1238 nt, synthetic construct
  source 1..1238: mol_type = other RNA
atgaaggtattaaaggcttataaatacaggctttaccctacggcatcacaagaagaatttattaaaaaaactttttcttgtgtaaggcttgtgcataatcttttattacaggaacggattaagttgtataagcaactgaaagaggaccctaatttaaaagttaagttaccgacacctgctcaatataaaaaagagtatccttgtttaaaggaagtggatagtttagctttatcgaatgcgcaagtttatttggatcgagcatttaaaaaatttcacagagaaaagtcaattggttttcccaaattgaaacagaaaaaagattctgtttgctcttatacaacgaataatcaaaatggtacagtgaaaattattgatgaaaaatatttaaaagtacctaaattaaaatcgttagtgagaatgaagatgcatcgtccagtaatagggaaaataaagtcagcaacgatttctttggctcccagtaacaaatattttgtttcaatcttatgtgaagaggaaattccaacgatcgagaagacctattcggcggttggcataaccttaggtgcttctgaatttgcgatattatcaaacggtagacgtatcgacaatgataaatttacgaaagaattcgagcagcgaatcacgagagaagaaagaaaactgacacgtcgtaaagaaattgcaaaagcaaaagggacggatctttcccaacaaaagaattaccagaaacaaaaattgaaagtagcgaaaatgcgggaaaagctgatgaatcaacgaatcgattttcttaataagatcacgacagaaattgttcgaaagtacgatttgatttgcatagaagatattcatcaagctgatttttatagaaatagtaagttacatcgtggcatctcagatgtttcttgggctttatttgtttcaaagcttgaatataaagctacatggtataacaaaagagtgatcaaggttttagcttgcggaaaatgttctgaacattcagaaaataacgtgagtcaaatttttactcaagatatcaatgagcaaaaaggactgcaagatcctgagactgctgctagtatcaacgtattgatccaaggactgaaagaaacaacaggcaattaacaaagtaaagaactgtagggactacagggatagcctagggcatataagatagatatagcgtttagtcgatcatttatctttttctaggaaatttctagttaatagaaatagttcac

SEQ ID NO: 1021 - RNA, 1241 nt, synthetic construct
  source 1..1241: mol_type = other RNA
atgaaggtattaaaggcgtataaatacaggctttaccctactttattacaagaagagttcatcaaaaaaactttttcttgtgttcggcttgtgcataatcttttattgcaggaaagaattcagctgtataaggagttgaaaaaaaatcctgatttaaaagtaaagttaccgacaccagctcaatttaaaaaagagcatccttgtttgaaggaagtggatagcttagcattatcaaatgcgcaggtttacttggatcgagcattcaaaaaattttatagagaaaagtcagttggttttcctaaactaaaacaaaagaaaaatgctgtcagttcttacacaacgaataatcaaaacggcacaattaaaattattgatgaaaaatatttaaaagtccctaaactgaaatcgttgattaaaatgaaaatgcatcgtccggtaatagggaaaataaagtcggcgacgatctctttgactcctagtaataaatatttcgtttcgattctttgtgaagaggagcttcctagagttgaaaagacctattcagcaatcgggataacattaggagcttcagaatttgctgtattatcaaatggtagacgtatcgataatgataaatttacaaaagaattcgaacagaggatcaccagagaagaaagaaaattaacacggcgaaaagaaattgctaaatccaaaggaacagaactgttacaacaaaaaaactatcagaaacaaaaactaaaagtagcaaaaatgcgggaaaagttaatgaatcaacgaattgattttctgaataaaatcacgacagaaattgttaagaaatatgatttgatttgtattgaagatattcatcaagctgattttttcagaaatactaaattacatcgaggcgtttcagatgtttcttgggcattgtttgtctcaaaacttgaatataaagcgacatggtataacaaacgattaatcaaggtttcggcatgtggtaaatgttcggaacattcagataatgatttggtgagtcaaatatttactcaagacgtcaatgaggaaaaaggaaaacatgatcctgagactgcggcgagtattcaagtgttgatccaaggattaaaaggaacaacggccaattaaaaaaagaagaactgtagggactacagggatagcctagggcatataagatagatatagcgtttagtcgatcatttgtctttttctaggaaatttctagttaaatagagatagttcac

SEQ ID NO: 1022 - RNA, 1232 nt, synthetic construct
  source 1..1232: mol_type = other RNA
gtgttaaaagcgtataaatataggctttaccctacttcagtacaagaagagtttataaaaaaaacattttcttgtgttcggttggtgtataatcttctattgcaggaaagagtccaattgtataaagaattgaaagaaaatcctgatttaaaagttaaattgccgacacctgctcagtataaaaaagagcatccttgtctaaaagaggtagacagtttagcgttgtcaaatgcacaagtatatttagatcgcgcatttaaaaaattttatagagaaaaatcagttggatttcctaaattaaagcaaaaaaaggattcagtttcctcttatacaacgaacaatcaaaatgggacagttaaaattattgacgaaaaatatttaaaagtacccaaattgaaatcattgttgaaaatgaagatgcatcgtccagtaatagggaaaataaagtcagtaacgatttctttaactaaaagcaataagtactttgtttcaatcttgtgtgaggaagaaattccaataatagagaagactcattcggcaatcgggataaccttaggggcttcagaatttgctgtattatcaaatggaaatcgtatcgataatgataaatacacaaaggaatttgaacaacggatcactcgagaagaaagaaaattgcagaggcgtaaagaaattgcaaaggtaaaaggaacagatctttcacagcaaaaaaattaccaaaaacaaaagcttaaagttgcaaaaatgcgagaaaaattaatgaatcaacgagtcgattttcttaataagatcactacagagattattagaaagtatgatttgatttgtattgaagacatccaccaagcagatgtttatagaaataataaattgtatcgtggtgtttcagatgtttcttgggctttatttgtttcaaagttagaatacaaagcatcctggtataacaagagattaatcaaagtttcagcatgtggaaaatgttctgaacattcagataatacacaggtaagtcaaatgttcacacaagatatcaatgagcaaaaaggattacatgatccagaaaccgcagcaagtattcaagtattgataaaaggactaaaagaaaccacacgtaagtaataaagaaaactgtaggaactacagggttagcctagggtatataagatagagatagcgttcagtcgatcatttgtctttttctaggaaatttctagttactagaaatagttcac

SEQ ID NO: 1023 - RNA, 1203 nt, synthetic construct
  source 1..1203: mol_type = other RNA
cctacttcagcacaggaagaatttatcaaaaaaactttttcttgtgttcgacttgtgcataatcttttattgcaagacaggatccagctttacaagacgttgaaagaaaatcctgatttaaaagtgaagctaccgacaccagctcaatataaaaaagagcatccttgtttaaaagaaatcgacagtctcgcattatctaacgcacaggtatacttagatcgagcatttaaaaaatttcatagagaaaaatcagtcggttttcctaagttgaaacaaaagaaaaacgctgtacgctcttatacaacgaataatcagaatggtacaattaaaattattgacggaagatatttaaaagtacctaaactaaaatcgttgatcaaaatgaaaatgcatcgtcaaatggtagggaaaataaagtcggcaacaatttctttaacacctagtcaaaagtactttgtttctattctgtgtgaagaagaagtgcctacagttgagaaaacatatgctgcaatcgggataactttagggagttctgaatttgctgtgttatcaaatggaaaacgcattgataatgataaatatacgaaagaatttgaaactaggattaacagagaagaacgaaagttgatgcggcgtaaagaaattgctaagtcaaaaggaatagaactttctcagcaaaaaaattatcagaaacaaaaactgaaagtagcaaaaatgcgggaaaagttaatgaatcaacgaatcgattttcttaataaagttactacggaaattgtgagaaagtatgatttgatttgtattgaagagattcaccaagcagatgtttttagaaataacaaattacatcgaggtgtttcagatgtttcatgggcattatttgtgtctaaattagaatacaaagcgtcatggtataataaaagattgattaaggtttccatctgcgggaaatcttctgaacattcagataatgatatgagcagtcgactattttttcaagatattaatgagaaaagagcaatgattgatccagagactgctactagtgttcaagtattaactcaaggattaaaagaagtagtcatataaataaattaaagaactgtagggactacagggatagcctagggcatataagacagatatagcgtttattcgatcatttgtttttttctaggaaatttctagatcatagaaatagttcac

SEQ ID NO: 1024 - RNA, 1241 nt, synthetic construct
  source 1..1241: mol_type = other RNA
atgaaggtattaaaggcatataaatacagactttaccctacttcattacaagaagagttcatcaaaaaaactttttcttgcgtgcggcttgtgcataatcttttattacaggagcgaattcagctctataagaaactgaaagaaaaccctaacttaaaagtaaaaatgcccacaccggctcaatataaaaaagagcatccttgtttaagggaagtggacagtttagcattagcaaatgcacaggtttacttggatcgagcattcaaaaaatttcatagagaaaaatcagtcggttttcctaagctaaagcaaaagaaaaacgctgtttgctcctatacaacgaataatcaaaatggtacgattaaaattattgacgaaaagtatttaaaagtaccaaagttaaaatcgttgatgaaaatgaagatgcatcgtccagtaatagggaaaataaagtcagcgacaatttctttgactcccagcaataagtatttcgtttcgatcttgtgcgaagaagaaattccggcagttgagaagacacattttgcaatcgggataacattaggtgcttctgaatttgctgtattatcaaatggcagacgttttgacaatgataaatatacaaaagaatttgaacgacggattacgagagaagaaagaaaactgaggcgacgcaaagaaattgcaaaattaaaaggaacagatctttctcagcagaaaaactaccagaaacaaaaaacgaaagtcgcgaaaatgcgagaaaagttgatgaatcaacgaatcgattttctaaataaaatcacgacagaaatcgttaggaagtatgatttgatttgtatagaagatatccatcaagcagatttttatagaaacaataaattgcatcgaggcgttacggatgtttcttgggcactgtttgtttcaaagctagaatataaagcatcatggtataacaaaagattggtcaaggtttcagtgtgtcaaaaatgttctgaacattcagataataatcggatgagtaaaatatttttccatgatatcaatgaaaaaaaaggtaggcaagatccagaaaccgccgccagtattcatgtattgacacagggattgaaagaagcaacagtcactgactaagtaaaaaaactgtagggactacagggctagcctagggcatataagatagatatagcgtttattcgatcatttgtctttttctaggaaatttctagttaatagaaatagttcac

SEQ ID NO: 1025 - RNA, 1078 nt, synthetic construct
  source 1..1078: mol_type = other RNA
ctgggtgttttaaaagcatacaaatttcggatctatcctaatggacagcaaaaacagtttttcatcgaaaccttcggctgtgtacggtttacttacaatcaactgctggaggcgaagatggaagagctggccaacaatgaagcaaagcaagggttgacgccagccaaactaaaaaaggagtatccttttttgaaggagaccgatagtttggcattggcgaatgcacaacggaatctggaccgagcgtttcgaaattactttcaaaagcgggctggctttccaaaaatgaaaaccaaaaaaagtatctggcaatcgtataccaccaataatcagcagcacaccatttattttgaagaggatcaaatcaagctgccaaagcttaaaacactggttcccgtaaaaaagcatcgggagatcaaagggaaaatcaaatcggcaacgatctcagcaaaaaacaacgaagagttttacatctcgatcctttgtttggaagagatcacgccactcccgaaacagcaagcgtctatcgcgattgtttatgatccacagcagttggtcaaagccaaccagccggtacccatcacctgtgaacatgccatccaaacgaagcaaaagctgacacgagcagaacgcaaacttcaggtgaaagctacggcggtcaaacggaaaaaaatccttttgactcaggcacgaaattatcagaagctaaaaggaaaggtcactcgcctttatcgttttcactgctgtcaaaagcgggaattcatcgatcaagtcagctaccatctcgtaaaacagtatgatacgatctatttggaacaaatcgcagaagatacggttttaaaagctggtcattacagcatcagtgattggcatcaattcgttcgcaaaatccagtacaaagcgcagtggtacggtaaagaactgcggtttgtcacgttggatacgcaggaccaacagaagctagaacggctctcaggcgaaatgagtagctgagccacttgaactggaaggaacgccagggatcgcctagggtatagaaaaaatctttaagatttttgtttctaggaaccacgttcac

SEQ ID NO: 1026 - RNA, 1172 nt, synthetic construct
  source 1..1172: mol_type = other RNA
atgaaggctctgaaagcttataaatacagactttatccaacctcaaaacaagaagagtttattcaaaaaacattttcttgtgttcgcttggtgtataatctaatgttacaagaccggattgatatctacaaagagatgcgaaaaaatcctcaacaaacgtttaaaatgccaacgccagctaaatataagaaacaataccctgtcctcagagaagttgatagtttagccttggcaaatgcacaagtttatttggatcgagcctttaaaaatttttatcgggaaaaagggatgggctttccaaaaaagaaaaagaaagaaacggtgcattcctacactacgaacaatcaacatggcacggtcaaaattttggataatcgttatttgaaagtacctaaattgaaatctttaattaaaatgaaggtacaccgccaaccgctgggggagataaaatctgtaactatttctatgagtgcgagtcacaattattatgtttccattttgtgtgaagcgccgattgaaacgaaaacaaagcaacaaaaaatggtgggaatttgtagcagtagggaaaaatttgcgctgctttcgaatggtgaaagcttcgaaaaaagctattgttcaaagcatttaaagcaaaaactacgtcaagaagaacgaaaattaaacaagcgtaaaatgattgctttagaaaaaggtgtcgatctttcgcaagcaaaaaattatcaaaaacaaaaaataaaagtcgcaaaaattcgcgaaaaaatagccaaccaacgaacggatattttaaacaaaattacaacggaattggtttcaagttacgatgttatttgtattgaaaaagcccatcacagtagtgagcggccaccaaaacatgatcgttctgaactggcttggtctttatttttagctaaactgttgtataaagcacaatggtatggcaaagaactcatttgtattgagtcagaggagatagaaacagagttgtctttttctgaaagtacagaaaattcagagtatcttagaagccaaaaaatcttagaacgtggcttgtctaaacgagaaaccttataaatagaagaactgtagggactacagggatcgcctaggggatagaaaatgtacaccatgtgttgaaccatttgtttctaggaagtcacattgagacagtccac

SEQ ID NO: 1027 - RNA, 1172 nt, synthetic construct
  source 1..1172: mol_type = other RNA
atgaaggctctgaaagcttataaatacagactttatccaacctcaaaacaagaagagtttattcaaaaaacattttcttgtgttcgcttggtgtataatttaatgttacaagaccggattgatatctacaaagagatgcgaaaaaatcctcaacaaacgtttaaaatgccaacgccagctaaatataagaaacaataccctgtcctcagagaagttgatagtttagccttggcaaatgcacaagtttatttggatcgagcctttaaaaatttttatcgggaaaaagggatgggctttccaaaaaagaaaaagaaagaaacggtgcattcctacactacgaacaatcaacatggcacggtcaaaattttggataatcgttatttgaaagtacctaaattgaaatctttaattaaaatgaaggtacaccgccaaccgctgggggagataaaatctgtaactatttctatgagtgcgagtcacaattattatgtttccattttgtgtgaagcaccgattgaaacgaaaacaaagcaacaaaaaatggtgggaatttgtagcagtagggaaaaatttgcgctgctttcgaatggtgaaagcttcgaaaaaagctattgttcaaagcatttaaagcaaaaactacgtcaagaagaacgaaaattaaacaagcgtaaaatgattgctttagaaaaaggtgttgatctttcgcaagcaaaaaattatcaaaaacaaaaaataaaagtcgcaaaaattcgcgaaaaaatagccaaccaacgaacggatattttaaacaaaattacaacggaattggtttcaagttacgatgttatttgtattgaaaaagcccatcacagtagtgagcggccaccaaaacatgatcgttctgaactggcttggtctttatttttagctaaactgttgtataaagcacaatggtatggcaaagaactcatttgtattgagtcagaggagatagaaacagagttgtctttttctgaaagtacagaaaattcagagtatcttagaagccaaaaaatcttagaacgtggcttgtctaaacgagaaaccttataaatagaagaactgtagggactacagggatcgcctaggggatagaaaatgtacaccatgtgttgaaccatttatttctaggaagtcacattgggacagtccac

SEQ ID NO: 1028 - RNA, 1172 nt, synthetic construct
  source 1..1172: mol_type = other RNA
atgaaggctctgaaagcttataaatacagactttatccaacctcaaaacaagaagagtttattcaaaaaacattttcttgtgttcgcttggtgtataatttaatgttacaagaccggattgatatctacaaagagatgcgaaaaaatcctcaacaaacgtttaaaatgccaacgccagctaaatataagaaacaataccctgtcctcagagaagttgatagtttagctttggcaaatgcacaagtttatttggatcgagcctttaaaaatttttatcgggaaaaagggatgggctttccaaaaaagaaaaagaaagaaacggtgcattcctacactacgaacaatcaacatggcacggtcaaaattttggataatcgttatttgaaagtacctaaattgaaatctttaattaaaatgaaggtacaccgccaaccgctgggggagataaaatctgtaactatttctatgagtgcgagtcacaattattatgtttccattttgtgtgaagcgccgattgaaacgaaaacaaagcaacaaaaaatggtgggaatttgtagcagtagggaaaaatttgcgctgctttcgaatggtgaaagcttcgaaaaaagctattgttcaaagcatttaaagcaaaaactacgtcaagaagaacgaaaattaaacaagcgtaaaatgattgctttagaaaaaggtgtcgatctttcgcaagcaaaaaattatcaaaaacaaaaaataaaagtcgcaaaaattcgcgaaaaaatagccaaccaacgaacggatattttaaacaaaattacaacggaattggtttcaagttacgatgttatttgtattgaaaaagcccatcacagtagtgagcggccaccaaaacatgatcgttctgaactggcttggtctttatttttagctaaactgttgtataaagcacaatggtatggcaaagaactcatttgtattgagtcagaggagatagaaacagagttgtctttttctgaaagtacagaaaattcagagtatcttagaagccaaaaaatcttagaacgtggcttgtctaaacgagaaaccttataaatagaagaactgtagggactacagggatcgcctaggggatagaaaatgtacaccatgtgttgaaccatttgtttctaggaagtcacattgagacagtccac

SEQ ID NO: 1029 - RNA, 1172 nt, synthetic construct
  source 1..1172: mol_type = other RNA
atgaaggctctgaaagcttataaatacagactttatccaacctcaaaacaagaagagtttattcaaaaaacattttcttgtgttcgcttggtgtataatttaatgttacaagaccggattgatatctacaaagagatgcgaaaaaatcctcaacaaacgtttaaaatgccaacgccagctaaatataagaaacaataccctgtcctcagagaagttgatagtttagccttggcaaatgcacaagtttatttggatcgagcctttaaaaatttttatcgggaaaaagggatgggctttccaaaaaagaaaaagaaagaaacggtgcattcctacactacgaacaatcaacatggcacggtcaaaattttggataatcgttatttgaaagtacctaaattgaaatctttaattaaaatgaaggtacaccgccaaccgctgggggagataaaatctgtaactatttctatgagtgcgagtcacaattattatgtttccattttgtgtgaagcaccgattgaaacgaaaacaaagcaacaaaaaatggtgggaatttgtagcagtagggaaaaatttgcgctgctttcgaatggtgaaagcttcgaaaaaagctattgttcaaagcatttaaagcaaaaactacgtcaagaagaacgaaaattaaacaagcgtaaaatgattgctttagaaaaaggtgttgatctttcgcaagcaaaaaattatcaaaaacaaaaaataaaagtcgcaaaaattcgcgaaaaaatagccaaccaacgaacggatattttaaacaaaattacaacggaattggtttcaagttacgatgttatttgtattgaaaaagcccatcacagtagtgagcggccaccaaaacatgatcgttctgaactggcttggtctttatttttagctaaactgttgtataaagcacaatggtatggcaaagaactcatttgtattgagtcagaggagatagaaacagagttgtctttttctgaaagtacagaaaattcagagtatcttagaagccaaaaaatcttagaacgtggcttgtctaaacgagaaaccttataaatagaagaactgtagggactacagggatcgcctaggggatagaaaatgtacaccatgtgttgaaccatttgtttctaggaagtcacattgagacagtccac

SEQ ID NO: 1030 - RNA, 1172 nt, synthetic construct
  source 1..1172: mol_type = other RNA
atgaaggctctgaaagcttataaatacagactttatccaacctcaaaacaagaagagtttattcaaaaaacattttcttgtgttcgcttggtgtataatttaatgttacaagaccggattgatatctacaaagagatgcgaaaaaatcctcaacaaacgtttaaaatgccaacgccagctaaatataagaaacaataccctgtcctcagagaagttgatagtttagccttggcaaatgcacaagtttatttggatcgagcctttaaaaatttttatcgggaaaaagggatgggctttccaaaaaagaaaaagaaagaaacggtgcattcctacactacgaacaatcaacatggcacggtcaaaattttggataatcgttatttgaaagtacctaaattgaaatctttaattaaaatgaaggtacaccgccaaccgctgggggagataaaatctgtaactatttctatgagtgcgagtcacaattattatgtttccattttgtgtgaagcgccgattgaaacgaaaacaaagcaacaaaaaatggtgggaatttgtagcagtagggaaaaatttgcgctgctttcgaatggtgaaagcttcgaaaaaagctattgttcaaagcatttaaagcaaaaactacgtcaagaagaacgaaaattaaacaagcgtaaaatgattgctttagaaaaaggtgtcgatctttcgcaagcaaaaaattatcaaaaacaaaaaataaaagtcgcaaaaattcgcgaaaaaatagccaaccaacgaacggatattttaaacaaaattacaacggaattggtttcaagttacgatgttatttgtattgaaaaagcccatcacagtagtgagcggccaccaaaacatgatcgttctgaactggcttggtctttatttttagctaaactgttgtataaagcacaatggtatggcaaagaactcatttgtattgagtcagaggagatagaaacagagttgtctttttctgaaagtacagaaaattcagagtatcttagaagccaaaaaatcttagaacgtggcttgtctaaacgagaaaccttataaatagaagaactgtagggactacagggatcgcctaggggatagaaaatgtacaccatgtgttgaaccatttgtttctaggaagtcacattgagacagtccac

SEQ ID NO: 1031 - RNA, 1172 nt, synthetic construct
  source 1..1172: mol_type = other RNA
atgaaggctctgaaagcttataaatacagactttatccaacctcaaaacaagaacagtttattcaaaaaacattttcttgtgttcgcttggtgtataatttaatgttacaagaccggattgatatctacaaagagatgcgaaaaaatcctcaacaaacgtttaaaatgccaacgccagctaaatataagaaacaataccctgtcctcagagaagttgatagtttagccttggcaaatgcacaagtttatttggatcgagcctttaaaaatttttatcgggaaaaagggatgggctttccaaaaaagaaaaagaaagaaacggtgcattcctacactacgaacaatcaacatggcacggtcaaaattttggataatcgttatttgaaagtacctaaattgaaatctttaattaaaatgaaggtacaccgccaaccgctgggggagataaattctgtaactatttctatgagtgcgagtcacaattattatgtttccattttgtgtgaagcgccgattgaaacgaaaacaaagcaacaaaaaatggtgggaatttgtagcagtagggaaaaatttgcgctgctttcgaatggtgaaagcttcgaaaaaagctattgttcaaagcatttaaagcaaaaactacgtcaagaagaacgaaaattaaacaagcgtaaaatgattgctttggaaaaaggtgtcgatctttcacaagcaaaaaattatcaaaaacaaaaaataaaagtcgcaaaaattcgcgaaaaaatagccaaccaacgaacggatattttaaacaaaattacaacggaattggtttcaagttacgatgttatttgtattgaaaaagcccatcacagtaatgagcggccgccaaaacatgatcgttctgaactggcttggtctttatttttagctaaactgttgtataaagcacaatggtatggcaaagaactcatttgtattgagtcagaggagatagaaacagagttgtctttttctgaaagtacagaaaattcagagtatcttagaagccaaaaaatcttagaacgtggcttgtctaaacgagaaaccttataaatagaagaactgtagggactacagggatcgcctaggggatagaaaatgtacaccatgtgttgaaccatttgtttctaggaagtcacattgggacagtccac

SEQ ID NO: 1032 - RNA, 1172 nt, synthetic construct
  source 1..1172: mol_type = other RNA
atgaaggctctgaaagcttataaatacagactttatccaacctcaaaacaagaacagtttattcaaaaaacattttcttgtgttcgcttggtgtataatttaatgttacaagaccggattgatatctacaaagagatgcgaaaaaatcctcaacaaacgtttaaaatgccaacgccagctaaatataagaaacaataccctgtcctcagagaagttgatagtttagccttggcaaatgcacaagtttatttggatcgagcctttaaaaatttttatcgggaaaaagggatgggctttccaaaaaagaaaaagaaagaaacggtgcattcctacactacgaacaatcaacatggcacggtcaaaattttggataatcgttatttgaaagtacctaaattgaaatctttaattaaaatgaaggtacaccgccaaccgctgggggagataaaatctgtaactatttctatgagtgcgagtcacaattattatgtttccattttgtgtgaagcgccggttgaaacaaaaacaaagcaacaaaaaatggtgggaatttgtagcagtagggaaaaatttgcgctgctttcgaatggtgaaagcttcgaaaaaagctattgttcaaagcatttaaagcaaaaactacgtcaagaagaacgaaaattaaacaagcgtaaaatgattgctttagaaaaaggtttcgatctttcgcaagcaaaaaattatcaaaaacaaaaaataaaagtcgcaaaaattcgcgaaaaaatagccaaccaacgaacggatattttaaacaaaattacaacggaattggtttcaagttacgatgttatttgtattgaaaaagcccatcacagtaatgaacggccgccaaaacatgatcgttctgaactcgcttggtctttatttttagctaaactgttgtataaagcacaatggtatggcaaagaactcatttgtattgagtcagaggagatagaaacagagttgtctttttctgaaagtacagaaaattcagagtatcttagaagccaaaaaatcttagaacgtggcttgtctaaacgagaaaccttataaatagaagaactgtagggactacagggatcgcctaggggatagaaaatgtacaccatgtgttgaaccatttgtttctaggaagtcacattgggacagtccac

SEQ ID NO: 1033 - RNA, 1237 nt, synthetic construct
  source 1..1237: mol_type = other RNA
atgaaggtgttaaaagcgtataaatataggctttaccctacttcaatacaggaagaatttattaaaaaaactttttcttgtgtaaggcttgtgcataatcttttgttgcaggaacggattcagttatataagcagctgaaggaaaatcctgatttaaaagttaagttgccaacacctgctcaatataaaaaagagtatccttgtttaaaggaagtggatagtttagctttatcgaacgcacaagtttatttggatcgagcatttaaaaaatttcatagagaaaagtctattggttttcctaagttgaaacagaagaaagattccgtttcctcttatacgacgaacaatcaaaatggtacagtaaaaattattgatgaaaaatatttgaaagtacctaagttaaaatcgttagtgaaaatgaaaatgcatcgtccggtaatagggaaaataaagtcagtaacgatttctttgactcctagtaataagtattttgcttcaattttgtgtgaagaggaaattccaacgatcgagaagacgtattcggcggttggcataaccttaggtgcttctgaatttgcggtattatcaaacggtagacgtatcgacaatgataaatttacgaaagaatttgagcagcgaatcactagagaggaacgaaaactgacacggcgtaaagaaattgcaaaagcaaaaggaactgatctttcgcaacaaaaaaattatcagaaacaaaagctgaaagtagcaaaaatgcgggagaagttgatgaatcagcgaatcgattttcttaataagattacgacagaaattgttcgaaagtatgatttgatttgcatagaagatattcatcaagctgatttttatagaaatagtaagctgcatcgtggtatctcagatgtttcttgggctttatttgtctcaaagcttgaatataaagctacatggtataacaaaagagtaatcaaggttttagcttgcggaaaatgttctgaacattcagaaaatagggtgagtcaaatttttactcaagatatcaatgagcaaaaaggactgcaagatcctgagaccgctgctagtatcaacgtattgatccaaggattgaaaaaaacaacaggcaattaacaagtaaagaactgtagggactacagggatagcctagggcatataagatagatatagcgtttagtcgatcatttgtctttttctaggaaatttctagttaatagaaatagttcac

SEQ ID NO: 1034 - RNA, 1237 nt, synthetic construct
  source 1..1237: mol_type = other RNA
atgaaggtgttaaaagcgtataaatataggctttaccctacttcaatacaggaagaatttattaaaaaaactttttcttgtgtaaggcttgtgcataatcttttgttgcaggaacggattcagttatataagcagctgaaggaaaatcctgatttaaaagttaagttgccaacacctgctcaatataaaaaagagtatccttgtttaaaggaagtggatagtttagctttatcgaacgcacaagtttatttggatcgagcatttaaaaaatttcatagagaaaagtctattggttttcctaagttgaaacagaagaaagattccgtttcctcttatacgacgaacaatcaaaatggtacagtaaaaattattgatgaaaaatatttgaaagtacctaagttaaaatcgttagtgaaaatgaaaatgcatcgtccggtaatagggaaaataaagtcagtaacgatttctttgactcctagtaataagtattttgcttcaattttgtgtgaagaggaaattccaacgatcgagaagacgtattcggcggttggcataaccttaggtgcttctgaatttgcggtattatcaaacggtagacgtatcgacaatgataaatttacgaaagaatttgagcagcgaatcactagagaggaacgaaaactgacacggcgtaaagaaattgcaaaagcaaaaggaactgatctttcgcaacaaaaaaattatcagaaacaaaagctgaaagtagcaaaaatgcgggagaagttgatgaatcagcgaatcgattttcttaataagattacgacagaaatcgttcgaaagtatgatttgatttgcatagaagatattcatcaagctgatttttatagaaatagtaagctgcatcgtggtatctcagatgtttcttgggctttatttgtctcaaagcttgaatataaagctacatggtataacaaaagagtaatcaaggttttagcttgcggaaaatgttctgaacattcagaaaatagggtgagtcaaatttttactcaagatatcaatgagcaaaaaggactgcaagatcctgagaccgctgctagtatcaacgtattgatccaaggattgaaaaaaacaacaggcaattaacaagtaaagaactgtagggactacagggatagcctagggcatataagatagatatagcgtttagtcgatcatttgtctttttctaggaaatttctagttaatagaaatagttcac

SEQ ID NO: 1035 - RNA, 1241 nt, synthetic construct
  source 1..1241: mol_type = other RNA
atgaaggtattgaaggcttataaatatagactttaccctactgcattacaagaagagttcataaaaaaaacattttcttgtgttcggcttgtgcataatcttttattgcaggaaagaattcagctttataaggaactgaaaaaaacccctgatttaaaagtaaagttaccaacacctgctcaatttaaaaaagagcatccttgtttaagggaagtggatagcttagcattatcgaatgcacaggtttacttggatcgagcctttaaaaaattttatagagaaaagtcagttggttttccgaagttaaaacaaaagaaaaacgctgttcgttcttatacaacgaataatcaaagtggaacaatcaaacttattgataagaaatatttaaaagttcctaaactgaaatcgttgattaaaataaaaatgcatcgtccagtaatggggaaaataaagtcagcgacgatttctttgactcctagtaataagtattttgtttcaattctctgtgaagaggaaattccaacagttgagaagacatattcggcagttggaataacgttaggggcttcagagtttgctgtattatcaaacggtagacgtatcgataatgataaatttacgaaagactttgaacaacggatcacgagagaagaaagaaaattattaagacgaaaagaaattgcaaaattaaaagggaacgagctttcccaacaaaaaaactatcagaaacaaaaattaaaagtagcaaaaatgcgggaaaaattaatgaatcaacgcgttgattttctgaataaaatcactacagaaattgttagaaaatatgatttgatttgcatagaagatattcatcaagccgactttttcagaaataacaaactgcatagaggaatttcggatgtatcatgggcattgtttgtttcaaagcttgaatataaagcgacctggtataacaaaagattagtgaaggtcacttcgtgcggagaaagttctgaacattcagataataatgcgttgagcaagatattcactcaggatatcaatgaaaaaaaaggtcagaaagatcctgagactgctgccagtattcaagtattgatcaaaggtttgagagatacaaaaaacggttaaaaaatgaagaactgtagggactacagggatagcctagggcatataaggtagatatagcgattagtcgatcatttatctttttctaggaaatttctagttgaatagaaatagttcac

SEQ ID NO: 1036 - RNA, 1111 nt, synthetic construct
  source 1..1111: mol_type = other RNA
atgctaaaagcttttaaattccgtatgtatccgacagaagaacaaaaacagcaattgattcgtacttttggatgtgctcgatttacctataaccatttgctgaaaaagcggcagaaaagttggcaacaaacaggagtggccgatttttcgctcacacccgctacattaaaaaaagaatacccattcttaaaagaagtagacagtcttgctttagcaaatgcacagcttaatttggatcgggcttttcgcaattatttcaagggacgtgccagcttcccaaagcttaaaacgaaaaaaagtatgtggcaatcttatacgaccaacaaccaaacccgtacgatctatctggaaaatggctacttaaagttaccaaaacaaaaagaactaatcaagataaatcagcatcggccagttgaaggatcgattcgctccgctacgatttctgctcgatataatgaagaattttatgtcgcactactttgtgatgtttcgccagtaaaaaaagaatctttagctaaatggatcgggatcgcctatcatccgaagacattgatccaaacatctcgacctctagaagtaactttaccaaaatttcaccagacagaagaaaagctgcaacatgcacagcggaaattgaatgtgaaagtccgctccgctcaccatagaaagatcaggttagatcaggcaagcaattatcagaaacaaaagagaaaagtaatggatctttatctgaaacaaaagaaccagcgagaagattatcttgaacaattatctgggaaattggtcaaacaatatgactacttatttgtagaatcttttccaaaagaagaggcacatgctgatttttctattcacgactggcataaattaataacaaaattgcgttataagtcccaatggtataataaaaaatttcttttgatcaataccgacggagcagaagaaagcaattccgtaagaaagagccaagtagtagaaaaaatgggcagacattcggttatcaagggataaaaaatgaatgaaactgataggagcgttagggttagccttgttaataaaaagtcttaatgacttttgtttctaggaatttttcttttgaagaaaagctcac

SEQ ID NO: 1037 - RNA, 1239 nt, synthetic construct
  source 1..1239: mol_type = other RNA
atgaaggtgttaaaagcgtacaaatacagactttaccctaccttatcgcaagaagtctttatcaaaaaaacattttcttgcgttcgactagtgcacaatcttttattacaggaaagaattcagctttttaaaacattgaaagaacaacctgaactaaaagtgaaaatgccgacacctgctcaatttaaaaaagaacacccttgtttaaaagaagtagatagtttagcattatcaaatgcacaagtttatttggatcgggcattcaaaaaatttcatagagaaaaatcagtggggtttccaaaattaaaacaaaaaaaagatgctgttagttcgtatacaacaaataatcaaaacggcacgattaaaattattgatgaaaaatatctaaaagtaccgaaactaaaatcattgataaaaatgaaaatgcaccgtccaataatagggaaaataaagtcagcaacaatttctttatcgcccagcaataaatattttgtttcgatcttgtgtgaagcagaaatacctacagtggaaaaaacatactctgctatcgggatcaccttaggtacttcggaattcgctgtattgtctaatggtagacgtatcgacaatgataaatttacaaaagaatttgagcagcggatcactagagaagaacgaaaattgacacgacgcaaagaaattgctaaagtaaaaggaactgatatcacccagcaaaaaaactatcagaagcaaaaactgaaagtagcaaaaatgcgggaaaaattaatgaatcagcgtattgattttttgaataaaatcacaacagaactagttagaaaatatgatttgatttgcatagaagatatccatcaaaatgatttttttagaaatagtaagctacatcgaggggtttccgatgtctcttgggcattatttgtatcaaaactagaatacaaagtatcttggtataacaaacgattaattaaagtttctgcatgcgggaaatgttctgaacattcagataatacacagctaagtcaaatgtttactcaggatatcaatgctaaaaaaggacaaaatgattcagagactgcagctagtattcaagtattagttcaaggattaaaaaatatacgaacataaaaagtaaagaactgtagggactacagggatagcctagggcatataagatagatatagcgtttattcgatcatttatctttttctaggaaattactagtttgactagtgatagttcac

SEQ ID NO: 1038 - RNA, 1202 nt, synthetic construct
  source 1..1202: mol_type = other RNA
gtgaaagtgttaaaagcctgtaaatacagactctatcctacctcgtctcaaatcgaattttttgaaaagactttttcaagtgtttatctggtccataatctcttgttgcaggatcgaatcaacctgtacagagaagccaaaaagaatcctcagctgaagcagagtttaccgactccggcgaagtataaaagggagcatccgttgttgaaagaagtcgatagccttgctcttgcgaatgcgcaggttcatttggaacgatctctaaaaagattttatagtgggaaagatgttggctttccaaaaatgaaatcaagaaaaaatccggttatgtcatacacaaccaacaatcaaaatggtacaataaagtttgttggtctaaattgtttgaaaattccgaaattaaaatcattgataaaagtcaaaatgcatcgtgaagtgaagggaaagataaaatctgcaacaatttcaaagtcctcaactggaaaatattttgtatcgatcctgtgcgaagagacaattgcctgtcaaaagaagacaaacaaggctgtgggaatcagtctcggttgttcagagctcgctgtattgtctaatggacggcgaatcgataatgattgtttgacagaagaaattgaacgtaaaattcgacgagaagagaaaaagctggcgagaaagaaaaagttggctagccaaaagggtttggatctgttagagcagaaaaattatcagaagcaaaaaatgaaggtagcgaaattaagggaacggttgctaaatcagcgcaatgattttctgaacaaagtaaccacagatctgatcaaggaatatgatttgatttgtattgaagaggcacacaaaaaggagtttcatcgaaactgtaaattaacaaaaagggtttctgatgtttcttggtcgctatttgtatccaagctagaatacaaggccatgtggcacgataagcgactaatcaagataaagaaaaatgatcaaattgaagcaacaaagattcctactaagatgatactggatattgatcaagagctcagtgaaagtgatactgaaacagcgagcagtattcagttattgttgcaaggattgaatcaataagtatgaaaaactgtagggactacagggttagcttaggggatataagataatagattatctgtttctaagaagctctccgacttggttggaaggcagttcac

SEQ ID NO: 1039 - RNA, 1233 nt, synthetic construct
  source 1..1233: mol_type = other RNA
atgagggttttaaaggcttataagtatcggctttatcctacctccgctcaagaggagtttataaaaaaaactttttcttgtgttcgtcttgtgtataatcttttgcttcaggatcggatcgctctttataaagcattgaaagaaaatcccgatcttactgtcaaactaccgacacctgctcaatataaaaaagagcatccttgtttaaaagaagtagatagtttggccttagcgaatgcacaagtttatctggatcgagcatttaaaaaatttcatagagaaaaaggcgtgggtttccccaagttgaaacaaaagaaagattctgtttcatcttatacgaccaacaatcaaaatggaacgatcaaaatcatcgatgataaatgtataaaggttcctaaattaaaaacgccaatgaaagtgaaaatgcatcgtccgataaaaggaaaaataaagtcagcaacgatttctttaacacctagtcataagtatttcatttcgatcctttgtgaagaggaagttccggaagtagagaaaacctactctgctatagggatcacattaggtacctctgaatttgcggtgctatcaaacggtagacgtatcgataatgataagtacaccagagaattcgagcagcggcttgcacgtgaagaaagaaaactagtcaggcgtaaagaaattgctaaagtaaaaggtatagaactatcccagcaaaaaaactatcagaaacaaaaattgaaggtagctaaaatgcgggaaaaattaatgaatcagcgaacagattttttaaataaaattacaacagaaatcgttcgtaaatatgatgtcatatgcattgaagatattcatcaaacagaagtttatagaaatagaaaacttcatcgaggaatttcagatgtatcttgggcattgtttgtttcaaaattagaatataaagcttcttggtataataaaagattgatcaaggtttctgcttgcaatgaatgttctgaacattcagaaaataaaaaacaaagtaagatctttcttgaagatatcgacaaacaaaaaggagcttctgatccagaaacagcagcgagtatccatgttttgaacaaaggattaagctattaaaaacatttatcaaaaactgtagggactacagggttagcctagggaatataaggtagatacagcgatgattcgatcatttatctttttctaggaaatttctattcaatagaaatagttcac

SEQ ID NO: 1040 - RNA, 1233 nt, synthetic construct
  source 1..1233: mol_type = other RNA
atgagggttttaaaggcgtataagtatcggctttatcctacctcagctcaagaggagtttatcaaaaaaactttttcttgtgttcgtcttgtgtataatcttttgctgcaggatcggatcgctctttataaagcattgaaagaaaatcctgatcttactgtcaagctgccgacacctgctcaatataaaaaagagcatccttgtttaaaagaagtagatagtttggcgttagcgaatgcgcaagtttatctggatcgggcatttaaaaaatttcatagggaaaaaggcgttggttttccaaaaatgaaacaaaagaaggattctgtttcgtcttacacaactaataatcaaaatgggacgatcaaaattatcgatgacaaatggataaaagttcccaagttgaagacaccaatgaaagtaaaaatgcatcgtccgataaaaggaaaaataaagtcagcaacgatttctttaacacctagccataagtttttcatttcgattctttgtgaagaggaagttcttgcggtagagaaaacacactctgctataggaatcacattaggcacttctgaatttgcggtgttatcaaatggtagacgtatcgataatgataagtacaccaaagaattcgagcaacgactcatacgggaagagagaaaacttgttaggcgtaaagaaattgctaaattgaaaggtacagaactatctcagcaaaaaaactaccagaaacaaaaattgaaggtagctaagatgcgggaaaaattgatgaatcagcgaacggattttttaaataagattacaacagaaatcgttcataaatatgatgtgatttgtattgaagatattcatcaatcagatgtgtatagaaatagcaaacttcatcgaggaatctcagatgtttcttgggcgttattcgtttcaaaattggaatataaagcttcttggtataataaaagattgatcaaagtttcagcttgcgataaatgttctgaacattcagaaaataaaaagcggagtaaaatatttattgaagacatcgataaacaaaaagaagtatctgatctagaaactgcagcaagtatccatgttttgaacaaaggattaagctattaaaatacacagtaaaaactgtagggactacagggttagcctagggcatataaggtagatacagcgataattcgatcatttatctttttctaggaagtttctattaaaatagaaatagttcac

SEQ ID NO: 1041 - RNA, 1078 nt, synthetic construct
  source 1..1078: mol_type = other RNA
ctgggtgttttaaaagcatacaaatttcggatctatcctaatggacagcaaaaacagtttttcatcgaaaccttcggctgtgtacggtttacgtacaatcaactgttggaggcgaagatggaagagctggccaacaatgaagcaaagcaagggttgacgccagccaaactaaaaaaggagtatccttttttgaaggagaccgatagtttggcattggcgaatgcacaacggaatctggaccgagcgtttcgaaattactttcaaaagcgggctggctttccaaaaatgaaaaccaaaaaaagtatctggcaatcgtataccaccaataatcagcagcacaccatttattttgaagaggatcaaatcaagctgccaaagcttaaaacactggttcccgtaaaaaagcatcgggagatcaaagggaaaatcaagtcggcaacgatctcagcaaaaaacaacgaagagttttacatctcgatcctttgtttggaagagatcacgccactcccgaaacagcaagcatctatcgcggttgtttatgatccacagcagttggtcaaagccaaccagccggtacctatcacctgtgaacatgccatccaaacgaagcaaaagctgacacgagcagaacgcaaacttcaggtgaaagctacggcggtcaaacggaaaaaaatccttttgactcaggcacgaaattatcagaagctaaaaggaaaggtcgctcgcctttatcgttttcactgctgtcaaaagcgggaattcatcgatcaagtcagctaccatctcgtaaaacagtatgatacgatctatttggaacaaatcgcagaagatacggttttaaaagctggtcattacagcatcagtgattggcatcaattcgttcgcaaaatccagtacaaagcgcagtggtacggtaaagaactgcgttttgtcacgttggatacgcaggaccaacagaagctagaacgactctcaggcgaaatgaggagctgagccacttgaactggaaggaacgccagggatcgcctagggtatagaaaaaatctttaagatttttgtttctaggaaccacgttcac

SEQ ID NO: 1042 - RNA, 1111 nt, synthetic construct
  source 1..1111: mol_type = other RNA
atgctaaaagcttttaaattccgtatgtatccgacagaagaacaaaaacagcaattgattcgtacttttggatgtgctcgatttacctataaccatttgctgaaaaagcggcagaaaagttggcaacaaacaggagtagccaatttttcgctcacacccgctacattaaaaaaagaatacccattcttaaaagaagtagacagtcttgctttagcaaatgcacagcttaatttggatcgggcttttcgcaattatttcaagggacgtgccagcttcccaaagcttaaaacgaaaaaaagtatgtggcaatcttatacgaccaacaaccaaacccgtacgatctatctggaaaatggctacttaaagttaccaaaacaaaaagaactaatcaagataaatcagcatcggccagttgaaggatcgattcgctccgctacgatttctgctcgatataatgaagaattttatgtcgcactactttgtgatgtttcgccagtaaaaaaagaatctttagctaaatggatcgggatcgcctatcatccgaagacattgatccaaacatctcgacctctagaagtaactttaccaaaatttcaccagacagaagaaaagctgcaacatgcacagcggaaattgaatgtgaaagtccgctccgctcaccatagaaagatcaggttagatcaggcaagcaattatcagaaacaaaagagaaaagtaatggatctttatctgaaacaaaagaaccagcgagaagattatcttgaacaattatctgggaaattggtcaaacaatatgactacttatttgtagaatcttttccaaaagaagaggcacatgctgatttttctattcacgactggcataaattaataacaaaattgcgttataagtcccaatggtataataaaaaatttcttttgatcaataccgacgaagcagaagaaagcaattccgtaagaaagagccaagtagtagaaaaaatgggcagacattcggttatcaagggataaaaaatgaatgaaactgataggagcgttagggttagccttgttaataaaaagtcttaatgacttttgtttctaggaatttttcttttgaagaaaagctcac

SEQ ID NO: 1043 - RNA, 1086 nt, synthetic construct
  source 1..1086: mol_type = other RNA
gtgaaagtattaaaagcttataaatttcgtatttatccaaatgaagaacaaatacaatattttatacagactttcggttgtgtacgttttacttataatcagttgttgtatgcccgaaaaaaagccctacaagcaggagattatgtgacacgactgactcctgctcaattaaaaaaagactatccgtttttaaaacaaacggatagtctagctttagctaatgctcagcgtaatttagatcgagcgtttaaaaattattttagtaaaagagcgggctatcctaaatggaagtcgaaaaaaagtcattggcaatcttataccacaaataatcaaaaacatacaatttattttattggggaagaattaaagttacctaaacttaagtctttagtaaaagccaatttgcatagagaaattttgggcgaaataaagtcagcgacgatttcagctaaaaacaatcaattgttttttgtttcaattctgtgtttagaaaacgtgatgtctttacccaaaacgggtgagtctataggagttgcttattgttctgaaaacttagttcaaatgtcatctacgaatgtttttcttagtcgtaaaagtaattcttactatcagttgaaaacagctaagaaaagattggaacttcgagcaaagttagcaaaaaaaagaaaagtgttgttgagtcaggccaaaaattatcaaaagcaaaaaaggaaagtccagaaattgtatatgataattgataaccaaagaaacgattatattaaccaattaacttatttcttagtgaaaaactatgattatatctatttggaaaagcatccgaaattcagtgaaaatgcaaaattttcggaaactgattggcaacatcttttaaggaaaatacagtataaagtaagttggtataataagcagctggcatttgttgcccctgacacaaaagaaagtgaagagaagtgctttactattgagcaattgggcagacagctaactactagttaaaattattaggaactggaaggagcgccagggatcgcctagggtatagaaaaaatctttatgatttttgtttctaggaatattgctcac

SEQ ID NO: 1044 - RNA, 1172 nt, synthetic construct
  source 1..1172: mol_type = other RNA
atgaaggctctgaaagcttataaatacagactttatccaacctcaaaacaagaacagtttattcaaaaaacattttcttgtgttcgcttggtgtataatttaatgttacaagaccggattgatatctacaaagagatgcgaaaaaatcctcaacaaacgtttaaaatgccaacgccagctaaatataagaaacaataccctgtcctcagagaagttgatagtttagccttggcaaatgcacaagtttatttggatcgagcctttaaaaatttttatcgggaaaaagggatgggctttccaaaaaagaaaaagaaagaaacggtgcattcctacactacgaacaatcaacatggcacggtcaaaattttggataatcgttatttgaaagtacctaaattgaaatctttaattaaaatgaaggtacaccgccaaccgctgggggagataaaatctgtaactatttctatgagtgcgagtcacaattattatgtttccattttgtgtgaagcgccgattgaaacgaaaacaaagcaacaaaaaatggtgggaatttgtagcagtagggaaaaatttgcgctgctttcgaatggtgaaagcttcgaaaaaagctattgttcaaagcatttaaagcaaaaactacgtcaagaagaacgaaaattaaacaagcgtaaaatgattgttttagaaaaaggtgtcgatctttcgcaagcaaaaaattatcaaaaacaaaaaataaaagtcgcaaaaattcgcgaaaaaatagccaaccaacgaacggatattttaaacaaaattacaacggaattggtttcaagttacgatgttatttgtattgaaaaagcccatcacagtaatgagcggccgccaaaacatgatcgttctgaactggcttggtctttatttttagctaaactgttgtataaagcacaatggtatggcaaagaactcatttgtattgagtcagaggagatcgaaacagagttgtctttttctgaaagtacagaaaattcagagtatcttagaagccaaaaaatcttagaacgtggcttgtctaaacgagaaaccttataaatagaagaactgtagggactacagggatcgcctaggggatagaaaatgtacaccatgtgttgaaccatttgtttctaggaagtcacattgggacagtccac

SEQ ID NO: 1045 - RNA, 1300 nt, synthetic construct
  source 1..1300: mol_type = other RNA
gtggaacgactaaaagcgtacaaattcagaatctatccaacagaggaacaagaaatcttctttgccaaaacttttggttgcgttcgtaaggtctacaatctaatgcttaatgatcgaaaaaaagcatatgaagaagttaaaaatgatccttctaaaaaaatggcttttccaacaccagctaaatataagaaagaatttccatttctgaaagaagtggatagccttgctttggccaatgcccaacttcatttagataaagcatacaagaatttttttcgggataaatctgttggctttccacgtttcaaaagtaagaaaaatcctgttcagagttatacaacgaataatcaaaagggtaccattgctttgattggtagtaaattcataaaacttcctaaattgaaatcattagtaagaattaagcttcatagacaaccaaaagggatgattaaatctgcgacaatatcacgtcattctagtggcaaatactatatttctttgttatgtaaagaagaaattagcgagttacctaaaaccaattctgccattggcattgacttaggtattacagactttgcgattctttcagatgggcaaaaaattgataatcataaattcacgtccaaaatggaaaagaaattaaaacgtgaacaacgtaagttgtcaagacgggcattattagccaaacaaaaaggtatcaatctgtttgaagctaaaaattatcaaaaacaaaaacgtaaagttgctagattacatgaaaaagtaatgaatcaacgtactgattttctgaataagttaagtacagaaattatcaaaaatcacgatattatctgtattgaagacttaaacgtaaaaggtatgttgcgtaatcataaattagcaagaagtatttctgatgtatcttggtctagctttgtggctaagttgcaatacaaagcggactggtatggacgtgaaatcatcaaagtgaatcagtggtttccgtctagtcaaatttgttcagaatgtggacataaagacggtaagaaaccgctagatatttgagaatggacttgccctatttgccatactcatcatgaccgagatatcaacgctagtatcaatatactgatcgaaggtctaagaataaaaacattagcttaggcacaatcaaaaaccgtaggaactacggggatagcttggtaaataagagaaacctctgttagtgaagaaataagctatcaagtatgctctattcccaagaagctcccacttcaagcgttaagaaccgttaggtttagctaagtggtgagtagttcac

SEQ ID NO: 1046 - RNA, 1078 nt, synthetic construct
  source 1..1078: mol_type = other RNA
ctgggtgttttaaaagcatacaaatttcggatctatcctaatggacagcaaaaacagtttttcatcgaaaccttcggctgtgtacgttttacgtacaatcaactgctggaggcaaagatggaggagctggccaacaatgaagcaaagcaagggttgacgccagccaaactaaaaaaggagtatccttttttgaaggagaccgatagtttggcattggcgaatgcacaacggaatctggaccgagcgtttcgaaattactttcaaaagcgggctggctttccaaaaatgaaaaccaaaaaaagtatctggcaatcgtataccaccaataatcagcagcacaccatttattttaaagacgatcaaatcaagctgccaaagcttaaaacattggttcccgtaaaaaagcatcgggcgatcaaagggaagatcaaatcggcaacgatctcagcaaaaaacaacgaagagttttacatctcgatcctttgtttggaagagatcccgcaattgccgaagcagcaagcctctgtcgctgttgtttatgatccgcagcagttggtcaaagccaaccagccgatacccatcacctgtgagcatgccatccaaacgaagcaaaagctgacgcgagcagaacgcaaacttcaggtgaaagcgacggcggtcaaacggaagaaaatccttttgacccaggcgcgaaattatcagaagctaaaaggaaaggtcgctcgcctttatcgttttcactgctgtcaaaagcgggaattcatcgatcaagtcagctaccatctcgtaaaacagtacgatacgatctatttggaacaaatcgcagaagatacggttttaaaagctggtcattacagcatcagtgattggcatcaattcgttcgcaaaatccagtacaaagcgcagtggtacggcaaagaactgcgttttgtcacgttggatacgcatgaccaacagaagctagaacggctctcaggcgaaatgagcagctgagtcgcttgaactggaaggaacgccagggatcgcctagggtatagaaaaaatctttctgatttttgtttctaggaaccacgttcac

SEQ ID NO: 1047 - RNA, 1078 nt, synthetic construct
  source 1..1078: mol_type = other RNA
ctgggtgttttaaaagcatacaaatttcggatctatcctaatggacagcaaaaacagtttttcatcgaaaccttcggctgtgtgcgttttacgtacaatcaactgctggaggcaaagatggaggagctggccaacaatgaagcaaagcaagggttgacgccagccaaactaaaaaaggagtatccttttttgaaggagaccgatagtttggcattggcaaatgcacaacggaatctggaccgagcgtttcgaaattactttcaaaagcgggctggctttccaaaaatgaaaaccaaaaaaagtatctggcaatcgtataccaccaataatcagcagcacaccatttattttgaagacgatcaaatcaagctgccaaagcttaaaacattggttcccgtaaaaaagcatcgggcgatcaaagggaagatcaaatcggcaacgatctcagcaaaaaacaacgaagagttttacatctcgatcctttgtttggaagagatcccgccattgccgaagcagcaagcctctgtcgctattgtttatgatccgcagcagttggtcaaagccaaccagccagtccccatcacctgtgaacatgctatccaaacgaagcaaaagctgacgcgagcagaacgcaaacttcaggtgaaagctacggcggtcaaacggaaaaaaatccttttgactcaggcgcgaaattatcagaagctaaaaggaaaggtcgctcgcctttatcgttttcactgctgtcaaaagcgggaattcatcgatcaagtcagctaccatctcgtaaaacagtacgatacgatctatttggaacaaatcgctgaagatacggttttaaaagctggtcattacagcatcagtgattggcatcaattcgttcgcaaaatccagtacaaagcgcagtggtacggcaaagaactgcgttttgtcacgttggatacgcaagaccaacagaagctagaacggctctcaggcgaaatgagcagctgagccgcttgaactggaaggaacgccagggatcgcctagggtatagaaaaaatctttctgatttttgtttctaggaaccacgttcac

SEQ ID NO: 1048 - RNA, 1036 nt, synthetic construct
  source 1..1036: mol_type = other RNA
gtgaaagtattaaagggttataaatttcgtatttatccaaatgaagagcaaatacaattctttattcagactttcggttgtgtacgatttacttataattgtttactatgtgcacggaaggagtctttacaaaagagaagctatgaaacaaaactttctccagcacatttaaaaaaagactatccgtttttgaaacaagcggatagtctagctttagctaatgcgcaacgcaatttagatcgtgcttttaaaaattactttagcaaaagaatgggttatccaaaatttaagacgaaaaacaatacttggcagtcttatacaaccaacaatcaaaaaaatacgatttatctggtgggaaaacaattgaagttgcccaagttgaaatcactagtctctgtgaacttgcatagggaagtttttggagaaataaagtcagcaacgatatctgcaaaaaataatcagttattttttgtgtcccttctttgcttggaagaagtgtttcctttaccaaaaactggaaaggccataggaatagcttattgtcctaaacatttagtccaattaacttcggataggtctttgccggtgtacgagtgcaaaggagttcaacatcgattaaaaagggctaataaaaaattggagcttcgtgcaaaagtagcaaagaaacgtgcggtagtggttaagcaagcaaaaaactaccaaaaacaaaaacataaagtacaaaaattaactgtgaaaaaaaataatcaaaaaagaaattatatagatcagttaactcatcttttagtccatgaatatgattctatttatttggaagaaaatccccattttatcgataatactcattttttagaagctgattggcatcattttttgcgtactattcgttataaagcgcactggtataataagaaattgatatttgttgaagatgtcaaaaaatttgatgaatttgttatgaactgaaagggacgtcagggatcgcctaggttatagaaaaaatcttaagatttttgtttctaggaatattgttcac

SEQ ID NO: 1049 - RNA, 1111 nt, synthetic construct
  source 1..1111: mol_type = other RNA
atgctaaaagcttttaaattccgtatgtatccgacagaagaacaaaaacagcaattgatccgtacttttggatgtgctcgatttacctataaccatttgctgaaaaagcggcagaaaagttggcaacaatcaggagtggccgatttttcgctcacacccgctacattaaaaaaagaatacccattcttaaaagaagtagacagtcttgctttagcaaatgcacagcttaatttggaccgggcttttcgcaattatttcaagggacgtgccagcttcccaaagcttaaaacgaaaaaaagtatgtggcaatcttatacgaccaacaaccaaacccgtacgatctatctggaaaatggctacttaaagttaccaaaacaaaaagaactaatcaagataaatcagcatcggccagttgaaggatcgattcgctccgctacgatttctgctcgatataatgaagaattctatgtcgcactactttgtgatgtttcgccagtaaaaaaagaatctttagctaaatggatcgggatcgcctatcatccgaagacattgatccaaacatctcgtcctctagaagtaactttaccaaaatttcaccagacagaagaaaagctgcaacatgcacagcggaaattgaatgtgaaagtccgctccgctcaccatagaaagatcaggttagatcaggcaagcaattatcagaaacaaaagagaaaagtaatggatctttatctgaaacaaaagaaccagcgagaagattatcttgaacaattatctgggaaattggtcaaacaatatgactacttatttgtagaatcttttccaaaagaagaagcacatgctgatttttctattcatgactggcataaattaataacaaaattgcgttataagtcccaatggtataataaaaaatttcttttgatcaataccgacggagcagaagaaagcaattccgtaagaaagagccaagtagtagaaaaaatgggcagacattcggttatcaagagataaaaaatgaatgaaactgataggagcgttagggttcgccttgttaataaaaagtcttaatgacttttgtttctaggaatttttcttttgaagaaaagctcac

SEQ ID NO: 1050 - RNA, 1078 nt, synthetic construct
  source 1..1078: mol_type = other RNA
ctgggtgttttaaaagcatacaaatttcggatctatcctaatggacagcaaaaacagtttttcatcgaaaccttcggctgtgtacggtttacgtacaatcaactgctggaggcgaagatggaagagctggccaacaatgaagcaaagcaagggttgacgccagccaaactaaaaaaggagtatccttttttgaaggagaccgatagtttggcattggcgaatgcacaacggaatctggaccgagcgtttcgaaattactttcaaaagcgggctggctttccaaaaatgaaaaccaaaaaaagtatctggcaatcgtataccaccaataatcagcagcacaccatttattttgaagaggatcaaatcaagctgccaaagcttaaaacactggttcccgtaaaaaagcatcgggagatcaaagggaaaatcaaatcggcaacgatctcagcaaaaaacaacgaagagttttacatctcgatcctttgtttggaagagatcacgccactcccgaaacagcaagcgtctatcgcggttgtttatgatccacagcagttggtcaaagccaaccagccggtacccatcacctgtgaacatgccatccaaacgaagaaaaagctgacacgagcagaacgcaaacttcaggtgaaagctacggcggtcaaacggaaaaaaatccttttgactcaggcacgaaattatcagaagctaaaaggaaaggtcgctcgcctttatcgttttcactgctgtcaaaagcgggaattcatcgatcaagtcagctaccatctcgtaaaacagtatgatacgatctatttggaacaaatcgcagaagatacggttttaaaagctggtcattacagcatcagtgattggcatcaattcgttcgtaaaatccagtacaaagcgcagtggtacggtaaagaactgcgttttgtcacgttggatacgcaggaccaacagaagctagaacggctctcaggcgaaatgagtagctgagccacttgaactggaaggaacgccagagatcgcctagggtatagaaaaaatctttaagatttttgtttctaggaaccacgttcac

SEQ ID NO: 1051 - RNA, 1078 nt, synthetic construct
  source 1..1078: mol_type = other RNA
ctgggtgttttaaaagcatacaaatttcggatctatcctaatggacagcaaaaacagtttttcatcgaaaccttcggctgtgtacggtttacgtacaatcaactgctggaggcgaagatggaagagctggccaacaatgaagcaaagcaagggttgacgccagccaaactaaaaaaggagtatccttttttgaaggagaccgatagtttggcattggcgaatgcacaacggaatctggaccgagcatttcgaaattactttcaaaagcgggctggctttccaaaaatgaaaaccaaaaaaagtatctggcaatcgtataccaccaataatcagcagcacaccatttattttgaagaggatcaaatcaagctgccaaagcttaaaacactggttcccgtaaaaaagcatcgggagatcaaagggaaaatcaaatcggcaacgatctcagcaaaaaacaacgaagagttttacatctcgatcctttgtttggaagagatcacgccactcccgaaacagcaagcgtctatcgcggttgtttatgatccacagcagttggtcaaagccaaccagccggtacccatcacctgtgaacatgccatccaaacgaagaaaaagctgacacgagcagaacgcaaacttcaggtgaaagctacggcggtcaaacggaaaaaaatccttttgactcaggcacgaaattatcagaagctaaaaggaaaggtcgctcgcctttatcgttttcactgctgtcaaaagcgggaattcatcgatcaagtcagctaccatctcgtaaaacagtatgatacgatctatttggaacaaatcgcagaagatacggttttaaaagctggtcattacagcatcagtgattggcatcaattcgttcgtaaaatccagtacaaagcgcagtggtacggtaaagaactgcgttttgtcacgttggatacgcaggaccaacagaagctagaacggctctcaggcgaaatgagtagctgagccacttgaactggaaggaacgccagagatcgcctagggtatagaaaaaatctttaagatttttgtttctaggaaccacgttcac

SEQ ID NO: 1052 - RNA, 1078 nt, synthetic construct
  source 1..1078: mol_type = other RNA
ctgggtgttttaaaagcatacaaatttcggatctatcctaatggacagcaaaaacagtttttcatcgaaaccttcggctgtgtacggtttacgtacaatcaactgctggaggcgaagatggaagagctggccaacaatgaagcaaagcaagggttgacgccagccaaactaaaaaaggagtatccttttttgaaggagaccgatagtttggcattggcgaatgcacaacggaatctggatcgagcgtttcgaaattactttcaaaagcgggctggctttccaaaaatgaaaaccaaaaaaagtatctggcaatcgtataccaccaataatcagcagcacaccatttattttgaagaggatcaaatcaagctgccaaagcttaaaacactggttcccgtaaaaaagcatcgggagatcaaagggaaaatcaaatcggcaacgatctcagcaaaaaacaacgaagagttttacatctcgatcctttgtttggaagagatcacgccactcccgaaacagcaagcgtctatcgcggttgtttatgatccacagcagttggtcaaagccaaccagccggtacccatcacctgtgaacatgccatccaaacgaagcaaaagctgatacgagcagaacgcaaacttcaggtgaaagctacggcggtcaaacggaaaaaaatccttttgactcaggcacgaaattatcagaagctaaaaggaaaggtcgctcgcctttatcgttttcactgctgtcaaaagcgggaattcatcgatcaagtcagctaccatctcgtaaaacagtatgatacgatctatttggaacaaatcgcagaagatacggttttaaaagctggtcattacagcatcagtgattggcatcaattcgttcgtaaaatccagtacaaagcgcagtggtacggtaaagaactgcgttttgtcacgttggatacgcaggaccaacagaagctagaacggctctcaggcgaaatgagtagctgagccacttgaactggaaggaacgccagggatcgcctagggtatagaaaaaatctttaagatttttgtttctaggaaccacgttcac

SEQ ID NO: 1053 - RNA, 1111 nt, synthetic construct
  source 1..1111: mol_type = other RNA
atgctaaaagcttttaaattccgtatgtatccgacagaagaacaaaaacagcaattgattcgtacttttggatgtgctcgatttacctataaccatttgctgaaaaagcggcagaaaagttggcaacaaacaggagtagccaatttttcgctcacacccgctacattaaaaaaagaatacccattcttaaaagaagtagacagtcttgctttagcaaatgcacagcttaatttggatcgggcttttcgcaattatttcaagggacgtgccagcttcccaaagcttaaaacgaaaaaaagtatgtggcaatcttatacgaccaacaaccaaacccgtacgatctatctggaaaatggctacttaaagttaccaaaacaaaaagaactaatcaagataaatcagcatcggccagttgaaggatcgattcgctccgctacgatttctgctcgatataatgaagaattttatgtcgcactactttgtgatgtttcgccagtaaaaaaagaatctttagctaaatggatcgggatcgcctatcatccgaagacattgatccaaacatctcgacctctagaagtaactttaccaaaatttcaccagacagaagaaaagctgcaacatgcacagcggaaattgaatgtgaaagtccgctccgctcaccatagaaagatcaggttagatcaggcaggcaattatcagaaacaaaagagaaaagtaatggatctttatctgaaacaaaagaaccagcgagaagattatcttgaacaattatctgggaaattggtcaaacaatatgactacttatttgtagaatcttttccaaaagaagaggcacatgctgatttttctattcacgactggcataaattaataacaaaattgcgttataagtcccaatggtataataaaaaatttcttttgatcaataccgacggagcagaagaaagcaattccgtaagaaagagccaagtagtagaaaaaatgggcagacattcggttatcaagggataaaaaatgaatgaaactgataggagcgttagggttagccttgttaataaaaagtcttaatgacttttgtttctaggaatttttcttttgaagaaaagctcac

SEQ ID NO: 1054 - RNA, 1078 nt, synthetic construct
  source 1..1078: mol_type = other RNA
ctgggtgttttaaaagcatacaaatttcggatctatcctaatggacagcaaagacagtttttcatcgaaaccttcggctgtgtacgttttacgtacaatcaactgctggaggcaaagatggaggagctggccaacaatgaagcaaagcaagggttgacgccagccaaactaaaaaaagagtatccttttttgaaggagaccgatagtttggcattggcgaatgcacaacggaatctggaccgagcgtttcgaaattactttcaaaagcgggctggctttccaaaaatgaaaaccaaaaaaagtatctggcaatcgtataccaccaataatcagcagcacaccatttattttgaagacgatcaaatcaagctgccaaagcttaaaacattggttcccgtaaaaaagcatcgggcgatcaaagggaagatcaaatcggcaacgatctcagcaaaaaacaacgaagagttttacatctcgatcctttgtttggaagagatctcgccattgccgaagcagcaagcctctgtcgctgttgtttatgatccgcagcagttggtcaaagccaaccagccgatacccatcacctgtgaacatgccatccaaacgaagcaaaagttgacgcgagcagaacgcaagcttcaggtgaaagcgacggcggtcaaacggaaaaaaatccttttgacccaggcgcgaaattatcagaagctaaaaggaaaggtcgctcgcctttatcgttttcactgctgtcaaaagcgggaattcatcgatcaagtcagctaccatctcgtaaaacagtacgatacgatctatttggaacaaatcgcagaagatacggttttaaaagctggtcattacagcatcagtgattggcatcaattcgttcgtaaaatccagtacaaagcgcagtggtacggcaaagaactgcggtttgttacgttggatacgcaggaccaacagaagctagaacggctctcaggcgaaatgagcagctgagccgcttgaactggaaggaacgccagggatcgcctagggtatagaaaaaatctttctgatttttgtttctaggaaccacgttcac

SEQ ID NO: 1055 - RNA, 1078 nt, synthetic construct
  source 1..1078: mol_type = other RNA
ctgggtgttttaaaagcatacaaatttcggatctatcctaatggacagcaaaaacagtttttcatcgaaaccttcggctgtgtacgttttacgtacaatcaactgctggaggcaaagatggaggagctggccaacaatgaagcaaagcaagggttgacgccagccaaactaaaaaaggagtatccttttttgaaggagaccgatagtttggcattggcgaatgcacaacggaatctggaccgagcgtttcgaaattactttcaaaagcgggctggctttccaaaaatgaaaaccaaaaaaagtatctggcaatcgtataccaccaataatcagcagcacaccatttattttgaagacgatcaaatcaagctgccaaagcttaaaacattggttcccgtaaaaaagcatcgggcgatcaaagggaagatcaaatcggcaacgatctcagcaaaaaacaacgaagagttttacatctcaatcctttgtttggaagagatcccgccattgccgaagcagcaagcctctgtcgctgttgtttatgatccgcagcagttggtcaaagccaaccagccgatacccatcacctgtgagcatgccatccaaacgaagcaaaagctgacgcgagcagaacgcaaacttcaggtgaaagcgacggcggtcaaacggaagaaaatccttttgacccaggcgcgaaattatcagaagctaaaaggaaaggtcgctcgcctttatcgttttcactgctgtcaaaagcgggaattcatcgatcaagtcagctaccatctcgtaaaacagtacgatacaatctatttggaacaaatcgcagaagatacggttttaaaagctggtcattacagcatcagtgattggcatcaattcgttcgcaaaatccagtacaaagcgcagtggtacggcaaagaactgcgttttgtcacgttagatacgcaggaccaacagaagctagaacggctctcaaacgaaatgagcagctgagccgcttgaactggaaggaacgccagggatcgcctagggtatagaaaaaatctttctgatttttgtttctaggaaccacgttcac

SEQ ID NO: 1056 - RNA, 1078 nt, synthetic construct
  source 1..1078: mol_type = other RNA
ctgggtgttttaaaagcatacaaatttcggatctatcctaatggacagcaaaaacagtttttcatcgaaaccttcggctgtgtacgttttacgtacaatcaactgctggaggcaaagatggaggagctggccaacaatgaagcaaagcaagggttgacgccagccaaactaaaaaaggagtatccttttttgaaggagaccgatagtttggcattggcgaatgcacagcgaaatctggaccgagcgtttcgaaattactttcaaaagcgggctggctttccaaaaatgaaaaccaaaaaaagtatctggcaatcgtataccaccaataatcagcagcacaccatttattttgaagacgatcaaatcaagctgccaaagcttaaaacattggttcccgtaaaaaagcatcgggaaatcaaagggaagatcaaatcggcaacgatctcagcaaaaaacaacgaagagttttacatctcgatcctttgtttggaagagattccgccattgccgaagcagcaagcctctgtcgctgttgtttatgatccgcagcagttggtcaaagccaaccagccggtacccatcacctgtgaacatgccattcaaacgaagcaaaagctgacgcgagcagaacgcaaacttcaggtaaaagctacagcggtcaaacggaaaaaaatccttttgactcaggcgcgaaattatcagaagctaaaaggaaaggtcgctcgcctttatcgttttcactgctgtcaaaagcgggaatttatcgatcaagtcagctaccatctcgtaaaacagtacgatacgatctatttggaacaaatcgcagaagatacggttttaaaagctggtcattacagcatcagtgattggcatcaattcgttcgcaaaatccagtacaaagcgcagtggtacggcaaagaactgcgttttgtcacgttggatacgcaggaccaacagaagctagaacggctctcaggcgaaatgagcagctgagtcgcttgaactggaaggaacgccagggatcgcctagggtatagaaaaaatctttctgatttttgtttctaggaaccacgttcac

SEQ ID NO: 1057 - RNA, 1172 nt, synthetic construct
  source 1..1172: mol_type = other RNA
atgaaggctctgaaagcttataaatacagactttatccaacctcaaaacaagaagagtttattcaaaaaacattttcttgtgttcgcttggtgtataatttaatgttacaagaccggattgatatctacaaagagatgcgaaaaaatcctcaacaaacgtttaaaatgccaacgccagctaaatataagaaacaataccctgtcctcagagaagttgatagtttagccttggcaaatgcacaagtttatttggatcgagcctttaaaaatttttatcgggaaaaagggatgggctttccaaaaaagaaaaagaaagaaacggtgcattcctacactacgaacaatcaacatggcacggtcaaaattttggataatcgttatttgaaagtacctaaattgaaatctttaattaaaatgaaggtacaccgccaaccgctgggggagataaaatctgtaactatttctatgagtgcgagtcacaattattatgtttccattttgtgtgaagcgccgattgaaacgaaaacaaagcaacaaaaaatggtgggaatttgtagcagtagggaaaaatttgcgctgctttcgaatggtgaaagcttcgaaaaaagctattgttcaaagcatttaaagcaaaaactacgtcaagaagaacgaaaattaaacaagcgtaaaatgattgctttagaaaaaggtgtcgatctttcgcaagcaaaaaattatcaaaaacaaaaaataaaagtcgcaaaaattcgcgaaaaaatagccaaccaacgaacggatattttaaacaaaattacaacggaattggtttcaagttacgatgttatttgtattgaaaaagcccatcacagtaatgagcggccgccaaaacattatcgttctgaactggcttggtctttatttttagctaaactgttgtataaagcacaatggtatggcaaagaactcatttgtattgagtcagaggagatagaaacagagttgtctttttctgaaagtacagaaaattcagagtatcttaaaagccaaaaaatcttagaacgtggcttgtctaaacgagaaaccttataaatagaagaactgtagggactacagggatcgcctaggggatagaaaatgtacaccatgtgttgaaccatttgtttctaggaagtcacattgggacagtccac

SEQ ID NO: 1058 - RNA, 1202 nt, synthetic construct
  source 1..1202: mol_type = other RNA
gtgaaaatactaaaagcctgtaagtacagactgtacccaacttcttctcaaattgaattttttgaaaagactttttcgagtgtctatctggttcacaatcttctgttgcaggatcgaatcaatttatacaaagaagcaaagaagaacccaaatagcaaaaagagcccaccgactccggcaaagtataaaagggaatatcctttgctgaaagaggttgatagtctcgctcttgcaaatgcgcaagttcatttagagcgggcgctaaaacgttactacagtgggaaggacgttggctttcccaaaatgaaatcgaagaaaaacccggttaattcatacacaaccaacaatcaaaatggaacaataaagtttgttggtctaaattgtttgaaaattccgaaattaaaatcattaataaaagtaaaggtacaccgtgaaccgaagggaaagataaagtctgcgacaatctcaaggtcttccactggaaaatactttgtgtcaattctctgcgaagaaacaatctgttgtcaaaaaaagacgaatagagcagttggaatcagcttaggatgttctgagctggctgttttatcaaacggccgcagaattgataacgatcatctgacggaagaaattgagaggaaaattcaacgagaagaaaagaagctggccagaaaaaaatatttggctagtgcaaaaggtctggatttgctggaacagaaaaattatcagaaacaaaaaatgaaggttgccagattgagggaacgcttgttgaatcaacgaaatgattttttgaataaagtgacgactcatctggttaaggaatatgatttaatctgtattgaagatgcgcataaaaaggaatttaatcgaaattgcaagctaacgaaacgagtttcggatgtttcctggtcgctgtttgtttccaagctggaatacaaagcgatgtggcatgataaacaactgattaagttgaaaaaaaatgatgacaaaatagtgacaacagcgtcgacagaaatgacattggatatcgatccggagctcagtaaaaatgatccggagactgctgccagtattcaactgttgttacagggattgaaccagtaagtatgaagaactgtagggactacaggggtagcttagggcatagaagatattaaattatctgtttctaagaagctcttcaattaacttgaggggcagttcac

SEQ ID NO: 1059 - RNA, 1241 nt, synthetic construct
  source 1..1241: mol_type = other RNA
atgaaggtattaaaggcgtataaatacagactttaccctactttactgcaagaagaattcataaaaaaaacgttctcttgtgttcgacttgtgcataatcttttattacaggaaagaactcaactttataaggaactgaaaaataatcctgatttaaaagtgaagttgccaacaccggctcaatataaaaaagagcatccttgtttaaaggaagtggatagtttagcattatcaaatgcgcaggtttacttggaccgtgctttcaaaaaatttcatagagaaaagtcggtgggttttcctaagttaaaacaaaagaaaaacgctgtcacatcttacacaacgaataatcaaaatgggacaattaaaattattgacgaaaaatatttaaaagtacctaaactgaaatcgttgattaaaatgaaattgcatcgtccggtaatagggaaaataaagtcagcaacaatttctttgaccccgagtaataagtattttgtttcgattctttgtgaagaggagattcctaaagttgaaaagacatattcagcaatcgggataacattaggagcttcggaatttgctgtattatcaaatggtaaacgtgtcgataatgataaatttacaaaagaatttgagcagcgaatcactagagaggaaagaaagttaacacgacgaaaagaaattgctaaatcaaaaaacacagaattgtcacagcaaaaaaattatcagaagcaaaaactgaaagttgcaaaaatgcgggaaaagttaatgaatcaacgaatcgattttctgaataaaatcaccacagaaattgttagaaaatatgatttgatttgtatagaagatattcatcaagcagactttttcagaaattccaaattgcatcgaggggtttcagatgtttcttgggcactatttgtatcaaaacttgaatataaagcagcatggtataagaaaagattgatcaaggtttcagcatgtgggaaatgttcggaacattcagataatagtttggtgagccaaatattcactcaagatatcaatgagaaaaaagggcagcatgatcctgagactgctgctagtattcaagtcttgatacaaggattgagagatacaaaagccaattaaaaaatgaagaactgtagggactacagggatagcctagggtatataagatagatatagcgtttagtcgatcatttatctttttctaggaaatttctagttaaatagaaatagttcac

SEQ ID NO: 1060 - RNA, 1241 nt, synthetic construct
  source 1..1241: mol_type = other RNA
atgaaggtattaaaggcgtataaatacagactttaccctactttactgcaagaagaattcataaaaaaaacgttctcttgtgttcgacttgtgcataatcttttattacaggaaagaactcaactttataaggaactgaaaaataatcctgatttaaaagtgaagttgccaacaccggctcaatataaaaaagagcatccttgtttaaaggaagtggatagtttagcattatcaaatgcgcaggtttacttggaccgtgctttcaaaaaatttcatagagaaaaatcggtgggttttcctaagttaaaacaaaagaaaaacgctgtcacatcttacacaacgaataatcaaaatgggacaattaaaattattgacgaaaaatatttaaaagtacctaaactgaaatcgttgattaaaatgaaattgcatcgtccggtaatagggaaaataaagtcagcaacaatttctttgaccccgagtaataagtattttgtttcgattctttgtgaagaggagattcctaaagttgaaaagacatattcagcaatcgggataacattaggagcttcggaatttgctgtattatcaaatggtaaacgtgtcgataatgataaatttacaaaagaatttgagcagcgaatcactagagaggaaagaaagttaacacgacgaaaagaaattgctaaatcaaaaaacacagaattgtcacagcaaaaaaattatcagaagcaaaaactgaaagttgcaaaaatgcgggaaaagttaatgaatcaacgaatcgattttctgaataaaatcaccacagaaattgttagaaaatatgatttgatttgtatagaagatattcatcaagcagactttttcagaaattccaaattgcatcgaggggtttcagatgtttcttgggcactatttgtatcaaaacttgaatataaagcagcatggtataagaaaagattgatcaaggtttcagcatgtgggaaatgttcggaacattcagataatagtttggtgagccaaatattcactcaagatatcaatgagaaaaaagggcagcatgatcctgagactgctgctagtattcaagtcttgatacaaggattgagagatacaaaagccaattaaaaaatgaagaactgtagggactacagggatagcctagggtatataagatagatatagcgtttagtcgatcatttatctttttctaggaaatttctagttaaatagaaatagttcac

SEQ ID NO: 1061 - RNA, 1242 nt, synthetic construct
  source 1..1242: mol_type = other RNA
atgaaggtattaaaggcgtataaatatagactttaccctacgttactacaagaagaattcatcaaaaaaacattttcttgtgttcgacttgtgcataatcttttattacaggaaagaattcagctttataaggagttgaagaaaaatcctgatttaaaagtaaagttacccactcctgctcattataaaaaagagcatccttgtttaagggaagtggatagtttagcattatcaaatgcgcaggtttacttggatcgagcatttaaaaaatttcatagagagaaatcagtgggatttcctaagctaaaacaaaagaagaacgctgtcagatcttacacaacgaacaatcaaaatggaacgattaaaattattgacgataaatatttgaaagtgcctaaattgaagtcgttgattaaaatgagaatgcatcgtccagtaatagggaaaataaaatcagcaacaatttctttgacccctagcaataagtattttgtttctattctttgtgaagaggagattcctagaattgataagacgtattcagcaatcgggataacattaggagcttcggaatttgttgtattatctaatggtagacgtatcgataatgataaatttacgaaagaatttgaacagcggatcactagagaagaaagaaaactaaaacggcgaaaagaaattgctaaattaaaaggaacagaattatctcggcaaaaaaattatcaaaagcaaaagctaaaagtagcgaaaatgcgagaaaagttaacgaatcaacgaatcgattttctgaacaaaatcacaacagaaattgttaagaaatatgatttgatctgtattgaagacattcagcaagcagattttttcagaaattctaaattacaacgtggattttcagatgtttcgtgggcgttatttgtctcaaaactcgaatataaagcaacatggtataataaaaggatgatcaaagtttcagcatgcgggaaatgttcggaacattcagataataatccggtgagtcagatatttatgcaagatatcgatgagaaaacaggacggcatgatcctgagacggctgctagtattcaagtgttgatgcaaggattaaaggaaataatgacttattaaaaaagtaaaaaactgtagggactacagggctagcctagggtatataagatagatataacgtttagtcgattatttatctttttctaggaaatttctaacttcatagaaatagttcac

SEQ ID NO: 1062 - RNA, 1250 nt, synthetic construct
  source 1..1250: mol_type = other RNA
atgaaggtattaaaggcgtataaatacagactttaccctacttcattacaagaagaatttattaaaaaaactttttcttgtgtacggcttgtgcataatcttttattacaggaacgaatccaactatataaaaatttgaaagaaaatcctaatttaaaagttaaattaccgacacctgctcaatataaaaaagagcatccttgtttaaaggaagtagacagtttagccttatcaaacgcacaagtttacttggatcgggcatttaaaaattttcatagggagaaatcagttggttttcctaagttaaaacaaaagaaaaactctgtaacttcttacacaacgaataatcaaaacggtacagttaagattattgatgaaaaatacttaaaagtgcctaaactaaaatcgttgatcaaaatgaaaatgcatcgtccgataatggggaaaataaagtccgcaacgatttctttgactccgagtaaaaagtattttgtctcgattctttgtgaagaagacattcctaaagttgagaaaacttattctgcgatcgggataactttaggagcttctgaatttgctgtattatcaaatggcagacgtatcgacaatgataaatatacgaaagaatttgaacagcggatcactagagaagaaagaaaattaacaaggcgcaaagaaattgcaaaagtaaaaggaatagaactttcacaacaaaagaattatcagaaacaaaaactaaaagtagcaaaaatgcgggaaaagctaatgaatcaacgaatcgattttctaaataagattactacagaaattgttagaaaatatgatttgatttgcattgaagatattcatcgagccgatttttttagaaataataagttgcatcgtgggatctcagatgtttcttgggcgctttttgtatcaaaattagaatataaagcctcttggtataataaaagattgatcaaagtttctgcatgcggaaaatgttctgaacattcagataataaaagcgtaagtcaaatatttattcaagatattgatgaaaaaaaaggaatacaggatccagaaactgcagcaagtatacaagtgttagttcaaggattaaaggaatcagtagctaattaaatagaaaatgaataaaagaactgtagggactacagggatagcctaggggatataagatagatatagcgtttagtcgatcatttatctttttctaggaaatttctagttaaatagaaatagttcac

SEQ ID NO: 1063 - RNA, 1248 nt, synthetic construct
  source 1..1248: mol_type = other RNA
atgaaggtattaaaggcgtataaatacagactttaccctacttcattgcaagaagaatttatcaaaaaaactttttcttgtgtacggcttgtgcataatcttttattacaggaacgaatccaattatataaaaatttgaaagaaaatcctggtttaaaagttaaattgccaacaccagctcaatacaaaaaagagcatccttgtttaaaggaagtagacagtttagccttatcaaacgcacaagtttacttggaccgggcatttaaaaattttcatagagagaaatcagttggttttcctaagttaaaacaaaagaaaaactctgtaacatcttacacaacgaataatcaaaacggtacgattaagattattgacgaaaaatacttaaaagtgcctaaactaaaatcgttgatcaaaatgaaaatgcatcgtccagtaatagggaaaataaagtccgcaacgatttctttgactccgagtaaaaagtattttgtctcgattctttgtgaagaggacattcctatagttgagaagacttattctgcaatcgggataactttaggagcttctgaatttgctgtattatcaaatggtagacgtatcgacaatgataaatatacgaaagaatttgaacagcggatcactagagaagaaagaaaattaacaaggcgtaaagaaattgcaaaagtaaaaggaatagaactttcacaacaaaagaattatcagaaacaaaaactaaaagtagcgaaaatgcgggaaaagctaatgaatcaacgaatcgattttctaaataagatcactacagaaattgttagaaaatatgatttgatttgcattgaagatatccatcgagccgatttttttagaaataataagttgcatcgtgggatctcagatgtctcttgggcactgtttgtatccaaattagaatataaagcctcttggtataataaaagattgatcaaagtttctgcatgcggaaaatgttctgaacattcagataataaacgcataagccaaatatttattcaagatattgacgaaaaaaaaggaatacaggatccagaaactgcagctagtatacaagtattagttcaaggattaaaagaatcagtagctaattaaatagaaaatgaataaaagaactgtagggactacagggatagcctagggcatataagatagatatagcgtttagtcgatcatttatctttttctaggaaatttctagtaatagaaatagttcac

SEQ ID NO: 1064 - RNA, 1238 nt, synthetic construct
  source 1..1238: mol_type = other RNA
atgaaggtgttaaaagcgtataagtataggctttaccctacttcaatacaggaagaatttattaaaaaaactttttcttgtgtaaggcttgtgcataatcttttgttgcaggaacggattcagttatataagcagctgaaggaaaatcctgatttaaaagttaagttgccaacacctgctcaatataaaaaagagtatccttgtttaaaggaagtggatagtttagctttatcgaacgcacaagtttatttggatcgagcatttaaaaaatttcacagagaaaagtctattggttttcctaagttgaaacagaagaaagattccgtttcctcttatacgacgaacaatcaaaatggtacagtaaaaattattgatgaaaaatatttgaaagtacctaagttaaaatcgttagtgaaaatgaaaatgcatcgtccagtaatagggaaaataaagtcagtaacgatttctttgactcctagtaataagtattttgcttcaatcttgtgtgaagaggaaattccaacgatcgagaagacgtattcggcggttggcataaccttaggtgcttctgaatttgcggtattatcaaacggtagacgtatcgacaatgataaatttacgaaagaatttgagcagcgaatcactagagaggaacgaaaactgacacggcgtaaagaaattgcaaaagcaaaaggaactgatctttcgcaacaaaaaaattatcagaaacaaaagctgaaagtagcaaaaatgcgggagaagttgatgaatcagcgaatcgattttcttaataagattacgacagaaattgttcgaaagtatgatttgatttgcatagaagatattcatcaagctgatttttatagaaatagtaagttgcatcgtggtatctcagatgtttcttgggctttatttgtttcaaagcttgaatataaagctacatggtataacaaaagagtaatcaaggttttagcttgcaaaaaatgttctgaacattcagaaaatagtgtgagtcaaatttttactcaagatatcaatgagcaaaaaggactgcaagatcctgagaccgctgctagtatcaacgtattgatccaaggattgaaagaaacaacaggtaactaacaaagcaaagaactgtagggactacagggatagcctagggcatataagatagatatagcgtttagtcgatcatttgtctttttctaggaaatttctagttactagaaatagttcac

SEQ ID NO: 1065 - RNA, 1205 nt, synthetic construct
  source 1..1205: mol_type = other RNA
gtgaaagtattgaaagcctgcaaatacagactctatccaacttcttctcagattgaattttttgaaaaaacattttccagtgtgcacttggttcataatcttctattacaggatcgaattgctctgtataaagaagcaaagaagaacccccaaaggaagaacagcctgccaactccggcaaagtataaaagggaatatcctttgcttaaagaggtggacagtctggcactggcaaatgcacaggttcatttagaacgggcactaaaacgtttctatagtggaaaggatgttggctttcccaaaatgaagtcaaagaaaaatccggttacttcctatacaaccaacaatcaaaagggaacgataaaaattgtcggtttaaattgtttgaaaattccaaaattaaaaacgttgattaaattaaaggtgcatcgtgaaccaaaagggaaaatcaaatcagctacgatttcaagatcttcaacaggcaagtattttgtatcgatcctttgtgaagagactattcagtgccgtaaaaaaacaaatagggctgtcggaatcactctgggttgttcagaattagccattttatctaatggtcaaagaatcgataatgatcaactgacgaaagaaatcgagggaagaattcaacgggaagaaaaaaagctggctcgaaaaaaacaattggccagtgaaaaaggtctggatctgctggaacagaagaactatcaaaaacaaaaaatgaaggttgccagattaagagaacgattattgaatcagcgtcatgattttttaaataaggtgacaacaaatctggtaaatgaatatgatttgatctgtatcgaggatgcacataaaaaagaattcaatcgaaactgtaaattgaataaacgggtttctgatgtttcatggtctctatttgtttccaagctggagtataaggctatgtggcacgataagcagctaatcaagctcaaacgaagctgcactgaagaaccatgtgctaaacctttaacagaactgctgttggatatcgatagcgagaacggcaagcacgacaaagaaattgcttcgagtattcaactgttgtttcaaggattaaatcagtaagtgtgaaaaactgtagggactacagggctagcttagggtatataagataatcgattatctgtttctaagaagccctttaagggatttaaagggcagttcac

SEQ ID NO: 1066 - RNA, 1233 nt, synthetic construct
  source 1..1233: mol_type = other RNA
atgagggttttaaaggcttataagtatcggctttatcctacctccgctcaagaggagtttataaaaaaaactttttcttgtgttcgtcttgtgtataatcttttgcttcaggatcggatcgctctttataaagcattgaaagaaaatcccgatcttactgtcaaacttccgacacctgctcaatataaaaaagagcatccttgtttaaaagaagtagatagtttggccttagcgaatgcacaagtttatctggatcgagcatttaaaaaatttcatagagaaaaaggcgtgggtttccccaagttgaaacaaaagaaagattctgtttcatcttatacgaccaacaatcaaaatggaacgatcaaaattatcgatgataaatgtataaaggttcctaaattaaaaacgccgatgaaagtgaaaatgcatcgtccgataaaaggaaaaataaagtcagcaacgatttctttaacacctagtcataagtatttcatttcgatcctttgtgaagaggaagttccggaagtagagaaaacctattctgctatagggatcacattaggtacctctgaatttgcggtgctatcaaacggtagacgtatcgataatgataagtacaccagagaattcgagcagcggcttgcacgggaagaaagaaaactagtcaggcgtaaagaaattgctaaagtaaaaggtacagaactatcccagcaaaaaaactatcagaaacaaaaattgaaggtagctaaaatgcgggaaaaattaatgaatcagcgaacagattttttgaataaaattacaacggaaatcgttcgtaaatatgatgtcatatgcattgaagatattcatcaaacagaagtttatagaaatagaaaacttcatcgaggaatttcagatgtatcttgggcactgtttgtttcaaaattagaatataaagcttcttggtataataaaagattgatcaaggtttctgcttgcaatgaatgttctgaacattcagaaaataaaaaacaaagtaagatctttcttgaagatatcgataaacaaaaaggagcttctgatccagaaacagcagcgagtatccatgttttgaacaaaggattaagctattaaaaacatttatcaaaaactgtagggactacagggttagcctagggaatataaggtagatacagcgatgattcgatcatttatctttttctaggaaatttctattcaatagaaatagttcac

SEQ ID NO: 1067 - RNA, 1204 nt, synthetic construct
  source 1..1204: mol_type = other RNA
gtgaaagtattaaaggcctataaatatagactttatccaactccttcccaaattgaattttttgaaaaaaatttttacagtgtcagtctggttcataatttattgctgcaggatcggatcatgcagtacagagcttctaaaaaaaatcccgatctgcatttaaagcctcccactcctgcaaaatataagaaagaatatccttttttaaaggaagccgacagccttgcgctggcaaatgcgcaggtctatttggaaagagggttaaaatattactatacgggaaaaaatgttggttttcccaaattgaaatccaggaaaaatccggtgacctcctatacgacgaataatcagggaggaacaataaaaattatcggtttaaattatttgaaaattccgaaattaaaaacatttgtgaaagttaaggcacatcgggagataaagggtaaaattaaatctgcaacgatttccaaaactcccagcggtaaatattttgtttctcttctttgtgaggaaaaaattcattgcaaggaaaagacaaatagggctgtgggaatcagtcttgggcagacagaatttgcggttttatcaaatggtcaaaaaatagataatgaccagctgactgacgaaatagaacagagaattcgacgagaggaaaagaaactggcaagaaaaaaacacttggctggtagaaaaggattggatttgctgaatcaaaaaaactaccagaagcaaaaaatgaaggttgctaaattaagggagaaacttttgaatcagcgtcatgatttcttaaataaagtaacaacagaactgattgatacctatgatgttatctgtgtggaagatgcccataaggaggacttctgcagaaactacaaactgaataagcgagtctccgatgtctcatgggctttgtttgtttctaaactggagtataaagcgacgtggcatgacaagcagctgatcaagctgaaaaaatgtgatgaaaagatggctgtcagcttaaagaatggactaattggtgatgttgatctggaactggcaaaggaagattctgaaacagatgccagtattcaactgctgcttcaaggattaaaaaataagtaagtataaaaactgtagggactacagggatagcctagggcatataagataatccaaattatctctttctaggaagcattctgatttcagacatgcagttcac

SEQ ID NO: 1068 - RNA, 1078 nt, synthetic construct
  source 1..1078: mol_type = other RNA
ctgggtgttttaaaagcatacaaatttcggatctatcctaatggacagcaaaaacagtttttcatcgaaaccttcggctgtgtacgttttacgtacaatcaactgctagaggcaaagatggaggagctggccaacaatgaagcaaagcaagggttgacgccagccaaactaaaaaaggagtatccttttttgaaggagaccgatagtttggcattggcgaatgcacaacggaatctggaccgagcgtttcgaaattactttcaaaagcgggctggctttccaaaaatgaaaaccaaaaaaagtatctggcaatcgtataccaccaataatcagcaccacaccatttattttgaagacgatcaaatcaagctgccaaagcttaaaacagtggttcccgtaaaaaagcatcgggcgatcaaagggaagatcaaatcggcaacgatctcagcaaaaaacaacgaagagttttacatctcgatcctttgtttggaagagatcccgccattgccgaagcagcaagcctctgtcgctgttgtttatgatccgcagcagttggtcaaagccaaccagccgatacccatcacctgtgagcatgccatccaaacgaagcaaaagctgacgcgagcagaacgcaaacttcaagtgaaagcgacggcggtcaaacggaagaaaatccttttgacccaggcgcgaaattatcagaagctaaaaggaaaggtcgctcgcctttatcgttttcactgctgtcaaaagcgggaattcatcgatcaagtcagctaccatctcgtaaaacagtacgatacgatctatttggaacaaatcgcagaagatacggttttaaaagctggtcattacagcatcagtgattggcatcaattcgttcgtaaaatccagtacaaagcgcagtggtacggcaaagaactgcgttttgtcacgttggatacgcaggaccaacagaagctagaacggctctcaggcgaaatgagcagctgagccgcttgaactggaaggaacgccagggatcgcctagggtatagaaaaaatctttctgatttttgtttctaggaaccacgttcac

SEQ ID NO: 1069 - RNA, 1477 nt, synthetic construct
  source 1..1477: mol_type = other RNA
atggaacaactaaaagcatacaaattcagaatctatccaacagaggaacaagaaatcttctttgccaaatcttttggttgtgtccgtaaggtctacaatctaatgcttgatgaccgaaaaaaggcgtatgaagaagttaaaaatgattcttctaaaaaaatgacttttccgacaccagctaaatacaagaaagaatttccgtttttgaaagaaattgatagccttgctttagccaatgcccaacttaatttagataaagcatacaagaatttttttcgggataaatccgttggatttccacgtttcaaaagtaagaaaaatcctgttcagagttatacaacgaataatcaaaatggtacagttgctttgattgatagtaaattcatcaaagttcctaaattgaagtcattagtaagaattaagcttcatagacaaccaaaagggattatcaaatccgctacaatatcacgtcattctagcggtaaatattatatttctttgttatgcaaagaagaagttcgcgaactacctaaatctaattctgctgttggtattgacctaggtattatagactttgcaattctttctgatggacaaaaaattgataataataaatttacgtccaaaatggaaaagaaactcaaacgtgaacaacgtaagttgtcaagacgtgccttattagctaaacaaaaaggtatcaatctgtttgaagctagaaattatcaaacacaaaaacgtaaagtagcacgattgcatgaaaaagtaatgaatcaacgtactgattttctgaataagttgagtacagaaattatcaaaaatcacgatatcatctgtattgaagacttaaacacaaaaggcatgttgcgtaatcataaactagcaaaaagtatttcggatgtttcttggtctagttttgtgtctaaattacaatacaaggctgactggtacggtcggaaaggttctgttgcaaagttttaaatctactatcaaataaggtagaataatagaaaaagatagcaggaggaatgacgatgaatcattttaaaggaaagnnnnnnnnnnnnnnnnnnnnnnnnnnnnnnnnnnnnnnnnnnnnnnnnnnnnnnnnnnnnnnnnnnnnnnnnnnnnnnnnnnnnnnnnnnnnnnnnnnnnnnnnnnnnnnnnnnnnnnnnnnnnnnnnnnnnnnnnnnnnnnnnnnnnnnnnnnnnnnnnnnnnnnnnnnnnnnnnnnnnnnnnnnnnnnnnnnnnnnnnnnnnnnnnnnnnnnnnnnnnnnnnnnnnnnnnnnnnnnnnnnnnnnnnnnnnnnnnnnnnnnnnnnnnnnnnnnnnnnnnnnnnnnnnnnnnnnnnnnnnnnnnnnnnnnnnnnnnnnnnnnnnnnnnnnnnnnnnnnnnnnnnnnnnnnnnnnnnnnnnnnnnnnnnnnnnnnnnnnnnnnnnnnnnnnnnnnnnnnnnnnnnnnnnnnnnnnnnnnnnnnnnn

SEQ ID NO: 1070 - RNA, 1032 nt, synthetic construct
  source 1..1032: mol_type = other RNA
gtgggacatttcggtgctaaaagcttataaatttcgcatttatccaacaaatgagcaaaaggaatttttaattcaaacgtttggctgcgtgcgtttcacctataacacacttttgaagcaccatcagcaaagcggtggaggaaaaagtaaaaagttaacccctgccagtttgaaaaaggaatttttgtttttaaaggtaaccgatagtttggcgcttgccaatgcacagcaaaatttgaagcgcgcctttcaaaactattatcaaggtcggagtggttatccaaaattgaagttaaaaaaaagtgtttggcaatcttacactaccaataatcaaaaacagacaatctggttaaaagatgatttactgaaagtacctaaattaaaacagcccattgcggtccattgtcatcgcccagtcacaggtcaaattaaatcagctactattatggcaaaaaatggccagcaattctttgtctccttgttatgtgaagaacagataacgcctttacctaaaactaatgtaacgactaccttgcatttttcacctgatcagctcgtgagtggaagcgacttggtttttttccgcaccctttgtcaaaaaaacgttgaaaataagcttactaaggccaaacgtaaattagaaatcaaagctaaaagtgcgcagcaacgaggggtgaagttatcagcagcgcaaaattatcaaaaacaaaaagtaaaggtgcaacagttgtatcatcataaacagcagcaaaaaaaagcgtggatggatgaattatcccttcacttaattaaaaaatatgattttttatatatcaaagtacctcacaacattcaagagggcgtctttaccttgacagattggcaacattttttggtcaaactacaatataaagctacttggtatgataaaaaggttattttcgcagcagcagaaaaagtcatttgaaatacgctcacttattaactggaagggactccagtgatcgcctagggtatataaaagtctgactttgtttctaggaatccgtccac

SEQ ID NO: 1071 - RNA, 1032 nt, synthetic construct; identical to SEQ ID NO: 1070
  source 1..1032: mol_type = other RNA

SEQ ID NO: 1072 - RNA, 1204 nt, synthetic construct
  source 1..1204: mol_type = other RNA
attaaaatattaaaagcgtacaaatttcgtatttatccagatgaagcacaacaagaatttttcattaaaacttttggctgtgtgcgatttacttacaacacgttgttaaaattacggcagcaaaatccaagtgatgaaagtactttacccgaaaaaatgactggtgtttgggagaaaaaaacgacggctacgcccgctaagttaaaaagagattatccttttttaaaagagacagacagcttagccctagccaatgcccaacgaaatttaacgaaggcttttcaaaactattatcgtggtcgcgccagttatccgaagcttaagagtaaaaaaaacgcttggcaatcgtatacaacaaataaccaaggccacaccatttatctcaccaatgaaggattaaaactaccaaagttaaagagtaaagttcctattcatcaacaccgccaggtttgcggtaaaattcgttctgcgacgatttctgccaaaaatcggcaagagttttatgtttcattattatgtgaagaagaaataacagcattacccaaaacgggttttgatattaccatcacttatgaccccattaagctaattggcacgagtaaggttctttctgatcggcctaatttttgtcaacaacggctgttagtccaattaaaaaatgcgcaacgaaagctttattgtcggggaaaaagtgcgcaacggcgcaatgttaagttagagcaggctaaaaattatcaaaaacaaaaactacgcctccaaaagctctatatccatcaaatcaagcaaaaagaagattttatggaacaactttcaattgcgcttttacgtcaatttgatttggtgacggtaacgatgccaaaagcttttgagtcgctaagcgcaaatcactcagccgctattcaccaagactgttctgctaattataaaaatacagcagtcaattttacaataagggattggaatcgttttgtactaaaactcaaatataaagccaattggtatggaaaaaaactgatttttactgatcaggaaaaagtaatctgattaaaaaaatttctgctgcacttaaaaagtatttttaaaactggaaggagctccagggatcgccttgggtatataaaaagtgccactgcacttttgtttctaggaatccgctcactaattatgataaaccatgaacagcttcttttattagaagttggac

SEQ ID NO: 1073 - RNA, 1120 nt, synthetic construct; identical to SEQ ID NO: 839
  source 1..1120: mol_type = other RNA

SEQ ID NO: 1074 - RNA, 1104 nt, synthetic construct
  source 1..1104: mol_type = other RNA
gtgcttatgctaaaagcctttaaattccgaatttacccgactgcttcacaaaaagaatggttcatccaaaattttggttgtgtgcgttttacgtataaccatttgctaaaagcacgacaggaaagttatgcgagaacaggtgccatcgattattcgatgacacctgcaacattaaaaaaaaaatacgcatttttaaaatcagcagatagcttagcattagcaaatgcccaattaaatttagatcgtgcttttcgcaattatttcaaggggcgtgctagtttccctaaactgaagaacaaaaaaagtatgtggcagtcttatacaacaaataatcaaaaaggaacgatttatttggaagataagtacttgaaactgccgaaacaaaaagagctgatccaagtgagattacatcgtccggtcgaaggtgttatacggtcagcgacgatttcagcacggtataatgaaagtttctatgtttctctactttgtgaagtacaaatcgccggagtgccaactactaatcgatggctaggggtagcatatgatccaaagaaattggtggaaacttcatcaccagttgaggtacaaatgccattgttcaggcaaacgagagataagatgaaggttgccaagagaaaactggtgattaaaagtaaagcagctcaaaaaagaaaagctcgcttggaaaattctagaaattatcagaaacaaaagagaaaagtaatggatctttatcagaaacaaaaattacaaaaagaagattacttggaaagagtatctggtaatttgatccgcaattatgattacttatttgttgaagctgttccatctgaactttcttcagccgattttcagttgcaagattggtataaattgattacaaaattgcgatataaagcgcagtggtacaataaaacattgctttttatcaatgtgaacgagcaattgaatgaaccacctgaaaaaaaaagtatggagttagaaaaaatcgggaaacaagtgatttttgaataatcgaactggtaggggtgccagggatcgccttgctaataaaaaacataacttgtttttgtttctaggaattttctttaaagaaaagctcac

SEQ ID NO: 1075 - RNA, 1240 nt, synthetic construct; identical to SEQ ID NO: 863
  source 1..1240: mol_type = other RNA

SEQ ID NO: 1076 - RNA, 1028 nt, synthetic construct
  source 1..1028: mol_type = other RNA
aggaaagtgctaaaggcttacaagtttcgcatttatccaaccaaagcacagcaaaaatttttaattcaaacttttggttgcgttcgctttacgtacaatacgcttttaaaacagcgtcagttcaatacgattgaagcaagtaaaaagctgacacctgctgccttaaaaaaggaatttccttttttaaaattaaccgatagcttggcattagcaaatgcacaacgaaatttagcgcgcgcatttcaaaattattatcaaggtagaagtgggcatccaaaaatgaagatcaaaaaaagtacgtggcagtcttacaccacgaataatcagcaacagacaatctggttaaaggataacttattgaaggtacctaaattaaaacagcccattgccgttgtttgtcatcgaaaagtggtaggcaaaattaaatctgcaacaattactgcaaagaatttgcaacagttttatgtttcattattatgtgaagaagaagtttgtcatttgcctaagactaaaactgaaattgaattacgttttgctccaaatcagcttgttgtaggcaatcaattaaaattttgtcgtcaactttgtgtaaatgaccttgaaaccaagttaaaaaaagccaaacgaaaattggaaataaaagccaaaagtgcacagcaacgcaaagtgagattggcagaggccaaaaactatcaaaaacaaaaattaaaggtacaaaaattgtaccatcataagcaacagcaaaaaaaagcgtggattgacgaactaacaatgcatctgattaaaaactatgattttttatatgttgaagtcccaaaaaatgggatagagggatcttttacgttggcggactggcaaagttttttagttaagttgcagtataaagccaattggtacgggaaaaaagtgatttttttaacagccgctaaaacggtgcgaaaaatcagttaaacagtttaactggaagggactccagggctcgcctaggggataaaaaagcttggctttgtttctaggaatccgttcac

SEQ ID NO: 1077 - RNA, 1092 nt, synthetic construct
  source 1..1092: mol_type = other RNA
gtgaaagtattaaaaggttataaatttcgtatttaccctaatgaaaaacaaatacaatattttatacagactttcggttgtgtccgttttacctataaccatttgttacatgctcggcaaaaagcattgcaagcaggggattatcagacacaagtctctccagctagtttgaaaagagactatccgtttttaaagaagacggatagtctagctttagctaatgcgcaacgcaatttagatcgtgcttttaagaactattttagtaaaagagcgggttatcctaagctgaaaacgaaaaaaaacaattggcagtcctatacgacaaataatcaaaagcacacgatttattttgttgggaatcagttaaagttgcctaaacttaaatcgctagttacggtaaatttgcatagaaaagtagcaggcgaaataaaatcagcaacagtttcggctcaaaataaccaaatgttttttgtttctcttctctgtttagaggagataaaccccttacctaaaaccggcacgaccattggtgttgcctactgtccagagaatttagtccaaatgtcagcagtcaatcgcttgcctgtctataagcaagagacacttcaatatcaattggataaagccattaaacgtttggaggttcgagcaaaagcagctaaaagacgtaaagtgctactcgagcaggcaaaaaattatcaaaaacaaaaaagtaaagttcaaaaactgtatatggcaaaaaacgatcagaaaaaaaactacatcgaccagttaacttgtcgtttggtacatgattatgactgtatttgtttagaaaaacagccagaatttactgaaaatacaaaattctctgaaactgattggcaacattttttgcgtaaaatccaatataaagcgcgttggtatgataaacaacttgtatttgttgattctattgaaaaagaaaatgaaacaaaatgttttactattgaacaagtaggcaaaaaactaattaaccaataaaaaagttataagaactggaagggacgccagggatcgcctaggggatagaaaaaattttcattaatttttgtttctaggaatattgttcac

SEQ ID NO: 1078 - RNA, 1096 nt, synthetic construct
  source 1..1096: mol_type = other RNA
atgctaaaagcctttaaatttcgaatctatcccactgagtcacaaaaacagtggttgatccaaacatttggttgtgtgcgtttcacttacaatcatttattaaaagccagacaggcgtattatttagaaacgaaagaaatcgattatacgctgacaccagcttctttaaaaaagcaatatccgtttttaaaggaagtcgatagtttagccttagcgaatgcccaattaaacttggatcgcgcatttcgtaattattttaaaggacgcgcaagcttccccaaactgaaaaataaaaaaagtatttggcagtcgtatacgacaaacaatcaaaagggaacgatctatttagaagaaacatctatcaaactgccaaagttaaaagaaaaaatccgcatccatgcgcatcgtccgattgaaggaacgattcgctcagcgacgatctcgtctcgatacaatgagattttttatgtctccttgctctgtgaagttccccaaaagacaatggaagcgtcaaataaatggatcgggatagcttatgatccagatcgtctagtggagatgtccaccccgcttgatatcgcgatccctaaattcaaacaagtcgatcaacaactccagcgagcaaagagaaaacttgtgatcaaaggacgagcagcacagcatcgacgagcacacgttgaaagagtgagaaattatcaaaagcaaaaaagaaaaatcaaagatttgtatttaaaacaaaaatttcaacgagaagattattttgaacaaatttcaggaacagtgatccgtcattatgattatttgtttgtcgaatcaattccagcagattgtcgggaaggtgatttttctatccaagattggcacaagttattagcaaagctccaatacaaagcgcaatggtatagcaaaaagctagtattgatcgatatgaaagaacaaacgaatccttccacaaccaaaaagagtctggaattagttgaaatcgggaaacaagtcctttttgaataataaaactggtaggggcgccagggttcgccttgtttataaaaaacatttattgtttttgtttctaggaatttctttcagaaaagctcac

SEQ ID NO: 1079 - RNA, 1240 nt, synthetic construct
  source 1..1240: mol_type = other RNA
attaagacattaaaggcttatagatttgcgctttatcctgacgaagcccaaaaacatttttttattcagacttttggctgcgttcgttttacgtataatatgctgttaacactacgacagcaagaaagtggcaaaactgttgaagaacgtacttcagcacgtttacaaaaacagaagatgacgccagctaagttaaaaaaagattatccttttttaaaagcaacagatagcttagctttggctaatgcacagcgtaatttggaaaaagcttttcaaaattattatcgcggtcgtgccagttatcccaagttaaaaagtaagaaaagtgcttggcagtcgtatacgacgaataatcaaggacatactatttacctagcagaagacggtttgaagcttcctaagttaaaaagcaaagttttagtgcatcaacatcgcagcgttgcagggaaaattcgttcagcaactatttcagctaaaaatcggcaagaattttatgtttctttattatgtgaagaagacattccggcattacccaaaacgggcagtgaaattgaaattgcctacgatccaacaggcttggtggtgacgaataaacctattgtggggatacccaccttttgccaaacccaagttctagaaaaactaaaaaaagcgcaacgccgacttagttgtcgggctaagagtgcgcaacgccgcaatgctaaactagaacaagcgaaaaactatcaaaagcaaaaatcccaggtgcaacaattgtatattcacaagctgaaacaaaaagaggatttcaccgaacaactttctattgctcttttgcgtcagtttgattgtattattatcacaaaaccgccagaattgcgggagaataaagaaagcaaagcggctaaaaccgtaaaaaaaagtaaacacaccactgttttcccaagttttgaggataattttactttaagtgattggaatcggttgcttttaaaattaaaatataaggccgagtggtatgaaaaagagctggtttttatttgtcctactaatggaaaagaaaactggcacaggaattctagcgcactttctttataatgaattgatttaaactgatttaatcaagtgtttgccagcgaaatacgttacaaaaagaataactatttttgtaaaactggaaggagctccagggttcgccttgggtatataaaaagtgttgacacttttgtttctaggaatccgctcactaattatgattaac

SEQ ID NO: 1080 - RNA, 1204 nt, synthetic construct
  source 1..1204: mol_type = other RNA
attaaaatattaaaagcgtacaaatttcgtatttatccagatgaagcacaacaagaatttttcattaaaacttttggctgtgtgcgatttacttacaacacgttgttaaaattacggcagcaaaatccaagtgatgaaagtactttacccgaaaaaatgactggtgtttgggagaaaaaaacgacggctacgcccgctaagttaaaaagagattatccttttttaaaagagacagacagcttagccctagccaatgcccaacgaaatttaacgaaggcttttcaaaactattatcgtggtcgcgccagttatccgaagttgaagagtaaaaaaaacgcttggcaatcgtatacaacaaataaccaaggccacaccatttatctcaccaatgaaggattaaaactaccaaagttaaagagtaaagttcctattcatcaacaccgccaggtttgcggtaaaattcgttctgcgacgatttctgccaaaaatcggcaagagttttatgtttcattattatgtgaagaagaaataacagcgttacccaaaacgggttttgatattaccatcacttatgaccccattaagctaattggcacgagtaaggttctttctgatcggcctaatttttgtcaacaacggctgttagtccaattaaaaaaggcgcaacgaaagctttattgtcggggaaaaagtgcgcaacggcgcaatgttaagttagagcaggctaaaaattatcaaaaacaaaaactacgcctccaaaagctctatatccatcaaatcaagcaaaaagaagattttatggaacaactttcaattgcgcttttacgtcaatttgatttggtgacggtaacgatgccaaaagcttttgagtcgctaagcgcaaatcactcagccgctattcaccaagactgttctgttaattataaaaatacagcagtcaattttacaataagggattggaatcgttttgtactaaaactcaaatataaagccaattggtatggaaaaaaactgatttttactgatcaggaaaaagtaatctgattaaaaaaatttctgctgcacttaaaaagtatttttaaaactggaaggagctccagggatcgccttgggtatataaaaagtgccactgcacttttgtttctaggaatccgctcactaattatgataaaccatgaacagcttcttttattagaagttggac

SEQ ID NO: 1081 - RNA, 20 nt, synthetic construct
  source 1..20: mol_type = other RNA
taattatgattaaccagcac

SEQ ID NO: 1082 - RNA, 20 nt, synthetic construct
  source 1..20: mol_type = other RNA
taattatgaaaaaccaaaaa

SEQ ID NO: 1083 - RNA, 20 nt, synthetic construct
  source 1..20: mol_type = other RNA
taattatgacaaaccaataa

SEQ ID NO: 1084 - RNA, 20 nt, synthetic construct
  source 1..20: mol_type = other RNA
taattatgacaaaccaataa

SEQ ID NO: 1085 - RNA, 20 nt, synthetic construct
  source 1..20: mol_type = other RNA
taattatgacaaaccaataa

SEQ ID NO: 1086 - RNA, 20 nt, synthetic construct
  source 1..20: mol_type = other RNA
taattatgaaaaaccacaaa

SEQ ID NO: 1087 - RNA, 20 nt, synthetic construct
  source 1..20: mol_type = other RNA
taattatgaaaaaccacaaa

SEQ ID NO: 1088 - RNA, 20 nt, synthetic construct
  source 1..20: mol_type = other RNA
taattatgacaaaccaaaaa

SEQ ID NO: 1089 - RNA, 20 nt, synthetic construct
  source 1..20: mol_type = other RNA
cattccggcttcttttaaag

SEQ ID NO: 1090 - RNA, 20 nt, synthetic construct
  source 1..20: mol_type = other RNA
taattatgaaaaaccgaaaa

SEQ ID NO: 1091 - RNA, 20 nt, synthetic construct
  source 1..20: mol_type = other RNA
tcactaattatgaaaaacca

SEQ ID NO: 1092 - RNA, 20 nt, synthetic construct
  source 1..20: mol_type = other RNA
taattatgaaaaaccaaaaa

SEQ ID NO: 1093 - RNA, 20 nt, synthetic construct
  source 1..20: mol_type = other RNA
taattatgacaaaccaataa

SEQ ID NO: 1094 - RNA, 20 nt, synthetic construct
  source 1..20: mol_type = other RNA
taattatgaaaaaccacaaa

SEQ ID NO: 1095 - RNA, 20 nt, synthetic construct
  source 1..20: mol_type = other RNA
taattatgaaaaaccacaaa

SEQ ID NO: 1096 - RNA, 20 nt, synthetic construct
  source 1..20: mol_type = other RNA
taattatgaaaaaccacaaa

SEQ ID NO: 1097 - RNA, 20 nt, synthetic construct
  source 1..20: mol_type = other RNA
taattatgaaaaaccacaaa

SEQ ID NO: 1098 - RNA, 20 nt, synthetic construct
  source 1..20: mol_type = other RNA
taattatgaaaaaccacaaa

SEQ ID NO: 1099 - RNA, 20 nt, synthetic construct
  source 1..20: mol_type = other RNA
taattatgattagccagtaa

SEQ ID NO: 1100 - RNA, 20 nt, synthetic construct
  source 1..20: mol_type = other RNA
ttccctttttcagcagagcg

SEQ ID NO: 1101 - RNA, 20 nt, synthetic construct
  source 1..20: mol_type = other RNA
taattataaaaaaccgtaaa

SEQ ID NO: 1102 - RNA, 20 nt, synthetic construct
  source 1..20: mol_type = other RNA
catagataagcttatgaaaa

SEQ ID NO: 1103 - RNA, 20 nt, synthetic construct
  source 1..20: mol_type = other RNA
taattatgaaaaaccgaaaa

SEQ ID NO: 1104 - RNA, 20 nt, synthetic construct
  source 1..20: mol_type = other RNA
taattatgattaaccagcaa

SEQ ID NO: 1105 - RNA, 20 nt, synthetic construct
  source 1..20: mol_type = other RNA
taattatgattaaccagcaa

SEQ ID NO: 1106 - RNA, 20 nt, synthetic construct
  source 1..20: mol_type = other RNA
taattatgattaaccagcaa

SEQ ID NO: 1107 - RNA, 20 nt, synthetic construct
  source 1..20: mol_type = other RNA
taattatgattaaccagcaa

SEQ ID NO: 1108 - RNA, 20 nt, synthetic construct
  source 1..20: mol_type = other RNA
taattatgattaaccagcaa

SEQ ID NO: 1109 - RNA, 20 nt, synthetic construct
  source 1..20: mol_type = other RNA
taattatgattaaccagcaa

SEQ ID NO: 1110 - RNA, 20 nt, synthetic construct
  source 1..20: mol_type = other RNA
taattatgattaaccagcaa

SEQ ID NO: 1111 - RNA, 20 nt, synthetic construct
  source 1..20: mol_type = other RNA
taattatgattaaccagcaa

SEQ ID NO: 1112 - RNA, 20 nt, synthetic construct
  source 1..20: mol_type = other RNA
taattatgattaaccagcaa

SEQ ID NO: 1113 - RNA, 20 nt, synthetic construct
  source 1..20: mol_type = other RNA
taattatgattaaccagcaa

SEQ ID NO: 1114 - RNA, 20 nt, synthetic construct
  source 1..20: mol_type = other RNA
taattatgattaaccagcaa

SEQ ID NO: 1115 - RNA, 20 nt, synthetic construct
  source 1..20: mol_type = other RNA
taattatgataaatcaaaaa

SEQ ID NO: 1116 - RNA, 20 nt, synthetic construct
  source 1..20: mol_type = other RNA
taattatgataaatcaaaaa

SEQ ID NO: 1117 - RNA, 20 nt, synthetic construct
  source 1..20: mol_type = other RNA
taattatgattagccagtaa

SEQ ID NO: 1118 - RNA, 20 nt, synthetic construct
  source 1..20: mol_type = other RNA
taattataattaaccagcaa

SEQ ID NO: 1119 - RNA, 20 nt, synthetic construct
  source 1..20: mol_type = other RNA
taattatgattaaccagcaa

SEQ ID NO: 1120 - RNA, 20 nt, synthetic construct
  source 1..20: mol_type = other RNA
taattatgattaaccagcaa

SEQ ID NO: 1121 - RNA, 20 nt, synthetic construct
  source 1..20: mol_type = other RNA
taattatgattaaccagcaa

SEQ ID NO: 1122 - RNA, 20 nt, synthetic construct
  source 1..20: mol_type = other RNA
taattatgattaaccagcaa

SEQ ID NO: 1123 - RNA, 20 nt, synthetic construct
  source 1..20: mol_type = other RNA
taattatgattaaccagcaa

SEQ ID NO: 1124 - RNA, 20 nt, synthetic construct
  source 1..20: mol_type = other RNA
taattatgattaaccagcaa

SEQ ID NO: 1125 - RNA, 20 nt, synthetic construct
  source 1..20: mol_type = other RNA
taattatgattaaccagcaa

SEQ ID NO: 1126 - RNA, 20 nt, synthetic construct
  source 1..20: mol_type = other RNA
taattatgattaaccagcaa

SEQ ID NO: 1127 - RNA, 20 nt, synthetic construct
  source 1..20: mol_type = other RNA
taattatgattaaccagcaa

SEQ ID NO: 1128 - RNA, 20 nt, synthetic construct
  source 1..20: mol_type = other RNA
taattatgattaaccagcaa

SEQ ID NO: 1129 - RNA, 20 nt, synthetic construct
  source 1..20: mol_type = other RNA
taattatgattaaccagcaa

SEQ ID NO: 1130 - RNA, 20 nt, synthetic construct
  source 1..20: mol_type = other RNA
taattatgattaaccagcaa

SEQ ID NO: 1131 - RNA, 20 nt, synthetic construct
  source 1..20: mol_type = other RNA
taattatgattaaccagcaa

SEQ ID NO: 1132 - RNA, 20 nt, synthetic construct
  source 1..20: mol_type = other RNA
taattatgattaaccagcaa

SEQ ID NO: 1133 - RNA, 20 nt, synthetic construct
  source 1..20: mol_type = other RNA
taattatgattaaccagcaa

SEQ ID NO: 1134 - RNA, 20 nt, synthetic construct
  source 1..20: mol_type = other RNA
taattatgacaaaccaataa

SEQ ID NO: 1135 - RNA, 20 nt, synthetic construct
  source 1..20: mol_type = other RNA
taattatgacaaaccaaaaa

SEQ ID NO: 1136 - RNA, 20 nt, synthetic construct
  source 1..20: mol_type = other RNA
taattatgacaaaccaaaaa

SEQ ID NO: 1137 - RNA, 20 nt, synthetic construct
  source 1..20: mol_type = other RNA
taattatgacaaaccaaaaa

SEQ ID NO: 1138 - RNA, 20 nt, synthetic construct
  source 1..20: mol_type = other RNA
taattatgaaaaaccacaaa

SEQ ID NO: 1139 - RNA, 20 nt, synthetic construct
  source 1..20: mol_type = other RNA
taattatgaaaaaccacaaa

SEQ ID NO: 1140 - RNA, 20 nt, synthetic construct
  source 1..20: mol_type = other RNA
taattatgaaaaaccaaaaa

SEQ ID NO: 1141 - RNA, 20 nt, synthetic construct
  source 1..20: mol_type = other RNA
taattatgaaaaaccacaaa

SEQ ID NO: 1142 - RNA, 20 nt, synthetic construct
  source 1..20: mol_type = other RNA
taattatgataaatcaaaaa

SEQ ID NO: 1143 - RNA, 20 nt, synthetic construct
  source 1..20: mol_type = other RNA
taattatgacaaaccaaaaa

SEQ ID NO: 1144 - RNA, 20 nt, synthetic construct
  source 1..20: mol_type = other RNA
caatcgcttctaaatgatca

SEQ ID NO: 1145 - RNA, 20 nt, synthetic construct
  source 1..20: mol_type = other RNA
taattatgaaaaaccacaaa

SEQ ID NO: 1146 - RNA, 20 nt, synthetic construct
  source 1..20: mol_type = other RNA
taattatgacaaaccaataa

SEQ ID NO: 1147 - RNA, 20 nt, synthetic construct
  source 1..20: mol_type = other RNA
caatcgcttctaaatgatca

SEQ ID NO: 1148 - RNA, 20 nt, synthetic construct
  source 1..20: mol_type = other RNA
taattatgataaaccaaaaa

SEQ ID NO: 1149 - RNA, 20 nt, synthetic construct
  source 1..20: mol_type = other RNA
taattatgaaaaaccacaaa

SEQ ID NO: 1150 - RNA, 20 nt, synthetic construct
  source 1..20: mol_type = other RNA
taattatgaaaaaccacaaa

SEQ ID NO: 1151 - RNA, 20 nt, synthetic construct
  source 1..20: mol_type = other RNA
taattatgaaaaatcacaaa

SEQ ID NO: 1152 - RNA, 20 nt, synthetic construct
  source 1..20: mol_type = other RNA
taattatgaaaaaccacaaa

SEQ ID NO: 1153 - RNA, 20 nt, synthetic construct
  source 1..20: mol_type = other RNA
taattatgacaaaccaataa

SEQ ID NO: 1154 - RNA, 20 nt, synthetic construct
  source 1..20: mol_type = other RNA
taattatgataaaccaaaaa

SEQ ID NO: 1155 - RNA, 20 nt, synthetic construct
  source 1..20: mol_type = other RNA
ataattaaccttttttgggt

SEQ ID NO: 1156 - RNA, 20 nt, synthetic construct
  source 1..20: mol_type = other RNA
taattataaaaaaccataaa

SEQ ID NO: 1157 - RNA, 20 nt, synthetic construct
  source 1..20: mol_type = other RNA
taattataaaaaaccataaa

SEQ ID NO: 1158 - RNA, 20 nt, synthetic construct
  source 1..20: mol_type = other RNA
taattataaaaaaccataaa

SEQ ID NO: 1159 - RNA, 20 nt, synthetic construct
  source 1..20: mol_type = other RNA
taattatgacaaaccaaaaa

SEQ ID NO: 1160 - RNA, 20 nt, synthetic construct
  source 1..20: mol_type = other RNA
taattatgacaaaccaaaaa

SEQ ID NO: 1161 - RNA, 20 nt, synthetic construct
  source 1..20: mol_type = other RNA
taattatgattaaccagcaa

SEQ ID NO: 1162 - RNA, 20 nt, synthetic construct
  source 1..20: mol_type = other RNA
taattatgattaaccagcaa

SEQ ID NO: 1163 - RNA, 20 nt, synthetic construct
  source 1..20: mol_type = other RNA
taattatgattaaccagcaa

SEQ ID NO: 1164 - RNA, 20 nt, synthetic construct
  source 1..20: mol_type = other RNA
taattatgacaaaccaataa

SEQ ID NO: 1165 - RNA, 20 nt, synthetic construct
  source 1..20: mol_type = other RNA
taattatgataaatcaaaaa

SEQ ID NO: 1166 - RNA, 20 nt, synthetic construct
  source 1..20: mol_type = other RNA
taattataacaaaccattta

SEQ ID NO: 1167 - RNA, 20 nt, synthetic construct
  source 1..20: mol_type = other RNA
taattataacaaaccattta

SEQ ID NO: 1168 - RNA, 20 nt, synthetic construct
  source 1..20: mol_type = other RNA
cattccggcttcttttaaag

SEQ ID NO: 1169 - RNA, 20 nt, synthetic construct
  source 1..20: mol_type = other RNA
taattatgaaaaaccacaaa

SEQ ID NO: 1170 - RNA, 20 nt, synthetic construct
  source 1..20: mol_type = other RNA
taattatgaaaaaccacaaa

SEQ ID NO: 1171 - RNA, 20 nt, synthetic construct
  source 1..20: mol_type = other RNA
taattatgaaaaaccacaaa

SEQ ID NO: 1172 - RNA, 20 nt, synthetic construct
  source 1..20: mol_type = other RNA
taattatgaaaaaccacaaa

SEQ ID NO: 1173 - RNA, 20 nt, synthetic construct
  source 1..20: mol_type = other RNA
taattatgacaaaccaataa

SEQ ID NO: 1174 - RNA, 20 nt, synthetic construct
  source 1..20: mol_type = other RNA
tctttgattcttccgctttt

SEQ ID NO: 1175 - RNA, 20 nt, synthetic construct
  source 1..20: mol_type = other RNA
atgaagagcatttagtacag

SEQ ID NO: 1176 - RNA, 20 nt, synthetic construct
  source 1..20: mol_type = other RNA
taattatgataaacctaaaa

SEQ ID NO: 1177 - RNA, 20 nt, synthetic construct
  source 1..20: mol_type = other RNA
taattatgaaaaaccacaaa

SEQ ID NO: 1178 - RNA, 20 nt, synthetic construct
  source 1..20: mol_type = other RNA
taattatgaaaaaccacaaa

SEQ ID NO: 1179 - RNA, 20 nt, synthetic construct
  source 1..20: mol_type = other RNA
taattatgaaaaaccaaaaa

SEQ ID NO: 1180 - RNA, 20 nt, synthetic construct
  source 1..20: mol_type = other RNA
caacgcccgctccagaagat

SEQ ID NO: 1181 - RNA, 20 nt, synthetic construct
  source 1..20: mol_type = other RNA
ataacactaattgagccaag

SEQ ID NO: 1182 - RNA, 20 nt, synthetic construct
  source 1..20: mol_type = other RNA
taattatgaaaaaccgaaaa

SEQ ID NO: 1183 - RNA, 20 nt, synthetic construct
  source 1..20: mol_type = other RNA
taattatgaaaaaccacaaa

SEQ ID NO: 1184 - RNA, 20 nt, synthetic construct
  source 1..20: mol_type = other RNA
taattatgaaaaaccacaaa

SEQ ID NO: 1185 - RNA, 20 nt, synthetic construct
  source 1..20: mol_type = other RNA
taattatgataaaccattgt

SEQ ID NO: 1186 - RNA, 20 nt, synthetic construct
  source 1..20: mol_type = other RNA
taattatgataaaccaaata

SEQ ID NO: 1187 - RNA, 20 nt, synthetic construct
  source 1..20: mol_type = other RNA
taattatgaaaaatcacaaa

SEQ ID NO: 1188 - RNA, 20 nt, synthetic construct
  source 1..20: mol_type = other RNA
cgatcgcttctaaatgatca

SEQ ID NO: 1189 - RNA, 20 nt, synthetic construct
  source 1..20: mol_type = other RNA
taattatgaaaaaccacaaa

SEQ ID NO: 1190 - RNA, 20 nt, synthetic construct
  source 1..20: mol_type = other RNA
taattatgaaaaaccacaaa

SEQ ID NO: 1191 - RNA, 20 nt, synthetic construct
  source 1..20: mol_type = other RNA
taattatgaaaaaccaaaaa

SEQ ID NO: 1192 - RNA, 20 nt, synthetic construct
  source 1..20: mol_type = other RNA
taattatgaaaaaccaaaaa

SEQ ID NO: 1193 - RNA, 20 nt, synthetic construct
  source 1..20: mol_type = other RNA
taattatgaaaaaccaaaaa

SEQ ID NO: 1194 - RNA, 20 nt, synthetic construct
  source 1..20: mol_type = other RNA
taattatgaaaaaccaaaaa

SEQ ID NO: 1195 - RNA, 20 nt, synthetic construct
  source 1..20: mol_type = other RNA
taattatgaaaaaccacaaa

SEQ ID NO: 1196 - RNA, 20 nt, synthetic construct
  source 1..20: mol_type = other RNA
taattatgaaaaaccacaaa

SEQ ID NO: 1197 - RNA, 20 nt, synthetic construct
  source 1..20: mol_type = other RNA
taattatgataaacctaaaa

SEQ ID NO: 1198 - RNA, 20 nt, synthetic construct
  source 1..20: mol_type = other RNA
taattataaaaaaccaaaaa

SEQ ID NO: 1199 - RNA, 20 nt, synthetic construct
  source 1..20: mol_type = other RNA
taattattaatgatcaaaat

SEQ ID NO: 1200 - RNA, 20 nt, synthetic construct
  source 1..20: mol_type = other RNA
taattattaatgattaaaat

SEQ ID NO: 1201 - RNA, 20 nt, synthetic construct
  source 1..20: mol_type = other RNA
taattattaatgatcaaaat

SEQ ID NO: 1202 - RNA, 20 nt, synthetic construct
  source 1..20: mol_type = other RNA
taattattaatgatcaaaat

SEQ ID NO: 1203 - RNA, 20 nt, synthetic construct
  source 1..20: mol_type = other RNA
taattattaatgatcaaaat

SEQ ID NO: 1204 - RNA, 20 nt, synthetic construct
  source 1..20: mol_type = other RNA
taattattaatgatcaaaat

SEQ ID NO: 1205 - RNA, 20 nt, synthetic construct
  source 1..20: mol_type = other RNA
taattattaatgattaaaat

SEQ ID NO: 1206 - RNA, 20 nt, synthetic construct
  source 1..20: mol_type = other RNA
taattattaatgatcaaaat

SEQ ID NO: 1207 - RNA, 20 nt, synthetic construct
  source 1..20: mol_type = other RNA
taattattaatgattaaaat

SEQ ID NO: 1208 - RNA, 20 nt, synthetic construct
  source 1..20: mol_type = other RNA
taattattaatgatcaaaat

SEQ ID NO: 1209 - RNA, 20 nt, synthetic construct
  source 1..20: mol_type = other RNA
taattattaatgatcaaaat

SEQ ID NO: 1210 - RNA, 20 nt, synthetic construct
  source 1..20: mol_type = other RNA
taattattaatgattaaaat

SEQ ID NO: 1211 - RNA, 20 nt, synthetic construct
  source 1..20: mol_type = other RNA
taattattaatgatcaaaat

SEQ ID NO: 1212 - RNA, 20 nt, synthetic construct
  source 1..20: mol_type = other RNA
taattattaataatcaaaat

SEQ ID NO: 1213 - RNA, 20 nt, synthetic construct
  source 1..20: mol_type = other RNA
taattattaatgatcaaaat

SEQ ID NO: 1214 - RNA, 20 nt, synthetic construct
  source 1..20: mol_type = other RNA
taattattaatgatcaaaat

SEQ ID NO: 1215 - RNA, 20 nt, synthetic construct
  source 1..20: mol_type = other RNA
taattattaatgatcaaaat

SEQ ID NO: 1216 - RNA, 20 nt, synthetic construct
  source 1..20: mol_type = other RNA
taattattaatgatcaaaat

SEQ ID NO: 1217 - RNA, 20 nt, synthetic construct
  source 1..20: mol_type = other RNA
taattattaatgatcaaaat

SEQ ID NO: 1218 - RNA, 20 nt, synthetic construct
  source 1..20: mol_type = other RNA
taattattaatgatcaaaat

SEQ ID NO: 1219 - RNA, 20 nt, synthetic construct
  source 1..20: mol_type = other RNA
taattattaatgatcaaaat

SEQ ID NO: 1220 - RNA, 20 nt, synthetic construct
  source 1..20: mol_type = other RNA
taattattaatgattaaaat

SEQ ID NO: 1221 - RNA, 20 nt, synthetic construct
  source 1..20: mol_type = other RNA
taattattaatgatcaaaat

SEQ ID NO: 1222 - RNA, 20 nt, synthetic construct
  source 1..20: mol_type = other RNA
taattattaatgatcaaaat

SEQ ID NO: 1223 - RNA, 20 nt, synthetic construct
  source 1..20: mol_type = other RNA
taattattaatgattaaaat

SEQ ID NO: 1224 - RNA, 20 nt, synthetic construct
  source 1..20: mol_type = other RNA
taattattaatgattaaaat

SEQ ID NO: 1225 - RNA, 20 nt, synthetic construct
  source 1..20: mol_type = other RNA
taattattaatgattaaaat

SEQ ID NO: 1226 - RNA, 20 nt, synthetic construct
  source 1..20: mol_type = other RNA
taattattaatgatcaaaat

SEQ ID NO: 1227 - RNA, 20 nt, synthetic construct
  source 1..20: mol_type = other RNA
taattattaatgatcaaaat

SEQ ID NO: 1228 - RNA, 20 nt, synthetic construct
  source 1..20: mol_type = other RNA
taattattaatgatcaaaat

SEQ ID NO: 1229 - RNA, 20 nt, synthetic construct
  source 1..20: mol_type = other RNA
taattattaatgattaaaat

SEQ ID NO: 1230 - RNA, 20 nt, synthetic construct
  source 1..20: mol_type = other RNA
taattattaatgattaaaat

SEQ ID NO: 1231 - RNA, 20 nt, synthetic construct
  source 1..20: mol_type = other RNA
taattattaataatcaaaat

SEQ ID NO: 1232 - RNA, 20 nt, synthetic construct
  source 1..20: mol_type = other RNA
taattattaatgatcaaaat

SEQ ID NO: 1233 - RNA, 20 nt, synthetic construct
  source 1..20: mol_type = other RNA
taattattaatgatcaaaat

SEQ ID NO: 1234 - RNA, 20 nt, synthetic construct
  source 1..20: mol_type = other RNA
taattattaatgattaaaat

SEQ ID NO: 1235 - RNA, 20 nt, synthetic construct
  source 1..20: mol_type = other RNA
taattattaatgatcaaaat

SEQ ID NO: 1236 - RNA, 20 nt, synthetic construct
  source 1..20: mol_type = other RNA
taattattaatgatcaaaat

SEQ ID NO: 1237 - RNA, 20 nt, synthetic construct
  source 1..20: mol_type = other RNA
taattattaatgatcaaaat

SEQ ID NO: 1238 - RNA, 20 nt, synthetic construct
  source 1..20: mol_type = other RNA
taattattaatgatcaaaat

SEQ ID NO: 1239 - RNA, 20 nt, synthetic construct
  source 1..20: mol_type = other RNA
taattattaatgatcaaaat

SEQ ID NO: 1240 - RNA, 20 nt, synthetic construct
  source 1..20: mol_type = other RNA
taattattaatgatcaaaat

SEQ ID NO: 1241 - RNA, 20 nt, synthetic construct
  source 1..20: mol_type = other RNA
taattattaatgattaaaat

SEQ ID NO: 1242 - RNA, 20 nt, synthetic construct
  source 1..20: mol_type = other RNA
taattattaatgatcaaaat

SEQ ID NO: 1243 - RNA, 20 nt, synthetic construct
  source 1..20: mol_type = other RNA
taattattaatgattaaaat

SEQ ID NO: 1244 - RNA, 20 nt, synthetic construct
  source 1..20: mol_type = other RNA
taattatgacaaaccaataa

SEQ ID NO: 1245 - RNA, 20 nt, synthetic construct
  source 1..20: mol_type = other RNA
taattatgacaaaccaataa

SEQ ID NO: 1246 - RNA, 20 nt, synthetic construct
  source 1..20: mol_type = other RNA
taattatgacaaaccaataa

SEQ ID NO: 1247 - RNA, 20 nt, synthetic construct
  source 1..20: mol_type = other RNA
taattatgacaaaccaataa

SEQ ID NO: 1248 - RNA, 20 nt, synthetic construct
  source 1..20: mol_type = other RNA
taattatgacaaaccaataa

SEQ ID NO: 1249 - RNA, 20 nt, synthetic construct
  source 1..20: mol_type = other RNA
taattatgacaaaccaataa

SEQ ID NO: 1250 - RNA, 20 nt, synthetic construct
  source 1..20: mol_type = other RNA
gccccatagaacagtacctt

SEQ ID NO: 1251 - RNA, 20 nt, synthetic construct
  source 1..20: mol_type = other RNA
aaaatcaaatctgagtcaga

SEQ ID NO: 1252 - RNA, 20 nt, synthetic construct
  source 1..20: mol_type = other RNA
taattatgacaaaccaataa

SEQ ID NO: 1253 - RNA, 20 nt, synthetic construct
  source 1..20: mol_type = other RNA
taattatgacaaaccaataa

SEQ ID NO: 1254 - RNA, 20 nt, synthetic construct
  source 1..20: mol_type = other RNA
taattatgaaaaaccaataa

SEQ ID NO: 1255 - RNA, 20 nt, synthetic construct
  source 1..20: mol_type = other RNA
taattattaataatcaaaat

SEQ ID NO: 1256 - RNA, 20 nt, synthetic construct
  source 1..20: mol_type = other RNA
taattatgattaaccagcga

SEQ ID NO: 1257 - RNA, 20 nt, synthetic construct
  source 1..20: mol_type = other RNA
taattatgattaaccagcga

SEQ ID NO: 1258 - RNA, 20 nt, synthetic construct
  source 1..20: mol_type = other RNA
taattatgattaaccagcga

SEQ ID NO: 1259 - RNA, 20 nt, synthetic construct
  source 1..20: mol_type = other RNA
taattatgattaaccagcga

SEQ ID NO: 1260 - RNA, 20 nt, synthetic construct
  source 1..20: mol_type = other RNA
taattatgattaaccagcga

SEQ ID NO: 1261 - RNA, 20 nt, synthetic construct
  source 1..20: mol_type = other RNA
taattatgattaaccagcga

SEQ ID NO: 1262 - RNA, 20 nt, synthetic construct
  source 1..20: mol_type = other RNA
taattatgattaaccagcga

SEQ ID NO: 1263 - RNA, 20 nt, synthetic construct
  source 1..20: mol_type = other RNA
taattatgacaaaccaataa

SEQ ID NO: 1264 - RNA, 20 nt, synthetic construct
  source 1..20: mol_type = other RNA
taattatgacaaaccaataa

SEQ ID NO: 1265 - RNA, 20 nt, synthetic construct
  source 1..20: mol_type = other RNA
taattatgacaaaccaataa

SEQ ID NO: 1266 - RNA, 20 nt, synthetic construct
  source 1..20: mol_type = other RNA
taattattaatgatcaaaat

SEQ ID NO: 1267 - RNA, 20 nt, synthetic construct
  source 1..20: mol_type = other RNA
taattattaatgatcaaaat

SEQ ID NO: 1268 - RNA, 20 nt, synthetic construct
  source 1..20: mol_type = other RNA
taattattaataatcaaaat

SEQ ID NO: 1269 - RNA, 20 nt, synthetic construct
  source 1..20: mol_type = other RNA
taattattaatgatcaaaat

SEQ ID NO: 1270 - RNA, 20 nt, synthetic construct
  source 1..20: mol_type = other RNA
taattattaataatcaaaat

SEQ ID NO: 1271 - RNA, 20 nt, synthetic construct
  source 1..20: mol_type = other RNA
taattattaataatcaaaat

SEQ ID NO: 1272 - RNA, 20 nt, synthetic construct
  source 1..20: mol_type = other RNA
taattattaataatcaaaat

SEQ ID NO: 1273 - RNA, 20 nt, synthetic construct
  source 1..20: mol_type = other RNA
taattattaatgatcaaaat

SEQ ID NO: 1274 - RNA, 20 nt, synthetic construct
  source 1..20: mol_type = other RNA
taattattaataatcaaaat

SEQ ID NO: 1275 - RNA, 20 nt, synthetic construct
  source 1..20: mol_type = other RNA
taattattaatgatcaaaat

SEQ ID NO: 1276 - RNA, 20 nt, synthetic construct
  source 1..20: mol_type = other RNA
taattattaataatcaaaat

SEQ ID NO: 1277 - RNA, 20 nt, synthetic construct
  source 1..20: mol_type = other RNA
taattattaataatcaaaat

SEQ ID NO: 1278 - RNA, 20 nt, synthetic construct
  source 1..20: mol_type = other RNA
taattattaataatcaaaat

SEQ ID NO: 1279 - RNA, 20 nt, synthetic construct
  source 1..20: mol_type = other RNA
taattattaatgatcaaaat

SEQ ID NO: 1280 - RNA, 20 nt, synthetic construct
  source 1..20: mol_type = other RNA
taattatgacaaaccaataa

SEQ ID NO: 1281 - RNA, 20 nt, synthetic construct
  source 1..20: mol_type = other RNA
taattatgacaaaccaataa

SEQ ID NO: 1282 - RNA, 20 nt, synthetic construct
  source 1..20: mol_type = other RNA
taattatgacaaaccaataa

SEQ ID NO: 1283 - RNA, 20 nt, synthetic construct
  source 1..20: mol_type = other RNA
taattatgacaaaccaataa

SEQ ID NO: 1284 - RNA, 20 nt, synthetic construct
  source 1..20: mol_type = other RNA
taattatgacaaaccaataa

SEQ ID NO: 1285 - RNA, 20 nt, synthetic construct
  source 1..20: mol_type = other RNA
taattatgacaaaccaataa

SEQ ID NO: 1286 - RNA, 20 nt, synthetic construct
  source 1..20: mol_type = other RNA
taattatgacaaaccaataa

SEQ ID NO: 1287 - RNA, 20 nt, synthetic construct
  source 1..20: mol_type = other RNA
taattatgattaaccagcaa

SEQ ID NO: 1288 - RNA, 20 nt, synthetic construct
  source 1..20: mol_type = other RNA
taattatgattaaccagcaa

SEQ ID NO: 1289 - RNA, 20 nt, synthetic construct
  source 1..20: mol_type = other RNA
taattatgattaaccagcaa

SEQ ID NO: 1290 - RNA, 20 nt, synthetic construct
  source 1..20: mol_type = other RNA
taattatgattaaccagcaa

SEQ ID NO: 1291 - RNA, 20 nt, synthetic construct
  source 1..20: mol_type = other RNA
taattatgattaaccagcaa

SEQ ID NO: 1292 - RNA, 20 nt, synthetic construct
  source 1..20: mol_type = other RNA
taattatgattaaccagcac

SEQ ID NO: 1293 - RNA, 20 nt, synthetic construct
  source 1..20: mol_type = other RNA
taattatgattaaccagcaa

SEQ ID NO: 1294 - RNA, 20 nt, synthetic construct
  source 1..20: mol_type = other RNA
taattatgattaaccagcaa

SEQ ID NO: 1295 - RNA, 20 nt, synthetic construct
  source 1..20: mol_type = other RNA
taattattaataatcaaaat

SEQ ID NO: 1296 - RNA, 20 nt, synthetic construct
  source 1..20: mol_type = other RNA
taattattaataatcaaaat

SEQ ID NO: 1297 - RNA, 20 nt, synthetic construct
  source 1..20: mol_type = other RNA
taattattaataatcaaaat

SEQ ID NO: 1298 - RNA, 20 nt, synthetic construct
  source 1..20: mol_type = other RNA
taattattaataatcaaaat

SEQ ID NO: 1299 - RNA, 20 nt, synthetic construct
  source 1..20: mol_type = other RNA
taattattaataatcaaaat

SEQ ID NO: 1300 - RNA, 20 nt, synthetic construct
  source 1..20: mol_type = other RNA
taattattaatgatcaaaat

SEQ ID NO: 1301 - RNA, 20 nt, synthetic construct
  source 1..20: mol_type = other RNA
taattattaataatcaaaat

SEQ ID NO: 1302 - RNA, 20 nt, synthetic construct
  source 1..20: mol_type = other RNA
taattattaatgatcaaaat

SEQ ID NO: 1303 - RNA, 20 nt, synthetic construct
  source 1..20: mol_type = other RNA
taattattaatgatcaaaat

SEQ ID NO: 1304 - RNA, 20 nt, synthetic construct
  source 1..20: mol_type = other RNA
taattatgaaaaaccgaaaa

SEQ ID NO: 1305 - RNA, 20 nt, synthetic construct
  source 1..20: mol_type = other RNA
cgatgggcaattagactata

SEQ ID NO: 1306 - RNA, 20 nt, synthetic construct
  source 1..20: mol_type = other RNA
taattatgattaaccagcaa

SEQ ID NO: 1307 - RNA, 20 nt, synthetic construct
  source 1..20: mol_type = other RNA
taattatgattaaccagcaa

SEQ ID NO: 1308 - RNA, 20 nt, synthetic construct
  source 1..20: mol_type = other RNA
taattattaatgatcaaaat

SEQ ID NO: 1309 - RNA, 20 nt, synthetic construct
  source 1..20: mol_type = other RNA
taattattaatgatcaaaat

SEQ ID NO: 1310 - RNA, 20 nt, synthetic construct
  source 1..20: mol_type = other RNA
taattatgacaaaccaataa

SEQ ID NO: 1311 - RNA, 20 nt, synthetic construct
  source 1..20: mol_type = other RNA
taattattaatgatcaaaat

SEQ ID NO: 1312 - RNA, 20 nt, synthetic construct
  source 1..20: mol_type = other RNA
taattattagttgataaaaa

SEQ ID NO: 1313 - RNA, 20 nt, synthetic construct
  source 1..20: mol_type = other RNA
taattattagttgataaaaa

SEQ ID NO: 1314 - RNA, 20 nt, synthetic construct
  source 1..20: mol_type = other RNA
taattattaataatcaaaat

SEQ ID NO: 1315 - RNA, 20 nt, synthetic construct
  source 1..20: mol_type = other RNA
taattattaatgatcaaaat

SEQ ID NO: 1316 - RNA, 20 nt, synthetic construct
  source 1..20: mol_type = other RNA
taattattaatgatcaaaat

SEQ ID NO: 1317 - RNA, 20 nt, synthetic construct
  source 1..20: mol_type = other RNA
taattataaaaaaccatgaa

SEQ ID NO: 1318 - RNA, 20 nt, synthetic construct
  source 1..20: mol_type = other RNA
taattattagttaataaaaa

SEQ ID NO: 1319 - RNA, 20 nt, synthetic construct
  source 1..20: mol_type = other RNA
taattattagttaataaaaa

SEQ ID NO: 1320 - RNA, 20 nt, synthetic construct
  source 1..20: mol_type = other RNA
taattattagttgatgaaaa

SEQ ID NO: 1321 - RNA, 20 nt, synthetic construct
  source 1..20: mol_type = other RNA
taattattagttgatgaaaa

SEQ ID NO: 1322 - RNA, 20 nt, synthetic construct
  source 1..20: mol_type = other RNA
taattattatttgataaaaa

SEQ ID NO: 1323 - RNA, 20 nt, synthetic construct
  source 1..20: mol_type = other RNA
taattattaatgatcaaaat

SEQ ID NO: 1324 - RNA, 20 nt, synthetic construct
  source 1..20: mol_type = other RNA
taattattaatgatcaaaat

SEQ ID NO: 1325 - RNA, 20 nt, synthetic construct
  source 1..20: mol_type = other RNA
taattattagttaatgaaaa

SEQ ID NO: 1326 - RNA, 20 nt, synthetic construct
  source 1..20: mol_type = other RNA
taattattagttgatgaaaa

SEQ ID NO: 1327 - RNA, 20 nt, synthetic construct
  source 1..20: mol_type = other RNA
taattattagttaatgaaaa

SEQ ID NO: 1328 - RNA, 20 nt, synthetic construct
  source 1..20: mol_type = other RNA
taattattagttgataaaaa

SEQ ID NO: 1329 - RNA, 20 nt, synthetic construct
  source 1..20: mol_type = other RNA
taattattagttgataaaaa

SEQ ID NO: 1330 - RNA, 20 nt, synthetic construct
  source 1..20: mol_type = other RNA
taattatgattaaccagcaa

SEQ ID NO: 1331 - RNA, 20 nt, synthetic construct
  source 1..20: mol_type = other RNA
taattattaatgatcaaaat

SEQ ID NO: 1332 - RNA, 20 nt, synthetic construct
  source 1..20: mol_type = other RNA
taattattaatgatcaaaat

SEQ ID NO: 1333 - RNA, 20 nt, synthetic construct
  source 1..20: mol_type = other RNA
taattattaatgatcaaaat

SEQ ID NO: 1334 - RNA, 20 nt, synthetic construct
  source 1..20: mol_type = other RNA
taattattaatgatcaaaat

SEQ ID NO: 1335 - RNA, 20 nt, synthetic construct
  source 1..20: mol_type = other RNA
taattattaatgatcaaaat

SEQ ID NO: 1336 - RNA, 20 nt, synthetic construct
  source 1..20: mol_type = other RNA
taattattaatgatcaaaat

SEQ ID NO: 1337 - RNA, 20 nt, synthetic construct
  source 1..20: mol_type = other RNA
taattattaataatcaaaat

SEQ ID NO: 1338 - RNA, 20 nt, synthetic construct
  source 1..20: mol_type = other RNA
taattattagttaatgaaaa

SEQ ID NO: 1339 - RNA, 20 nt, synthetic construct
  source 1..20: mol_type = other RNA
taattattagttaatgaaaa

SEQ ID NO: 1340 - RNA, 20 nt, synthetic construct
  source 1..20: mol_type = other RNA
taattattagttgataaaca

SEQ ID NO: 1341 - RNA, 20 nt, synthetic construct
  source 1..20: mol_type = other RNA
taattatgacaaaccaataa

SEQ ID NO: 1342 - RNA, 20 nt, synthetic construct
  source 1..20: mol_type = other RNA
taattattagttgatgaaaa

SEQ ID NO: 1343 - RNA, 20 nt, synthetic construct
  source 1..20: mol_type = other RNA
taattattaataaaggatac

SEQ ID NO: 1344 - RNA, 20 nt, synthetic construct
  source 1..20: mol_type = other RNA
taattattagttgatgaaaa

SEQ ID NO: 1345 - RNA, 20 nt, synthetic construct
  source 1..20: mol_type = other RNA
taattattagttgataaaaa

SEQ ID NO: 1346 - RNA, 20 nt, synthetic construct
  source 1..20: mol_type = other RNA
taattatgattaaccagcaa

SEQ ID NO: 1347 - RNA, 20 nt, synthetic construct
  source 1..20: mol_type = other RNA
taattatgacaaaccaataa

SEQ ID NO: 1348 - RNA, 20 nt, synthetic construct
  source 1..20: mol_type = other RNA
taattataaaaaaccatgaa

SEQ ID NO: 1349 - RNA, 20 nt, synthetic construct
  source 1..20: mol_type = other RNA
taattattaatgatcaaaat

SEQ ID NO: 1350 - RNA, 20 nt, synthetic construct
  source 1..20: mol_type = other RNA
catagtagaaagttagaggg

SEQ ID NO: 1351 - RNA, 20 nt, synthetic construct
  source 1..20: mol_type = other RNA
taattatgattaaccagcaa

SEQ ID NO: 1352 - RNA, 20 nt, synthetic construct
  source 1..20: mol_type = other RNA
taattatgattaaccagcaa

SEQ ID NO: 1353 - RNA, 20 nt, synthetic construct
  source 1..20: mol_type = other RNA
taattataaagaaccgtaaa

SEQ ID NO: 1354 - RNA, 20 nt, synthetic construct
  source 1..20: mol_type = other RNA
taattatgacaaaccaataa

SEQ ID NO: 1355 - RNA, 20 nt, synthetic construct
  source 1..20: mol_type = other RNA
taattatgattaaccagcac

SEQ ID NO: 1356 - RNA, 20 nt, synthetic construct
  source 1..20: mol_type = other RNA
taattatgattaaccagcaa

SEQ ID NO: 1357 - RNA, 20 nt, synthetic construct
  source 1..20: mol_type = other RNA
taattatgattaaccagcaa

SEQ ID NO: 1358 - RNA, 20 nt, synthetic construct
  source 1..20: mol_type = other RNA
taattatgacaaaccaataa

SEQ ID NO: 1359 - RNA, 20 nt, synthetic construct
  source 1..20: mol_type = other RNA
taattatgattaaccagcaa

SEQ ID NO: 1360 - RNA, 20 nt, synthetic construct
  source 1..20: mol_type = other RNA
taattatgattaaccagcac

SEQ ID NO: 1361 - RNA, 20 nt, synthetic construct
  source 1..20: mol_type = other RNA
taattatgattaaccagcaa

SEQ ID NO: 1362 - RNA, 20 nt, synthetic construct
  source 1..20: mol_type = other RNA
taattattaatgatcaaaat

SEQ ID NO: 1363 - RNA, 20 nt, synthetic construct
  source 1..20: mol_type = other RNA
taattattaataaagagtat

SEQ ID NO: 1364 - RNA, 20 nt, synthetic construct
  source 1..20: mol_type = other RNA
taattattagttgatgaaaa

SEQ ID NO: 1365 - RNA, 20 nt, synthetic construct
  source 1..20: mol_type = other RNA
taattattagttgatgaaaa

SEQ ID NO: 1366 - RNA, 20 nt, synthetic construct
  source 1..20: mol_type = other RNA
taattataagtgtatggaaa

SEQ ID NO: 1367 - RNA, 20 nt, synthetic construct
  source 1..20: mol_type = other RNA
taattattagttgatgaaaa

SEQ ID NO: 1368 - RNA, 20 nt, synthetic construct
  source 1..20: mol_type = other RNA
taattattagttgatgaaaa

SEQ ID NO: 1369 - RNA, 20 nt, synthetic construct
  source 1..20: mol_type = other RNA
taattattagttaatgaaaa

SEQ ID NO: 1370 - RNA, 20 nt, synthetic construct
  source 1..20: mol_type = other RNA
taattattaataaaagaata

SEQ ID NO: 1371 - RNA, 20 nt, synthetic construct
  source 1..20: mol_type = other RNA
taattattagttgatgaaaa

SEQ ID NO: 1372 - RNA, 20 nt, synthetic construct
  source 1..20: mol_type = other RNA
taattattaaatggacaaat

SEQ ID NO: 1373 - RNA, 20 nt, synthetic construct
  source 1..20: mol_type = other RNA
taattatgattaaccagcaa

SEQ ID NO: 1374 - RNA, 20 nt, synthetic construct
  source 1..20: mol_type = other RNA
taattatgataaacctaaaa

SEQ ID NO: 1375 - RNA, 20 nt, synthetic construct
  source 1..20: mol_type = other RNA
taattatgataaacctaaaa

SEQ ID NO: 1376 - RNA, 20 nt, synthetic construct
  source 1..20: mol_type = other RNA
catagataagcttatgaaaa

SEQ ID NO: 1377 - RNA, 20 nt, synthetic construct
  source 1..20: mol_type = other RNA
caatcgcttctaaatgatca

SEQ ID NO: 1378 - RNA, 20 nt, synthetic construct
  source 1..20: mol_type = other RNA
taattatgataaatcaaaaa

SEQ ID NO: 1379 - RNA, 20 nt, synthetic construct
  source 1..20: mol_type = other RNA
cattccggcttcttttaaag

SEQ ID NO: 1380 - RNA, 20 nt, synthetic construct
  source 1..20: mol_type = other RNA
taattatgataaaccaaata

SEQ ID NO: 1381 - RNA, 20 nt, synthetic construct
  source 1..20: mol_type = other RNA
taattataaaaaaccataaa

SEQ ID NO: 1382 - RNA, 20 nt, synthetic construct
  source 1..20: mol_type = other RNA
taattatgacaaaccaaaaa

SEQ ID NO: 1383 - RNA, 20 nt, synthetic construct
  source 1..20: mol_type = other RNA
cattccggcttcttttaaag

SEQ ID NO: 1384 - RNA, 20 nt, synthetic construct
  source 1..20: mol_type = other RNA
catagacaagcttatgaaaa

SEQ ID NO: 1385 - DNA, 3781 bp, synthetic construct
  source 1..3781: mol_type = other DNA
acgccactggcagcagccattggtaactgggagttcgcagaggatttgtttagctaaacacgcggttgctcttgaagtgtgcgccaaagtccggctacactggaaggacagatttggttgctgtgctctgcgaaagccagttaccacggttaagcagttccccaactgacttaaccttcgatcaaaccacctccccaggtggttttttcgtttacagggcaaaagattacgcgcagaaaaaaaggatctcaagaagatcctttgatcttttctactgaaccgctctagatttcagtgcaatttatctcttcaaatgtagcacctgaagtcagccccatacgatataagttgtaattctcatgttagtcatgccccgcgcccaccggaaggagctgactgggttgaaggctctcaagggcatcggtcgagatcccggtgcctaatgagtgagctaacttacattaattgcgttgcgctcactgcccgctttccagtcgggaaacctgtcgtgccagctgcattaatgaatcggccaacgcgcggggagaggcggtttgcgtattgggcgccagggtggtttttcttttcaccagtgagacgggcaacagctgattgcccttcaccgcctggccctgagagagttgcagcaagcggtccacgctggtttgccccagcaggcgaaaatcctgtttgatggtggttaacggcgggatataacatgagctgtcttcggtatcgtcgtatcccactaccgagatgtccgcaccaacgcgcagcccggactcggtaatggcgcgcattgcgcccagcgccatctgatcgttggcaaccagcatcgcagtgggaacgatgccctcattcagcatttgcatggtttgttgaaaaccggacatggcactccagtcgccttcccgttccgctatcggctgaatttgattgcgagtgagatatttatgccagccagccagacgcagacgcgccgagacagaacttaatgggcccgctaacagcgcgatttgctggtgacccaatgcgaccagatgctccacgcccagtcgcgtaccgtcttcatgggagaaaataatactgttgatgggtgtctggtcagagacatcaagaaataacgccggaacattagtgcaggcagcttccacagcaatggcatcctggtcatccagcggatagttaatgatcagcccactgacgcgttgcgcgagaagattgtgcaccgccgctttacaggcttcgacgccgcttcgttctaccatcgacaccaccacgctggcacccagttgatcggcgcgagatttaatcgccgcgacaatttgcgacggcgcgtgcagggccagactggaggtggcaacgccaatcagcaacgactgtttgcccgccagttgttgtgccacgcggttgggaatgtaattcagctccgccatcgccgcttccactttttcccgcgttttcgcagaaacgtggctggcctggttcaccacgcgggaaacggtctgataagagacaccggcatactctgcgacatcgtataacgttactggtttcacattcaccaccctgaattgactctcttccgggcgctatcatgccataccgcgaaaggttttgcgccattcgatggtgtccgggatctcgacgctctcccttatgcgactcctgcattaggaaattaatacgactcactataggggaattgtgagcggataacaattcccctgtagaaataattttgtttaactttaataaggagatataccatgggcagcagccatcaccatcatcaccacagccaggatccgaattcgagctcggcgcgcctgcaggtcgacaagcttgcggccgcataatgcttaagtcgaacagaaagtaatcgtattgtacacggccgcataatcgaaattaatacgactcactataggggaattgtgagcggataacaattccccatcttagtatattagttaagtataagaaggagatatacatatggcagatctcaattggatatcggccggccacgcgatcgctgacgtcggtaccctcgagtctggtaaagaaaccgctgctgcgaaatttgaacgccagcacatggactcgtctactagcgcagcttaattaacctaggctgctgccaccgctgagcaataactagcataaccccttggggcctctaaacgggtcttgaggggttttttgctgaaacctcaggcatttgagaagcacacggtcacactgcttccggtagtcaataaaccggtaaaccagcaatagacataagcggctatttaacgaccctgccctgaaccgacgaccgggtcatcgtggccggatcttgcggcccctcggcttgaacgaattgttagacattatttgccgactaccttggtgatctcgcctttcacgtagtggacaaattcttccaactgatctgcgcgcgaggccaagcgatcttcttcttgtccaagataagcctgtctagcttcaagtatgacgggctgatactgggccggcaggcgctccattgcccagtcggcagcgacatccttcggcgcgattttgccggttactgcgctgtaccaaatgcgggacaacgtaagcactacatttcgctcatcgccagcccagtcgggcggcgagttccatagcgttaaggtttcatttagcgcctcaaatagatcctgttcaggaaccggatcaaagagttcctccgccgctggacctaccaaggcaacgctatgttctcttgcttttgtcagcaagatagccagatcaatgtcgatcgtggctggctcgaagatacctgcaagaatgtcattgcgctgccattctccaaattgcagttcgcgcttagctggataacgccacggaatgatgtcgtcgtgcacaacaatggtgacttctacagcgcggagaatctcgctctctccaggggaagccgaagtttccaaaaggtcgttgatcaaagctcgccgcgttgtttcatcaagccttacggtcaccgtaaccagcaaatcaatatcactgtgtggcttcaggccgccatccactgcggagccgtacaaatgtacggccagcaacgtcggttcgagatggcgctcgatgacgccaactacctctgatagttgagtcgatacttcggcgatcaccgcttccctcatactcttcctttttcaatattattgaagcatttatcagggttattgtctcatgagcggatacatatttgaatgtatttagaaaaataaacaaatagctagctcactcggtcgctacgctccgggcgtgagactgcggcgggcgctgcggacacatacaaagttacccacagattccgtggataagcaggggactaacatgtgaggcaaaacagcagggccgcgccggtggcgtttttccataggctccgccctcctgccagagttcacataaacagacgcttttccggtgcatctgtgggagccgtgaggctcaaccatgaatctgacagtacgggcgaaacccgacaggacttaaagatccccaccgtttccggcgggtcgctccctcttgcgctctcctgttccgaccctgccgtttaccggatacctgttccgcctttctcccttacgggaagtgtggcgctttctcatagctcacacactggtatctcggctcggtgtaggtcgttcgctccaagctgggctgtaagcaagaactccccgttcagcccgactgctgcgccttatccggtaactgttcacttgagtccaacccggaaaagcacggtaaa

SEQ ID NO: 1386 - DNA, 3719 bp, synthetic construct
  source 1..3719: mol_type = other DNA
cgggatctcgacgctctcccttatgcgactcctgcattaggaaattaatacgactcactataggggaattgtgagcggataacaattcccctgtagaaataattttgtttaactttaataaggagatataccatgggcagcagccatcaccatcatcaccacagccaggatccgaattcgagctcggcgcgcctgcaggtcgacaagcttgcggccgcataatgcttaagtcgaacagaaagtaatcgtattgtacacggccgcataatcgaaattaatacgactcactataggggaattgtgagcggataacaattccccatcttagtatattagttaagtataagaaggagatatacatatggcagatctcaattggatatcggccggccacgcgatcgctgacgtcggtaccctcgagtctggtaaagaaaccgctgctgcgaaatttgaacgccagcacatggactcgtctactagcgcagcttaattaacctaggctgctgccaccgctgagcaataactagcataaccccttggggcctctaaacgggtcttgaggggttttttgctgaaacctcaggcatttgagaagcacacggtcacactgcttccggtagtcaataaaccggtaaaccagcaatagacataagcggctatttaacgaccctgccctgaaccgacgacaagctgacgaccgggtctccgcaagtggcacttttcggggaaatgtgcgcggaacccctatttgtttatttttctaaatacattcaaatatgtatccgctcatgaattaattcttagaaaaactcatcgagcatcaaatgaaactgcaatttattcatatcaggattatcaataccatatttttgaaaaagccgtttctgtaatgaaggagaaaactcaccgaggcagttccataggatggcaagatcctggtatcggtctgcgattccgactcgtccaacatcaatacaacctattaatttcccctcgtcaaaaataaggttatcaagtgagaaatcaccatgagtgacgactgaatccggtgagaatggcaaaagtttatgcatttctttccagacttgttcaacaggccagccattacgctcgtcatcaaaatcactcgcatcaaccaaaccgttattcattcgtgattgcgcctgagcgagacgaaatacgcggtcgctgttaaaaggacaattacaaacaggaatcgaatgcaaccggcgcaggaacactgccagcgcatcaacaatattttcacctgaatcaggatattcttctaatacctggaatgctgttttcccggggatcgcagtggtgagtaaccatgcatcatcaggagtacggataaaatgcttgatggtcggaagaggcataaattccgtcagccagtttagtctgaccatctcatctgtaacatcattggcaacgctacctttgccatgtttcagaaacaactctggcgcatcgggcttcccatacaatcgatagattgtcgcacctgattgcccgacattatcgcgagcccatttatacccatataaatcagcatccatgttggaatttaatcgcggcctagagcaagacgtttcccgttgaatatggctcatactcttcctttttcaatattattgaagcatttatcagggttattgtctcatgagcggatacatatttgaatgtatttagaaaaataaacaaataggcatgctagcgcagaaacgtcctagaagatgccaggaggatacttagcagagagacaataaggccggagcgaagccgtttttccataggctccgcccccctgacgaacatcacgaaatctgacgctcaaatcagtggtggcgaaacccgacaggactataaagataccaggcgtttccccctgatggctccctcttgcgctctcctgttcccgtcctgcggcgtccgtgttgtggtggaggctttacccaaatcaccacgtcccgttccgtgtagacagttcgctccaagctgggctgtgtgcaagaaccccccgttcagcccgactgctgcgccttatccggtaactatcatcttgagtccaacccggaaagacacgacaaaacgccactggcagcagccattggtaactgagaattagtggatttagatatcgagagtcttgaagtggtggcctaacagaggctacactgaaaggacagtatttggtatctgcgctccactaaagccagttaccaggttaagcagttccccaactgacttaaccttcgatcaaaccgcctccccaggcggttttttcgtttacagagcaggagattacgacgatcgtaaaaggatctcaagaagatcctttacggattcccgacaccatcactctagatttcagtgcaatttatctcttcaaatgtagcacctgaagtcagccccatacgatataagttgtaattctcatgttagtcatgccccgcgcccaccggaaggagctgactgggttgaaggctctcaagggcatcggtcgagatcccggtgcctaatgagtgagctaacttacattaattgcgttgcgctcactgcccgctttccagtcgggaaacctgtcgtgccagctgcattaatgaatcggccaacgcgcggggagaggcggtttgcgtattgggcgccagggtggtttttcttttcaccagtgagacgggcaacagctgattgcccttcaccgcctggccctgagagagttgcagcaagcggtccacgctggtttgccccagcaggcgaaaatcctgtttgatggtggttaacggcgggatataacatgagctgtcttcggtatcgtcgtatcccactaccgagatgtccgcaccaacgcgcagcccggactcggtaatggcgcgcattgcgcccagcgccatctgatcgttggcaaccagcatcgcagtgggaacgatgccctcattcagcatttgcatggtttgttgaaaaccggacatggcactccagtcgccttcccgttccgctatcggctgaatttgattgcgagtgagatatttatgccagccagccagacgcagacgcgccgagacagaacttaatgggcccgctaacagcgcgatttgctggtgacccaatgcgaccagatgctccacgcccagtcgcgtaccgtcttcatgggagaaaataatactgttgatgggtgtctggtcagagacatcaagaaataacgccggaacattagtgcaggcagcttccacagcaatggcatcctggtcatccagcggatagttaatgatcagcccactgacgcgttgcgcgagaagattgtgcaccgccgctttacaggcttcgacgccgcttcgttctaccatcgacaccaccacgctggcacccagttgatcggcgcgagatttaatcgccgcgacaatttgcgacggcgcgtgcagggccagactggaggtggcaacgccaatcagcaacgactgtttgcccgccagttgttgtgccacgcggttgggaatgtaattcagctccgccatcgccgcttccactttttcccgcgttttcgcagaaacgtggctggcctggttcaccacgcgggaaacggtctgataagagacaccggcatactctgcgacatcgtataacgttactggtttcacattcaccaccctgaattgactctcttccgggcgctatcatgccataccgcgaaaggttttgcgccattcgatggtgtc

SEQ ID NO: 1387 - DNA, 2710 bp, synthetic construct
  source 1..2710: mol_type = other DNA
tcgcgcgtttcggtgatgacggtgaaaacctctgacacatgcagctcccggagacggtcacagcttgtctgtaagcggatgccgggagcagacaagcccgtcagggcgcgtcagcgggtgttggcgggtgtcggggctggcttaactatgcggcatcagagcagattgtactgagagtgcaccatatgcggtgtgaaataccgcacagatgcgtaaggagaaaataccgcatcaggcgccattcgccattcaggctgcgcaactgttgggaagggcgatcggtgcgggcctcttcgctattacgccagctggcgaaagggggatgtgctgcaaggcgattaagttgggtaacgccagggttttcccagtcacgacgttgtaaaacgacggccagtgaattcgagctcggtacctcgcgaatgcatctagatatcggatcccgggcccgtcgactgcagaggcctgcatgcaagcttggcgtaatcatggtcatagctgtttcctgtgtgaaattgttatccgctcacaattccacacaacatacgagccggaagcataaagtgtaaagcctggggtgcctaatgagtgagctaactcacattaattgcgttgcgctcactgcccgctttccagtcgggaaacctgtcgtgccagctgcattaatgaatcggccaacgcgcggggagaggcggtttgcgtattgggcgctcttccgcttcctcgctcactgactcgctgcgctcggtcgttcggctgcggcgagcggtatcagctcactcaaaggcggtaatacggttatccacagaatcaggggataacgcaggaaagaacatgtgagcaaaaggccagcaaaaggccaggaaccgtaaaaaggccgcgttgctggcgtttttccataggctccgcccccctgacgagcatcacaaaaatcgacgctcaagtcagaggtggcgaaacccgacaggactataaagataccaggcgtttccccctggaagctccctcgtgcgctctcctgttccgaccctgccgcttaccggatacctgtccgcctttctcccttcgggaagcgtggcgctttctcatagctcacgctgtaggtatctcagttcggtgtaggtcgttcgctccaagctgggctgtgtgcacgaaccccccgttcagcccgaccgctgcgccttatccggtaactatcgtcttgagtccaacccggtaagacacgacttatcgccactggcagcagccactggtaacaggattagcagagcgaggtatgtaggcggtgctacagagttcttgaagtggtggcctaactacggctacactagaagaacagtatttggtatctgcgctctgctgaagccagttaccttcggaaaaagagttggtagctcttgatccggcaaacaaaccaccgctggtagcggtggtttttttgtttgcaagcagcagattacgcgcagaaaaaaaggatctcaagaagatcctttgatcttttctacggggtctgacgctcagtggaacgaaaactcacgttaagggattttggtcatgagattatcaaaaaggatcttcacctagatccttttaaattaaaaatgaagttttaaatcaatctaaagtatatatgagtaaacttggtctgacagttaccaatgcttaatcagtgaggcacctatctcagcgatctgtctatttcgttcatccatagttgcctgactccccgtcgtgtagataactacgatacgggagggcttaccatctggccccagtgctgcaatgataccgcgagacccacgctcaccggctccagatttatcagcaataaaccagccagccggaagggccgagcgcagaagtggtcctgcaactttatccgcctccatccagtctattaattgttgccgggaagctagagtaagtagttcgccagttaatagtttgcgcaacgttgttgccattgctacaggcatcgtggtgtcacgctcgtcgtttggtatggcttcattcagctccggttcccaacgatcaaggcgagttacatgatcccccatgttgtgcaaaaaagcggttagctccttcggtcctccgatcgttgtcagaagtaagttggccgcagtgttatcactcatggttatggcagcactgcataattctcttactgtcatgccatccgtaagatgcttttctgtgactggtgagtactcaaccaagtcattctgagaatagtgtatgcggcgaccgagttgctcttgcccggcgtcaatacgggataataccgcgccacatagcagaactttaaaagtgctcatcattggaaaacgttcttcggggcgaaaactctcaaggatcttaccgctgttgagatccagttcgatgtaacccactcgtgcacccaactgatcttcagcatcttttactttcaccagcgtttctgggtgagcaaaaacaggaaggcaaaatgccgcaaaaaagggaataagggcgacacggaaatgttgaatactcatactcttcctttttcaatattattgaagcatttatcagggttattgtctcatgagcggatacatatttgaatgtatttagaaaaataaacaaataggggttccgcgcacatttccccgaaaagtgccacctgacgtctaagaaaccattattatcatgacattaacctataaaaataggcgtatcacgaggccctttcgtc

SEQ ID NO: 1388 - DNA, 4745 bp, synthetic construct
  source 1..4745: mol_type = other DNA
tccgggattgacagctagctcagtcctaggtataatgctagcgtggagatatacctcgagacttgttaggcaattattgtataaacaggaatggttaggtgggaaaataattcatctagatgcttagtatttattaaatatcctttgagagatttttcactcgttttttaatataaatcaaagtgattattggcggcagggcatgtcgtttcagtttgtggaggaaggtttttttaacttctgttgaagcaaaaatctcggatgtcattgagaatgtcaacgtctggtccaaaccaacctctcgcggccgcaataatagactagcataaccccttggggcctctaaacgggtcttgaggggttttttgctgaacgtacgttttacggctagctcagtcctaggtactatgctagcgtggagatatacggtaccaaggagatataccatggactacaaagaccatgacggtgattataaagatcatgacatcgattacaaggatgacgatgacaagggaggaagcggatccatgatcaaaaaaaaggcatttaaatttttgcttgaaccaagtaaaagtcagatttctgacgttttggtttttgctggtgcctgccgttttgtctataataaaggccttgctctcctaagcgaaaactataataacggcaagccgttcctgaactataataaacttgcacctttattagtcgagtggaaaaatgataataagttggagtggcttaaactttgtccatctcaatgcttacagcaatcattacgtgatctcgatagggcttttcagaatttcttttcaggaagatcacagtatcctcgattcaaaaagaaaggccgcagtgattcctttagagtcccatgccaaagagttagattagaccaagaaaaaggtttggtatcattgcctaaattaggatgggttaagtaccgtaaaagtcgtgcaatcactggagatttgaaaaatgttacagtgtcaagaaagtttgataagtggtacataagttttaatactgaggaggttgtttctaatccggttcatccatcagttgataagacaagaattttactcaatgatggatatgttaccctgtgcacggggggcgatctttcagtcaaaaaatttactagtctagttgatgaaaaaaaaataaaacgtcttaataaagagttaagtaggaaagttaaaaacagtaacaattggctgaaaaataaaaagaaaattgacaaaataagattaaagtcaggtagtttcagactggatgccatacataagataactacgacaatatgcaaaaaacacgcagttgtggaagtggttaacgtaaagaattttgtatcggataaaaataacattgcaacaagtatgagatacgaacttgttagacagttactttataaacaagaatggttaggtggaaaaattattcatttagatgcttaatgagaattcctgctgccaccgctgagcaataactagcataaccccttggggcctctaaacgggtcttgaggggttttttgctgaaacctcaggcatttgagaagcacacggtcacactgcttccggtagtcaataaaccggtaaaccagcaatagacataagcggctatttaacgaccctgccctgaaccgacgaccgggtcatcgtggccggatcttgcggcccctcggcttgaacgaattgttagacattatttgccgactaccttggtgatctcgcctttcacgtagtggacaaattcttccaactgatctgcgcgcgaggccaagcgatcttcttcttgtccaagataagcctgtctagcttcaagtatgacgggctgatactgggccggcaggcgctccattgcccagtcggcagcgacatccttcggcgcgattttgccggttactgcgctgtaccaaatgcgggacaacgtaagcactacatttcgctcatcgccagcccagtcgggcggcgagttccatagcgttaaggtttcatttagcgcctcaaatagatcctgttcaggaaccggatcaaagagttcctccgccgctggacctaccaaggcaacgctatgttctcttgcttttgtcagcaagatagccagatcaatgtcgatcgtggctggctcgaagatacctgcaagaatgtcattgcgctgccattctccaaattgcagttcgcgcttagctggataacgccacggaatgatgtcgtcgtgcacaacaatggtgacttctacagcgcggagaatctcgctctctccaggggaagccgaagtttccaaaaggtcgttgatcaaagctcgccgcgttgtttcatcaagccttacggtcaccgtaaccagcaaatcaatatcactgtgtggcttcaggccgccatccactgcggagccgtacaaatgtacggccagcaacgtcggttcgagatggcgctcgatgacgccaactacctctgatagttgagtcgatacttcggcgatcaccgcttccctcatactcttcctttttcaatattattgaagcatttatcagggttattgtctcatgagcggatacatatttgaatgtatttagaaaaataaacaaatagctagctcactcggtcgctacgctccgggcgtgagactgcggcgggcgctgcggacacatacaaagttacccacagattccgtggataagcaggggactaacatgtgaggcaaaacagcagggccgcgccggtggcgtttttccataggctccgccctcctgccagagttcacataaacagacgcttttccggtgcatctgtgggagccgtgaggctcaaccatgaatctgacagtacgggcgaaacccgacaggacttaaagatccccaccgtttccggcgggtcgctccctcttgcgctctcctgttccgaccctgccgtttaccggatacctgttccgcctttctcccttacgggaagtgtggcgctttctcatagctcacacactggtatctcggctcggtgtaggtcgttcgctccaagctgggctgtaagcaagaactccccgttcagcccgactgctgcgccttatccggtaactgttcacttgagtccaacccggaaaagcacggtaaaacgccactggcagcagccattggtaactgggagttcgcagaggatttgtttagctaaacacgcggttgctcttgaagtgtgcgccaaagtccggctacactggaaggacagatttggttgctgtgctctgcgaaagccagttaccacggttaagcagttccccaactgacttaaccttcgatcaaaccacctccccaggtggttttttcgtttacagggcaaaagattacgcgcagaaaaaaaggatctcaagaagatcctttgatcttttctactgaaccgctctagatttcagtgcaatttatctcttcaaatgtagcacctgaagtcagccccatacgatataagttgtaattctcatgttagtcatgccccgcgcccaccggaaggagctgactgggttgaaggctctcaagggcatcggtcgagatcccggtgcctaatgagtgagctaacttacattaattgcgttgcgctcactgcccgctttccagtcgggaaacctgtcgtgccagctgcattaatgaatcggccaacgcgcggggagaggcggtttgcgtattgggcgccagggtggtttttcttttcaccagtgagacgggcaacagctgattgcccttcaccgcctggccctgagagagttgcagcaagcggtccacgctggtttgccccagcaggcgaaaatcctgtttgatggtggttaacggcgggatataacatgagctgtcttcggtatcgtcgtatcccactaccgagatgtccgcaccaacgcgcagcccggactcggtaatggcgcgcattgcgcccagcgccatctgatcgttggcaaccagcatcgcagtgggaacgatgccctcattcagcatttgcatggtttgttgaaaaccggacatggcactccagtcgccttcccgttccgctatcggctgaatttgattgcgagtgagatatttatgccagccagccagacgcagacgcgccgagacagaacttaatgggcccgctaacagcgcgatttgctggtgacccaatgcgaccagatgctccacgcccagtcgcgtaccgtcttcatgggagaaaataatactgttgatgggtgtctggtcagagacatcaagaaataacgccggaacattagtgcaggcagcttccacagcaatggcatcctggtcatccagcggatagttaatgatcagcccactgacgcgttgcgcgagaagattgtgcaccgccgctttacaggcttcgacgccgcttcgttctaccatcgacaccaccacgctggcacccagttgatcggcgcgagatttaatcgccgcgacaatttgcgacggcgcgtgcagggccagactggaggtggcaacgccaatcagcaacgactgtttgcccgccagttgttgtgccacgcggttgggaatgtaattcagctccgccatcgccgcttccactttttcccgcgttttcgcagaaacgtggctggcctggttcaccacgcgggaaacggtctgataagagacaccggcatactctgcgacatcgtataacgttactggtttcacattcaccaccctgaattgactctcttccgggcgctatcatgccataccgcgaaaggttttgcgccattcgatggtg

SEQ ID NO: 1389 - DNA, 4745 bp, synthetic construct
  source 1..4745: mol_type = other DNA
tccgggattgacagctagctcagtcctaggtataatgctagcgtggagatatacctcgaggttagacagttaatgtataaacaagaatggttaggtggtcaggtaattcggttaggcgattagcgtagtttattaatgattaaataagagttatatacagctgtttatatgaccttagatgaattgctggcggcagggcatgtcgtgtcagtttgtggaggggggttatttcaacttccgatgaagcaaaaatctcggttattagtactgagaatgtcaacgtctggtccaaaccaacctctcgcggccgcaataatagactagcataaccccttggggcctctaaacgggtcttgaggggttttttgctgaacgtacgttttacggctagctcagtcctaggtactatgctagcgtggagatatacggtaccaaggagatataccatggactacaaagaccatgacggtgattataaagatcatgacatcgattacaaggatgacgatgacaagggaggaagcggatccatgattaagaaacaggcgtttaaatttttgcttgagccgaataaaaatcatatcaatgaatttttggttttcgcaggttcctgtcgatttgtatacaataaaggactcgctcttattaatgagaattatgattcgggtaagaaattcttaaactacaatcaactggcatcagaattagttaattggaaaaatgaagagtgccttgcatggctaaaaatggctccatctcagtgcttgcaacaatcattaagggatctggataaagcgtttaaaaatttcttttcgggaaaatcacagtaccctcgattcaaaaagaaaggccgtaatgattcttttagagtgccttgccaaagagtcaggctggaccaagaaaaacatttggtatcattacccaaactagggtgggttaagtatcgtaaaagccgagagataacaggagtattaaagaacgttactatttcaagaaagcttgataaatggtatataagttttaatacagaagtagttgttcctgaacccgttcatccatcattcagcaaagccaaagttttgctaaataatgaatgtattgtgcaacttacatcgaatgagagcctggtcgagcaatttaccagcatggaaggtaataaaaagctaaggaaccttaataatatactaggcagaaaagtaaaatacagcagcaattggctaaaaactaaaaagaaaattgatagcgtaaaagcaaggtcaagcaggcgcagactggatgccttacataaaataactacagcaatatgcaaaaaacacgctattgtagagttggttaatttaacggattctttacctgataaaaataatggttttgtaagcatgggttatgaatttgttcgccagctgatgtacaagcaggagtggctgggcggtcaggtgatccgtctgggcgactaataagaattcctgctgccaccgctgagcaataactagcataaccccttggggcctctaaacgggtcttgaggggttttttgctgaaacctcaggcatttgagaagcacacggtcacactgcttccggtagtcaataaaccggtaaaccagcaatagacataagcggctatttaacgaccctgccctgaaccgacgaccgggtcatcgtggccggatcttgcggcccctcggcttgaacgaattgttagacattatttgccgactaccttggtgatctcgcctttcacgtagtggacaaattcttccaactgatctgcgcgcgaggccaagcgatcttcttcttgtccaagataagcctgtctagcttcaagtatgacgggctgatactgggccggcaggcgctccattgcccagtcggcagcgacatccttcggcgcgattttgccggttactgcgctgtaccaaatgcgggacaacgtaagcactacatttcgctcatcgccagcccagtcgggcggcgagttccatagcgttaaggtttcatttagcgcctcaaatagatcctgttcaggaaccggatcaaagagttcctccgccgctggacctaccaaggcaacgctatgttctcttgcttttgtcagcaagatagccagatcaatgtcgatcgtggctggctcgaagatacctgcaagaatgtcattgcgctgccattctccaaattgcagttcgcgcttagctggataacgccacggaatgatgtcgtcgtgcacaacaatggtgacttctacagcgcggagaatctcgctctctccaggggaagccgaagtttccaaaaggtcgttgatcaaagctcgccgcgttgtttcatcaagccttacggtcaccgtaaccagcaaatcaatatcactgtgtggcttcaggccgccatccactgcggagccgtacaaatgtacggccagcaacgtcggttcgagatggcgctcgatgacgccaactacctctgatagttgagtcgatacttcggcgatcaccgcttccctcatactcttcctttttcaatattattgaagcatttatcagggttattgtctcatgagcggatacatatttgaatgtatttagaaaaataaacaaatagctagctcactcggtcgctacgctccgggcgtgagactgcggcgggcgctgcggacacatacaaagttacccacagattccgtggataagcaggggactaacatgtgaggcaaaacagcagggccgcgccggtggcgtttttccataggctccgccctcctgccagagttcacataaacagacgcttttccggtgcatctgtgggagccgtgaggctcaaccatgaatctgacagtacgggcgaaacccgacaggacttaaagatccccaccgtttccggcgggtcgctccctcttgcgctctcctgttccgaccctgccgtttaccggatacctgttccgcctttctcccttacgggaagtgtggcgctttctcatagctcacacactggtatctcggctcggtgtaggtcgttcgctccaagctgggctgtaagcaagaactccccgttcagcccgactgctgcgccttatccggtaactgttcacttgagtccaacccggaaaagcacggtaaaacgccactggcagcagccattggtaactgggagttcgcagaggatttgtttagctaaacacgcggttgctcttgaagtgtgcgccaaagtccggctacactggaaggacagatttggttgctgtgctctgcgaaagccagttaccacggttaagcagttccccaactgacttaaccttcgatcaaaccacctccccaggtggttttttcgtttacagggcaaaagattacgcgcagaaaaaaaggatctcaagaagatcctttgatcttttctactgaaccgctctagatttcagtgcaatttatctcttcaaatgtagcacctgaagtcagccccatacgatataagttgtaattctcatgttagtcatgccccgcgcccaccggaaggagctgactgggttgaaggctctcaagggcatcggtcgagatcccggtgcctaatgagtgagctaacttacattaattgcgttgcgctcactgcccgctttccagtcgggaaacctgtcgtgccagctgcattaatgaatcggccaacgcgcggggagaggcggtttgcgtattgggcgccagggtggtttttcttttcaccagtgagacgggcaacagctgattgcccttcaccgcctggccctgagagagttgcagcaagcggtccacgctggtttgccccagcaggcgaaaatcctgtttgatggtggttaacggcgggatataacatgagctgtcttcggtatcgtcgtatcccactaccgagatgtccgcaccaacgcgcagcccggactcggtaatggcgcgcattgcgcccagcgccatctgatcgttggcaaccagcatcgcagtgggaacgatgccctcattcagcatttgcatggtttgttgaaaaccggacatggcactccagtcgccttcccgttccgctatcggctgaatttgattgcgagtgagatatttatgccagccagccagacgcagacgcgccgagacagaacttaatgggcccgctaacagcgcgatttgctggtgacccaatgcgaccagatgctccacgcccagtcgcgtaccgtcttcatgggagaaaataatactgttgatgggtgtctggtcagagacatcaagaaataacgccggaacattagtgcaggcagcttccacagcaatggcatcctggtcatccagcggatagttaatgatcagcccactgacgcgttgcgcgagaagattgtgcaccgccgctttacaggcttcgacgccgcttcgttctaccatcgacaccaccacgctggcacccagttgatcggcgcgagatttaatcgccgcgacaatttgcgacggcgcgtgcagggccagactggaggtggcaacgccaatcagcaacgactgtttgcccgccagttgttgtgccacgcggttgggaatgtaattcagctccgccatcgccgcttccactttttcccgcgttttcgcagaaacgtggctggcctggttcaccacgcgggaaacggtctgataagagacaccggcatactctgcgacatcgtataacgttactggtttcacattcaccaccctgaattgactctcttccgggcgctatcatgccataccgcgaaaggttttgcgccattcgatggtg

SEQ ID NO: 1390 - DNA, 4745 bp, synthetic construct
  source 1..4745: mol_type = other DNA
tccgggattgacagctagctcagtcctaggtataatgctagcgtggagatatacctcgagagcatgagatacgaatttgtcagacagctaatttacaaacaagagtggctgggtggtgaagttattcgccgagagttagcctagtaacgcctgttttcgagatgatgtagtactaaatgatgaaatttatgcggcagggcatgtcgtttctgcttgtcgaggaaggttacttaaacttccgttgaagcaagaatctcatgattgcatctgagagtgtcaacgtctggtccaaaccaacctctcgcggccgcaataatagactagcataaccccttggggcctctaaacgggtcttgaggggttttttgctgaacgtacgttttacggctagctcagtcctaggtactatgctagcgtggagatatacggtaccaaggagatataccatggactacaaagaccatgacggtgattataaagatcatgacatcgattacaaggatgacgatgacaagggaggaagcggatccatgattaaaaaacaggcgttcaaattccggcttgaacctaataaaagccagtcgtctgacttttttatgtttgctggttcctgtcgttttgtttataacaaagcccttgctcttctcaacgataattaccattctggcaagaaattcatgggttacaatcaactagctacagagttagttgagtggaaaagtgaagaaagcctttcctggttgaaagcttctccttcccagtgcttgcagcaatctctaagagatttagatagagctttccggaattttttctccggaaaagcacaatatccaaagtttaaaaagaaagggcggcatgattccttccgtattccatgtcaaagggttagagtagatcaagataagaaaatggtgtctctccccaaagtcggttgggtaaaatatcgaaaaagtcgtgaaatcattggagagttaaaaaacgtaaccatttccatgaagcaagataagtggtacatcagttttaatacagagagtatggtccctgacccaatgcatccttctgatatcaaaacaaaaattgtacttagtgatcagtgtgagtttcctatccggttggatagcagcatggatagttctcatcagcttgatgaagtaaaaaaattagcccgacttaatagaatattaatcagaagaattaagtacagcagtaattggttgaaaactaaagggaaaattgacaggataaaggcaaggttagctaggtgcaggctagataacatccataaagtaactacagcaatttgtaaaaaacacgcagttgttgaggttttgagcttgatggattcagtatcggataaaaatgatatcactctgagcatgcgctacgaatttgttcgtcagcttatctataagcaggaatggcttggcggcgaagtgattcgccgtgaactcgcgtaataagaattcctgctgccaccgctgagcaataactagcataaccccttggggcctctaaacgggtcttgaggggttttttgctgaaacctcaggcatttgagaagcacacggtcacactgcttccggtagtcaataaaccggtaaaccagcaatagacataagcggctatttaacgaccctgccctgaaccgacgaccgggtcatcgtggccggatcttgcggcccctcggcttgaacgaattgttagacattatttgccgactaccttggtgatctcgcctttcacgtagtggacaaattcttccaactgatctgcgcgcgaggccaagcgatcttcttcttgtccaagataagcctgtctagcttcaagtatgacgggctgatactgggccggcaggcgctccattgcccagtcggcagcgacatccttcggcgcgattttgccggttactgcgctgtaccaaatgcgggacaacgtaagcactacatttcgctcatcgccagcccagtcgggcggcgagttccatagcgttaaggtttcatttagcgcctcaaatagatcctgttcaggaaccggatcaaagagttcctccgccgctggacctaccaaggcaacgctatgttctcttgcttttgtcagcaagatagccagatcaatgtcgatcgtggctggctcgaagatacctgcaagaatgtcattgcgctgccattctccaaattgcagttcgcgcttagctggataacgccacggaatgatgtcgtcgtgcacaacaatggtgacttctacagcgcggagaatctcgctctctccaggggaagccgaagtttccaaaaggtcgttgatcaaagctcgccgcgttgtttcatcaagccttacggtcaccgtaaccagcaaatcaatatcactgtgtggcttcaggccgccatccactgcggagccgtacaaatgtacggccagcaacgtcggttcgagatggcgctcgatgacgccaactacctctgatagttgagtcgatacttcggcgatcaccgcttccctcatactcttcctttttcaatattattgaagcatttatcagggttattgtctcatgagcggatacatatttgaatgtatttagaaaaataaacaaatagctagctcactcggtcgctacgctccgggcgtgagactgcggcgggcgctgcggacacatacaaagttacccacagattccgtggataagcaggggactaacatgtgaggcaaaacagcagggccgcgccggtggcgtttttccataggctccgccctcctgccagagttcacataaacagacgcttttccggtgcatctgtgggagccgtgaggctcaaccatgaatctgacagtacgggcgaaacccgacaggacttaaagatccccaccgtttccggcgggtcgctccctcttgcgctctcctgttccgaccctgccgtttaccggatacctgttccgcctttctcccttacgggaagtgtggcgctttctcatagctcacacactggtatctcggctcggtgtaggtcgttcgctccaagctgggctgtaagcaagaactccccgttcagcccgactgctgcgccttatccggtaactgttcacttgagtccaacccggaaaagcacggtaaaacgccactggcagcagccattggtaactgggagttcgcagaggatttgtttagctaaacacgcggttgctcttgaagtgtgcgccaaagtccggctacactggaaggacagatttggttgctgtgctctgcgaaagccagttaccacggttaagcagttccccaactgacttaaccttcgatcaaaccacctccccaggtggttttttcgtttacagggcaaaagattacgcgcagaaaaaaaggatctcaagaagatcctttgatcttttctactgaaccgctctagatttcagtgcaatttatctcttcaaatgtagcacctgaagtcagccccatacgatataagttgtaattctcatgttagtcatgccccgcgcccaccggaaggagctgactgggttgaaggctctcaagggcatcggtcgagatcccggtgcctaatgagtgagctaacttacattaattgcgttgcgctcactgcccgctttccagtcgggaaacctgtcgtgccagctgcattaatgaatcggccaacgcgcggggagaggcggtttgcgtattgggcgccagggtggtttttcttttcaccagtgagacgggcaacagctgattgcccttcaccgcctggccctgagagagttgcagcaagcggtccacgctggtttgccccagcaggcgaaaatcctgtttgatggtggttaacggcgggatataacatgagctgtcttcggtatcgtcgtatcccactaccgagatgtccgcaccaacgcgcagcccggactcggtaatggcgcgcattgcgcccagcgccatctgatcgttggcaaccagcatcgcagtgggaacgatgccctcattcagcatttgcatggtttgttgaaaaccggacatggcactccagtcgccttcccgttccgctatcggctgaatttgattgcgagtgagatatttatgccagccagccagacgcagacgcgccgagacagaacttaatgggcccgctaacagcgcgatttgctggtgacccaatgcgaccagatgctccacgcccagtcgcgtaccgtcttcatgggagaaaataatactgttgatgggtgtctggtcagagacatcaagaaataacgccggaacattagtgcaggcagcttccacagcaatggcatcctggtcatccagcggatagttaatgatcagcccactgacgcgttgcgcgagaagattgtgcaccgccgctttacaggcttcgacgccgcttcgttctaccatcgacaccaccacgctggcacccagttgatcggcgcgagatttaatcgccgcgacaatttgcgacggcgcgtgcagggccagactggaggtggcaacgccaatcagcaacgactgtttgcccgccagttgttgtgccacgcggttgggaatgtaattcagctccgccatcgccgcttccactttttcccgcgttttcgcagaaacgtggctggcctggttcaccacgcgggaaacggtctgataagagacaccggcatactctgcgacatcgtataacgttactggtttcacattcaccaccctgaattgactctcttccgggcgctatcatgccataccgcgaaaggttttgcgccattcgatggtg

SEQ ID NO: 1391 - DNA, 4751 bp, synthetic construct
  source 1..4751: mol_type = other DNA
tccgggattgacagctagctcagtcctaggtataatgctagcgtggagatatacctcgagatgagatacgaatttgtcaggcagttgatatacaaacaagagtggctgggtggtgaaattattcgccgggagagtaagctcttgtaacggttttttccgtgatgatgttgtactatgtgatgaattttaagcggcagggcatgtcgtttctgcttgtggaggaaggttaattcaacttccgttgaagcaagaatctcttgattgttattgagaatgtcaacgtctggtccaaaccaacctctcgcggccgcaataatagactagcataaccccttggggcctctaaacgggtcttgaggggttttttgctgaacgtacgttttacggctagctcagtcctaggtactatgctagcgtggagatatacggtaccaaggagatataccatggactacaaagaccatgacggtgattataaagatcatgacatcgattacaaggatgacgatgacaagggaggaagcggatccatgattaaaaaacaggcattcaaatttttgcttgaacctaacaaaggtcagttatctgactttttggcctttgctggctcctgtcgttttgtttacaacaaaggccttgctcttcttaacgagaattaccgtgcgggtaaaaaattcataggctacaataagctggcttctgaattggtggaatggaagaatgaagagagcctttcttggttgaaagaagctccgtctcagtgtttacagcaatcgttaagagatttagacagagcattcagaaactttttcaccggcaaatcacaatatccaaagtttaaaaagaaaggtcggcatgattctttccgtataccatgccaaagggttagagtagatcaagaaaaaaaactagtatctctccctaaagtcggctgggtaaagtatcgcaagagccgtgaaatcattggtgatttaaaaaacgcaactatttccctgaatcaggggaaatggtatatcagttttaatacagaacaaacagttcctgaaccaatacacccctctgatatcaaaactacaattatacttaataatgtgaatagcgttcatctgtcatctggggtcggcggtgataacacttaccaagcggaagaaaagaaaaagttagtccgtctcaataaaacactgaccagaagaaagagatacagcaaaaattggctaaaaaccaaaggtaaaatcgatagagtaaaatcaaaggcagcaaggataagactcgataatatccataaggcaaccacggcaatttgtaaaaatcacgctgttgttgaggttgtgaacttgatggattctgtatttgacaagaacgataacactctgagtatgcgttacgaatttgtgcgccagctgatttataaacaagaatggctgggcggtgaaatcattcgccgtgagagcaagcttttataataagaattcctgctgccaccgctgagcaataactagcataaccccttggggcctctaaacgggtcttgaggggttttttgctgaaacctcaggcatttgagaagcacacggtcacactgcttccggtagtcaataaaccggtaaaccagcaatagacataagcggctatttaacgaccctgccctgaaccgacgaccgggtcatcgtggccggatcttgcggcccctcggcttgaacgaattgttagacattatttgccgactaccttggtgatctcgcctttcacgtagtggacaaattcttccaactgatctgcgcgcgaggccaagcgatcttcttcttgtccaagataagcctgtctagcttcaagtatgacgggctgatactgggccggcaggcgctccattgcccagtcggcagcgacatccttcggcgcgattttgccggttactgcgctgtaccaaatgcgggacaacgtaagcactacatttcgctcatcgccagcccagtcgggcggcgagttccatagcgttaaggtttcatttagcgcctcaaatagatcctgttcaggaaccggatcaaagagttcctccgccgctggacctaccaaggcaacgctatgttctcttgcttttgtcagcaagatagccagatcaatgtcgatcgtggctggctcgaagatacctgcaagaatgtcattgcgctgccattctccaaattgcagttcgcgcttagctggataacgccacggaatgatgtcgtcgtgcacaacaatggtgacttctacagcgcggagaatctcgctctctccaggggaagccgaagtttccaaaaggtcgttgatcaaagctcgccgcgttgtttcatcaagccttacggtcaccgtaaccagcaaatcaatatcactgtgtggcttcaggccgccatccactgcggagccgtacaaatgtacggccagcaacgtcggttcgagatggcgctcgatgacgccaactacctctgatagttgagtcgatacttcggcgatcaccgcttccctcatactcttcctttttcaatattattgaagcatttatcagggttattgtctcatgagcggatacatatttgaatgtatttagaaaaataaacaaatagctagctcactcggtcgctacgctccgggcgtgagactgcggcgggcgctgcggacacatacaaagttacccacagattccgtggataagcaggggactaacatgtgaggcaaaacagcagggccgcgccggtggcgtttttccataggctccgccctcctgccagagttcacataaacagacgcttttccggtgcatctgtgggagccgtgaggctcaaccatgaatctgacagtacgggcgaaacccgacaggacttaaagatccccaccgtttccggcgggtcgctccctcttgcgctctcctgttccgaccctgccgtttaccggatacctgttccgcctttctcccttacgggaagtgtggcgctttctcatagctcacacactggtatctcggctcggtgtaggtcgttcgctccaagctgggctgtaagcaagaactccccgttcagcccgactgctgcgccttatccggtaactgttcacttgagtccaacccggaaaagcacggtaaaacgccactggcagcagccattggtaactgggagttcgcagaggatttgtttagctaaacacgcggttgctcttgaagtgtgcgccaaagtccggctacactggaaggacagatttggttgctgtgctctgcgaaagccagttaccacggttaagcagttccccaactgacttaaccttcgatcaaaccacctccccaggtggttttttcgtttacagggcaaaagattacgcgcagaaaaaaaggatctcaagaagatcctttgatcttttctactgaaccgctctagatttcagtgcaatttatctcttcaaatgtagcacctgaagtcagccccatacgatataagttgtaattctcatgttagtcatgccccgcgcccaccggaaggagctgactgggttgaaggctctcaagggcatcggtcgagatcccggtgcctaatgagtgagctaacttacattaattgcgttgcgctcactgcccgctttccagtcgggaaacctgtcgtgccagctgcattaatgaatcggccaacgcgcggggagaggcggtttgcgtattgggcgccagggtggtttttcttttcaccagtgagacgggcaacagctgattgcccttcaccgcctggccctgagagagttgcagcaagcggtccacgctggtttgccccagcaggcgaaaatcctgtttgatggtggttaacggcgggatataacatgagctgtcttcggtatcgtcgtatcccactaccgagatgtccgcaccaacgcgcagcccggactcggtaatggcgcgcattgcgcccagcgccatctgatcgttggcaaccagcatcgcagtgggaacgatgccctcattcagcatttgcatggtttgttgaaaaccggacatggcactccagtcgccttcccgttccgctatcggctgaatttgattgcgagtgagatatttatgccagccagccagacgcagacgcgccgagacagaacttaatgggcccgctaacagcgcgatttgctggtgacccaatgcgaccagatgctccacgcccagtcgcgtaccgtcttcatgggagaaaataatactgttgatgggtgtctggtcagagacatcaagaaataacgccggaacattagtgcaggcagcttccacagcaatggcatcctggtcatccagcggatagttaatgatcagcccactgacgcgttgcgcgagaagattgtgcaccgccgctttacaggcttcgacgccgcttcgttctaccatcgacaccaccacgctggcacccagttgatcggcgcgagatttaatcgccgcgacaatttgcgacggcgcgtgcagggccagactggaggtggcaacgccaatcagcaacgactgtttgcccgccagttgttgtgccacgcggttgggaatgtaattcagctccgccatcgccgcttccactttttcccgcgttttcgcagaaacgtggctggcctggttcaccacgcgggaaacggtctgataagagacaccggcatactctgcgacatcgtataacgttactggtttcacattcaccaccctgaattgactctcttccgggcgctatcatgccataccgcgaaaggttttgcgccattcgatggtg

SEQ ID NO: 1392 - DNA, 5065 bp, synthetic construct
  source 1..5065: mol_type = other DNA
gcgctgcggacacatacaaagttacccacagattccgtggataagcaggggactaacatgtgaggcaaaacagcagggccgcgccggtggcgtttttccataggctccgccctcctgccagagttcacataaacagacgcttttccggtgcatctgtgggagccgtgaggctcaaccatgaatctgacagtacgggcgaaacccgacaggacttaaagatccccaccgtttccggcgggtcgctccctcttgcgctctcctgttccgaccctgccgtttaccggatacctgttccgcctttctcccttacgggaagtgtggcgctttctcatagctcacacactggtatctcggctcggtgtaggtcgttcgctccaagctgggctgtaagcaagaactccccgttcagcccgactgctgcgccttatccggtaactgttcacttgagtccaacccggaaaagcacggtaaaacgccactggcagcagccattggtaactgggagttcgcagaggatttgtttagctaaacacgcggttgctcttgaagtgtgcgccaaagtccggctacactggaaggacagatttggttgctgtgctctgcgaaagccagttaccacggttaagcagttccccaactgacttaaccttcgatcaaaccacctccccaggtggttttttcgtttacagggcaaaagattacgcgcagaaaaaaaggatctcaagaagatcctttgatcttttctactgaaccgctctagatttcagtgcaatttatctcttcaaatgtagcacctgaagtcagccccatacgatataagttgtaattctcatgttagtcatgccccgcgcccaccggaaggagctgactgggttgaaggctctcaagggcatcggtcgagatcccggtgcctaatgagtgagctaacttacattaattgcgttgcgctcactgcccgctttccagtcgggaaacctgtcgtgccagctgcattaatgaatcggccaacgcgcggggagaggcggtttgcgtattgggcgccagggtggtttttcttttcaccagtgagacgggcaacagctgattgcccttcaccgcctggccctgagagagttgcagcaagcggtccacgctggtttgccccagcaggcgaaaatcctgtttgatggtggttaacggcgggatataacatgagctgtcttcggtatcgtcgtatcccactaccgagatgtccgcaccaacgcgcagcccggactcggtaatggcgcgcattgcgcccagcgccatctgatcgttggcaaccagcatcgcagtgggaacgatgccctcattcagcatttgcatggtttgttgaaaaccggacatggcactccagtcgccttcccgttccgctatcggctgaatttgattgcgagtgagatatttatgccagccagccagacgcagacgcgccgagacagaacttaatgggcccgctaacagcgcgatttgctggtgacccaatgcgaccagatgctccacgcccagtcgcgtaccgtcttcatgggagaaaataatactgttgatgggtgtctggtcagagacatcaagaaataacgccggaacattagtgcaggcagcttccacagcaatggcatcctggtcatccagcggatagttaatgatcagcccactgacgcgttgcgcgagaagattgtgcaccgccgctttacaggcttcgacgccgcttcgttctaccatcgacaccaccacgctggcacccagttgatcggcgcgagatttaatcgccgcgacaatttgcgacggcgcgtgcagggccagactggaggtggcaacgccaatcagcaacgactgtttgcccgccagttgttgtgccacgcggttgggaatgtaattcagctccgccatcgccgcttccactttttcccgcgttttcgcagaaacgtggctggcctggttcaccacgcgggaaacggtctgataagagacaccggcatactctgcgacatcgtataacgttactggtttcacattcaccaccctgaattgactctcttccgggcgctatcatgccataccgcgaaaggttttgcgccattcgatggtgtccgggagaaattaatacgactcactataggcctcgagttaagcgcggcttgtatcgaacaaagtctggcaaactaattaatgctgatgtcaatggcgcattaaacatcttaaagaaaagtaaagctgtagacctgagtgtcttatgctctagcggcgaagtggacacgcctcaaagaataaggattgcttgaagcagtcaaacttctttggaagcccccacttcaaattttcgctagaaaattaagtgggggtagttcacccgggcaaaccatcgaagtgaccagcgaatacctgttccgctcgcggccgcaataactagcataaccccttggggcctctaaacgggtcttgaggggttttttgctgaagtcgacttaatacgactcactataggggaattgtgagcggataacaattcccaggtaccaaggagatataccatggactacaaagaccatgacggtgattataaagatcatgacatcgattacaaggatgacgatgacaagggaggaagcggatcgatgggctatttttgcatcaagcagcagcttaatgggttgacgaaggaagagtacctgacactgcgtgagttgtgccatattgccaaaaacatgtacaacgttggcctttacaacgtacgtcagtactattttgagcataaggagttcttaaattacgaaaagaactatcacttggcgaagactaatgaaaactacaagttactgaactcgaacatggctcaacaaatcttgaaaaaagtaaatgaagccttcaaaagtttcttcggtcttatttcgcttgccaaacaaggtaaatacgaccataaagcaatctcgattcccaaatacttaaagaaagacggtttccattcgttaatcatcggccaaatccgcattgacggaaataagttcacgattccatactctcgcttattcaaaaagacacataagcccattacaatcactattccaccagtgttacttgataaaaagattaagcagatcgaaatcattccgaaacaccatgcacgtttcttcgagatccagtacaagtacgaaatgcctgaagatcagcgcgaacttaatgatcagaaggcgcttgcgattgccttggggcttaataacttggctacatgtgtaacctcagacggacgttctttcattattgacggccgtcgtcttaaatctatcaaccaatggttcaataaggaaaacgctcgcttgcagtctattaaagataaacagaagattaagggaaccacgcgtaaacaagcactgcttgcgatgaatcgtaataacaaggtgaacgactatatcaataagacctgccgctatatcattaactactgtatcgaaaatcaaattggcaagctggtaatcgggtacgccgaaacatggcagcgcaacatgaatttgggcaagaaaaccaaccaaaacttcgtcaatatccctcttggaaacattaaggagaagttagaatacctttgtgagttctatgggatcgagtttttgaagcaagaagagtcgtatacaagtcaagcgtcgttttttgatggagatgaaatccccgaatacaacgcggataatcccaaagagtacaaattttctggtaagcgcattaagcgcggcctgtatcgcactaaatcaggaaaacttattaacgcagacgtgaatggggcattgaatattttaaaaaaaagcaaggctgttgatttgtctgtcttgtgcagttctggtgaggtagacaccccgcaacgtattcgcatcgcgtgataacctaggctgctgccaccgctgagcaataactagcataaccccttggggcctctaaacgggtcttgaggggttttttgctgaaacctcaggcatttgagaagcacacggtcacactgcttccggtagtcaataaaccggtaaaccagcaatagacataagcggctatttaacgaccctgccctgaaccgacgaccgggtcatcgtggccggatcttgcggcccctcggcttgaacgaattgttagacattatttgccgactaccttggtgatctcgcctttcacgtagtggacaaattcttccaactgatctgcgcgcgaggccaagcgatcttcttcttgtccaagataagcctgtctagcttcaagtatgacgggctgatactgggccggcaggcgctccattgcccagtcggcagcgacatccttcggcgcgattttgccggttactgcgctgtaccaaatgcgggacaacgtaagcactacatttcgctcatcgccagcccagtcgggcggcgagttccatagcgttaaggtttcatttagcgcctcaaatagatcctgttcaggaaccggatcaaagagttcctccgccgctggacctaccaaggcaacgctatgttctcttgcttttgtcagcaagatagccagatcaatgtcgatcgtggctggctcgaagatacctgcaagaatgtcattgcgctgccattctccaaattgcagttcgcgcttagctggataacgccacggaatgatgtcgtcgtgcacaacaatggtgacttctacagcgcggagaatctcgctctctccaggggaagccgaagtttccaaaaggtcgttgatcaaagctcgccgcgttgtttcatcaagccttacggtcaccgtaaccagcaaatcaatatcactgtgtggcttcaggccgccatccactgcggagccgtacaaatgtacggccagcaacgtcggttcgagatggcgctcgatgacgccaactacctctgatagttgagtcgatacttcggcgatcaccgcttccctcatactcttcctttttcaatattattgaagcatttatcagggttattgtctcatgagcggatacatatttgaatgtatttagaaaaataaacaaatagctagctcactcggtcgctacgctccgggcgtgagactgcggcgg

SEQ ID NO: 1393 - DNA, 4943 bp, synthetic construct
  source 1..4943: mol_type = other DNA
tccgggattgacagctagctcagtcctaggtataatgctagcgtggagatatacctcgagcgtgtgcgaacgcgatgacaacttaaagccaattatagatgatgcctcaagcaaccattatggcaggcttagggctgagaagattttagcggcagggcatgccgttattgcctgtggaggagcggatttgttaggccatccgatgaaacaggaaccctcagaagatggcaaaagcaccgttatcttactgtaagctcgggttatccgcgccggatgtcaacgtctggtccaaaccaacctctcgcggccgcaataatagactagcataaccccttggggcctctaaacgggtcttgaggggttttttgctgaacgtacgttttacggctagctcagtcctaggtactatgctagcgtggagatatacggtaccaaggagatataccatggactacaaagaccatgacggtgattataaagatcatgacatcgattacaaggatgacgatgacaagggaggaagcggatccatgatccgccgtaaagcatacaagtttcagttgaaaccgaatccagaacagattgcttctatgaagtcgttcgcgggtgcgtgtcgttttgtctacaatcgtgctttaacgatgcagagcgacatctggcgcaatggtgatcgctacatcccgtataataaaatggcgccgtggctagtcgaatggaaaagccaagaggaaatgtcatggttgagtaatgccccttcccagatcctgcagcaatcgctgaaagacctggataaagcattcaacaacctctttgcacgtcgagccaccttcccctctccgaaaaaaaagggccgcaatgacgcttttcgttatcccactcagcgtgtgaagcttgatgaaggcaatgaacgcatccaactgccgaagctgggttggatgcgttaccggaaaagtcgatccattacaggcgtaattaaaaacgtcaccgtttcgatgaaacttgataaatggtatgtgagtctgcagacagaagcggaggttgatgatccttcaccgaaacagtcaagcatcatagggttggataccagcaacattaaatgcatcaccacttcggacagcattgattttctgtctcaggcgtcgctgcctaaaatggaaaaatccctggagaaaagcctcaaactgctgcgcaagaaaaaacgctttagctccaattgggccaagcaaaaacataaagtgaaccgtctgctgcatcgcatttcaaacatgcgtaaagaccatttccacaaaatttcgacggcactcagcaaaaaccacgccattgtggtaattgaaaacttagaggatgcgaccagtctatctaatcaccgcaagcgcacgagtggtttcacgttaaacgacatttatgagttgaaacgccagcttgactacaagctgaaatggaatggcggcgaactggtgaccgtgtgcgagcgcgacgataacctgaagccaatcattgatgacgccagcagcaaccattatggccggcttagggcggagaagatattagcagccgggcacgctgtcatcgcctgtggcggcgctgatctcttgggtcatccgatgaagcaggagccgtcagaagatggtaaaagcaccgtcattttgctgtaataagaattcctgctgccaccgctgagcaataactagcataaccccttggggcctctaaacgggtcttgaggggttttttgctgaaacctcaggcatttgagaagcacacggtcacactgcttccggtagtcaataaaccggtaaaccagcaatagacataagcggctatttaacgaccctgccctgaaccgacgaccgggtcatcgtggccggatcttgcggcccctcggcttgaacgaattgttagacattatttgccgactaccttggtgatctcgcctttcacgtagtggacaaattcttccaactgatctgcgcgcgaggccaagcgatcttcttcttgtccaagataagcctgtctagcttcaagtatgacgggctgatactgggccggcaggcgctccattgcccagtcggcagcgacatccttcggcgcgattttgccggttactgcgctgtaccaaatgcgggacaacgtaagcactacatttcgctcatcgccagcccagtcgggcggcgagttccatagcgttaaggtttcatttagcgcctcaaatagatcctgttcaggaaccggatcaaagagttcctccgccgctggacctaccaaggcaacgctatgttctcttgcttttgtcagcaagatagccagatcaatgtcgatcgtggctggctcgaagatacctgcaagaatgtcattgcgctgccattctccaaattgcagttcgcgcttagctggataacgccacggaatgatgtcgtcgtgcacaacaatggtgacttctacagcgcggagaatctcgctctctccaggggaagccgaagtttccaaaaggtcgttgatcaaagctcgccgcgttgtttcatcaagccttacggtcaccgtaaccagcaaatcaatatcactgtgtggcttcaggccgccatccactgcggagccgtacaaatgtacggccagcaacgtcggttcgagatggcgctcgatgacgccaactacctctgatagttgagtcgatacttcggcgatcaccgcttccctcatactcttcctttttcaatattattgaagcatttatcagggttattgtctcatgagcggatacatatttgaatgtatttagaaaaataaacaaatagctagctcactcggtcgctacgctccgggcgtgagactgcggcgggcgctgcggacacatacaaagttacccacagattccgtggataagcaggggactaacatgtgaggcaaaacagcagggccgcgccggtggcgtttttccataggctccgccctcctgccagagttcacataaacagacgcttttccggtgcatctgtgggagccgtgaggctcaaccatgaatctgacagtacgggcgaaacccgacaggacttaaagatccccaccgtttccggcgggtcgctccctcttgcgctctcctgttccgaccctgccgtttaccggatacctgttccgcctttctcccttacgggaagtgtggcgctttctcatagctcacacactggtatctcggctcggtgtaggtcgttcgctccaagctgggctgtaagcaagaactccccgttcagcccgactgctgcgccttatccggtaactgttcacttgagtccaacccggaaaagcacggtaaaacgccactggcagcagccattggtaactgggagttcgcagaggatttgtttagctaaacacgcggttgctcttgaagtgtgcgccaaagtccggctacactggaaggacagatttggttgctgtgctctgcgaaagccagttaccacggttaagcagttccccaactgacttaaccttcgatcaaaccacctccccaggtggttttttcgtttacagggcaaaagattacgcgcagaaaaaaaggatctcaagaagatcctttgatcttttctactgaaccgctctagatttcagtgcaatttatctcttcaaatgtagcacctgaagtcagccccatacgatataagttgtaattctcatgttagtcatgccccgcgcccaccggaaggagctgactgggttgaaggctctcaagggcatcggtcgagatcccggtgcctaatgagtgagctaacttacattaattgcgttgcgctcactgcccgctttccagtcgggaaacctgtcgtgccagctgcattaatgaatcggccaacgcgcggggagaggcggtttgcgtattgggcgccagggtggtttttcttttcaccagtgagacgggcaacagctgattgcccttcaccgcctggccctgagagagttgcagcaagcggtccacgctggtttgccccagcaggcgaaaatcctgtttgatggtggttaacggcgggatataacatgagctgtcttcggtatcgtcgtatcccactaccgagatgtccgcaccaacgcgcagcccggactcggtaatggcgcgcattgcgcccagcgccatctgatcgttggcaaccagcatcgcagtgggaacgatgccctcattcagcatttgcatggtttgttgaaaaccggacatggcactccagtcgccttcccgttccgctatcggctgaatttgattgcgagtgagatatttatgccagccagccagacgcagacgcgccgagacagaacttaatgggcccgctaacagcgcgatttgctggtgacccaatgcgaccagatgctccacgcccagtcgcgtaccgtcttcatgggagaaaataatactgttgatgggtgtctggtcagagacatcaagaaataacgccggaacattagtgcaggcagcttccacagcaatggcatcctggtcatccagcggatagttaatgatcagcccactgacgcgttgcgcgagaagattgtgcaccgccgctttacaggcttcgacgccgcttcgttctaccatcgacaccaccacgctggcacccagttgatcggcgcgagatttaatcgccgcgacaatttgcgacggcgcgtgcagggccagactggaggtggcaacgccaatcagcaacgactgtttgcccgccagttgttgtgccacgcggttgggaatgtaattcagctccgccatcgccgcttccactttttcccgcgttttcgcagaaacgtggctggcctggttcaccacgcgggaaacggtctgataagagacaccggcatactctgcgacatcgtataacgttactggtttcacattcaccaccctgaattgactctcttccgggcgctatcatgccataccgcgaaaggttttgcgccattcgatggtg

SEQ ID NO: 1394 - DNA, 4751 bp, synthetic construct
  source 1..4751: mol_type = other DNA
tccgggattgacagctagctcagtcctaggtataatgctagcgtggagatatacctcgagtcggccagaaaaactaagccactaccaatcaatttcaaaccatacgagtttttgaggcaaataacatacaaacagtcatggaatggtggttctgtatgtatggagcagtcttagcacattaaagataattggcggcagggcatgccgtcgttacctgtggagggttctttcaaggactcgctgaagcaggaaacctgatattttcaaggcaggaagtcaacgtctggtccaaaccaacctctcgcggccgcaataatagactagcataaccccttggggcctctaaacgggtcttgaggggttttttgctgaacgtacgttttacggctagctcagtcctaggtactatgctagcgtggagatatacggtaccaaggagatataccatggactacaaagaccatgacggtgattataaagatcatgacatcgattacaaggatgacgatgacaagggaggaagcggatccatgattaagcatcaagctttcaaatacatgttagacccaaatcaggaacagttatccatgatgactgttatctctggtgcgtgtcgttatgtttttaataaagctttagagatagcagtaaaaaaccatttagcaggtgagaagtacgttccttacaacaaaactgcgcccttgttggtacagtggaagtcacaggaaaacttatcatggttaaagcttgctccctctcagtctttgcaacaatcgctgaaagatctggacagagcatttcatggctacatctccagaaaatctggttttccaaaattcaggaagaaaggaactgatgaatctttccgtttccctcaacaaagggtgaaagtggatgagggaaataaaaaagtttatctgcctaaaattgggtgggtaaggtaccgtaaaagccgggatatcattggtgaaataaaaaacattaccatttcccagtcagccaataaatggtatgtcagctttcaaacacagattgaggtaccggaccctgtccatacatcaaactcaacgatcaaagtcaccttaagcgatgaaggaaccatatttttatcagacggtaaaaaatatgctctccccgcaacttatagcaaacattttaaccagctaaacaaactaattagacagaaacacagaaagataaaaaacagtcaaagctggctggcttttcatcatagtacaattttaaaaaaagcaaagttacgaaatatcctgattgatttcctgcataagacttcaactttaatttgcaataaccacgcgaaaatttcagttgatacgaaaaagggaaattcggcgcgcaaaaccaagccgttacctattaatttcaaaccgtatgaatttctgcgtcaaatcacgtacaaacagtcatggaacggtggcagcgtgtgcatggagcagagttaataagaattcctgctgccaccgctgagcaataactagcataaccccttggggcctctaaacgggtcttgaggggttttttgctgaaacctcaggcatttgagaagcacacggtcacactgcttccggtagtcaataaaccggtaaaccagcaatagacataagcggctatttaacgaccctgccctgaaccgacgaccgggtcatcgtggccggatcttgcggcccctcggcttgaacgaattgttagacattatttgccgactaccttggtgatctcgcctttcacgtagtggacaaattcttccaactgatctgcgcgcgaggccaagcgatcttcttcttgtccaagataagcctgtctagcttcaagtatgacgggctgatactgggccggcaggcgctccattgcccagtcggcagcgacatccttcggcgcgattttgccggttactgcgctgtaccaaatgcgggacaacgtaagcactacatttcgctcatcgccagcccagtcgggcggcgagttccatagcgttaaggtttcatttagcgcctcaaatagatcctgttcaggaaccggatcaaagagttcctccgccgctggacctaccaaggcaacgctatgttctcttgcttttgtcagcaagatagccagatcaatgtcgatcgtggctggctcgaagatacctgcaagaatgtcattgcgctgccattctccaaattgcagttcgcgcttagctggataacgccacggaatgatgtcgtcgtgcacaacaatggtgacttctacagcgcggagaatctcgctctctccaggggaagccgaagtttccaaaaggtcgttgatcaaagctcgccgcgttgtttcatcaagccttacggtcaccgtaaccagcaaatcaatatcactgtgtggcttcaggccgccatccactgcggagccgtacaaatgtacggccagcaacgtcggttcgagatggcgctcgatgacgccaactacctctgatagttgagtcgatacttcggcgatcaccgcttccctcatactcttcctttttcaatattattgaagcatttatcagggttattgtctcatgagcggatacatatttgaatgtatttagaaaaataaacaaatagctagctcactcggtcgctacgctccgggcgtgagactgcggcgggcgctgcggacacatacaaagttacccacagattccgtggataagcaggggactaacatgtgaggcaaaacagcagggccgcgccggtggcgtttttccataggctccgccctcctgccagagttcacataaacagacgcttttccggtgcatctgtgggagccgtgaggctcaaccatgaatctgacagtacgggcgaaacccgacaggacttaaagatccccaccgtttccggcgggtcgctccctcttgcgctctcctgttccgaccctgccgtttaccggatacctgttccgcctttctcccttacgggaagtgtggcgctttctcatagctcacacactggtatctcggctcggtgtaggtcgttcgctccaagctgggctgtaagcaagaactccccgttcagcccgactgctgcgccttatccggtaactgttcacttgagtccaacccggaaaagcacggtaaaacgccactggcagcagccattggtaactgggagttcgcagaggatttgtttagctaaacacgcggttgctcttgaagtgtgcgccaaagtccggctacactggaaggacagatttggttgctgtgctctgcgaaagccagttaccacggttaagcagttccccaactgacttaaccttcgatcaaaccacctccccaggtggttttttcgtttacagggcaaaagattacgcgcagaaaaaaaggatctcaagaagatcctttgatcttttctactgaaccgctctagatttcagtgcaatttatctcttcaaatgtagcacctgaagtcagccccatacgatataagttgtaattctcatgttagtcatgccccgcgcccaccggaaggagctgactgggttgaaggctctcaagggcatcggtcgagatcccggtgcctaatgagtgagctaacttacattaattgcgttgcgctcactgcccgctttccagtcgggaaacctgtcgtgccagctgcattaatgaatcggccaacgcgcggggagaggcggtttgcgtattgggcgccagggtggtttttcttttcaccagtgagacgggcaacagctgattgcccttcaccgcctggccctgagagagttgcagcaagcggtccacgctggtttgccccagcaggcgaaaatcctgtttgatggtggttaacggcgggatataacatgagctgtcttcggtatcgtcgtatcccactaccgagatgtccgcaccaacgcgcagcccggactcggtaatggcgcgcattgcgcccagcgccatctgatcgttggcaaccagcatcgcagtgggaacgatgccctcattcagcatttgcatggtttgttgaaaaccggacatggcactccagtcgccttcccgttccgctatcggctgaatttgattgcgagtgagatatttatgccagccagccagacgcagacgcgccgagacagaacttaatgggcccgctaacagcgcgatttgctggtgacccaatgcgaccagatgctccacgcccagtcgcgtaccgtcttcatgggagaaaataatactgttgatgggtgtctggtcagagacatcaagaaataacgccggaacattagtgcaggcagcttccacagcaatggcatcctggtcatccagcggatagttaatgatcagcccactgacgcgttgcgcgagaagattgtgcaccgccgctttacaggcttcgacgccgcttcgttctaccatcgacaccaccacgctggcacccagttgatcggcgcgagatttaatcgccgcgacaatttgcgacggcgcgtgcagggccagactggaggtggcaacgccaatcagcaacgactgtttgcccgccagttgttgtgccacgcggttgggaatgtaattcagctccgccatcgccgcttccactttttcccgcgttttcgcagaaacgtggctggcctggttcaccacgcgggaaacggtctgataagagacaccggcatactctgcgacatcgtataacgttactggtttcacattcaccaccctgaattgactctcttccgggcgctatcatgccataccgcgaaaggttttgcgccattcgatggtg

SEQ ID NO: 1395 - DNA, 4751 bp, synthetic construct; identical to SEQ ID NO: 1394
  source 1..4751: mol_type = other DNA

SEQ ID NO: 1396 - DNA, 4909 bp, synthetic construct
  source 1..4909: mol_type = other DNA
tccgggattgacagctagctcagtcctaggtataatgctagcgtggagatatacctcgaggtattgagtcagaggagatcgaaacagagttgtctttttctgaaagtacagaaaattcagagtatcttagaagccaaaaaatcttagaacgtggcttgtctaaacgagaaaccttataaatagaagaactgtagggactacagggatcgcctaggggatagaaaatgtacaccatgtgttgaaccatttatttctaggaagtcacattgggacagtccacggacaagtggttcaccatgcgttgctttatggtatgatagctcgcggccgcaataatagactagcataaccccttggggcctctaaacgggtcttgaggggttttttgctgaacgtacgttttacggctagctcagtcctaggtactatgctagcgtggagatatacggtaccaaggagatataccatggactacaaagaccatgacggtgattataaagatcatgacatcgattacaaggatgacgatgacaagggaggaagcggatccatgaaggcgctgaaagcgtataaatacagactttatccaaccagcaaacaggaagagttcatccaaaaaaccttctcttgcgttcgcctggtgtataatctgatgttacaggaccgcattgatatctacaaagagatgcgtaaaaatccgcaacaaacttttaaaatgcccacgccggccaaatacaagaagcagtaccctgtcttgcgcgaagtagacagtctggccctagccaatgcacaggtttatctggatcgtgcctttaaaaacttttaccgcgaaaaaggaatgggctttccaaaaaagaaaaagaaagaaaccgtgcattcctacactacgaacaaccagcacggcacggtcaaaattctggataaccgttatctcaaagtgccgaaactcaaatcgctgattaagatgaaggtacaccgccagccgctgggggagataaaatcggtaactattagcatgagcgcgagccacaattattatgtgtccatcttatgcgaagcgccgattgaaacgaaaaccaagcaacagaaaatggtgggaatttgcagcagtcgcgaaaaatttgcgctgatttcgaatggtgaaagcttcgaaaaaagctattgttcaaagcatctcaagcagaaactacgtcaggaagaacgaaaacttaacaagcgtaagatgattgcactggaaaaaggtgtcgatctttcgcaggcgaagaactatcaaaaacaaaaaataaaagtggcaaaaattcgcgaaaaaatagccaaccagcgcaccgatattttaaacaaaatcacaaccgaactggtttcaagttacgatgttatctgcatcgaaaaagcccatcactcaaatgagcggccgcccaaacatgaccgttccgaactggcttggtcgctgttcttggcgaaactgttgtacaaagcacagtggtatggcaaggaactcatctgtatcgagtcagaggaaattgaaacagagctgtctttcagcgaaagtaccgaaaacagcgagtaccttcgcagccagaaaatcttagaacgtggtctttctaaaagggaaaccctgtaataagaattcctgctgccaccgctgagcaataactagcataaccccttggggcctctaaacgggtcttgaggggttttttgctgaaacctcaggcatttgagaagcacacggtcacactgcttccggtagtcaataaaccggtaaaccagcaatagacataagcggctatttaacgaccctgccctgaaccgacgaccgggtcatcgtggccggatcttgcggcccctcggcttgaacgaattgttagacattatttgccgactaccttggtgatctcgcctttcacgtagtggacaaattcttccaactgatctgcgcgcgaggccaagcgatcttcttcttgtccaagataagcctgtctagcttcaagtatgacgggctgatactgggccggcaggcgctccattgcccagtcggcagcgacatccttcggcgcgattttgccggttactgcgctgtaccaaatgcgggacaacgtaagcactacatttcgctcatcgccagcccagtcgggcggcgagttccatagcgttaaggtttcatttagcgcctcaaatagatcctgttcaggaaccggatcaaagagttcctccgccgctggacctaccaaggcaacgctatgttctcttgcttttgtcagcaagatagccagatcaatgtcgatcgtggctggctcgaagatacctgcaagaatgtcattgcgctgccattctccaaattgcagttcgcgcttagctggataacgccacggaatgatgtcgtcgtgcacaacaatggtgacttctacagcgcggagaatctcgctctctccaggggaagccgaagtttccaaaaggtcgttgatcaaagctcgccgcgttgtttcatcaagccttacggtcaccgtaaccagcaaatcaatatcactgtgtggcttcaggccgccatccactgcggagccgtacaaatgtacggccagcaacgtcggttcgagatggcgctcgatgacgccaactacctctgatagttgagtcgatacttcggcgatcaccgcttccctcatactcttcctttttcaatattattgaagcatttatcagggttattgtctcatgagcggatacatatttgaatgtatttagaaaaataaacaaatagctagctcactcggtcgctacgctccgggcgtgagactgcggcgggcgctgcggacacatacaaagttacccacagattccgtggataagcaggggactaacatgtgaggcaaaacagcagggccgcgccggtggcgtttttccataggctccgccctcctgccagagttcacataaacagacgcttttccggtgcatctgtgggagccgtgaggctcaaccatgaatctgacagtacgggcgaaacccgacaggacttaaagatccccaccgtttccggcgggtcgctccctcttgcgctctcctgttccgaccctgccgtttaccggatacctgttccgcctttctcccttacgggaagtgtggcgctttctcatagctcacacactggtatctcggctcggtgtaggtcgttcgctccaagctgggctgtaagcaagaactccccgttcagcccgactgctgcgccttatccggtaactgttcacttgagtccaacccggaaaagcacggtaaaacgccactggcagcagccattggtaactgggagttcgcagaggatttgtttagctaaacacgcggttgctcttgaagtgtgcgccaaagtccggctacactggaaggacagatttggttgctgtgctctgcgaaagccagttaccacggttaagcagttccccaactgacttaaccttcgatcaaaccacctccccaggtggttttttcgtttacagggcaaaagattacgcgcagaaaaaaaggatctcaagaagatcctttgatcttttctactgaaccgctctagatttcagtgcaatttatctcttcaaatgtagcacctgaagtcagccccatacgatataagttgtaattctcatgttagtcatgccccgcgcccaccggaaggagctgactgggttgaaggctctcaagggcatcggtcgagatcccggtgcctaatgagtgagctaacttacattaattgcgttgcgctcactgcccgctttccagtcgggaaacctgtcgtgccagctgcattaatgaatcggccaacgcgcggggagaggcggtttgcgtattgggcgccagggtggtttttcttttcaccagtgagacgggcaacagctgattgcccttcaccgcctggccctgagagagttgcagcaagcggtccacgctggtttgccccagcaggcgaaaatcctgtttgatggtggttaacggcgggatataacatgagctgtcttcggtatcgtcgtatcccactaccgagatgtccgcaccaacgcgcagcccggactcggtaatggcgcgcattgcgcccagcgccatctgatcgttggcaaccagcatcgcagtgggaacgatgccctcattcagcatttgcatggtttgttgaaaaccggacatggcactccagtcgccttcccgttccgctatcggctgaatttgattgcgagtgagatatttatgccagccagccagacgcagacgcgccgagacagaacttaatgggcccgctaacagcgcgatttgctggtgacccaatgcgaccagatgctccacgcccagtcgcgtaccgtcttcatgggagaaaataatactgttgatgggtgtctggtcagagacatcaagaaataacgccggaacattagtgcaggcagcttccacagcaatggcatcctggtcatccagcggatagttaatgatcagcccactgacgcgttgcgcgagaagattgtgcaccgccgctttacaggcttcgacgccgcttcgttctaccatcgacaccaccacgctggcacccagttgatcggcgcgagatttaatcgccgcgacaatttgcgacggcgcgtgcagggccagactggaggtggcaacgccaatcagcaacgactgtttgcccgccagttgttgtgccacgcggttgggaatgtaattcagctccgccatcgccgcttccactttttcccgcgttttcgcagaaacgtggctggcctggttcaccacgcgggaaacggtctgataagagacaccggcatactctgcgacatcgtataacgttactggtttcacattcaccaccctgaattgactctcttccgggcgctatcatgccataccgcgaaaggttttgcgccattcgatggtg

SEQ ID NO: 1397 - DNA, 4960 bp, synthetic construct
  source 1..4960: mol_type = other DNA
tccgggattgacagctagctcagtcctaggtataatgctagcgtggagatatacctcgagtttttactcaagatatcaatgagcaaaaaggactgcaagatcctgagaccgctgctagtatcaacgtattgatccaaggattgaaagaaacaacaggtaactaacaaagcaaagaactgtagggactacagggatagcctagggcatataagatagatatagcgtttagtcgatcatttgtctttttctaggaaatttctagttactagaaatagttcacggacaagtggttcaccatgcgttgctttatggtatgatagctcgcggccgcaataatagactagcataaccccttggggcctctaaacgggtcttgaggggttttttgctgaacgtacgttttacggctagctcagtcctaggtactatgctagcgtggagatatacggtaccaaggagatataccatggactacaaagaccatgacggtgattataaagatcatgacatcgattacaaggatgacgatgacaagggaggaagcggatccatgaaagtgttaaaagcgtacaaatacaggttgtacccgacttcaattcaggaagaatttattaaaaaaactttctcatgtgtccgcctggtgcataaccttcttttgcaggaacgtattcagttatataagcagctgaaggaaaatccggatctcaaagttaagctaccaaccccggcacagtataaaaaagagtatccgtgcttaaaagaagtggacagcctggcgttatcgaacgcacaagtttatctcgatcgcgccttcaaaaagttccaccgcgaaaagagcattggtttcccaaagctgaaacagaagaaagatagcgtgtccagctacacgacgaacaaccagaatggcaccgtgaaaattattgacgaaaaatatctgaaagtcccgaaactgaaatcgctagtgaaaatgaaaatgcatcgtccggtgatcgggaaaataaagagcgtaaccattagcttaacccctagcaacaaatatttcgcgagcatcttgtgtgaagaggaaattcccacgatcgagaagacgtactcggcggttggcataaccctgggcgcctccgaatttgcggtcctgtcaaacggtcgccgtattgacaatgacaaatttacgaaagaatttgagcagcgcatcacccgtgaggaacgaaaactgacacgccgtaaagaaattgcaaaagccaaaggaactgatctgtcgcagcaaaaaaattaccagaaacaaaagctgaaagtagcaaaaatgcgggagaagcttatgaatcagagaatcgattttctcaacaagattaccaccgaaattgttcgcaagtacgacttgatttgcatagaagatattcaccaggcggatttttatcgcaatagtaaactgcaccgtggcatctcagacgtgagctgggccctgttcgttagtaagcttgaatataaagcgacatggtacaacaaacgcgtcatcaaggtactggcttgcaaaaaatgcagcgaacatagcgaaaatagtgtgagtcaaatttttacccaagatatcaatgagcagaaaggactgcaagatcccgagaccgccgcctccatcaacgtactgatccagggtctcaaagaaaccacaggcaactaataagaattcctgctgccaccgctgagcaataactagcataaccccttggggcctctaaacgggtcttgaggggttttttgctgaaacctcaggcatttgagaagcacacggtcacactgcttccggtagtcaataaaccggtaaaccagcaatagacataagcggctatttaacgaccctgccctgaaccgacgaccgggtcatcgtggccggatcttgcggcccctcggcttgaacgaattgttagacattatttgccgactaccttggtgatctcgcctttcacgtagtggacaaattcttccaactgatctgcgcgcgaggccaagcgatcttcttcttgtccaagataagcctgtctagcttcaagtatgacgggctgatactgggccggcaggcgctccattgcccagtcggcagcgacatccttcggcgcgattttgccggttactgcgctgtaccaaatgcgggacaacgtaagcactacatttcgctcatcgccagcccagtcgggcggcgagttccatagcgttaaggtttcatttagcgcctcaaatagatcctgttcaggaaccggatcaaagagttcctccgccgctggacctaccaaggcaacgctatgttctcttgcttttgtcagcaagatagccagatcaatgtcgatcgtggctggctcgaagatacctgcaagaatgtcattgcgctgccattctccaaattgcagttcgcgcttagctggataacgccacggaatgatgtcgtcgtgcacaacaatggtgacttctacagcgcggagaatctcgctctctccaggggaagccgaagtttccaaaaggtcgttgatcaaagctcgccgcgttgtttcatcaagccttacggtcaccgtaaccagcaaatcaatatcactgtgtggcttcaggccgccatccactgcggagccgtacaaatgtacggccagcaacgtcggttcgagatggcgctcgatgacgccaactacctctgatagttgagtcgatacttcggcgatcaccgcttccctcatactcttcctttttcaatattattgaagcatttatcagggttattgtctcatgagcggatacatatttgaatgtatttagaaaaataaacaaatagctagctcactcggtcgctacgctccgggcgtgagactgcggcgggcgctgcggacacatacaaagttacccacagattccgtggataagcaggggactaacatgtgaggcaaaacagcagggccgcgccggtggcgtttttccataggctccgccctcctgccagagttcacataaacagacgcttttccggtgcatctgtgggagccgtgaggctcaaccatgaatctgacagtacgggcgaaacccgacaggacttaaagatccccaccgtttccggcgggtcgctccctcttgcgctctcctgttccgaccctgccgtttaccggatacctgttccgcctttctcccttacgggaagtgtggcgctttctcatagctcacacactggtatctcggctcggtgtaggtcgttcgctccaagctgggctgtaagcaagaactccccgttcagcccgactgctgcgccttatccggtaactgttcacttgagtccaacccggaaaagcacggtaaaacgccactggcagcagccattggtaactgggagttcgcagaggatttgtttagctaaacacgcggttgctcttgaagtgtgcgccaaagtccggctacactggaaggacagatttggttgctgtgctctgcgaaagccagttaccacggttaagcagttccccaactgacttaaccttcgatcaaaccacctccccaggtggttttttcgtttacagggcaaaagattacgcgcagaaaaaaaggatctcaagaagatcctttgatcttttctactgaaccgctctagatttcagtgcaatttatctcttcaaatgtagcacctgaagtcagccccatacgatataagttgtaattctcatgttagtcatgccccgcgcccaccggaaggagctgactgggttgaaggctctcaagggcatcggtcgagatcccggtgcctaatgagtgagctaacttacattaattgcgttgcgctcactgcccgctttccagtcgggaaacctgtcgtgccagctgcattaatgaatcggccaacgcgcggggagaggcggtttgcgtattgggcgccagggtggtttttcttttcaccagtgagacgggcaacagctgattgcccttcaccgcctggccctgagagagttgcagcaagcggtccacgctggtttgccccagcaggcgaaaatcctgtttgatggtggttaacggcgggatataacatgagctgtcttcggtatcgtcgtatcccactaccgagatgtccgcaccaacgcgcagcccggactcggtaatggcgcgcattgcgcccagcgccatctgatcgttggcaaccagcatcgcagtgggaacgatgccctcattcagcatttgcatggtttgttgaaaaccggacatggcactccagtcgccttcccgttccgctatcggctgaatttgattgcgagtgagatatttatgccagccagccagacgcagacgcgccgagacagaacttaatgggcccgctaacagcgcgatttgctggtgacccaatgcgaccagatgctccacgcccagtcgcgtaccgtcttcatgggagaaaataatactgttgatgggtgtctggtcagagacatcaagaaataacgccggaacattagtgcaggcagcttccacagcaatggcatcctggtcatccagcggatagttaatgatcagcccactgacgcgttgcgcgagaagattgtgcaccgccgctttacaggcttcgacgccgcttcgttctaccatcgacaccaccacgctggcacccagttgatcggcgcgagatttaatcgccgcgacaatttgcgacggcgcgtgcagggccagactggaggtggcaacgccaatcagcaacgactgtttgcccgccagttgttgtgccacgcggttgggaatgtaattcagctccgccatcgccgcttccactttttcccgcgttttcgcagaaacgtggctggcctggttcaccacgcgggaaacggtctgataagagacaccggcatactctgcgacatcgtataacgttactggtttcacattcaccaccctgaattgactctcttccgggcgctatcatgccataccgcgaaaggttttgcgccattcgatggtg

SEQ ID NO: 1398 - DNA, 4837 bp, synthetic construct
  source 1..4837: mol_type = other DNA
tccgggattgacagctagctcagtcctaggtataatgctagcgtggagatatacctcgagatcagtgattggcatcaattcgttcgcaaaatccagtacaaagcgcagtggtacggcaaagaactgcgttttgtcacgttggatacgcaagaccaacagaagctagaacggctctcaggcgaaatgagcagctgagccgcttgaactggaaggaacgccagggatcgcctagggtatagaaaaaatctttctgatttttgtttctaggaaccacgttcacggacaagtggttcaccatgcgttgctttatggtatgatagctcgcggccgcaataatagactagcataaccccttggggcctctaaacgggtcttgaggggttttttgctgaacgtacgttttacggctagctcagtcctaggtactatgctagcgtggagatatacggtaccaaggagatataccatggactacaaagaccatgacggtgattataaagatcatgacatcgattacaaggatgacgatgacaagggaggaagcggatccatgaaactgggtgttttaaaagcctataaatttcgtatctatcccaatggacagcagaaacagtttttcattgaaaccttcggctgcgtgcgtttcacttacaatcagctgctggaggcaaagatggaggagctggccaacaatgaagccaagcaagggttgaccccggccaaactgaaaaaggagtatccttttctgaaggagaccgatagtctggcactagccaacgcacagcggaatctggaccgcgcgtttcgcaattactttcaaaagcgcgcgggcttcccaaaaatgaaaaccaaaaaaagcatctggcaatcctataccaccaataaccagcagcacaccatttattttgaagacgatcagataaagctgccgaagcttaaaacactggtgccggtaaaaaagcatagggcgatcaaaggtaaaatcaaatcggccaccatctcagcaaaaaacaacgaagaattttacatctcgatcttatgtttggaagagatcccgccgttaccgaaacagcaagcctctgtcgctattgtatatgatccgcagcagctggtgaaagccaaccagccagttcccatcacctgtgaacacgcgatccaaacgaagcagaaactgactcgcgcagaacgcaaacttcaggtgaaagctacggcggtcaaacgtaaaaaaatactgctgactcaggcgcgaaactatcagaagctcaaaggcaaggtcgcgcgcctttatcgtttccactgctgccaaaaacgcgaattcatcgatcaggtgagctaccatctcgtaaaacagtacgacacaatctatcttgaacaaatcgcggaagatacggttttaaaagcgggtcactacagcatcagtgattggcaccaattcgtccgcaaaattcagtacaaagctcagtggtacggtaaagaacttcgttttgtgacgttggatacgcaggaccaacagaaacttgaacgtctctcaggtgaaatgagtagctaataagaattcctgctgccaccgctgagcaataactagcataaccccttggggcctctaaacgggtcttgaggggttttttgctgaaacctcaggcatttgagaagcacacggtcacactgcttccggtagtcaataaaccggtaaaccagcaatagacataagcggctatttaacgaccctgccctgaaccgacgaccgggtcatcgtggccggatcttgcggcccctcggcttgaacgaattgttagacattatttgccgactaccttggtgatctcgcctttcacgtagtggacaaattcttccaactgatctgcgcgcgaggccaagcgatcttcttcttgtccaagataagcctgtctagcttcaagtatgacgggctgatactgggccggcaggcgctccattgcccagtcggcagcgacatccttcggcgcgattttgccggttactgcgctgtaccaaatgcgggacaacgtaagcactacatttcgctcatcgccagcccagtcgggcggcgagttccatagcgttaaggtttcatttagcgcctcaaatagatcctgttcaggaaccggatcaaagagttcctccgccgctggacctaccaaggcaacgctatgttctcttgcttttgtcagcaagatagccagatcaatgtcgatcgtggctggctcgaagatacctgcaagaatgtcattgcgctgccattctccaaattgcagttcgcgcttagctggataacgccacggaatgatgtcgtcgtgcacaacaatggtgacttctacagcgcggagaatctcgctctctccaggggaagccgaagtttccaaaaggtcgttgatcaaagctcgccgcgttgtttcatcaagccttacggtcaccgtaaccagcaaatcaatatcactgtgtggcttcaggccgccatccactgcggagccgtacaaatgtacggccagcaacgtcggttcgagatggcgctcgatgacgccaactacctctgatagttgagtcgatacttcggcgatcaccgcttccctcatactcttcctttttcaatattattgaagcatttatcagggttattgtctcatgagcggatacatatttgaatgtatttagaaaaataaacaaatagctagctcactcggtcgctacgctccgggcgtgagactgcggcgggcgctgcggacacatacaaagttacccacagattccgtggataagcaggggactaacatgtgaggcaaaacagcagggccgcgccggtggcgtttttccataggctccgccctcctgccagagttcacataaacagacgcttttccggtgcatctgtgggagccgtgaggctcaaccatgaatctgacagtacgggcgaaacccgacaggacttaaagatccccaccgtttccggcgggtcgctccctcttgcgctctcctgttccgaccctgccgtttaccggatacctgttccgcctttctcccttacgggaagtgtggcgctttctcatagctcacacactggtatctcggctcggtgtaggtcgttcgctccaagctgggctgtaagcaagaactccccgttcagcccgactgctgcgccttatccggtaactgttcacttgagtccaacccggaaaagcacggtaaaacgccactggcagcagccattggtaactgggagttcgcagaggatttgtttagctaaacacgcggttgctcttgaagtgtgcgccaaagtccggctacactggaaggacagatttggttgctgtgctctgcgaaagccagttaccacggttaagcagttccccaactgacttaaccttcgatcaaaccacctccccaggtggttttttcgtttacagggcaaaagattacgcgcagaaaaaaaggatctcaagaagatcctttgatcttttctactgaaccgctctagatttcagtgcaatttatctcttcaaatgtagcacctgaagtcagccccatacgatataagttgtaattctcatgttagtcatgccccgcgcccaccggaaggagctgactgggttgaaggctctcaagggcatcggtcgagatcccggtgcctaatgagtgagctaacttacattaattgcgttgcgctcactgcccgctttccagtcgggaaacctgtcgtgccagctgcattaatgaatcggccaacgcgcggggagaggcggtttgcgtattgggcgccagggtggtttttcttttcaccagtgagacgggcaacagctgattgcccttcaccgcctggccctgagagagttgcagcaagcggtccacgctggtttgccccagcaggcgaaaatcctgtttgatggtggttaacggcgggatataacatgagctgtcttcggtatcgtcgtatcccactaccgagatgtccgcaccaacgcgcagcccggactcggtaatggcgcgcattgcgcccagcgccatctgatcgttggcaaccagcatcgcagtgggaacgatgccctcattcagcatttgcatggtttgttgaaaaccggacatggcactccagtcgccttcccgttccgctatcggctgaatttgattgcgagtgagatatttatgccagccagccagacgcagacgcgccgagacagaacttaatgggcccgctaacagcgcgatttgctggtgacccaatgcgaccagatgctccacgcccagtcgcgtaccgtcttcatgggagaaaataatactgttgatgggtgtctggtcagagacatcaagaaataacgccggaacattagtgcaggcagcttccacagcaatggcatcctggtcatccagcggatagttaatgatcagcccactgacgcgttgcgcgagaagattgtgcaccgccgctttacaggcttcgacgccgcttcgttctaccatcgacaccaccacgctggcacccagttgatcggcgcgagatttaatcgccgcgacaatttgcgacggcgcgtgcagggccagactggaggtggcaacgccaatcagcaacgactgtttgcccgccagttgttgtgccacgcggttgggaatgtaattcagctccgccatcgccgcttccactttttcccgcgttttcgcagaaacgtggctggcctggttcaccacgcgggaaacggtctgataagagacaccggcatactctgcgacatcgtataacgttactggtttcacattcaccaccctgaattgactctcttccgggcgctatcatgccataccgcgaaaggttttgcgccattcgatggtg

SEQ ID NO: 1399 - DNA, 4846 bp, synthetic construct
  source 1..4846: mol_type = other DNA
tccgggattgacagctagctcagtcctaggtataatgctagcgtggagatatacctcgagaaagctccaatataaatcgcaatggtatagcaaaaagttagtattgatcgatatgaaagaacaaacaaatccttccacaaataaaaagagtctggaattaattgaaatcgggaagcaagtcctgtttgaataaaaaactggtaggggcgccagggttcgccttgctaataaaaaacatctattgtttttgtttctaggaatttctttcagagaagctcacggacaagtggttcaccatgcgttgctttatggtatgatagctcgcggccgcaataatagactagcataaccccttggggcctctaaacgggtcttgaggggttttttgctgaacgtacgttttacggctagctcagtcctaggtactatgctagcgtggagatatacggtaccaaggagatataccatggactacaaagaccatgacggtgattataaagatcatgacatcgattacaaggatgacgatgacaagggaggaagcggatccatgctaaaagcctttaaatttcgcatctatccgactgatagccagaaacagtggctgatccaaacgtttggttgcgtgcgtttcacttacaaccacttgttaaaagcccgccaggcgtactatctggagacccaggagatcgactatacgctgactccggctagcctgaaaaagcagtatccgttcctgaaggaagtcgatagcttagccttagcgaatgcccagctgaacctggatcgtgcgtttcgtaattatttcaaaggacgcgcaagctttcccaaactaaaaaacaaaaaaagtatttggcagtcgtataccaccaacaatcagaaaggcaccatatacctggaagaaacataccttaaactccctaagctgaaagagaaaattcgcattcatgcccatcgtccgattgaaggcacgattcgttcagcaacgatcagctctcgatacaacgagatcttctacgtgtccttgctctgcgaagttcccccgaagaccatgaaagcgagcaacaaatggatcgggatagcgtatgatccggatcgtctggtggagatgtccaccccacttgacatcacgattccaaaattcaaacaagttgatcagcaactcctgcgggcaaagcgcaagcttgtgatcaaaggacgctcagcgcagcatcgacgcacccacgttgaacgcgtaaaaaattaccagaagcagaaaaggaaaatcaaagacctttacttaaaacagaaatttcaacgcgaagactatctggagcagattagcggtaccgtgattcgtcactatgactatttgttcgtcgaatcgatttcagcagactgtccggaaggcgacttttctattcaggactggcataagctgttagcgaagctccagtacaaatcgcaatggtacagcaaaaagctggtattgattgatatgaaggaacaaacaaaccctagtaccaataaaaaaagtctggaactgattgaaatcggcaagcaagttctctttgaataataagaattcctgctgccaccgctgagcaataactagcataaccccttggggcctctaaacgggtcttgaggggttttttgctgaaacctcaggcatttgagaagcacacggtcacactgcttccggtagtcaataaaccggtaaaccagcaatagacataagcggctatttaacgaccctgccctgaaccgacgaccgggtcatcgtggccggatcttgcggcccctcggcttgaacgaattgttagacattatttgccgactaccttggtgatctcgcctttcacgtagtggacaaattcttccaactgatctgcgcgcgaggccaagcgatcttcttcttgtccaagataagcctgtctagcttcaagtatgacgggctgatactgggccggcaggcgctccattgcccagtcggcagcgacatccttcggcgcgattttgccggttactgcgctgtaccaaatgcgggacaacgtaagcactacatttcgctcatcgccagcccagtcgggcggcgagttccatagcgttaaggtttcatttagcgcctcaaatagatcctgttcaggaaccggatcaaagagttcctccgccgctggacctaccaaggcaacgctatgttctcttgcttttgtcagcaagatagccagatcaatgtcgatcgtggctggctcgaagatacctgcaagaatgtcattgcgctgccattctccaaattgcagttcgcgcttagctggataacgccacggaatgatgtcgtcgtgcacaacaatggtgacttctacagcgcggagaatctcgctctctccaggggaagccgaagtttccaaaaggtcgttgatcaaagctcgccgcgttgtttcatcaagccttacggtcaccgtaaccagcaaatcaatatcactgtgtggcttcaggccgccatccactgcggagccgtacaaatgtacggccagcaacgtcggttcgagatggcgctcgatgacgccaactacctctgatagttgagtcgatacttcggcgatcaccgcttccctcatactcttcctttttcaatattattgaagcatttatcagggttattgtctcatgagcggatacatatttgaatgtatttagaaaaataaacaaatagctagctcactcggtcgctacgctccgggcgtgagactgcggcgggcgctgcggacacatacaaagttacccacagattccgtggataagcaggggactaacatgtgaggcaaaacagcagggccgcgccggtggcgtttttccataggctccgccctcctgccagagttcacataaacagacgcttttccggtgcatctgtgggagccgtgaggctcaaccatgaatctgacagtacgggcgaaacccgacaggacttaaagatccccaccgtttccggcgggtcgctccctcttgcgctctcctgttccgaccctgccgtttaccggatacctgttccgcctttctcccttacgggaagtgtggcgctttctcatagctcacacactggtatctcggctcggtgtaggtcgttcgctccaagctgggctgtaagcaagaactccccgttcagcccgactgctgcgccttatccggtaactgttcacttgagtccaacccggaaaagcacggtaaaacgccactggcagcagccattggtaactgggagttcgcagaggatttgtttagctaaacacgcggttgctcttgaagtgtgcgccaaagtccggctacactggaaggacagatttggttgctgtgctctgcgaaagccagttaccacggttaagcagttccccaactgacttaaccttcgatcaaaccacctccccaggtggttttttcgtttacagggcaaaagattacgcgcagaaaaaaaggatctcaagaagatcctttgatcttttctactgaaccgctctagatttcagtgcaatttatctcttcaaatgtagcacctgaagtcagccccatacgatataagttgtaattctcatgttagtcatgccccgcgcccaccggaaggagctgactgggttgaaggctctcaagggcatcggtcgagatcccggtgcctaatgagtgagctaacttacattaattgcgttgcgctcactgcccgctttccagtcgggaaacctgtcgtgccagctgcattaatgaatcggccaacgcgcggggagaggcggtttgcgtattgggcgccagggtggtttttcttttcaccagtgagacgggcaacagctgattgcccttcaccgcctggccctgagagagttgcagcaagcggtccacgctggtttgccccagcaggcgaaaatcctgtttgatggtggttaacggcgggatataacatgagctgtcttcggtatcgtcgtatcccactaccgagatgtccgcaccaacgcgcagcccggactcggtaatggcgcgcattgcgcccagcgccatctgatcgttggcaaccagcatcgcagtgggaacgatgccctcattcagcatttgcatggtttgttgaaaaccggacatggcactccagtcgccttcccgttccgctatcggctgaatttgattgcgagtgagatatttatgccagccagccagacgcagacgcgccgagacagaacttaatgggcccgctaacagcgcgatttgctggtgacccaatgcgaccagatgctccacgcccagtcgcgtaccgtcttcatgggagaaaataatactgttgatgggtgtctggtcagagacatcaagaaataacgccggaacattagtgcaggcagcttccacagcaatggcatcctggtcatccagcggatagttaatgatcagcccactgacgcgttgcgcgagaagattgtgcaccgccgctttacaggcttcgacgccgcttcgttctaccatcgacaccaccacgctggcacccagttgatcggcgcgagatttaatcgccgcgacaatttgcgacggcgcgtgcagggccagactggaggtggcaacgccaatcagcaacgactgtttgcccgccagttgttgtgccacgcggttgggaatgtaattcagctccgccatcgccgcttccactttttcccgcgttttcgcagaaacgtggctggcctggttcaccacgcgggaaacggtctgataagagacaccggcatactctgcgacatcgtataacgttactggtttcacattcaccaccctgaattgactctcttccgggcgctatcatgccataccgcgaaaggttttgcgccattcgatggtg

SEQ ID NO: 1400 - DNA, 4849 bp, synthetic construct
  source 1..4849: mol_type = other DNA
tccgggattgacagctagctcagtcctaggtataatgctagcgtggagatatacctcgagtcccaatggtataataaaaaatttcttttgatcaataccgacggagcagaagaaagcaattccgtaagaaagagccaagtagtagaaaaaatgggcagacattcggttatcaagggataaaaaatgaatgaaactgataggagcgttagggttagccttgttaataaaaagtcttaatgacttttgtttctaggaatttttcttttgaagaaaagctcacggacaagtggttcaccatgcgttgctttatggtatgatagctcgcggccgcaataatagactagcataaccccttggggcctctaaacgggtcttgaggggttttttgctgaacgtacgttttacggctagctcagtcctaggtactatgctagcgtggagatatacggtaccaaggagatataccatggactacaaagaccatgacggtgattataaagatcatgacatcgattacaaggatgacgatgacaagggaggaagcggatccatgctcaaagcgtttaaattccgtatgtatccgacagaagagcaaaaacagcagttgattcgtacttttggttgtgcgcgcttcacctataaccatctgttgaaaaagcggcagaaaagttggcagcaaaccggcgtggccaacttttcgctcacccccgcgaccctgaaaaaagaatacccgttcctgaaagaagtagacagtcttgcgctggcaaatgcacagcttaatctggatcgcgcgtttcgcaattatttcaaaggtcgtgccagcttcccaaagctgaaaacgaaaaaaagtatgtggcagtcttacacgaccaacaaccagacccgtacgatctacctggaaaatggctacctgaagttaccaaaacaaaaagagctcatcaagataaatcagcaccggccggttgaaggctcgattcgctccgcgacgattagcgctcgctataacgaggagttttatgtcgccctactgtgcgatgtttcgcccgtgaaaaaagaatctttagcgaaatggatcgggatcgcctatcatccgaagacactgatccagactagccgacctctagaagtaactttaccgaaatttcaccagaccgaggaaaagttgcaacatgcccagcgtaaactgaacgtgaaagtccgctccgcgcaccaccgcaagatccgcttagatcaggccagcaactaccagaaacagaagcgtaaagttatggatctgtatctgaaacagaagaaccagcgagaagattaccttgaacaactcagcggcaaactggtcaaacaatatgactacctgttcgtggagtcgtttccgaaagaagaggcacatgctgatttttcaattcacgactggcataaactgataaccaaactgcgttataagtcacagtggtacaacaaaaaattccttttaatcaataccgacggtgcagaagaaagcaattcagtgcgcaagagccaagtggtagaaaaaatgggcaggcatagcgttatcaagggataataagaattcctgctgccaccgctgagcaataactagcataaccccttggggcctctaaacgggtcttgaggggttttttgctgaaacctcaggcatttgagaagcacacggtcacactgcttccggtagtcaataaaccggtaaaccagcaatagacataagcggctatttaacgaccctgccctgaaccgacgaccgggtcatcgtggccggatcttgcggcccctcggcttgaacgaattgttagacattatttgccgactaccttggtgatctcgcctttcacgtagtggacaaattcttccaactgatctgcgcgcgaggccaagcgatcttcttcttgtccaagataagcctgtctagcttcaagtatgacgggctgatactgggccggcaggcgctccattgcccagtcggcagcgacatccttcggcgcgattttgccggttactgcgctgtaccaaatgcgggacaacgtaagcactacatttcgctcatcgccagcccagtcgggcggcgagttccatagcgttaaggtttcatttagcgcctcaaatagatcctgttcaggaaccggatcaaagagttcctccgccgctggacctaccaaggcaacgctatgttctcttgcttttgtcagcaagatagccagatcaatgtcgatcgtggctggctcgaagatacctgcaagaatgtcattgcgctgccattctccaaattgcagttcgcgcttagctggataacgccacggaatgatgtcgtcgtgcacaacaatggtgacttctacagcgcggagaatctcgctctctccaggggaagccgaagtttccaaaaggtcgttgatcaaagctcgccgcgttgtttcatcaagccttacggtcaccgtaaccagcaaatcaatatcactgtgtggcttcaggccgccatccactgcggagccgtacaaatgtacggccagcaacgtcggttcgagatggcgctcgatgacgccaactacctctgatagttgagtcgatacttcggcgatcaccgcttccctcatactcttcctttttcaatattattgaagcatttatcagggttattgtctcatgagcggatacatatttgaatgtatttagaaaaataaacaaatagctagctcactcggtcgctacgctccgggcgtgagactgcggcgggcgctgcggacacatacaaagttacccacagattccgtggataagcaggggactaacatgtgaggcaaaacagcagggccgcgccggtggcgtttttccataggctccgccctcctgccagagttcacataaacagacgcttttccggtgcatctgtgggagccgtgaggctcaaccatgaatctgacagtacgggcgaaacccgacaggacttaaagatccccaccgtttccggcgggtcgctccctcttgcgctctcctgttccgaccctgccgtttaccggatacctgttccgcctttctcccttacgggaagtgtggcgctttctcatagctcacacactggtatctcggctcggtgtaggtcgttcgctccaagctgggctgtaagcaagaactccccgttcagcccgactgctgcgccttatccggtaactgttcacttgagtccaacccggaaaagcacggtaaaacgccactggcagcagccattggtaactgggagttcgcagaggatttgtttagctaaacacgcggttgctcttgaagtgtgcgccaaagtccggctacactggaaggacagatttggttgctgtgctctgcgaaagccagttaccacggttaagcagttccccaactgacttaaccttcgatcaaaccacctccccaggtggttttttcgtttacagggcaaaagattacgcgcagaaaaaaaggatctcaagaagatcctttgatcttttctactgaaccgctctagatttcagtgcaatttatctcttcaaatgtagcacctgaagtcagccccatacgatataagttgtaattctcatgttagtcatgccccgcgcccaccggaaggagctgactgggttgaaggctctcaagggcatcggtcgagatcccggtgcctaatgagtgagctaacttacattaattgcgttgcgctcactgcccgctttccagtcgggaaacctgtcgtgccagctgcattaatgaatcggccaacgcgcggggagaggcggtttgcgtattgggcgccagggtggtttttcttttcaccagtgagacgggcaacagctgattgcccttcaccgcctggccctgagagagttgcagcaagcggtccacgctggtttgccccagcaggcgaaaatcctgtttgatggtggttaacggcgggatataacatgagctgtcttcggtatcgtcgtatcccactaccgagatgtccgcaccaacgcgcagcccggactcggtaatggcgcgcattgcgcccagcgccatctgatcgttggcaaccagcatcgcagtgggaacgatgccctcattcagcatttgcatggtttgttgaaaaccggacatggcactccagtcgccttcccgttccgctatcggctgaatttgattgcgagtgagatatttatgccagccagccagacgcagacgcgccgagacagaacttaatgggcccgctaacagcgcgatttgctggtgacccaatgcgaccagatgctccacgcccagtcgcgtaccgtcttcatgggagaaaataatactgttgatgggtgtctggtcagagacatcaagaaataacgccggaacattagtgcaggcagcttccacagcaatggcatcctggtcatccagcggatagttaatgatcagcccactgacgcgttgcgcgagaagattgtgcaccgccgctttacaggcttcgacgccgcttcgttctaccatcgacaccaccacgctggcacccagttgatcggcgcgagatttaatcgccgcgacaatttgcgacggcgcgtgcagggccagactggaggtggcaacgccaatcagcaacgactgtttgcccgccagttgttgtgccacgcggttgggaatgtaattcagctccgccatcgccgcttccactttttcccgcgttttcgcagaaacgtggctggcctggttcaccacgcgggaaacggtctgataagagacaccggcatactctgcgacatcgtataacgttactggtttcacattcaccaccctgaattgactctcttccgggcgctatcatgccataccgcgaaaggttttgcgccattcgatggtg

SEQ ID NO: 1401 - DNA, 4804 bp, synthetic construct
  source 1..4804: mol_type = other DNA
tccgggattgacagctagctcagtcctaggtataatgctagcgtggagatatacctcgaggaaaatccccattttatcgataatactcattttttagaagctgattggcatcattttttgcgtactattcgttataaagcgcactggtataataagaaattgatatttgttgaagatgtcaaaaaatttgatgaatttgttatgaactgaaagggacgtcagggatcgcctaggttatagaaaaaatcttaagatttttgtttctaggaatattgttcacggacaagtggttcaccatgcgttgctttatggtatgatagctcgcggccgcaataatagactagcataaccccttggggcctctaaacgggtcttgaggggttttttgctgaacgtacgttttacggctagctcagtcctaggtactatgctagcgtggagatatacggtaccaaggagatataccatggactacaaagaccatgacggtgattataaagatcatgacatcgattacaaggatgacgatgacaagggaggaagcggatccatgaaagtacttaagggttataaatttcgcatttacccaaacgaagagcagatccagttctttattcagacgttcggctgtgtacgatttacatataactgtttactctgcgcccggaaggagtccttacagaagcgcagctatgaaaccaaacttagcccggcacacctgaaaaaagactatccgttcctgaaacaagcggatagtctcgcgctggctaatgcgcaacgcaatcttgatcgcgcgttcaaaaactactttagcaaacgcatgggttatccgaaatttaagacgaaaaacaacacctggcagtcgtatacaaccaacaatcaaaaaaatacgatttacctggtgggaaaacagttgaagctgcccaagttaaaatcactagtcagcgtgaacctacatcgtgaagtttttggcgagatcaagtcagccacgatcagtgcaaaaaacaaccagctgttttttgtgtccctcctgtgcttggaagaagtgttccctttaccgaaaactggcaaggccatagggatagcctactgcccgaaacacttagtccaactgacctcggaccgttctttgccggtgtacgagtgcaagggcgttcagcatagactgaaaagggccaataaaaaactggagctgcgtgccaaagtagcgaagaaacgtgcggtagtggttaagcaggcaaaaaactaccagaaacaaaaacataaagtgcagaaactcactgtgaaaaaaaacaatcagaaacgtaattatatcgaccagcttacccatctgctggtccacgaatacgacagcatttacctggaagaaaatccacatttcatcgataatacccacttccttgaagcagactggcaccattttctgcgcaccattcgctataaagctcactggtacaataagaaactgatcttcgttgaagatgttaaaaagttcgatgaattcgttatgaactaataagaattcctgctgccaccgctgagcaataactagcataaccccttggggcctctaaacgggtcttgaggggttttttgctgaaacctcaggcatttgagaagcacacggtcacactgcttccggtagtcaataaaccggtaaaccagcaatagacataagcggctatttaacgaccctgccctgaaccgacgaccgggtcatcgtggccggatcttgcggcccctcggcttgaacgaattgttagacattatttgccgactaccttggtgatctcgcctttcacgtagtggacaaattcttccaactgatctgcgcgcgaggccaagcgatcttcttcttgtccaagataagcctgtctagcttcaagtatgacgggctgatactgggccggcaggcgctccattgcccagtcggcagcgacatccttcggcgcgattttgccggttactgcgctgtaccaaatgcgggacaacgtaagcactacatttcgctcatcgccagcccagtcgggcggcgagttccatagcgttaaggtttcatttagcgcctcaaatagatcctgttcaggaaccggatcaaagagttcctccgccgctggacctaccaaggcaacgctatgttctcttgcttttgtcagcaagatagccagatcaatgtcgatcgtggctggctcgaagatacctgcaagaatgtcattgcgctgccattctccaaattgcagttcgcgcttagctggataacgccacggaatgatgtcgtcgtgcacaacaatggtgacttctacagcgcggagaatctcgctctctccaggggaagccgaagtttccaaaaggtcgttgatcaaagctcgccgcgttgtttcatcaagccttacggtcaccgtaaccagcaaatcaatatcactgtgtggcttcaggccgccatccactgcggagccgtacaaatgtacggccagcaacgtcggttcgagatggcgctcgatgacgccaactacctctgatagttgagtcgatacttcggcgatcaccgcttccctcatactcttcctttttcaatattattgaagcatttatcagggttattgtctcatgagcggatacatatttgaatgtatttagaaaaataaacaaatagctagctcactcggtcgctacgctccgggcgtgagactgcggcgggcgctgcggacacatacaaagttacccacagattccgtggataagcaggggactaacatgtgaggcaaaacagcagggccgcgccggtggcgtttttccataggctccgccctcctgccagagttcacataaacagacgcttttccggtgcatctgtgggagccgtgaggctcaaccatgaatctgacagtacgggcgaaacccgacaggacttaaagatccccaccgtttccggcgggtcgctccctcttgcgctctcctgttccgaccctgccgtttaccggatacctgttccgcctttctcccttacgggaagtgtggcgctttctcatagctcacacactggtatctcggctcggtgtaggtcgttcgctccaagctgggctgtaagcaagaactccccgttcagcccgactgctgcgccttatccggtaactgttcacttgagtccaacccggaaaagcacggtaaaacgccactggcagcagccattggtaactgggagttcgcagaggatttgtttagctaaacacgcggttgctcttgaagtgtgcgccaaagtccggctacactggaaggacagatttggttgctgtgctctgcgaaagccagttaccacggttaagcagttccccaactgacttaaccttcgatcaaaccacctccccaggtggttttttcgtttacagggcaaaagattacgcgcagaaaaaaaggatctcaagaagatcctttgatcttttctactgaaccgctctagatttcagtgcaatttatctcttcaaatgtagcacctgaagtcagccccatacgatataagttgtaattctcatgttagtcatgccccgcgcccaccggaaggagctgactgggttgaaggctctcaagggcatcggtcgagatcccggtgcctaatgagtgagctaacttacattaattgcgttgcgctcactgcccgctttccagtcgggaaacctgtcgtgccagctgcattaatgaatcggccaacgcgcggggagaggcggtttgcgtattgggcgccagggtggtttttcttttcaccagtgagacgggcaacagctgattgcccttcaccgcctggccctgagagagttgcagcaagcggtccacgctggtttgccccagcaggcgaaaatcctgtttgatggtggttaacggcgggatataacatgagctgtcttcggtatcgtcgtatcccactaccgagatgtccgcaccaacgcgcagcccggactcggtaatggcgcgcattgcgcccagcgccatctgatcgttggcaaccagcatcgcagtgggaacgatgccctcattcagcatttgcatggtttgttgaaaaccggacatggcactccagtcgccttcccgttccgctatcggctgaatttgattgcgagtgagatatttatgccagccagccagacgcagacgcgccgagacagaacttaatgggcccgctaacagcgcgatttgctggtgacccaatgcgaccagatgctccacgcccagtcgcgtaccgtcttcatgggagaaaataatactgttgatgggtgtctggtcagagacatcaagaaataacgccggaacattagtgcaggcagcttccacagcaatggcatcctggtcatccagcggatagttaatgatcagcccactgacgcgttgcgcgagaagattgtgcaccgccgctttacaggcttcgacgccgcttcgttctaccatcgacaccaccacgctggcacccagttgatcggcgcgagatttaatcgccgcgacaatttgcgacggcgcgtgcagggccagactggaggtggcaacgccaatcagcaacgactgtttgcccgccagttgttgtgccacgcggttgggaatgtaattcagctccgccatcgccgcttccactttttcccgcgttttcgcagaaacgtggctggcctggttcaccacgcgggaaacggtctgataagagacaccggcatactctgcgacatcgtataacgttactggtttcacattcaccaccctgaattgactctcttccgggcgctatcatgccataccgcgaaaggttttgcgccattcgatggtg

SEQ ID NO: 1402 - DNA, 4780 bp, synthetic construct
  source 1..4780: mol_type = other DNA
tccgggattgacagctagctcagtcctaggtataatgctagcgtggagatatacctcgaggtaatcgaaattgtcgaaccagaagataggtcttgtgctgaagatgctttattcaccagcaatgaatggcatcaattagttcgtttattgaaatataaagcacaatggtacggtaaagagattcaaatcataaattgtcaaaatatttaaaaaaataactggtaggggtgccagggttcgcctaggtaataattgatttgtttctaggaaaagtgcccacggacaagtggttcaccatgcgttgctttatggtatgatagctcgcggccgcaataatagactagcataaccccttggggcctctaaacgggtcttgaggggttttttgctgaacgtacgttttacggctagctcagtcctaggtactatgctagcgtggagatatacggtaccaaggagatataccatggactacaaagaccatgacggtgattataaagatcatgacatcgattacaaggatgacgatgacaagggaggaagcggatccatgaaaaacctgaaaggctaccgctttcgaatttacccgaacgaagcacagaaacggttctttatcgaaacgtttggctgcgttcgcttcatctataactattttctgaagctggataccgctgagcgcaccagtgaagagattatcaccccggcgagcctcaaacgtgactatccttttctgaaaaagacggacagtctagcccttgcaaacgcgaaacgcaatttggacagggcctttcagaactactatcagcagcgtagcggctatccgaagctgaaaaataagtcctcggtctggcagagctacacgaccaacaatcagaacgggacggtacgtatagaggatggatatctgaaactaccaaagctgaaagaaaaaattcaaatctgcgaacatcgaaaaattactggcaaaattaaatcagtgactatttcagcgaaaaacaacgaagagttctacgcttcgattttgtgcgtggaaaccatcgataagttcgagaaaacaggtaaaaaaatccgccttagctttgatgcgcatcaattagtccagcaagcgaaataccgtgccgaagtgatcgaacccattcagcacaccaaaggacgtctggcgtttttacaacgccgcctgaaggtcaaggcacgcgttgcgcgtaagcagaaccggatcttagccgactgtaagaattaccagaaacaaaaaaaacagtacgacaaattactcacacaccttaacaatcagataaaagactatctgaatcacctgtccgtgttctatattaaggaatatgatgtaatcgaaatcgtggaaccggaagatcgctcttgtgccgaagatgccttgttcaccagcaacgaatggcatcaactggttcgtctcctgaaatataaagcacagtggtacggcaaagaaattcagatcatcaattgccagaatatataataagaattcctgctgccaccgctgagcaataactagcataaccccttggggcctctaaacgggtcttgaggggttttttgctgaaacctcaggcatttgagaagcacacggtcacactgcttccggtagtcaataaaccggtaaaccagcaatagacataagcggctatttaacgaccctgccctgaaccgacgaccgggtcatcgtggccggatcttgcggcccctcggcttgaacgaattgttagacattatttgccgactaccttggtgatctcgcctttcacgtagtggacaaattcttccaactgatctgcgcgcgaggccaagcgatcttcttcttgtccaagataagcctgtctagcttcaagtatgacgggctgatactgggccggcaggcgctccattgcccagtcggcagcgacatccttcggcgcgattttgccggttactgcgctgtaccaaatgcgggacaacgtaagcactacatttcgctcatcgccagcccagtcgggcggcgagttccatagcgttaaggtttcatttagcgcctcaaatagatcctgttcaggaaccggatcaaagagttcctccgccgctggacctaccaaggcaacgctatgttctcttgcttttgtcagcaagatagccagatcaatgtcgatcgtggctggctcgaagatacctgcaagaatgtcattgcgctgccattctccaaattgcagttcgcgcttagctggataacgccacggaatgatgtcgtcgtgcacaacaatggtgacttctacagcgcggagaatctcgctctctccaggggaagccgaagtttccaaaaggtcgttgatcaaagctcgccgcgttgtttcatcaagccttacggtcaccgtaaccagcaaatcaatatcactgtgtggcttcaggccgccatccactgcggagccgtacaaatgtacggccagcaacgtcggttcgagatggcgctcgatgacgccaactacctctgatagttgagtcgatacttcggcgatcaccgcttccctcatactcttcctttttcaatattattgaagcatttatcagggttattgtctcatgagcggatacatatttgaatgtatttagaaaaataaacaaatagctagctcactcggtcgctacgctccgggcgtgagactgcggcgggcgctgcggacacatacaaagttacccacagattccgtggataagcaggggactaacatgtgaggcaaaacagcagggccgcgccggtggcgtttttccataggctccgccctcctgccagagttcacataaacagacgcttttccggtgcatctgtgggagccgtgaggctcaaccatgaatctgacagtacgggcgaaacccgacaggacttaaagatccccaccgtttccggcgggtcgctccctcttgcgctctcctgttccgaccctgccgtttaccggatacctgttccgcctttctcccttacgggaagtgtggcgctttctcatagctcacacactggtatctcggctcggtgtaggtcgttcgctccaagctgggctgtaagcaagaactccccgttcagcccgactgctgcgccttatccggtaactgttcacttgagtccaacccggaaaagcacggtaaaacgccactggcagcagccattggtaactgggagttcgcagaggatttgtttagctaaacacgcggttgctcttgaagtgtgcgccaaagtccggctacactggaaggacagatttggttgctgtgctctgcgaaagccagttaccacggttaagcagttccccaactgacttaaccttcgatcaaaccacctccccaggtggttttttcgtttacagggcaaaagattacgcgcagaaaaaaaggatctcaagaagatcctttgatcttttctactgaaccgctctagatttcagtgcaatttatctcttcaaatgtagcacctgaagtcagccccatacgatataagttgtaattctcatgttagtcatgccccgcgcccaccggaaggagctgactgggttgaaggctctcaagggcatcggtcgagatcccggtgcctaatgagtgagctaacttacattaattgcgttgcgctcactgcccgctttccagtcgggaaacctgtcgtgccagctgcattaatgaatcggccaacgcgcggggagaggcggtttgcgtattgggcgccagggtggtttttcttttcaccagtgagacgggcaacagctgattgcccttcaccgcctggccctgagagagttgcagcaagcggtccacgctggtttgccccagcaggcgaaaatcctgtttgatggtggttaacggcgggatataacatgagctgtcttcggtatcgtcgtatcccactaccgagatgtccgcaccaacgcgcagcccggactcggtaatggcgcgcattgcgcccagcgccatctgatcgttggcaaccagcatcgcagtgggaacgatgccctcattcagcatttgcatggtttgttgaaaaccggacatggcactccagtcgccttcccgttccgctatcggctgaatttgattgcgagtgagatatttatgccagccagccagacgcagacgcgccgagacagaacttaatgggcccgctaacagcgcgatttgctggtgacccaatgcgaccagatgctccacgcccagtcgcgtaccgtcttcatgggagaaaataatactgttgatgggtgtctggtcagagacatcaagaaataacgccggaacattagtgcaggcagcttccacagcaatggcatcctggtcatccagcggatagttaatgatcagcccactgacgcgttgcgcgagaagattgtgcaccgccgctttacaggcttcgacgccgcttcgttctaccatcgacaccaccacgctggcacccagttgatcggcgcgagatttaatcgccgcgacaatttgcgacggcgcgtgcagggccagactggaggtggcaacgccaatcagcaacgactgtttgcccgccagttgttgtgccacgcggttgggaatgtaattcagctccgccatcgccgcttccactttttcccgcgttttcgcagaaacgtggctggcctggttcaccacgcgggaaacggtctgataagagacaccggcatactctgcgacatcgtataacgttactggtttcacattcaccaccctgaattgactctcttccgggcgctatcatgccataccgcgaaaggttttgcgccattcgatggtg

SEQ ID NO: 1403 - DNA, 4780 bp, synthetic construct
  source 1..4780: mol_type = other DNA
tccgggattgacagctagctcagtcctaggtataatgctagcgtggagatatacctcgagtgtcctactaatggaaaataaaactggcgcaggaagtctagcgcactttctttataatgaattgatttaaactgatttaatcaagtgtttgccagcgaaatacgttacaaaaagaataactatttttgtaaaactggaaggagctccagggttcgccttgggtatataaaaagtgttgacacttttgtttctaggaatccgctcactaattatgattaacggacaagtggttcaccatgcgttgctttatggtatgatagctcgcggccgcaataatagactagcataaccccttggggcctctaaacgggtcttgaggggttttttgctgaacgtacgttttacggctagctcagtcctaggtactatgctagcgtggagatatacggtaccaaggagatataccatggactacaaagaccatgacggtgattataaagatcatgacatcgattacaaggatgacgatgacaagggaggaagcggatccatgttacttacactccgacagcaggagtcgggcaaaactgttgaagaacgtacatcagcacgtctgcagaaacagaagatgaccccggcgaagctgaagaaagactacccgtttttaaaagccaccgatagcttagccttggctaacgcacagcgtaatctggaaaaagcgttccagaactactatcgcggtcgtgccagttatcccaagctgaagagcaagaaatcggcttggcagtcgtacacgacgaataatcaaggacataccatatacctggcagaagacggtttgaagctgccgaagttgaaaagcaaagtccttgtgcatcaacaccgcagcgtcgcagggaaaattcgttcagccaccatttcagcgaaaaatcggcaggagttctatgtatctttactgtgtgaagaagacatcccggcactcccaaaaacgggcagtgaaatcgaaattgcctacgatccgacaggcctggtggtgacgaataaacctatcgtgggcatacccaccttttgccagacccaagttctagaaaaactcaaaaaagcgcaacgccgccttagctgccgcgcgaagagtgcgcagcgccgcaacgcgaaactggaacaagcgaaaaactatcagaagcaaaaatcccaggtgcaacagttgtatatccacaagctgaaacagaaagaggacttcaccgaacagctatctatcgccctgctgcgccagtttgattgcattattatcaccaaaccgccggaactgagagagaataaagaaagcaaagcggccaaaaccgtaaaaaaatccaaacacaccactgtgttcccaagctttgaggataactttactttaagcgactggaacaggctcctgctgaaacttaaatataaggccgagtggtacgaaaaagagctggtcttcatttgtcctaccaacggtaaataataagaattcctgctgccaccgctgagcaataactagcataaccccttggggcctctaaacgggtcttgaggggttttttgctgaaacctcaggcatttgagaagcacacggtcacactgcttccggtagtcaataaaccggtaaaccagcaatagacataagcggctatttaacgaccctgccctgaaccgacgaccgggtcatcgtggccggatcttgcggcccctcggcttgaacgaattgttagacattatttgccgactaccttggtgatctcgcctttcacgtagtggacaaattcttccaactgatctgcgcgcgaggccaagcgatcttcttcttgtccaagataagcctgtctagcttcaagtatgacgggctgatactgggccggcaggcgctccattgcccagtcggcagcgacatccttcggcgcgattttgccggttactgcgctgtaccaaatgcgggacaacgtaagcactacatttcgctcatcgccagcccagtcgggcggcgagttccatagcgttaaggtttcatttagcgcctcaaatagatcctgttcaggaaccggatcaaagagttcctccgccgctggacctaccaaggcaacgctatgttctcttgcttttgtcagcaagatagccagatcaatgtcgatcgtggctggctcgaagatacctgcaagaatgtcattgcgctgccattctccaaattgcagttcgcgcttagctggataacgccacggaatgatgtcgtcgtgcacaacaatggtgacttctacagcgcggagaatctcgctctctccaggggaagccgaagtttccaaaaggtcgttgatcaaagctcgccgcgttgtttcatcaagccttacggtcaccgtaaccagcaaatcaatatcactgtgtggcttcaggccgccatccactgcggagccgtacaaatgtacggccagcaacgtcggttcgagatggcgctcgatgacgccaactacctctgatagttgagtcgatacttcggcgatcaccgcttccctcatactcttcctttttcaatattattgaagcatttatcagggttattgtctcatgagcggatacatatttgaatgtatttagaaaaataaacaaatagctagctcactcggtcgctacgctccgggcgtgagactgcggcgggcgctgcggacacatacaaagttacccacagattccgtggataagcaggggactaacatgtgaggcaaaacagcagggccgcgccggtggcgtttttccataggctccgccctcctgccagagttcacataaacagacgcttttccggtgcatctgtgggagccgtgaggctcaaccatgaatctgacagtacgggcgaaacccgacaggacttaaagatccccaccgtttccggcgggtcgctccctcttgcgctctcctgttccgaccctgccgtttaccggatacctgttccgcctttctcccttacgggaagtgtggcgctttctcatagctcacacactggtatctcggctcggtgtaggtcgttcgctccaagctgggctgtaagcaagaactccccgttcagcccgactgctgcgccttatccggtaactgttcacttgagtccaacccggaaaagcacggtaaaacgccactggcagcagccattggtaactgggagttcgcagaggatttgtttagctaaacacgcggttgctcttgaagtgtgcgccaaagtccggctacactggaaggacagatttggttgctgtgctctgcgaaagccagttaccacggttaagcagttccccaactgacttaaccttcgatcaaaccacctccccaggtggttttttcgtttacagggcaaaagattacgcgcagaaaaaaaggatctcaagaagatcctttgatcttttctactgaaccgctctagatttcagtgcaatttatctcttcaaatgtagcacctgaagtcagccccatacgatataagttgtaattctcatgttagtcatgccccgcgcccaccggaaggagctgactgggttgaaggctctcaagggcatcggtcgagatcccggtgcctaatgagtgagctaacttacattaattgcgttgcgctcactgcccgctttccagtcgggaaacctgtcgtgccagctgcattaatgaatcggccaacgcgcggggagaggcggtttgcgtattgggcgccagggtggtttttcttttcaccagtgagacgggcaacagctgattgcccttcaccgcctggccctgagagagttgcagcaagcggtccacgctggtttgccccagcaggcgaaaatcctgtttgatggtggttaacggcgggatataacatgagctgtcttcggtatcgtcgtatcccactaccgagatgtccgcaccaacgcgcagcccggactcggtaatggcgcgcattgcgcccagcgccatctgatcgttggcaaccagcatcgcagtgggaacgatgccctcattcagcatttgcatggtttgttgaaaaccggacatggcactccagtcgccttcccgttccgctatcggctgaatttgattgcgagtgagatatttatgccagccagccagacgcagacgcgccgagacagaacttaatgggcccgctaacagcgcgatttgctggtgacccaatgcgaccagatgctccacgcccagtcgcgtaccgtcttcatgggagaaaataatactgttgatgggtgtctggtcagagacatcaagaaataacgccggaacattagtgcaggcagcttccacagcaatggcatcctggtcatccagcggatagttaatgatcagcccactgacgcgttgcgcgagaagattgtgcaccgccgctttacaggcttcgacgccgcttcgttctaccatcgacaccaccacgctggcacccagttgatcggcgcgagatttaatcgccgcgacaatttgcgacggcgcgtgcagggccagactggaggtggcaacgccaatcagcaacgactgtttgcccgccagttgttgtgccacgcggttgggaatgtaattcagctccgccatcgccgcttccactttttcccgcgttttcgcagaaacgtggctggcctggttcaccacgcgggaaacggtctgataagagacaccggcatactctgcgacatcgtataacgttactggtttcacattcaccaccctgaattgactctcttccgggcgctatcatgccataccgcgaaaggttttgcgccattcgatggtg

SEQ ID NO: 1404 - DNA, 5003 bp, synthetic construct
  source 1..5003: mol_type = other DNA
tccgggattgacagctagctcagtcctaggtataatgctagcgtggagatatacctcgagttaagcgcggcttgtatcgaacaaagtctggcaaactaattaatgctgatgtcaatggcgcattaaacatcttaaagaaaagtaaagctgtagacctgagtgtcttatgctctagcggcgaagtggacacgcctcaaagaataaggattgcttgaagcagtcaaacttctttggaagcccccacttcaaattttcgctagaaaattaagtgggggtagttcacggacaagtggttcaccatgcgttgctttatggtatgatagctcgcggccgcaataactagcataaccccttggggcctctaaacgggtcttgaggggttttttgctgaagtcgattttacggctagctcagtcctaggtactatgctagcgtggagatatacggtaccaaggagatataccatgggctatttttgcatcaagcagcagcttaatgggttgacgaaggaagagtacctgacactgcgtgagttgtgccatattgccaaaaacatgtacaacgttggcctttacaacgtacgtcagtactattttgagcataaggagttcttaaattacgaaaagaactatcacttggcgaagactaatgaaaactacaagttactgaactcgaacatggctcaacaaatcttgaaaaaagtaaatgaagccttcaaaagtttcttcggtcttatttcgcttgccaaacaaggtaaatacgaccataaagcaatctcgattcccaaatacttaaagaaagacggtttccattcgttaatcatcggccaaatccgcattgacggaaataagttcacgattccatactctcgcttattcaaaaagacacataagcccattacaatcactattccaccagtgttacttgataaaaagattaagcagatcgaaatcattccgaaacaccatgcacgtttcttcgagatccagtacaagtacgaaatgcctgaagatcagcgcgaacttaatgatcagaaggcgcttgcgattgacttggggcttaataacttggctacatgtgtaacctcagacggacgttctttcattattgacggccgtcgtcttaaatctatcaaccaatggttcaataaggaaaacgctcgcttgcagtctattaaagataaacagaagattaagggaaccacgcgtaaacaagcactgcttgcgatgaatcgtaataacaaggtgaacgactatatcaataagacctgccgctatatcattaactactgtatcgaaaatcaaattggcaagctggtaatcgggtacgccgaaacatggcagcgcaacatgaatttgggcaagaaaaccaaccaaaacttcgtcaatatccctcttggaaacattaaggagaagttagaatacctttgtgagttctatgggatcgagtttttgaagcaagaagagtcgtatacaagtcaagcgtcgttttttgatggagatgaaatccccgaatacaacgcggataatcccaaagagtacaaattttctggtaagcgcattaagcgcggcctgtatcgcactaaatcaggaaaacttattaacgcagacgtgaatggggcattgaatattttaaaaaaaagcaaggctgttgatttgtctgtcttgtgcagttctggtgaggtagacaccccgcaacgtattcgcatcgcgtgataacctaggctgctgccaccgctgagcaataactagcataaccccttggggcctctaaacgggtcttgaggggttttttgctgaaacctcaggcatttgagaagcacacggtcacactgcttccggtagtcaataaaccggtaaaccagcaatagacataagcggctatttaacgaccctgccctgaaccgacgaccgggtcatcgtggccggatcttgcggcccctcggcttgaacgaattgttagacattatttgccgactaccttggtgatctcgcctttcacgtagtggacaaattcttccaactgatctgcgcgcgaggccaagcgatcttcttcttgtccaagataagcctgtctagcttcaagtatgacgggctgatactgggccggcaggcgctccattgcccagtcggcagcgacatccttcggcgcgattttgccggttactgcgctgtaccaaatgcgggacaacgtaagcactacatttcgctcatcgccagcccagtcgggcggcgagttccatagcgttaaggtttcatttagcgcctcaaatagatcctgttcaggaaccggatcaaagagttcctccgccgctggacctaccaaggcaacgctatgttctcttgcttttgtcagcaagatagccagatcaatgtcgatcgtggctggctcgaagatacctgcaagaatgtcattgcgctgccattctccaaattgcagttcgcgcttagctggataacgccacggaatgatgtcgtcgtgcacaacaatggtgacttctacagcgcggagaatctcgctctctccaggggaagccgaagtttccaaaaggtcgttgatcaaagctcgccgcgttgtttcatcaagccttacggtcaccgtaaccagcaaatcaatatcactgtgtggcttcaggccgccatccactgcggagccgtacaaatgtacggccagcaacgtcggttcgagatggcgctcgatgacgccaactacctctgatagttgagtcgatacttcggcgatcaccgcttccctcatactcttcctttttcaatattattgaagcatttatcagggttattgtctcatgagcggatacatatttgaatgtatttagaaaaataaacaaatagctagctcactcggtcgctacgctccgggcgtgagactgcggcgggcgctgcggacacatacaaagttacccacagattccgtggataagcaggggactaacatgtgaggcaaaacagcagggccgcgccggtggcgtttttccataggctccgccctcctgccagagttcacataaacagacgcttttccggtgcatctgtgggagccgtgaggctcaaccatgaatctgacagtacgggcgaaacccgacaggacttaaagatccccaccgtttccggcgggtcgctccctcttgcgctctcctgttccgaccctgccgtttaccggatacctgttccgcctttctcccttacgggaagtgtggcgctttctcatagctcacacactggtatctcggctcggtgtaggtcgttcgctccaagctgggctgtaagcaagaactccccgttcagcccgactgctgcgccttatccggtaactgttcacttgagtccaacccggaaaagcacggtaaaacgccactggcagcagccattggtaactgggagttcgcagaggatttgtttagctaaacacgcggttgctcttgaagtgtgcgccaaagtccggctacactggaaggacagatttggttgctgtgctctgcgaaagccagttaccacggttaagcagttccccaactgacttaaccttcgatcaaaccacctccccaggtggttttttcgtttacagggcaaaagattacgcgcagaaaaaaaggatctcaagaagatcctttgatcttttctactgaaccgctctagatttcagtgcaatttatctcttcaaatgtagcacctgaagtcagccccatacgatataagttgtaattctcatgttagtcatgccccgcgcccaccggaaggagctgactgggttgaaggctctcaagggcatcggtcgagatcccggtgcctaatgagtgagctaacttacattaattgcgttgcgctcactgcccgctttccagtcgggaaacctgtcgtgccagctgcattaatgaatcggccaacgcgcggggagaggcggtttgcgtattgggcgccagggtggtttttcttttcaccagtgagacgggcaacagctgattgcccttcaccgcctggccctgagagagttgcagcaagcggtccacgctggtttgccccagcaggcgaaaatcctgtttgatggtggttaacggcgggatataacatgagctgtcttcggtatcgtcgtatcccactaccgagatgtccgcaccaacgcgcagcccggactcggtaatggcgcgcattgcgcccagcgccatctgatcgttggcaaccagcatcgcagtgggaacgatgccctcattcagcatttgcatggtttgttgaaaaccggacatggcactccagtcgccttcccgttccgctatcggctgaatttgattgcgagtgagatatttatgccagccagccagacgcagacgcgccgagacagaacttaatgggcccgctaacagcgcgatttgctggtgacccaatgcgaccagatgctccacgcccagtcgcgtaccgtcttcatgggagaaaataatactgttgatgggtgtctggtcagagacatcaagaaataacgccggaacattagtgcaggcagcttccacagcaatggcatcctggtcatccagcggatagttaatgatcagcccactgacgcgttgcgcgagaagattgtgcaccgccgctttacaggcttcgacgccgcttcgttctaccatcgacaccaccacgctggcacccagttgatcggcgcgagatttaatcgccgcgacaatttgcgacggcgcgtgcagggccagactggaggtggcaacgccaatcagcaacgactgtttgcccgccagttgttgtgccacgcggttgggaatgtaattcagctccgccatcgccgcttccactttttcccgcgttttcgcagaaacgtggctggcctggttcaccacgcgggaaacggtctgataagagacaccggcatactctgcgacatcgtataacgttactggtttcacattcaccaccctgaattgactctcttccgggcgctatcatgccataccgcgaaaggttttgcgccattcgatggtg

SEQ ID NO: 1405 - DNA, 5004 bp, synthetic construct
  source 1..5004: mol_type = other DNA
tccgggattgacagctagctcagtcctaggtataatgctagcgtggagatatacctcgagttaagcgcggcttgtatcgaacaaagtctggcaaactaattaatgctgatgtcaatggcgcattaaacatcttaaagaaaagtaaagctgtagacctgagtgtcttatgctctagcggcgaagtggacacgcctcaaagaataaggattgcttgaagcagtcaaacttctttggaagcccccacttcaaattttcgctagaaaattaagtgggggtagttcacggacaagtggttcaccatgcgttgctttatggtatgatagctcgcggccgcaataactagcataaccccttggggcctctaaacgggtcttgaggggttttttgctgaagtcgacttttacggctagctcagtcctaggtactatgctagcgtggagatatacggtaccaaggagatataccatgggctatttttgcatcaagcagcagcttaatgggttgacgaaggaagagtacctgacactgcgtgagttgtgccatattgccaaaaacatgtacaacgttggcctttacaacgtacgtcagtactattttgagcataaggagttcttaaattacgaaaagaactatcacttggcgaagactaatgaaaactacaagttactgaactcgaacatggctcaacaaatcttgaaaaaagtaaatgaagccttcaaaagtttcttcggtcttatttcgcttgccaaacaaggtaaatacgaccataaagcaatctcgattcccaaatacttaaagaaagacggtttccattcgttaatcatcggccaaatccgcattgacggaaataagttcacgattccatactctcgcttattcaaaaagacacataagcccattacaatcactattccaccagtgttacttgataaaaagattaagcagatcgaaatcattccgaaacaccatgcacgtttcttcgagatccagtacaagtacgaaatgcctgaagatcagcgcgaacttaatgatcagaaggcgcttgcgattgccttggggcttaataacttggctacatgtgtaacctcagacggacgttctttcattattgacggccgtcgtcttaaatctatcaaccaatggttcaataaggaaaacgctcgcttgcagtctattaaagataaacagaagattaagggaaccacgcgtaaacaagcactgcttgcgatgaatcgtaataacaaggtgaacgactatatcaataagacctgccgctatatcattaactactgtatcgaaaatcaaattggcaagctggtaatcgggtacgccgaaacatggcagcgcaacatgaatttgggcaagaaaaccaaccaaaacttcgtcaatatccctcttggaaacattaaggagaagttagaatacctttgtgagttctatgggatcgagtttttgaagcaagaagagtcgtatacaagtcaagcgtcgttttttgatggagatgaaatccccgaatacaacgcggataatcccaaagagtacaaattttctggtaagcgcattaagcgcggcctgtatcgcactaaatcaggaaaacttattaacgcagacgtgaatggggcattgaatattttaaaaaaaagcaaggctgttgatttgtctgtcttgtgcagttctggtgaggtagacaccccgcaacgtattcgcatcgcgtgataacctaggctgctgccaccgctgagcaataactagcataaccccttggggcctctaaacgggtcttgaggggttttttgctgaaacctcaggcatttgagaagcacacggtcacactgcttccggtagtcaataaaccggtaaaccagcaatagacataagcggctatttaacgaccctgccctgaaccgacgaccgggtcatcgtggccggatcttgcggcccctcggcttgaacgaattgttagacattatttgccgactaccttggtgatctcgcctttcacgtagtggacaaattcttccaactgatctgcgcgcgaggccaagcgatcttcttcttgtccaagataagcctgtctagcttcaagtatgacgggctgatactgggccggcaggcgctccattgcccagtcggcagcgacatccttcggcgcgattttgccggttactgcgctgtaccaaatgcgggacaacgtaagcactacatttcgctcatcgccagcccagtcgggcggcgagttccatagcgttaaggtttcatttagcgcctcaaatagatcctgttcaggaaccggatcaaagagttcctccgccgctggacctaccaaggcaacgctatgttctcttgcttttgtcagcaagatagccagatcaatgtcgatcgtggctggctcgaagatacctgcaagaatgtcattgcgctgccattctccaaattgcagttcgcgcttagctggataacgccacggaatgatgtcgtcgtgcacaacaatggtgacttctacagcgcggagaatctcgctctctccaggggaagccgaagtttccaaaaggtcgttgatcaaagctcgccgcgttgtttcatcaagccttacggtcaccgtaaccagcaaatcaatatcactgtgtggcttcaggccgccatccactgcggagccgtacaaatgtacggccagcaacgtcggttcgagatggcgctcgatgacgccaactacctctgatagttgagtcgatacttcggcgatcaccgcttccctcatactcttcctttttcaatattattgaagcatttatcagggttattgtctcatgagcggatacatatttgaatgtatttagaaaaataaacaaatagctagctcactcggtcgctacgctccgggcgtgagactgcggcgggcgctgcggacacatacaaagttacccacagattccgtggataagcaggggactaacatgtgaggcaaaacagcagggccgcgccggtggcgtttttccataggctccgccctcctgccagagttcacataaacagacgcttttccggtgcatctgtgggagccgtgaggctcaaccatgaatctgacagtacgggcgaaacccgacaggacttaaagatccccaccgtttccggcgggtcgctccctcttgcgctctcctgttccgaccctgccgtttaccggatacctgttccgcctttctcccttacgggaagtgtggcgctttctcatagctcacacactggtatctcggctcggtgtaggtcgttcgctccaagctgggctgtaagcaagaactccccgttcagcccgactgctgcgccttatccggtaactgttcacttgagtccaacccggaaaagcacggtaaaacgccactggcagcagccattggtaactgggagttcgcagaggatttgtttagctaaacacgcggttgctcttgaagtgtgcgccaaagtccggctacactggaaggacagatttggttgctgtgctctgcgaaagccagttaccacggttaagcagttccccaactgacttaaccttcgatcaaaccacctccccaggtggttttttcgtttacagggcaaaagattacgcgcagaaaaaaaggatctcaagaagatcctttgatcttttctactgaaccgctctagatttcagtgcaatttatctcttcaaatgtagcacctgaagtcagccccatacgatataagttgtaattctcatgttagtcatgccccgcgcccaccggaaggagctgactgggttgaaggctctcaagggcatcggtcgagatcccggtgcctaatgagtgagctaacttacattaattgcgttgcgctcactgcccgctttccagtcgggaaacctgtcgtgccagctgcattaatgaatcggccaacgcgcggggagaggcggtttgcgtattgggcgccagggtggtttttcttttcaccagtgagacgggcaacagctgattgcccttcaccgcctggccctgagagagttgcagcaagcggtccacgctggtttgccccagcaggcgaaaatcctgtttgatggtggttaacggcgggatataacatgagctgtcttcggtatcgtcgtatcccactaccgagatgtccgcaccaacgcgcagcccggactcggtaatggcgcgcattgcgcccagcgccatctgatcgttggcaaccagcatcgcagtgggaacgatgccctcattcagcatttgcatggtttgttgaaaaccggacatggcactccagtcgccttcccgttccgctatcggctgaatttgattgcgagtgagatatttatgccagccagccagacgcagacgcgccgagacagaacttaatgggcccgctaacagcgcgatttgctggtgacccaatgcgaccagatgctccacgcccagtcgcgtaccgtcttcatgggagaaaataatactgttgatgggtgtctggtcagagacatcaagaaataacgccggaacattagtgcaggcagcttccacagcaatggcatcctggtcatccagcggatagttaatgatcagcccactgacgcgttgcgcgagaagattgtgcaccgccgctttacaggcttcgacgccgcttcgttctaccatcgacaccaccacgctggcacccagttgatcggcgcgagatttaatcgccgcgacaatttgcgacggcgcgtgcagggccagactggaggtggcaacgccaatcagcaacgactgtttgcccgccagttgttgtgccacgcggttgggaatgtaattcagctccgccatcgccgcttccactttttcccgcgttttcgcagaaacgtggctggcctggttcaccacgcgggaaacggtctgataagagacaccggcatactctgcgacatcgtataacgttactggtttcacattcaccaccctgaattgactctcttccgggcgctatcatgccataccgcgaaaggttttgcgccattcgatggtg

SEQ ID NO: 1406 - DNA, 4963 bp, synthetic construct
  source 1..4963: mol_type = other DNA
tccgggattgacagctagctcagtcctaggtataatgctagcgtggagatatacctcgagcgcctgtcacaaagtcaattcagatgccaggtatgtggatatacagcgaacgccgatgtaaacggcgctcgtaacattttagcggcggggcacgccgttcttgcctgtggagagatggtgcagtcaggccgcccgttgaagcaggaacccaccgaaatgattcaggcgacagcctgaacgtagcagggatcctcgtccttcagggcgtggaggatgtcaaggacaagtggttcaccatgcgttgctttatggtatgatagctcgcggccgcaataatagactagcataaccccttggggcctctaaacgggtcttgaggggttttttgctgaacgtacgttttacggctagctcagtcctaggtactatgctagcgtggagatatacggtaccaaggagatataccatgaaacgactacaggcctttaagtttcaactccggccgggtgatcaacaggagtgcgaaatgcgccgctttgcaggcgcatgtcgtttcgttttcaatcgtgccttagcgctgcagaatgaaaatcatgaggccggtaataaatatatcccttacgggaaaatggcttcgtggctggtggaatggaaaaatgccactgaaacgcaatggctgaaagactctccctcacagccacttcaacaatcactgaaagacttggagcgcgcttataaaaacttcttccgcaagcgggcagcttttccccgcttcaaaaagcgcggacagaatgatgcctttcgctacccgcaaggcgttaagcttgatcaggaaaacagccgtatttttctgccgaaactgggctggatgcgttatcgcaatagccgtcaggttaccggtgttgtgaaaaatgtgaccgttagccagtcctgcggtaagtggtacatcagtattcagacagaaagtgaagtatccaccccggtacacccgtccgcaagcatggtcgggctggatgcgggcgtggcgaaactcgccacgctgtcggatggcacagtctttgagccggtaaacagttttcagaaaaaccagaagacgctggcgagacttcagcgacagttaagccgcaaagtcaaattcagcaacaactggcagaaacagaaacgcaaaatccaacgtctgcatagccgtatcgcaaatatccgcagggactacctgcataaagtgactacgaccgtgagcaaaaaccacgcaatgatagtgattgaagatctcaaggtcagcaacatgtcgaagtcagccgcgggtaccgtcagcttgccggggcgcaatgtgcgggcaaaatcgggcttaaaccgttcgatactggatcagggctggtatgaaatacgccgccaactggagtataagcagctgtggcgtggcggtcaggtgcttgctgtgccgccagcgtacaccagccagcgttgcgcgtgctgtggtcatactgcgaaagaaaatcgcctgagccaaagtcaattccgttgccaggtttgtggctataccgcgaacgccgacgtaaacggcgcgcgtaacatcttagctgcgggccacgccgttctagcctgtggagaaatggttcagtcaggtcgcccgcttaaacaggaacctaccgaaatgatccaggctaccgcctaataagaattcctgctgccaccgctgagcaataactagcataaccccttggggcctctaaacgggtcttgaggggttttttgctgaaacctcaggcatttgagaagcacacggtcacactgcttccggtagtcaataaaccggtaaaccagcaatagacataagcggctatttaacgaccctgccctgaaccgacgaccgggtcatcgtggccggatcttgcggcccctcggcttgaacgaattgttagacattatttgccgactaccttggtgatctcgcctttcacgtagtggacaaattcttccaactgatctgcgcgcgaggccaagcgatcttcttcttgtccaagataagcctgtctagcttcaagtatgacgggctgatactgggccggcaggcgctccattgcccagtcggcagcgacatccttcggcgcgattttgccggttactgcgctgtaccaaatgcgggacaacgtaagcactacatttcgctcatcgccagcccagtcgggcggcgagttccatagcgttaaggtttcatttagcgcctcaaatagatcctgttcaggaaccggatcaaagagttcctccgccgctggacctaccaaggcaacgctatgttctcttgcttttgtcagcaagatagccagatcaatgtcgatcgtggctggctcgaagatacctgcaagaatgtcattgcgctgccattctccaaattgcagttcgcgcttagctggataacgccacggaatgatgtcgtcgtgcacaacaatggtgacttctacagcgcggagaatctcgctctctccaggggaagccgaagtttccaaaaggtcgttgatcaaagctcgccgcgttgtttcatcaagccttacggtcaccgtaaccagcaaatcaatatcactgtgtggcttcaggccgccatccactgcggagccgtacaaatgtacggccagcaacgtcggttcgagatggcgctcgatgacgccaactacctctgatagttgagtcgatacttcggcgatcaccgcttccctcatactcttcctttttcaatattattgaagcatttatcagggttattgtctcatgagcggatacatatttgaatgtatttagaaaaataaacaaatagctagctcactcggtcgctacgctccgggcgtgagactgcggcgggcgctgcggacacatacaaagttacccacagattccgtggataagcaggggactaacatgtgaggcaaaacagcagggccgcgccggtggcgtttttccataggctccgccctcctgccagagttcacataaacagacgcttttccggtgcatctgtgggagccgtgaggctcaaccatgaatctgacagtacgggcgaaacccgacaggacttaaagatccccaccgtttccggcgggtcgctccctcttgcgctctcctgttccgaccctgccgtttaccggatacctgttccgcctttctcccttacgggaagtgtggcgctttctcatagctcacacactggtatctcggctcggtgtaggtcgttcgctccaagctgggctgtaagcaagaactccccgttcagcccgactgctgcgccttatccggtaactgttcacttgagtccaacccggaaaagcacggtaaaacgccactggcagcagccattggtaactgggagttcgcagaggatttgtttagctaaacacgcggttgctcttgaagtgtgcgccaaagtccggctacactggaaggacagatttggttgctgtgctctgcgaaagccagttaccacggttaagcagttccccaactgacttaaccttcgatcaaaccacctccccaggtggttttttcgtttacagggcaaaagattacgcgcagaaaaaaaggatctcaagaagatcctttgatcttttctactgaaccgctctagatttcagtgcaatttatctcttcaaatgtagcacctgaagtcagccccatacgatataagttgtaattctcatgttagtcatgccccgcgcccaccggaaggagctgactgggttgaaggctctcaagggcatcggtcgagatcccggtgcctaatgagtgagctaacttacattaattgcgttgcgctcactgcccgctttccagtcgggaaacctgtcgtgccagctgcattaatgaatcggccaacgcgcggggagaggcggtttgcgtattgggcgccagggtggtttttcttttcaccagtgagacgggcaacagctgattgcccttcaccgcctggccctgagagagttgcagcaagcggtccacgctggtttgccccagcaggcgaaaatcctgtttgatggtggttaacggcgggatataacatgagctgtcttcggtatcgtcgtatcccactaccgagatgtccgcaccaacgcgcagcccggactcggtaatggcgcgcattgcgcccagcgccatctgatcgttggcaaccagcatcgcagtgggaacgatgccctcattcagcatttgcatggtttgttgaaaaccggacatggcactccagtcgccttcccgttccgctatcggctgaatttgattgcgagtgagatatttatgccagccagccagacgcagacgcgccgagacagaacttaatgggcccgctaacagcgcgatttgctggtgacccaatgcgaccagatgctccacgcccagtcgcgtaccgtcttcatgggagaaaataatactgttgatgggtgtctggtcagagacatcaagaaataacgccggaacattagtgcaggcagcttccacagcaatggcatcctggtcatccagcggatagttaatgatcagcccactgacgcgttgcgcgagaagattgtgcaccgccgctttacaggcttcgacgccgcttcgttctaccatcgacaccaccacgctggcacccagttgatcggcgcgagatttaatcgccgcgacaatttgcgacggcgcgtgcagggccagactggaggtggcaacgccaatcagcaacgactgtttgcccgccagttgttgtgccacgcggttgggaatgtaattcagctccgccatcgccgcttccactttttcccgcgttttcgcagaaacgtggctggcctggttcaccacgcgggaaacggtctgataagagacaccggcatactctgcgacatcgtataacgttactggtttcacattcaccaccctgaattgactctcttccgggcgctatcatgccataccgcgaaaggttttgcgccattcgatggtg

SEQ ID NO: 1407 - DNA, 4950 bp, synthetic construct
  source 1..4950: mol_type = other DNA
tccgggattgacagctagctcagtcctaggtataatgctagcgtggagatatacctcgagcgcctgtcacaaagtcaattcagatgccaggtatgtggatatacagcgaacgccgatgtaaacggcgctcgtaacattttagcggcggggcacgccgttcttgcctgtggagagatggtgcagtcaggccgcccgttgaagcaggaacccaccgaaatgattcaggcgacagcctgaacgtagcagggatcctcgtccttcagggcgtggaggatgtcaaagagacccagcgtatctaaaggtctcactcgcggccgcaataatagactagcataaccccttggggcctctaaacgggtcttgaggggttttttgctgaacgtacgttttacggctagctcagtcctaggtactatgctagcgtggagatatacggtaccaaggagatataccatgaaacgactacaggcctttaagtttcaactccggccgggtgatcaacaggagtgcgaaatgcgccgctttgcaggcgcatgtcgtttcgttttcaatcgtgccttagcgctgcagaatgaaaatcatgaggccggtaataaatatatcccttacgggaaaatggcttcgtggctggtggaatggaaaaatgccactgaaacgcaatggctgaaagactctccctcacagccacttcaacaatcactgaaagacttggagcgcgcttataaaaacttcttccgcaagcgggcagcttttccccgcttcaaaaagcgcggacagaatgatgcctttcgctacccgcaaggcgttaagcttgatcaggaaaacagccgtatttttctgccgaaactgggctggatgcgttatcgcaatagccgtcaggttaccggtgttgtgaaaaatgtgaccgttagccagtcctgcggtaagtggtacatcagtattcagacagaaagtgaagtatccaccccggtacacccgtccgcaagcatggtcgggctggatgcgggcgtggcgaaactcgccacgctgtcggatggcacagtctttgagccggtaaacagttttcagaaaaaccagaagacgctggcgagacttcagcgacagttaagccgcaaagtcaaattcagcaacaactggcagaaacagaaacgcaaaatccaacgtctgcatagccgtatcgcaaatatccgcagggactacctgcataaagtgactacgaccgtgagcaaaaaccacgcaatgatagtgattgaagatctcaaggtcagcaacatgtcgaagtcagccgcgggtaccgtcagcttgccggggcgcaatgtgcgggcaaaatcgggcttaaaccgttcgatactggatcagggctggtatgaaatacgccgccaactggagtataagcagctgtggcgtggcggtcaggtgcttgctgtgccgccagcgtacaccagccagcgttgcgcgtgctgtggtcatactgcgaaagaaaatcgcctgagccaaagtcaattccgttgccaggtttgtggctataccgcgaacgccgacgtaaacggcgcgcgtaacatcttagctgcgggccacgccgttctagcctgtggagaaatggttcagtcaggtcgcccgcttaaacaggaacctaccgaaatgatccaggctaccgcctaataagaattcctgctgccaccgctgagcaataactagcataaccccttggggcctctaaacgggtcttgaggggttttttgctgaaacctcaggcatttgagaagcacacggtcacactgcttccggtagtcaataaaccggtaaaccagcaatagacataagcggctatttaacgaccctgccctgaaccgacgaccgggtcatcgtggccggatcttgcggcccctcggcttgaacgaattgttagacattatttgccgactaccttggtgatctcgcctttcacgtagtggacaaattcttccaactgatctgcgcgcgaggccaagcgatcttcttcttgtccaagataagcctgtctagcttcaagtatgacgggctgatactgggccggcaggcgctccattgcccagtcggcagcgacatccttcggcgcgattttgccggttactgcgctgtaccaaatgcgggacaacgtaagcactacatttcgctcatcgccagcccagtcgggcggcgagttccatagcgttaaggtttcatttagcgcctcaaatagatcctgttcaggaaccggatcaaagagttcctccgccgctggacctaccaaggcaacgctatgttctcttgcttttgtcagcaagatagccagatcaatgtcgatcgtggctggctcgaagatacctgcaagaatgtcattgcgctgccattctccaaattgcagttcgcgcttagctggataacgccacggaatgatgtcgtcgtgcacaacaatggtgacttctacagcgcggagaatctcgctctctccaggggaagccgaagtttccaaaaggtcgttgatcaaagctcgccgcgttgtttcatcaagccttacggtcaccgtaaccagcaaatcaatatcactgtgtggcttcaggccgccatccactgcggagccgtacaaatgtacggccagcaacgtcggttcgagatggcgctcgatgacgccaactacctctgatagttgagtcgatacttcggcgatcaccgcttccctcatactcttcctttttcaatattattgaagcatttatcagggttattgtctcatgagcggatacatatttgaatgtatttagaaaaataaacaaatagctagctcactcggtcgctacgctccgggcgtgagactgcggcgggcgctgcggacacatacaaagttacccacagattccgtggataagcaggggactaacatgtgaggcaaaacagcagggccgcgccggtggcgtttttccataggctccgccctcctgccagagttcacataaacagacgcttttccggtgcatctgtgggagccgtgaggctcaaccatgaatctgacagtacgggcgaaacccgacaggacttaaagatccccaccgtttccggcgggtcgctccctcttgcgctctcctgttccgaccctgccgtttaccggatacctgttccgcctttctcccttacgggaagtgtggcgctttctcatagctcacacactggtatctcggctcggtgtaggtcgttcgctccaagctgggctgtaagcaagaactccccgttcagcccgactgctgcgccttatccggtaactgttcacttgagtccaacccggaaaagcacggtaaaacgccactggcagcagccattggtaactgggagttcgcagaggatttgtttagctaaacacgcggttgctcttgaagtgtgcgccaaagtccggctacactggaaggacagatttggttgctgtgctctgcgaaagccagttaccacggttaagcagttccccaactgacttaaccttcgatcaaaccacctccccaggtggttttttcgtttacagggcaaaagattacgcgcagaaaaaaaggatctcaagaagatcctttgatcttttctactgaaccgctctagatttcagtgcaatttatctcttcaaatgtagcacctgaagtcagccccatacgatataagttgtaattctcatgttagtcatgccccgcgcccaccggaaggagctgactgggttgaaggctctcaagggcatcggtcgagatcccggtgcctaatgagtgagctaacttacattaattgcgttgcgctcactgcccgctttccagtcgggaaacctgtcgtgccagctgcattaatgaatcggccaacgcgcggggagaggcggtttgcgtattgggcgccagggtggtttttcttttcaccagtgagacgggcaacagctgattgcccttcaccgcctggccctgagagagttgcagcaagcggtccacgctggtttgccccagcaggcgaaaatcctgtttgatggtggttaacggcgggatataacatgagctgtcttcggtatcgtcgtatcccactaccgagatgtccgcaccaacgcgcagcccggactcggtaatggcgcgcattgcgcccagcgccatctgatcgttggcaaccagcatcgcagtgggaacgatgccctcattcagcatttgcatggtttgttgaaaaccggacatggcactccagtcgccttcccgttccgctatcggctgaatttgattgcgagtgagatatttatgccagccagccagacgcagacgcgccgagacagaacttaatgggcccgctaacagcgcgatttgctggtgacccaatgcgaccagatgctccacgcccagtcgcgtaccgtcttcatgggagaaaataatactgttgatgggtgtctggtcagagacatcaagaaataacgccggaacattagtgcaggcagcttccacagcaatggcatcctggtcatccagcggatagttaatgatcagcccactgacgcgttgcgcgagaagattgtgcaccgccgctttacaggcttcgacgccgcttcgttctaccatcgacaccaccacgctggcacccagttgatcggcgcgagatttaatcgccgcgacaatttgcgacggcgcgtgcagggccagactggaggtggcaacgccaatcagcaacgactgtttgcccgccagttgttgtgccacgcggttgggaatgtaattcagctccgccatcgccgcttccactttttcccgcgttttcgcagaaacgtggctggcctggttcaccacgcgggaaacggtctgataagagacaccggcatactctgcgacatcgtataacgttactggtttcacattcaccaccctgaattgactctcttccgggcgctatcatgccataccgcgaaaggttttgcgccattcgatggtg

SEQ ID NO: 1408 - DNA, 4897 bp, synthetic construct
  source 1..4897: mol_type = other DNA
tccgggattgacagctagctcagtcctaggtataatgctagcgtggagatatacctcgaggtgatatcaatgctagtatcaatattttgaccgaaggtctaagaatacaaacattggcttaggtacaatcaaaaaaccgtaggaactacggggatagcttggtaaataagagaaaccgctgttagtgaagaaataagctatcaagtatgctctattcccaagaagctcccacttcaagcgctaagaaccgttaggtttagctaagtggtgagtagttcacggacaagtggttcaccatgcgttgctttatggtatgatagctcgcggccgcaataatagactagcataaccccttggggcctctaaacgggtcttgaggggttttttgctgaacgtacgttttacggctagctcagtcctaggtactatgctagcgtggagatatacggtaccaaggagatataccatggagcaactcaaagcgtacaagttccgtatctatcctactgaggagcaggaaatcttctttgccaaaacgttcggctgcgttcgtaaggtctacaacttgatgctgaacgaccgaaaaaaagcatatgaagaagtgaaaaatgatcctagcaaaaaaatgacgttccccaccccggcgaaatataagaaagagtttccatttctgaaagaagtcgatagcttagctctggccaatgcccaactgcatctcgacaaggcatacaagaatttttttcgggataaatcggtgggctttccgcgtttcaaaagcaagaaaaacccggttcagagttatacaacgaataatcagaacggcaccatcgccttgatcgatagtaagttcataaaagttcccaaactcaaatcacttgtccggatcaagctgcaccgccaaccaaaagggatgatcaaatcggcgacaatatcacgtcatagcagcggcaaatactatatctccttgctttgcaaagaagaaattagcgagcttccgaaaaccaactcggccattgggattgacttaggtattaccgacttcgcgattttgtcagatggacagaaaattgataataacaaatttacgtccaaaatggaaaagaaactgaaacgcgaacagcgcaagctgtctcgccgcgccttacttgcgaagaaaaagggtatcccgctgagcgaagcgaaaaattaccagaaacaaaaacgaaaagtagcgcgtctgcatgaaaaagtaatgaatcagaggaccgatttcctgaacaagttaagtaccgaaattatcaaaaaccacgatattatctgtattgaagacctgaacgtgaaaggtatgctgcgtaaccacaaactggcacgcagtattagcgatgtaagctggtctagctttgtggccaagctgcagtacaaagcggactggtatggacgtgaaatcatcaaagtggatcagtggtttccgtcgagccagatttgttcagagtgcggccataaagatggcaagaaatcgttagatatccgcgaatggacctgcccgatttgtcatactcaccacgaccgcgatatcaacgcttccatcaatattctgaccgaaggtctacgcatacaaactctagcataataagaattcctgctgccaccgctgagcaataactagcataaccccttggggcctctaaacgggtcttgaggggttttttgctgaaacctcaggcatttgagaagcacacggtcacactgcttccggtagtcaataaaccggtaaaccagcaatagacataagcggctatttaacgaccctgccctgaaccgacgaccgggtcatcgtggccggatcttgcggcccctcggcttgaacgaattgttagacattatttgccgactaccttggtgatctcgcctttcacgtagtggacaaattcttccaactgatctgcgcgcgaggccaagcgatcttcttcttgtccaagataagcctgtctagcttcaagtatgacgggctgatactgggccggcaggcgctccattgcccagtcggcagcgacatccttcggcgcgattttgccggttactgcgctgtaccaaatgcgggacaacgtaagcactacatttcgctcatcgccagcccagtcgggcggcgagttccatagcgttaaggtttcatttagcgcctcaaatagatcctgttcaggaaccggatcaaagagttcctccgccgctggacctaccaaggcaacgctatgttctcttgcttttgtcagcaagatagccagatcaatgtcgatcgtggctggctcgaagatacctgcaagaatgtcattgcgctgccattctccaaattgcagttcgcgcttagctggataacgccacggaatgatgtcgtcgtgcacaacaatggtgacttctacagcgcggagaatctcgctctctccaggggaagccgaagtttccaaaaggtcgttgatcaaagctcgccgcgttgtttcatcaagccttacggtcaccgtaaccagcaaatcaatatcactgtgtggcttcaggccgccatccactgcggagccgtacaaatgtacggccagcaacgtcggttcgagatggcgctcgatgacgccaactacctctgatagttgagtcgatacttcggcgatcaccgcttccctcatactcttcctttttcaatattattgaagcatttatcagggttattgtctcatgagcggatacatatttgaatgtatttagaaaaataaacaaatagctagctcactcggtcgctacgctccgggcgtgagactgcggcgggcgctgcggacacatacaaagttacccacagattccgtggataagcaggggactaacatgtgaggcaaaacagcagggccgcgccggtggcgtttttccataggctccgccctcctgccagagttcacataaacagacgcttttccggtgcatctgtgggagccgtgaggctcaaccatgaatctgacagtacgggcgaaacccgacaggacttaaagatccccaccgtttccggcgggtcgctccctcttgcgctctcctgttccgaccctgccgtttaccggatacctgttccgcctttctcccttacgggaagtgtggcgctttctcatagctcacacactggtatctcggctcggtgtaggtcgttcgctccaagctgggctgtaagcaagaactccccgttcagcccgactgctgcgccttatccggtaactgttcacttgagtccaacccggaaaagcacggtaaaacgccactggcagcagccattggtaactgggagttcgcagaggatttgtttagctaaacacgcggttgctcttgaagtgtgcgccaaagtccggctacactggaaggacagatttggttgctgtgctctgcgaaagccagttaccacggttaagcagttccccaactgacttaaccttcgatcaaaccacctccccaggtggttttttcgtttacagggcaaaagattacgcgcagaaaaaaaggatctcaagaagatcctttgatcttttctactgaaccgctctagatttcagtgcaatttatctcttcaaatgtagcacctgaagtcagccccatacgatataagttgtaattctcatgttagtcatgccccgcgcccaccggaaggagctgactgggttgaaggctctcaagggcatcggtcgagatcccggtgcctaatgagtgagctaacttacattaattgcgttgcgctcactgcccgctttccagtcgggaaacctgtcgtgccagctgcattaatgaatcggccaacgcgcggggagaggcggtttgcgtattgggcgccagggtggtttttcttttcaccagtgagacgggcaacagctgattgcccttcaccgcctggccctgagagagttgcagcaagcggtccacgctggtttgccccagcaggcgaaaatcctgtttgatggtggttaacggcgggatataacatgagctgtcttcggtatcgtcgtatcccactaccgagatgtccgcaccaacgcgcagcccggactcggtaatggcgcgcattgcgcccagcgccatctgatcgttggcaaccagcatcgcagtgggaacgatgccctcattcagcatttgcatggtttgttgaaaaccggacatggcactccagtcgccttcccgttccgctatcggctgaatttgattgcgagtgagatatttatgccagccagccagacgcagacgcgccgagacagaacttaatgggcccgctaacagcgcgatttgctggtgacccaatgcgaccagatgctccacgcccagtcgcgtaccgtcttcatgggagaaaataatactgttgatgggtgtctggtcagagacatcaagaaataacgccggaacattagtgcaggcagcttccacagcaatggcatcctggtcatccagcggatagttaatgatcagcccactgacgcgttgcgcgagaagattgtgcaccgccgctttacaggcttcgacgccgcttcgttctaccatcgacaccaccacgctggcacccagttgatcggcgcgagatttaatcgccgcgacaatttgcgacggcgcgtgcagggccagactggaggtggcaacgccaatcagcaacgactgtttgcccgccagttgttgtgccacgcggttgggaatgtaattcagctccgccatcgccgcttccactttttcccgcgttttcgcagaaacgtggctggcctggttcaccacgcgggaaacggtctgataagagacaccggcatactctgcgacatcgtataacgttactggtttcacattcaccaccctgaattgactctcttccgggcgctatcatgccataccgcgaaaggttttgcgccattcgatggtg

SEQ ID NO: 1409 - DNA, 4884 bp, synthetic construct
  source 1..4884: mol_type = other DNA
tccgggattgacagctagctcagtcctaggtataatgctagcgtggagatatacctcgaggtgatatcaatgctagtatcaatattttgaccgaaggtctaagaatacaaacattggcttaggtacaatcaaaaaaccgtaggaactacggggatagcttggtaaataagagaaaccgctgttagtgaagaaataagctatcaagtatgctctattcccaagaagctcccacttcaagcgctaagaaccgttaggtttagctaagtggtgagtagttcacagagacccagcgtatctaaaggtctcactcgcggccgcaataatagactagcataaccccttggggcctctaaacgggtcttgaggggttttttgctgaacgtacgttttacggctagctcagtcctaggtactatgctagcgtggagatatacggtaccaaggagatataccatggagcaactcaaagcgtacaagttccgtatctatcctactgaggagcaggaaatcttctttgccaaaacgttcggctgcgttcgtaaggtctacaacttgatgctgaacgaccgaaaaaaagcatatgaagaagtgaaaaatgatcctagcaaaaaaatgacgttccccaccccggcgaaatataagaaagagtttccatttctgaaagaagtcgatagcttagctctggccaatgcccaactgcatctcgacaaggcatacaagaatttttttcgggataaatcggtgggctttccgcgtttcaaaagcaagaaaaacccggttcagagttatacaacgaataatcagaacggcaccatcgccttgatcgatagtaagttcataaaagttcccaaactcaaatcacttgtccggatcaagctgcaccgccaaccaaaagggatgatcaaatcggcgacaatatcacgtcatagcagcggcaaatactatatctccttgctttgcaaagaagaaattagcgagcttccgaaaaccaactcggccattgggattgacttaggtattaccgacttcgcgattttgtcagatggacagaaaattgataataacaaatttacgtccaaaatggaaaagaaactgaaacgcgaacagcgcaagctgtctcgccgcgccttacttgcgaagaaaaagggtatcccgctgagcgaagcgaaaaattaccagaaacaaaaacgaaaagtagcgcgtctgcatgaaaaagtaatgaatcagaggaccgatttcctgaacaagttaagtaccgaaattatcaaaaaccacgatattatctgtattgaagacctgaacgtgaaaggtatgctgcgtaaccacaaactggcacgcagtattagcgatgtaagctggtctagctttgtggccaagctgcagtacaaagcggactggtatggacgtgaaatcatcaaagtggatcagtggtttccgtcgagccagatttgttcagagtgcggccataaagatggcaagaaatcgttagatatccgcgaatggacctgcccgatttgtcatactcaccacgaccgcgatatcaacgcttccatcaatattctgaccgaaggtctacgcatacaaactctagcataataagaattcctgctgccaccgctgagcaataactagcataaccccttggggcctctaaacgggtcttgaggggttttttgctgaaacctcaggcatttgagaagcacacggtcacactgcttccggtagtcaataaaccggtaaaccagcaatagacataagcggctatttaacgaccctgccctgaaccgacgaccgggtcatcgtggccggatcttgcggcccctcggcttgaacgaattgttagacattatttgccgactaccttggtgatctcgcctttcacgtagtggacaaattcttccaactgatctgcgcgcgaggccaagcgatcttcttcttgtccaagataagcctgtctagcttcaagtatgacgggctgatactgggccggcaggcgctccattgcccagtcggcagcgacatccttcggcgcgattttgccggttactgcgctgtaccaaatgcgggacaacgtaagcactacatttcgctcatcgccagcccagtcgggcggcgagttccatagcgttaaggtttcatttagcgcctcaaatagatcctgttcaggaaccggatcaaagagttcctccgccgctggacctaccaaggcaacgctatgttctcttgcttttgtcagcaagatagccagatcaatgtcgatcgtggctggctcgaagatacctgcaagaatgtcattgcgctgccattctccaaattgcagttcgcgcttagctggataacgccacggaatgatgtcgtcgtgcacaacaatggtgacttctacagcgcggagaatctcgctctctccaggggaagccgaagtttccaaaaggtcgttgatcaaagctcgccgcgttgtttcatcaagccttacggtcaccgtaaccagcaaatcaatatcactgtgtggcttcaggccgccatccactgcggagccgtacaaatgtacggccagcaacgtcggttcgagatggcgctcgatgacgccaactacctctgatagttgagtcgatacttcggcgatcaccgcttccctcatactcttcctttttcaatattattgaagcatttatcagggttattgtctcatgagcggatacatatttgaatgtatttagaaaaataaacaaatagctagctcactcggtcgctacgctccgggcgtgagactgcggcgggcgctgcggacacatacaaagttacccacagattccgtggataagcaggggactaacatgtgaggcaaaacagcagggccgcgccggtggcgtttttccataggctccgccctcctgccagagttcacataaacagacgcttttccggtgcatctgtgggagccgtgaggctcaaccatgaatctgacagtacgggcgaaacccgacaggacttaaagatccccaccgtttccggcgggtcgctccctcttgcgctctcctgttccgaccctgccgtttaccggatacctgttccgcctttctcccttacgggaagtgtggcgctttctcatagctcacacactggtatctcggctcggtgtaggtcgttcgctccaagctgggctgtaagcaagaactccccgttcagcccgactgctgcgccttatccggtaactgttcacttgagtccaacccggaaaagcacggtaaaacgccactggcagcagccattggtaactgggagttcgcagaggatttgtttagctaaacacgcggttgctcttgaagtgtgcgccaaagtccggctacactggaaggacagatttggttgctgtgctctgcgaaagccagttaccacggttaagcagttccccaactgacttaaccttcgatcaaaccacctccccaggtggttttttcgtttacagggcaaaagattacgcgcagaaaaaaaggatctcaagaagatcctttgatcttttctactgaaccgctctagatttcagtgcaatttatctcttcaaatgtagcacctgaagtcagccccatacgatataagttgtaattctcatgttagtcatgccccgcgcccaccggaaggagctgactgggttgaaggctctcaagggcatcggtcgagatcccggtgcctaatgagtgagctaacttacattaattgcgttgcgctcactgcccgctttccagtcgggaaacctgtcgtgccagctgcattaatgaatcggccaacgcgcggggagaggcggtttgcgtattgggcgccagggtggtttttcttttcaccagtgagacgggcaacagctgattgcccttcaccgcctggccctgagagagttgcagcaagcggtccacgctggtttgccccagcaggcgaaaatcctgtttgatggtggttaacggcgggatataacatgagctgtcttcggtatcgtcgtatcccactaccgagatgtccgcaccaacgcgcagcccggactcggtaatggcgcgcattgcgcccagcgccatctgatcgttggcaaccagcatcgcagtgggaacgatgccctcattcagcatttgcatggtttgttgaaaaccggacatggcactccagtcgccttcccgttccgctatcggctgaatttgattgcgagtgagatatttatgccagccagccagacgcagacgcgccgagacagaacttaatgggcccgctaacagcgcgatttgctggtgacccaatgcgaccagatgctccacgcccagtcgcgtaccgtcttcatgggagaaaataatactgttgatgggtgtctggtcagagacatcaagaaataacgccggaacattagtgcaggcagcttccacagcaatggcatcctggtcatccagcggatagttaatgatcagcccactgacgcgttgcgcgagaagattgtgcaccgccgctttacaggcttcgacgccgcttcgttctaccatcgacaccaccacgctggcacccagttgatcggcgcgagatttaatcgccgcgacaatttgcgacggcgcgtgcagggccagactggaggtggcaacgccaatcagcaacgactgtttgcccgccagttgttgtgccacgcggttgggaatgtaattcagctccgccatcgccgcttccactttttcccgcgttttcgcagaaacgtggctggcctggttcaccacgcgggaaacggtctgataagagacaccggcatactctgcgacatcgtataacgttactggtttcacattcaccaccctgaattgactctcttccgggcgctatcatgccataccgcgaaaggttttgcgccattcgatggtg

SEQ ID NO: 1410 - DNA, 4771 bp, synthetic construct
  source 1..4771: mol_type = other DNA
tccgggattgacagctagctcagtcctaggtataatgctagcgtggagatatacctcgagatgagatacgaatttgtcaggcagttgatatacaaacaagagtggctgggtggtgaaattattcgccgggagagtaagctcttgtaacggttttttccgtgatgatgttgtactatgtgatgaattttaagcggcagggcatgtcgtttctgcttgtggaggaaggttaattcaacttccgttgaagcaagaatctcttgattgttattgagaatgtcaaggacaagtggttcaccatgcgttgctttatggtatgatagctcgcggccgcaataatagactagcataaccccttggggcctctaaacgggtcttgaggggttttttgctgaacgtacgttttacggctagctcagtcctaggtactatgctagcgtggagatatacggtaccaaggagatataccatggactacaaagaccatgacggtgattataaagatcatgacatcgattacaaggatgacgatgacaagggaggaagcggatccatgattaaaaaacaggcattcaaatttttgcttgaacctaacaaaggtcagttatctgactttttggcctttgctggctcctgtcgttttgtttacaacaaaggccttgctcttcttaacgagaattaccgtgcgggtaaaaaattcataggctacaataagctggcttctgaattggtggaatggaagaatgaagagagcctttcttggttgaaagaagctccgtctcagtgtttacagcaatcgttaagagatttagacagagcattcagaaactttttcaccggcaaatcacaatatccaaagtttaaaaagaaaggtcggcatgattctttccgtataccatgccaaagggttagagtagatcaagaaaaaaaactagtatctctccctaaagtcggctgggtaaagtatcgcaagagccgtgaaatcattggtgatttaaaaaacgcaactatttccctgaatcaggggaaatggtatatcagttttaatacagaacaaacagttcctgaaccaatacacccctctgatatcaaaactacaattatacttaataatgtgaatagcgttcatctgtcatctggggtcggcggtgataacacttaccaagcggaagaaaagaaaaagttagtccgtctcaataaaacactgaccagaagaaagagatacagcaaaaattggctaaaaaccaaaggtaaaatcgatagagtaaaatcaaaggcagcaaggataagactcgataatatccataaggcaaccacggcaatttgtaaaaatcacgctgttgttgaggttgtgaacttgatggattctgtatttgacaagaacgataacactctgagtatgcgttacgaatttgtgcgccagctgatttataaacaagaatggctgggcggtgaaatcattcgccgtgagagcaagcttttataataagaattcctgctgccaccgctgagcaataactagcataaccccttggggcctctaaacgggtcttgaggggttttttgctgaaacctcaggcatttgagaagcacacggtcacactgcttccggtagtcaataaaccggtaaaccagcaatagacataagcggctatttaacgaccctgccctgaaccgacgaccgggtcatcgtggccggatcttgcggcccctcggcttgaacgaattgttagacattatttgccgactaccttggtgatctcgcctttcacgtagtggacaaattcttccaactgatctgcgcgcgaggccaagcgatcttcttcttgtccaagataagcctgtctagcttcaagtatgacgggctgatactgggccggcaggcgctccattgcccagtcggcagcgacatccttcggcgcgattttgccggttactgcgctgtaccaaatgcgggacaacgtaagcactacatttcgctcatcgccagcccagtcgggcggcgagttccatagcgttaaggtttcatttagcgcctcaaatagatcctgttcaggaaccggatcaaagagttcctccgccgctggacctaccaaggcaacgctatgttctcttgcttttgtcagcaagatagccagatcaatgtcgatcgtggctggctcgaagatacctgcaagaatgtcattgcgctgccattctccaaattgcagttcgcgcttagctggataacgccacggaatgatgtcgtcgtgcacaacaatggtgacttctacagcgcggagaatctcgctctctccaggggaagccgaagtttccaaaaggtcgttgatcaaagctcgccgcgttgtttcatcaagccttacggtcaccgtaaccagcaaatcaatatcactgtgtggcttcaggccgccatccactgcggagccgtacaaatgtacggccagcaacgtcggttcgagatggcgctcgatgacgccaactacctctgatagttgagtcgatacttcggcgatcaccgcttccctcatactcttcctttttcaatattattgaagcatttatcagggttattgtctcatgagcggatacatatttgaatgtatttagaaaaataaacaaatagctagctcactcggtcgctacgctccgggcgtgagactgcggcgggcgctgcggacacatacaaagttacccacagattccgtggataagcaggggactaacatgtgaggcaaaacagcagggccgcgccggtggcgtttttccataggctccgccctcctgccagagttcacataaacagacgcttttccggtgcatctgtgggagccgtgaggctcaaccatgaatctgacagtacgggcgaaacccgacaggacttaaagatccccaccgtttccggcgggtcgctccctcttgcgctctcctgttccgaccctgccgtttaccggatacctgttccgcctttctcccttacgggaagtgtggcgctttctcatagctcacacactggtatctcggctcggtgtaggtcgttcgctccaagctgggctgtaagcaagaactccccgttcagcccgactgctgcgccttatccggtaactgttcacttgagtccaacccggaaaagcacggtaaaacgccactggcagcagccattggtaactgggagttcgcagaggatttgtttagctaaacacgcggttgctcttgaagtgtgcgccaaagtccggctacactggaaggacagatttggttgctgtgctctgcgaaagccagttaccacggttaagcagttccccaactgacttaaccttcgatcaaaccacctccccaggtggttttttcgtttacagggcaaaagattacgcgcagaaaaaaaggatctcaagaagatcctttgatcttttctactgaaccgctctagatttcagtgcaatttatctcttcaaatgtagcacctgaagtcagccccatacgatataagttgtaattctcatgttagtcatgccccgcgcccaccggaaggagctgactgggttgaaggctctcaagggcatcggtcgagatcccggtgcctaatgagtgagctaacttacattaattgcgttgcgctcactgcccgctttccagtcgggaaacctgtcgtgccagctgcattaatgaatcggccaacgcgcggggagaggcggtttgcgtattgggcgccagggtggtttttcttttcaccagtgagacgggcaacagctgattgcccttcaccgcctggccctgagagagttgcagcaagcggtccacgctggtttgccccagcaggcgaaaatcctgtttgatggtggttaacggcgggatataacatgagctgtcttcggtatcgtcgtatcccactaccgagatgtccgcaccaacgcgcagcccggactcggtaatggcgcgcattgcgcccagcgccatctgatcgttggcaaccagcatcgcagtgggaacgatgccctcattcagcatttgcatggtttgttgaaaaccggacatggcactccagtcgccttcccgttccgctatcggctgaatttgattgcgagtgagatatttatgccagccagccagacgcagacgcgccgagacagaacttaatgggcccgctaacagcgcgatttgctggtgacccaatgcgaccagatgctccacgcccagtcgcgtaccgtcttcatgggagaaaataatactgttgatgggtgtctggtcagagacatcaagaaataacgccggaacattagtgcaggcagcttccacagcaatggcatcctggtcatccagcggatagttaatgatcagcccactgacgcgttgcgcgagaagattgtgcaccgccgctttacaggcttcgacgccgcttcgttctaccatcgacaccaccacgctggcacccagttgatcggcgcgagatttaatcgccgcgacaatttgcgacggcgcgtgcagggccagactggaggtggcaacgccaatcagcaacgactgtttgcccgccagttgttgtgccacgcggttgggaatgtaattcagctccgccatcgccgcttccactttttcccgcgttttcgcagaaacgtggctggcctggttcaccacgcgggaaacggtctgataagagacaccggcatactctgcgacatcgtataacgttactggtttcacattcaccaccctgaattgactctcttccgggcgctatcatgccataccgcgaaaggttttgcgccattcgatggtg

SEQ ID NO: 1411 - DNA, 4758 bp, synthetic construct
  source 1..4758: mol_type = other DNA
tccgggattgacagctagctcagtcctaggtataatgctagcgtggagatatacctcgagatgagatacgaatttgtcaggcagttgatatacaaacaagagtggctgggtggtgaaattattcgccgggagagtaagctcttgtaacggttttttccgtgatgatgttgtactatgtgatgaattttaagcggcagggcatgtcgtttctgcttgtggaggaaggttaattcaacttccgttgaagcaagaatctcttgattgttattgagaatgtcaaagagacccagcgtatctaaaggtctcactcgcggccgcaataatagactagcataaccccttggggcctctaaacgggtcttgaggggttttttgctgaacgtacgttttacggctagctcagtcctaggtactatgctagcgtggagatatacggtaccaaggagatataccatggactacaaagaccatgacggtgattataaagatcatgacatcgattacaaggatgacgatgacaagggaggaagcggatccatgattaaaaaacaggcattcaaatttttgcttgaacctaacaaaggtcagttatctgactttttggcctttgctggctcctgtcgttttgtttacaacaaaggccttgctcttcttaacgagaattaccgtgcgggtaaaaaattcataggctacaataagctggcttctgaattggtggaatggaagaatgaagagagcctttcttggttgaaagaagctccgtctcagtgtttacagcaatcgttaagagatttagacagagcattcagaaactttttcaccggcaaatcacaatatccaaagtttaaaaagaaaggtcggcatgattctttccgtataccatgccaaagggttagagtagatcaagaaaaaaaactagtatctctccctaaagtcggctgggtaaagtatcgcaagagccgtgaaatcattggtgatttaaaaaacgcaactatttccctgaatcaggggaaatggtatatcagttttaatacagaacaaacagttcctgaaccaatacacccctctgatatcaaaactacaattatacttaataatgtgaatagcgttcatctgtcatctggggtcggcggtgataacacttaccaagcggaagaaaagaaaaagttagtccgtctcaataaaacactgaccagaagaaagagatacagcaaaaattggctaaaaaccaaaggtaaaatcgatagagtaaaatcaaaggcagcaaggataagactcgataatatccataaggcaaccacggcaatttgtaaaaatcacgctgttgttgaggttgtgaacttgatggattctgtatttgacaagaacgataacactctgagtatgcgttacgaatttgtgcgccagctgatttataaacaagaatggctgggcggtgaaatcattcgccgtgagagcaagcttttataataagaattcctgctgccaccgctgagcaataactagcataaccccttggggcctctaaacgggtcttgaggggttttttgctgaaacctcaggcatttgagaagcacacggtcacactgcttccggtagtcaataaaccggtaaaccagcaatagacataagcggctatttaacgaccctgccctgaaccgacgaccgggtcatcgtggccggatcttgcggcccctcggcttgaacgaattgttagacattatttgccgactaccttggtgatctcgcctttcacgtagtggacaaattcttccaactgatctgcgcgcgaggccaagcgatcttcttcttgtccaagataagcctgtctagcttcaagtatgacgggctgatactgggccggcaggcgctccattgcccagtcggcagcgacatccttcggcgcgattttgccggttactgcgctgtaccaaatgcgggacaacgtaagcactacatttcgctcatcgccagcccagtcgggcggcgagttccatagcgttaaggtttcatttagcgcctcaaatagatcctgttcaggaaccggatcaaagagttcctccgccgctggacctaccaaggcaacgctatgttctcttgcttttgtcagcaagatagccagatcaatgtcgatcgtggctggctcgaagatacctgcaagaatgtcattgcgctgccattctccaaattgcagttcgcgcttagctggataacgccacggaatgatgtcgtcgtgcacaacaatggtgacttctacagcgcggagaatctcgctctctccaggggaagccgaagtttccaaaaggtcgttgatcaaagctcgccgcgttgtttcatcaagccttacggtcaccgtaaccagcaaatcaatatcactgtgtggcttcaggccgccatccactgcggagccgtacaaatgtacggccagcaacgtcggttcgagatggcgctcgatgacgccaactacctctgatagttgagtcgatacttcggcgatcaccgcttccctcatactcttcctttttcaatattattgaagcatttatcagggttattgtctcatgagcggatacatatttgaatgtatttagaaaaataaacaaatagctagctcactcggtcgctacgctccgggcgtgagactgcggcgggcgctgcggacacatacaaagttacccacagattccgtggataagcaggggactaacatgtgaggcaaaacagcagggccgcgccggtggcgtttttccataggctccgccctcctgccagagttcacataaacagacgcttttccggtgcatctgtgggagccgtgaggctcaaccatgaatctgacagtacgggcgaaacccgacaggacttaaagatccccaccgtttccggcgggtcgctccctcttgcgctctcctgttccgaccctgccgtttaccggatacctgttccgcctttctcccttacgggaagtgtggcgctttctcatagctcacacactggtatctcggctcggtgtaggtcgttcgctccaagctgggctgtaagcaagaactccccgttcagcccgactgctgcgccttatccggtaactgttcacttgagtccaacccggaaaagcacggtaaaacgccactggcagcagccattggtaactgggagttcgcagaggatttgtttagctaaacacgcggttgctcttgaagtgtgcgccaaagtccggctacactggaaggacagatttggttgctgtgctctgcgaaagccagttaccacggttaagcagttccccaactgacttaaccttcgatcaaaccacctccccaggtggttttttcgtttacagggcaaaagattacgcgcagaaaaaaaggatctcaagaagatcctttgatcttttctactgaaccgctctagatttcagtgcaatttatctcttcaaatgtagcacctgaagtcagccccatacgatataagttgtaattctcatgttagtcatgccccgcgcccaccggaaggagctgactgggttgaaggctctcaagggcatcggtcgagatcccggtgcctaatgagtgagctaacttacattaattgcgttgcgctcactgcccgctttccagtcgggaaacctgtcgtgccagctgcattaatgaatcggccaacgcgcggggagaggcggtttgcgtattgggcgccagggtggtttttcttttcaccagtgagacgggcaacagctgattgcccttcaccgcctggccctgagagagttgcagcaagcggtccacgctggtttgccccagcaggcgaaaatcctgtttgatggtggttaacggcgggatataacatgagctgtcttcggtatcgtcgtatcccactaccgagatgtccgcaccaacgcgcagcccggactcggtaatggcgcgcattgcgcccagcgccatctgatcgttggcaaccagcatcgcagtgggaacgatgccctcattcagcatttgcatggtttgttgaaaaccggacatggcactccagtcgccttcccgttccgctatcggctgaatttgattgcgagtgagatatttatgccagccagccagacgcagacgcgccgagacagaacttaatgggcccgctaacagcgcgatttgctggtgacccaatgcgaccagatgctccacgcccagtcgcgtaccgtcttcatgggagaaaataatactgttgatgggtgtctggtcagagacatcaagaaataacgccggaacattagtgcaggcagcttccacagcaatggcatcctggtcatccagcggatagttaatgatcagcccactgacgcgttgcgcgagaagattgtgcaccgccgctttacaggcttcgacgccgcttcgttctaccatcgacaccaccacgctggcacccagttgatcggcgcgagatttaatcgccgcgacaatttgcgacggcgcgtgcagggccagactggaggtggcaacgccaatcagcaacgactgtttgcccgccagttgttgtgccacgcggttgggaatgtaattcagctccgccatcgccgcttccactttttcccgcgttttcgcagaaacgtggctggcctggttcaccacgcgggaaacggtctgataagagacaccggcatactctgcgacatcgtataacgttactggtttcacattcaccaccctgaattgactctcttccgggcgctatcatgccataccgcgaaaggttttgcgccattcgatggtg

SEQ ID NO: 1412 - DNA, 4896 bp, synthetic construct
  source 1..4896: mol_type = other DNA
tccgggattgacagctagctcagtcctaggtataatgctagcgtggagatatacctcgaggtattgagtcagaggagatcgaaacagagttgtctttttctgaaagtacagaaaattcagagtatcttagaagccaaaaaatcttagaacgtggcttgtctaaacgagaaaccttataaatagaagaactgtagggactacagggatcgcctaggggatagaaaatgtacaccatgtgttgaaccatttatttctaggaagtcacattgggacagtccacagagacccagcgtatctaaaggtctcactcgcggccgcaataatagactagcataaccccttggggcctctaaacgggtcttgaggggttttttgctgaacgtacgttttacggctagctcagtcctaggtactatgctagcgtggagatatacggtaccaaggagatataccatggactacaaagaccatgacggtgattataaagatcatgacatcgattacaaggatgacgatgacaagggaggaagcggatccatgaaggcgctgaaagcgtataaatacagactttatccaaccagcaaacaggaagagttcatccaaaaaaccttctcttgcgttcgcctggtgtataatctgatgttacaggaccgcattgatatctacaaagagatgcgtaaaaatccgcaacaaacttttaaaatgcccacgccggccaaatacaagaagcagtaccctgtcttgcgcgaagtagacagtctggccctagccaatgcacaggtttatctggatcgtgcctttaaaaacttttaccgcgaaaaaggaatgggctttccaaaaaagaaaaagaaagaaaccgtgcattcctacactacgaacaaccagcacggcacggtcaaaattctggataaccgttatctcaaagtgccgaaactcaaatcgctgattaagatgaaggtacaccgccagccgctgggggagataaaatcggtaactattagcatgagcgcgagccacaattattatgtgtccatcttatgcgaagcgccgattgaaacgaaaaccaagcaacagaaaatggtgggaatttgcagcagtcgcgaaaaatttgcgctgatttcgaatggtgaaagcttcgaaaaaagctattgttcaaagcatctcaagcagaaactacgtcaggaagaacgaaaacttaacaagcgtaagatgattgcactggaaaaaggtgtcgatctttcgcaggcgaagaactatcaaaaacaaaaaataaaagtggcaaaaattcgcgaaaaaatagccaaccagcgcaccgatattttaaacaaaatcacaaccgaactggtttcaagttacgatgttatctgcatcgaaaaagcccatcactcaaatgagcggccgcccaaacatgaccgttccgaactggcttggtcgctgttcttggcgaaactgttgtacaaagcacagtggtatggcaaggaactcatctgtatcgagtcagaggaaattgaaacagagctgtctttcagcgaaagtaccgaaaacagcgagtaccttcgcagccagaaaatcttagaacgtggtctttctaaaagggaaaccctgtaataagaattcctgctgccaccgctgagcaataactagcataaccccttggggcctctaaacgggtcttgaggggttttttgctgaaacctcaggcatttgagaagcacacggtcacactgcttccggtagtcaataaaccggtaaaccagcaatagacataagcggctatttaacgaccctgccctgaaccgacgaccgggtcatcgtggccggatcttgcggcccctcggcttgaacgaattgttagacattatttgccgactaccttggtgatctcgcctttcacgtagtggacaaattcttccaactgatctgcgcgcgaggccaagcgatcttcttcttgtccaagataagcctgtctagcttcaagtatgacgggctgatactgggccggcaggcgctccattgcccagtcggcagcgacatccttcggcgcgattttgccggttactgcgctgtaccaaatgcgggacaacgtaagcactacatttcgctcatcgccagcccagtcgggcggcgagttccatagcgttaaggtttcatttagcgcctcaaatagatcctgttcaggaaccggatcaaagagttcctccgccgctggacctaccaaggcaacgctatgttctcttgcttttgtcagcaagatagccagatcaatgtcgatcgtggctggctcgaagatacctgcaagaatgtcattgcgctgccattctccaaattgcagttcgcgcttagctggataacgccacggaatgatgtcgtcgtgcacaacaatggtgacttctacagcgcggagaatctcgctctctccaggggaagccgaagtttccaaaaggtcgttgatcaaagctcgccgcgttgtttcatcaagccttacggtcaccgtaaccagcaaatcaatatcactgtgtggcttcaggccgccatccactgcggagccgtacaaatgtacggccagcaacgtcggttcgagatggcgctcgatgacgccaactacctctgatagttgagtcgatacttcggcgatcaccgcttccctcatactcttcctttttcaatattattgaagcatttatcagggttattgtctcatgagcggatacatatttgaatgtatttagaaaaataaacaaatagctagctcactcggtcgctacgctccgggcgtgagactgcggcgggcgctgcggacacatacaaagttacccacagattccgtggataagcaggggactaacatgtgaggcaaaacagcagggccgcgccggtggcgtttttccataggctccgccctcctgccagagttcacataaacagacgcttttccggtgcatctgtgggagccgtgaggctcaaccatgaatctgacagtacgggcgaaacccgacaggacttaaagatccccaccgtttccggcgggtcgctccctcttgcgctctcctgttccgaccctgccgtttaccggatacctgttccgcctttctcccttacgggaagtgtggcgctttctcatagctcacacactggtatctcggctcggtgtaggtcgttcgctccaagctgggctgtaagcaagaactccccgttcagcccgactgctgcgccttatccggtaactgttcacttgagtccaacccggaaaagcacggtaaaacgccactggcagcagccattggtaactgggagttcgcagaggatttgtttagctaaacacgcggttgctcttgaagtgtgcgccaaagtccggctacactggaaggacagatttggttgctgtgctctgcgaaagccagttaccacggttaagcagttccccaactgacttaaccttcgatcaaaccacctccccaggtggttttttcgtttacagggcaaaagattacgcgcagaaaaaaaggatctcaagaagatcctttgatcttttctactgaaccgctctagatttcagtgcaatttatctcttcaaatgtagcacctgaagtcagccccatacgatataagttgtaattctcatgttagtcatgccccgcgcccaccggaaggagctgactgggttgaaggctctcaagggcatcggtcgagatcccggtgcctaatgagtgagctaacttacattaattgcgttgcgctcactgcccgctttccagtcgggaaacctgtcgtgccagctgcattaatgaatcggccaacgcgcggggagaggcggtttgcgtattgggcgccagggtggtttttcttttcaccagtgagacgggcaacagctgattgcccttcaccgcctggccctgagagagttgcagcaagcggtccacgctggtttgccccagcaggcgaaaatcctgtttgatggtggttaacggcgggatataacatgagctgtcttcggtatcgtcgtatcccactaccgagatgtccgcaccaacgcgcagcccggactcggtaatggcgcgcattgcgcccagcgccatctgatcgttggcaaccagcatcgcagtgggaacgatgccctcattcagcatttgcatggtttgttgaaaaccggacatggcactccagtcgccttcccgttccgctatcggctgaatttgattgcgagtgagatatttatgccagccagccagacgcagacgcgccgagacagaacttaatgggcccgctaacagcgcgatttgctggtgacccaatgcgaccagatgctccacgcccagtcgcgtaccgtcttcatgggagaaaataatactgttgatgggtgtctggtcagagacatcaagaaataacgccggaacattagtgcaggcagcttccacagcaatggcatcctggtcatccagcggatagttaatgatcagcccactgacgcgttgcgcgagaagattgtgcaccgccgctttacaggcttcgacgccgcttcgttctaccatcgacaccaccacgctggcacccagttgatcggcgcgagatttaatcgccgcgacaatttgcgacggcgcgtgcagggccagactggaggtggcaacgccaatcagcaacgactgtttgcccgccagttgttgtgccacgcggttgggaatgtaattcagctccgccatcgccgcttccactttttcccgcgttttcgcagaaacgtggctggcctggttcaccacgcgggaaacggtctgataagagacaccggcatactctgcgacatcgtataacgttactggtttcacattcaccaccctgaattgactctcttccgggcgctatcatgccataccgcgaaaggttttgcgccattcgatggtg

SEQ ID NO: 1413 - DNA, 4963 bp, synthetic construct
  source 1..4963: mol_type = other DNA
tccgggattgacagctagctcagtcctaggtataatgctagcgtggagatatacctcgagcgccagtcacaaagtcaattcgagtgccttgaatgtggatatacagcgaatgctgatatcaacggggcacgtaacattttagcggcaggacatgccgtgcttgcctgtggagggagggtgcagtcaggccgcccgtcgaagcaggaacccgccgaggtaattcagacatcagtctgaacgcagtagggatccacgtcctttagggcgtggaggatgtcaaggacaagtggttcaccatgcgttgctttatggtatgatagctcgcggccgcaataatagactagcataaccccttggggcctctaaacgggtcttgaggggttttttgctgaacgtacgttttacggctagctcagtcctaggtactatgctagcgtggagatatacggtaccaaggagatataccatgaaacgtctacaagcctttaagttccagttaagacccaatggccagcaggagcgtgagatgcgccgctttgcaggcgcgtgtcgttttgttttcaatcgtgcattagcgcgtcagaatgagaattacgaagcggggaataaatacattccctataccaaaatggcttcatggctcattgagtggaaaagcgacactgagacccagtggttgaaggaagccccgtcacagccgctgcaacagagcctgaaagacttggaacgtgcgtacaaaaactttttccagaagcgtaccgcgtttcctcggttcaagaaacgcggtaaaaatgatgcttttcgctatccgcagggcgtgaaactcgatcaatccaatagccgtatctcactgccaaagttgggttggatgcgctaccgcaacagccgtgaagtcgtgggagaagtgcgcaacgtcacggtcagccagtcatgcggtaaatggtacgtgagcattcagactgaatctgaagcgacagaaccgcaacatgaatccaccagcatagttggcctagatgccggcgttaccaagctggccacgctgtcggatggtacggtatatccgccggtcagcagttttaaagtgaaccagcgaaaactggcaaggcttcaacggaaactgagccgtaaaatcacgttcagtgccaactggcaaaaacagaagcgcaaaattcaacgtctgcatactcatattgccaatatccgcaaagactatctgcacaaagtgaccagcgaaatcagcaaaaaccacgcgatgattgttattgaggacttaaaggtgagtaacatgagcaaatcggcaaaaggtacgaccgaacgccctggacggaacgtaaaagctaaatctggtttaaaccgcgcgattctcgaacagggctggtatgaaatgcgccgccagctggaatacaaacagctgtggcgagggggtcaggtactggcaataccaccggcctatacctcccagaagtgcgcgtgctgtggccataccgcaaaagaaaaccgccagtcgcaaagtcagttcgagtgcctcgaatgtggttacacggccaatgcggacatcaacggtgcccgtaacattttagctgctggccatgccgtgctggcgtgcggtggacgcgttcagtcaggcagaccgagcaaacaagaaccggccgaagtgatccagaccagcgtctaataagaattcctgctgccaccgctgagcaataactagcataaccccttggggcctctaaacgggtcttgaggggttttttgctgaaacctcaggcatttgagaagcacacggtcacactgcttccggtagtcaataaaccggtaaaccagcaatagacataagcggctatttaacgaccctgccctgaaccgacgaccgggtcatcgtggccggatcttgcggcccctcggcttgaacgaattgttagacattatttgccgactaccttggtgatctcgcctttcacgtagtggacaaattcttccaactgatctgcgcgcgaggccaagcgatcttcttcttgtccaagataagcctgtctagcttcaagtatgacgggctgatactgggccggcaggcgctccattgcccagtcggcagcgacatccttcggcgcgattttgccggttactgcgctgtaccaaatgcgggacaacgtaagcactacatttcgctcatcgccagcccagtcgggcggcgagttccatagcgttaaggtttcatttagcgcctcaaatagatcctgttcaggaaccggatcaaagagttcctccgccgctggacctaccaaggcaacgctatgttctcttgcttttgtcagcaagatagccagatcaatgtcgatcgtggctggctcgaagatacctgcaagaatgtcattgcgctgccattctccaaattgcagttcgcgcttagctggataacgccacggaatgatgtcgtcgtgcacaacaatggtgacttctacagcgcggagaatctcgctctctccaggggaagccgaagtttccaaaaggtcgttgatcaaagctcgccgcgttgtttcatcaagccttacggtcaccgtaaccagcaaatcaatatcactgtgtggcttcaggccgccatccactgcggagccgtacaaatgtacggccagcaacgtcggttcgagatggcgctcgatgacgccaactacctctgatagttgagtcgatacttcggcgatcaccgcttccctcatactcttcctttttcaatattattgaagcatttatcagggttattgtctcatgagcggatacatatttgaatgtatttagaaaaataaacaaatagctagctcactcggtcgctacgctccgggcgtgagactgcggcgggcgctgcggacacatacaaagttacccacagattccgtggataagcaggggactaacatgtgaggcaaaacagcagggccgcgccggtggcgtttttccataggctccgccctcctgccagagttcacataaacagacgcttttccggtgcatctgtgggagccgtgaggctcaaccatgaatctgacagtacgggcgaaacccgacaggacttaaagatccccaccgtttccggcgggtcgctccctcttgcgctctcctgttccgaccctgccgtttaccggatacctgttccgcctttctcccttacgggaagtgtggcgctttctcatagctcacacactggtatctcggctcggtgtaggtcgttcgctccaagctgggctgtaagcaagaactccccgttcagcccgactgctgcgccttatccggtaactgttcacttgagtccaacccggaaaagcacggtaaaacgccactggcagcagccattggtaactgggagttcgcagaggatttgtttagctaaacacgcggttgctcttgaagtgtgcgccaaagtccggctacactggaaggacagatttggttgctgtgctctgcgaaagccagttaccacggttaagcagttccccaactgacttaaccttcgatcaaaccacctccccaggtggttttttcgtttacagggcaaaagattacgcgcagaaaaaaaggatctcaagaagatcctttgatcttttctactgaaccgctctagatttcagtgcaatttatctcttcaaatgtagcacctgaagtcagccccatacgatataagttgtaattctcatgttagtcatgccccgcgcccaccggaaggagctgactgggttgaaggctctcaagggcatcggtcgagatcccggtgcctaatgagtgagctaacttacattaattgcgttgcgctcactgcccgctttccagtcgggaaacctgtcgtgccagctgcattaatgaatcggccaacgcgcggggagaggcggtttgcgtattgggcgccagggtggtttttcttttcaccagtgagacgggcaacagctgattgcccttcaccgcctggccctgagagagttgcagcaagcggtccacgctggtttgccccagcaggcgaaaatcctgtttgatggtggttaacggcgggatataacatgagctgtcttcggtatcgtcgtatcccactaccgagatgtccgcaccaacgcgcagcccggactcggtaatggcgcgcattgcgcccagcgccatctgatcgttggcaaccagcatcgcagtgggaacgatgccctcattcagcatttgcatggtttgttgaaaaccggacatggcactccagtcgccttcccgttccgctatcggctgaatttgattgcgagtgagatatttatgccagccagccagacgcagacgcgccgagacagaacttaatgggcccgctaacagcgcgatttgctggtgacccaatgcgaccagatgctccacgcccagtcgcgtaccgtcttcatgggagaaaataatactgttgatgggtgtctggtcagagacatcaagaaataacgccggaacattagtgcaggcagcttccacagcaatggcatcctggtcatccagcggatagttaatgatcagcccactgacgcgttgcgcgagaagattgtgcaccgccgctttacaggcttcgacgccgcttcgttctaccatcgacaccaccacgctggcacccagttgatcggcgcgagatttaatcgccgcgacaatttgcgacggcgcgtgcagggccagactggaggtggcaacgccaatcagcaacgactgtttgcccgccagttgttgtgccacgcggttgggaatgtaattcagctccgccatcgccgcttccactttttcccgcgttttcgcagaaacgtggctggcctggttcaccacgcgggaaacggtctgataagagacaccggcatactctgcgacatcgtataacgttactggtttcacattcaccaccctgaattgactctcttccgggcgctatcatgccataccgcgaaaggttttgcgccattcgatggtg

SEQ ID NO: 1414 - DNA, 4981 bp, synthetic construct
  source 1..4981: mol_type = other DNA
tccgggattgacagctagctcagtcctaggtataatgctagcgtggagatatacctcgagaagtcaattcagatgccaggtatgtggatatacagcgaacgccgatgtaaatggcgctcgtaacattttagcggcggggcacgccgtacttgcctgtggagggacgatgcagtcagaccgcccgttgaagcaggaaccagacgctgagcaatcagccgtcacccactaatgggaatccccctcctgagtcacgaagtgcgaaggtgggggaggatgtcaaggacaagtggttcaccatgcgttgctttatggtatgatagctcgcggccgcaataatagactagcataaccccttggggcctctaaacgggtcttgaggggttttttgctgaacgtacgttttacggctagctcagtcctaggtactatgctagcgtggagatatacggtaccaaggagatataccatgctaatcttaaaagcctacaaattcaggttagaaccaacgcccgaacagtcgcagcgtttgcggcagctgtgcggttgcgcccgttttgtttggaatctcggtcttgcggagacaaaacgcatactggactccggcgaaaaactgccgtcggcgttcgagttgaaccggatgatcaccgtgtggaaaaaaatgccggaatacatcttcctgcaggatgcctataccgacaatctgcaacaaaagctgaaagatctgcataccgcatggaaacgttgttttgataaaaaactcgcagcgaaggccccggtttggaaacgaaaaaatgagggccgcgacagtatccgttttgtgaactttgaaaaatattgctgccttgaaaatcgccgcgtgaagctaccgtccggcctggggtgggtgaaattccggcaatctcaacgtgtgaacggcaaaatcaaaaatgcgaccatcagtcagttagcgggacagtggtatatctcgtttcaggttgaaattgaaacggcagaacccaatcacactagcacaacgatcgtcggtctggatgccggcgtggctaaactcgccacgctgtctgatggcaccgtttttgaacctgtaaatagttttcagaaaaaccagaagaagctggcgagacttcaacgacaactgagccgcaaggtcaaattcagcaacaactggcagaagcagaaacgcaaaatacagtgtctgcatagccgtatcgcaaatatccgccgcgactacctgcataaagtcactaccaccgtgagcaaaaaccacgcaatgatagtcattgaggatctgaaggtcagcaacatgagcaagagcgcagcgggtaccgtgagccagccggggcgcaatgttcgcgcaaaatcaggcttgaaccgttcgatactggatcagggctggtatgaaatgcgccgccagcttgagtacaaacagctctggcgtggcggtcaggtgttagctgttccgccagcgtacacaagccagcgttgcgcgtgctgtggtcatactgcgaaagaaaaccgcctgtcacaatcccaattccgttgccaggtttgtggttataccgcgaacgccgatgttaatggcgcccgtaacattttagctgcgggccacgccgtactggcctgtgggggaacgatgcaatccgaccgcccattgaagcaggaacctgatgccgagcaatcagccgtgacccactaataagaattcctgctgccaccgctgagcaataactagcataaccccttggggcctctaaacgggtcttgaggggttttttgctgaaacctcaggcatttgagaagcacacggtcacactgcttccggtagtcaataaaccggtaaaccagcaatagacataagcggctatttaacgaccctgccctgaaccgacgaccgggtcatcgtggccggatcttgcggcccctcggcttgaacgaattgttagacattatttgccgactaccttggtgatctcgcctttcacgtagtggacaaattcttccaactgatctgcgcgcgaggccaagcgatcttcttcttgtccaagataagcctgtctagcttcaagtatgacgggctgatactgggccggcaggcgctccattgcccagtcggcagcgacatccttcggcgcgattttgccggttactgcgctgtaccaaatgcgggacaacgtaagcactacatttcgctcatcgccagcccagtcgggcggcgagttccatagcgttaaggtttcatttagcgcctcaaatagatcctgttcaggaaccggatcaaagagttcctccgccgctggacctaccaaggcaacgctatgttctcttgcttttgtcagcaagatagccagatcaatgtcgatcgtggctggctcgaagatacctgcaagaatgtcattgcgctgccattctccaaattgcagttcgcgcttagctggataacgccacggaatgatgtcgtcgtgcacaacaatggtgacttctacagcgcggagaatctcgctctctccaggggaagccgaagtttccaaaaggtcgttgatcaaagctcgccgcgttgtttcatcaagccttacggtcaccgtaaccagcaaatcaatatcactgtgtggcttcaggccgccatccactgcggagccgtacaaatgtacggccagcaacgtcggttcgagatggcgctcgatgacgccaactacctctgatagttgagtcgatacttcggcgatcaccgcttccctcatactcttcctttttcaatattattgaagcatttatcagggttattgtctcatgagcggatacatatttgaatgtatttagaaaaataaacaaatagctagctcactcggtcgctacgctccgggcgtgagactgcggcgggcgctgcggacacatacaaagttacccacagattccgtggataagcaggggactaacatgtgaggcaaaacagcagggccgcgccggtggcgtttttccataggctccgccctcctgccagagttcacataaacagacgcttttccggtgcatctgtgggagccgtgaggctcaaccatgaatctgacagtacgggcgaaacccgacaggacttaaagatccccaccgtttccggcgggtcgctccctcttgcgctctcctgttccgaccctgccgtttaccggatacctgttccgcctttctcccttacgggaagtgtggcgctttctcatagctcacacactggtatctcggctcggtgtaggtcgttcgctccaagctgggctgtaagcaagaactccccgttcagcccgactgctgcgccttatccggtaactgttcacttgagtccaacccggaaaagcacggtaaaacgccactggcagcagccattggtaactgggagttcgcagaggatttgtttagctaaacacgcggttgctcttgaagtgtgcgccaaagtccggctacactggaaggacagatttggttgctgtgctctgcgaaagccagttaccacggttaagcagttccccaactgacttaaccttcgatcaaaccacctccccaggtggttttttcgtttacagggcaaaagattacgcgcagaaaaaaaggatctcaagaagatcctttgatcttttctactgaaccgctctagatttcagtgcaatttatctcttcaaatgtagcacctgaagtcagccccatacgatataagttgtaattctcatgttagtcatgccccgcgcccaccggaaggagctgactgggttgaaggctctcaagggcatcggtcgagatcccggtgcctaatgagtgagctaacttacattaattgcgttgcgctcactgcccgctttccagtcgggaaacctgtcgtgccagctgcattaatgaatcggccaacgcgcggggagaggcggtttgcgtattgggcgccagggtggtttttcttttcaccagtgagacgggcaacagctgattgcccttcaccgcctggccctgagagagttgcagcaagcggtccacgctggtttgccccagcaggcgaaaatcctgtttgatggtggttaacggcgggatataacatgagctgtcttcggtatcgtcgtatcccactaccgagatgtccgcaccaacgcgcagcccggactcggtaatggcgcgcattgcgcccagcgccatctgatcgttggcaaccagcatcgcagtgggaacgatgccctcattcagcatttgcatggtttgttgaaaaccggacatggcactccagtcgccttcccgttccgctatcggctgaatttgattgcgagtgagatatttatgccagccagccagacgcagacgcgccgagacagaacttaatgggcccgctaacagcgcgatttgctggtgacccaatgcgaccagatgctccacgcccagtcgcgtaccgtcttcatgggagaaaataatactgttgatgggtgtctggtcagagacatcaagaaataacgccggaacattagtgcaggcagcttccacagcaatggcatcctggtcatccagcggatagttaatgatcagcccactgacgcgttgcgcgagaagattgtgcaccgccgctttacaggcttcgacgccgcttcgttctaccatcgacaccaccacgctggcacccagttgatcggcgcgagatttaatcgccgcgacaatttgcgacggcgcgtgcagggccagactggaggtggcaacgccaatcagcaacgactgtttgcccgccagttgttgtgccacgcggttgggaatgtaattcagctccgccatcgccgcttccactttttcccgcgttttcgcagaaacgtggctggcctggttcaccacgcgggaaacggtctgataagagacaccggcatactctgcgacatcgtataacgttactggtttcacattcaccaccctgaattgactctcttccgggcgctatcatgccataccgcgaaaggttttgcgccattcgatggtg

SEQ ID NO: 1415 - DNA, 4918 bp, synthetic construct
  source 1..4918: mol_type = other DNA
tccgggattgacagctagctcagtcctaggtataatgctagcgtggagatatacctcgaggcaggcgcaattctcctgcatcgaatgcggcttcgaggaaaacgccgatgtagtcggcgcgatcaatgttttggcgcggggacaccgcgttgcagcctgtggagaggcggcgcagtaaggcccctctatgaagcaggaacccgctgaggcggtctggaataggcatcatcgtttcagacgcggtaggaatccccggcattcaggcaggggaggatgtcaaggacaagtggttcaccatgcgttgctttatggtatgatagctcgcggccgcaataatagactagcataaccccttggggcctctaaacgggtcttgaggggttttttgctgaacgtacgttttacggctagctcagtcctaggtactatgctagcgtggagatatacggtaccaaggagatataccatgcagcgactccaagcctttaaattcgaactgatgccgagcggcgaacagcagcgccagatgcgccgctatgctggttcgtgccgcttcgtctacaacaaggcgttggcgctgcagaaagaaaactacgatgcaggcggcaaatttattggctacgtggcgatggcaaagtatctgaccgcgtggcgtaatgagccggagacgccgtggttaaaagactcacccgtgcatacactacagcatgcgttaaaagacatggaacgagcgtataagaactttttcgccaaacgtgcagcgtttccaaaatttaaaaaaaaggggcagcgcgatagctttcgctaccccgatccgaaacaaatcaagctggatcaggataacagccgtattttcttgccgaaactggggtggctgcgctatcgcaatagccgtgatgtgcttggtgctgtgcgcaacgcgaccgtgtcccagtcgagtggtaaatggtttgtctcgattcagaccgaacgcgaagtcgaacaacctataccacaggccacgagcgctatcggtatcgatgtgggtatcgcgcgttttgccactatgagcgatggcacgtacttcgctccgttaaatagttttaaacgtcacgaaactcgtctgcgtagagcacagcgagcgatgtcacgtaaaactaagttcagcagtaactggaagaaagccaaagcccgcatccagcacatccatgcccgtatcggcaacgcccgcagggactatctgcacaaagccaccaccaccatcagccaaaaccatgcaatggtatgtatcgaagacctgcaggttcgtaatatgtccaaatctgcagcaggcaataccgaaacgccgggtaagaatgttcgggccaaatccgggctgaacaaatcgatcctcgaccaaggatggttcgagtttcgccgccaactagactacaaactggcgtggaacggcggctggcttatcgcagtgccgcctgcgaatacaagccgtacctgtccggtatgcggttgcgtgaacgcggaaaatcggctcacccaggcgcaattttcatgcatcgaatgcggattcgaggaaaacgcagatgtcgtcggagcgataaatgttcttgcgcggggtcaccgcgtcgccgcatgtggagaggcagcccagtaataagaattcctgctgccaccgctgagcaataactagcataaccccttggggcctctaaacgggtcttgaggggttttttgctgaaacctcaggcatttgagaagcacacggtcacactgcttccggtagtcaataaaccggtaaaccagcaatagacataagcggctatttaacgaccctgccctgaaccgacgaccgggtcatcgtggccggatcttgcggcccctcggcttgaacgaattgttagacattatttgccgactaccttggtgatctcgcctttcacgtagtggacaaattcttccaactgatctgcgcgcgaggccaagcgatcttcttcttgtccaagataagcctgtctagcttcaagtatgacgggctgatactgggccggcaggcgctccattgcccagtcggcagcgacatccttcggcgcgattttgccggttactgcgctgtaccaaatgcgggacaacgtaagcactacatttcgctcatcgccagcccagtcgggcggcgagttccatagcgttaaggtttcatttagcgcctcaaatagatcctgttcaggaaccggatcaaagagttcctccgccgctggacctaccaaggcaacgctatgttctcttgcttttgtcagcaagatagccagatcaatgtcgatcgtggctggctcgaagatacctgcaagaatgtcattgcgctgccattctccaaattgcagttcgcgcttagctggataacgccacggaatgatgtcgtcgtgcacaacaatggtgacttctacagcgcggagaatctcgctctctccaggggaagccgaagtttccaaaaggtcgttgatcaaagctcgccgcgttgtttcatcaagccttacggtcaccgtaaccagcaaatcaatatcactgtgtggcttcaggccgccatccactgcggagccgtacaaatgtacggccagcaacgtcggttcgagatggcgctcgatgacgccaactacctctgatagttgagtcgatacttcggcgatcaccgcttccctcatactcttcctttttcaatattattgaagcatttatcagggttattgtctcatgagcggatacatatttgaatgtatttagaaaaataaacaaatagctagctcactcggtcgctacgctccgggcgtgagactgcggcgggcgctgcggacacatacaaagttacccacagattccgtggataagcaggggactaacatgtgaggcaaaacagcagggccgcgccggtggcgtttttccataggctccgccctcctgccagagttcacataaacagacgcttttccggtgcatctgtgggagccgtgaggctcaaccatgaatctgacagtacgggcgaaacccgacaggacttaaagatccccaccgtttccggcgggtcgctccctcttgcgctctcctgttccgaccctgccgtttaccggatacctgttccgcctttctcccttacgggaagtgtggcgctttctcatagctcacacactggtatctcggctcggtgtaggtcgttcgctccaagctgggctgtaagcaagaactccccgttcagcccgactgctgcgccttatccggtaactgttcacttgagtccaacccggaaaagcacggtaaaacgccactggcagcagccattggtaactgggagttcgcagaggatttgtttagctaaacacgcggttgctcttgaagtgtgcgccaaagtccggctacactggaaggacagatttggttgctgtgctctgcgaaagccagttaccacggttaagcagttccccaactgacttaaccttcgatcaaaccacctccccaggtggttttttcgtttacagggcaaaagattacgcgcagaaaaaaaggatctcaagaagatcctttgatcttttctactgaaccgctctagatttcagtgcaatttatctcttcaaatgtagcacctgaagtcagccccatacgatataagttgtaattctcatgttagtcatgccccgcgcccaccggaaggagctgactgggttgaaggctctcaagggcatcggtcgagatcccggtgcctaatgagtgagctaacttacattaattgcgttgcgctcactgcccgctttccagtcgggaaacctgtcgtgccagctgcattaatgaatcggccaacgcgcggggagaggcggtttgcgtattgggcgccagggtggtttttcttttcaccagtgagacgggcaacagctgattgcccttcaccgcctggccctgagagagttgcagcaagcggtccacgctggtttgccccagcaggcgaaaatcctgtttgatggtggttaacggcgggatataacatgagctgtcttcggtatcgtcgtatcccactaccgagatgtccgcaccaacgcgcagcccggactcggtaatggcgcgcattgcgcccagcgccatctgatcgttggcaaccagcatcgcagtgggaacgatgccctcattcagcatttgcatggtttgttgaaaaccggacatggcactccagtcgccttcccgttccgctatcggctgaatttgattgcgagtgagatatttatgccagccagccagacgcagacgcgccgagacagaacttaatgggcccgctaacagcgcgatttgctggtgacccaatgcgaccagatgctccacgcccagtcgcgtaccgtcttcatgggagaaaataatactgttgatgggtgtctggtcagagacatcaagaaataacgccggaacattagtgcaggcagcttccacagcaatggcatcctggtcatccagcggatagttaatgatcagcccactgacgcgttgcgcgagaagattgtgcaccgccgctttacaggcttcgacgccgcttcgttctaccatcgacaccaccacgctggcacccagttgatcggcgcgagatttaatcgccgcgacaatttgcgacggcgcgtgcagggccagactggaggtggcaacgccaatcagcaacgactgtttgcccgccagttgttgtgccacgcggttgggaatgtaattcagctccgccatcgccgcttccactttttcccgcgttttcgcagaaacgtggctggcctggttcaccacgcgggaaacggtctgataagagacaccggcatactctgcgacatcgtataacgttactggtttcacattcaccaccctgaattgactctcttccgggcgctatcatgccataccgcgaaaggttttgcgccattcgatggtg

SEQ ID NO: 1416 - DNA, 5167 bp, synthetic construct
  source 1..5167: mol_type = other DNA
tccgggattgacagctagctcagtcctaggtataatgctagcgtggagatatacctcgaggaatataaattttcgtagattttcttgcaaaatcttactggcacagcaacttgtgtcattagtttggggcgatttggcgtagatatctttgccgatagaagcttgcttcttgagcgaggatatcgcagtctcatccaaacatattggtgctagtaacaaataagtgatgagcttatttgtgaagtcaccatgccattcactttagtgaatggtagttgacggacaagtggttcaccatgcgttgctttatggtatgatagctcgcggccgcaataatagactagcataaccccttggggcctctaaacgggtcttgaggggttttttgctgaacgtacgttttacggctagctcagtcctaggtactatgctagcgtggagatatacggtaccaaggagatataccatgctgttcgcaaaggaggtgaaaataatgcgcaaaaccgaaatgaaatacatgcttggtttaaaaatgagagcctttcccaaccacaaacaaaagaagatcattaaaaaaaatactgatgcgtctcgctttgtctataatcagctgctggcgaatagctataccgatagtgcaattcatcgtaacaagctggacaaaaaatacccaattcctaaatacacagtacgcttcaaccgaatcaagaagtgttttattgtgcaccagaattggcgctacaacaaaaaaggtaccttgataaccaaatcaactaagcgtaaaaccggcttagaccgtatcaccgcagataagtatccgtggttaggggataaggatctagatagtctgaccgcctacaatgctcagataaactatcagtcagcatggaaaacgttccgccaggttcatgatgcgggggtgccgaaattcaagcgcaagtccgcgtctaagcaaagctatagtaccaactgccagtatgtgggactagacaagaaacacggcgaagtgcccaacctgttcaacggtacagttcgttttttaaagcagaatccgcatggctactgtcatattaagctgcctaaactgggcaaaattaaagtttatctatccaaagaactgccaaaagctaaggaaatccgcattgcccgcgttacgatttcagttcacagcagcggggagtactatatctcaatgcttatcaaatcgaatgatccgttggcgagcttgtatccaaaaacaggctcggcgctgggttacgacttaaacatcaaaaacttcctcatagatacgaacggcaatgaagtagcgaacccgaaatattatcggcgtatgcgcgacaaactggcaaaagagcagcgcatcttgagccgtcggtgccgccgagccaaaaagaccaaacataaactgagcgaatgcaaaaactaccagaagcaaaaactcaaagtcgcgcaactctaccgccgtatatacaggcagcgtaatgcttttctgcataatctgtcgactgcacttatcaaaaaccacgatctcgtagtcggagaaaatctgaaaagccgcaacatgcttaaaaatcacgccctggccatgagcatctccgatgtgggctggcgcacgtttatcggtatgctggaatataaagccccgcttcacggcaaaacctttgtcctggtgaatccggcgtacaccacccaaacttgttatgactgcaaattcgtgatgggtaaaaaaggcacgaaaaaactcacgctgcagatgcgtgagtgggattgtccgaattgcaacgcgcatcatatccgtgactacaacgccgcgaaaaatatcctgggcaaaggatatatggccttaaaaattccggattatgaatacaaattttcgtaataagaattcctgctgccaccgctgagcaataactagcataaccccttggggcctctaaacgggtcttgaggggttttttgctgaaacctcaggcatttgagaagcacacggtcacactgcttccggtagtcaataaaccggtaaaccagcaatagacataagcggctatttaacgaccctgccctgaaccgacgaccgggtcatcgtggccggatcttgcggcccctcggcttgaacgaattgttagacattatttgccgactaccttggtgatctcgcctttcacgtagtggacaaattcttccaactgatctgcgcgcgaggccaagcgatcttcttcttgtccaagataagcctgtctagcttcaagtatgacgggctgatactgggccggcaggcgctccattgcccagtcggcagcgacatccttcggcgcgattttgccggttactgcgctgtaccaaatgcgggacaacgtaagcactacatttcgctcatcgccagcccagtcgggcggcgagttccatagcgttaaggtttcatttagcgcctcaaatagatcctgttcaggaaccggatcaaagagttcctccgccgctggacctaccaaggcaacgctatgttctcttgcttttgtcagcaagatagccagatcaatgtcgatcgtggctggctcgaagatacctgcaagaatgtcattgcgctgccattctccaaattgcagttcgcgcttagctggataacgccacggaatgatgtcgtcgtgcacaacaatggtgacttctacagcgcggagaatctcgctctctccaggggaagccgaagtttccaaaaggtcgttgatcaaagctcgccgcgttgtttcatcaagccttacggtcaccgtaaccagcaaatcaatatcactgtgtggcttcaggccgccatccactgcggagccgtacaaatgtacggccagcaacgtcggttcgagatggcgctcgatgacgccaactacctctgatagttgagtcgatacttcggcgatcaccgcttccctcatactcttcctttttcaatattattgaagcatttatcagggttattgtctcatgagcggatacatatttgaatgtatttagaaaaataaacaaatagctagctcactcggtcgctacgctccgggcgtgagactgcggcgggcgctgcggacacatacaaagttacccacagattccgtggataagcaggggactaacatgtgaggcaaaacagcagggccgcgccggtggcgtttttccataggctccgccctcctgccagagttcacataaacagacgcttttccggtgcatctgtgggagccgtgaggctcaaccatgaatctgacagtacgggcgaaacccgacaggacttaaagatccccaccgtttccggcgggtcgctccctcttgcgctctcctgttccgaccctgccgtttaccggatacctgttccgcctttctcccttacgggaagtgtggcgctttctcatagctcacacactggtatctcggctcggtgtaggtcgttcgctccaagctgggctgtaagcaagaactccccgttcagcccgactgctgcgccttatccggtaactgttcacttgagtccaacccggaaaagcacggtaaaacgccactggcagcagccattggtaactgggagttcgcagaggatttgtttagctaaacacgcggttgctcttgaagtgtgcgccaaagtccggctacactggaaggacagatttggttgctgtgctctgcgaaagccagttaccacggttaagcagttccccaactgacttaaccttcgatcaaaccacctccccaggtggttttttcgtttacagggcaaaagattacgcgcagaaaaaaaggatctcaagaagatcctttgatcttttctactgaaccgctctagatttcagtgcaatttatctcttcaaatgtagcacctgaagtcagccccatacgatataagttgtaattctcatgttagtcatgccccgcgcccaccggaaggagctgactgggttgaaggctctcaagggcatcggtcgagatcccggtgcctaatgagtgagctaacttacattaattgcgttgcgctcactgcccgctttccagtcgggaaacctgtcgtgccagctgcattaatgaatcggccaacgcgcggggagaggcggtttgcgtattgggcgccagggtggtttttcttttcaccagtgagacgggcaacagctgattgcccttcaccgcctggccctgagagagttgcagcaagcggtccacgctggtttgccccagcaggcgaaaatcctgtttgatggtggttaacggcgggatataacatgagctgtcttcggtatcgtcgtatcccactaccgagatgtccgcaccaacgcgcagcccggactcggtaatggcgcgcattgcgcccagcgccatctgatcgttggcaaccagcatcgcagtgggaacgatgccctcattcagcatttgcatggtttgttgaaaaccggacatggcactccagtcgccttcccgttccgctatcggctgaatttgattgcgagtgagatatttatgccagccagccagacgcagacgcgccgagacagaacttaatgggcccgctaacagcgcgatttgctggtgacccaatgcgaccagatgctccacgcccagtcgcgtaccgtcttcatgggagaaaataatactgttgatgggtgtctggtcagagacatcaagaaataacgccggaacattagtgcaggcagcttccacagcaatggcatcctggtcatccagcggatagttaatgatcagcccactgacgcgttgcgcgagaagattgtgcaccgccgctttacaggcttcgacgccgcttcgttctaccatcgacaccaccacgctggcacccagttgatcggcgcgagatttaatcgccgcgacaatttgcgacggcgcgtgcagggccagactggaggtggcaacgccaatcagcaacgactgtttgcccgccagttgttgtgccacgcggttgggaatgtaattcagctccgccatcgccgcttccactttttcccgcgttttcgcagaaacgtggctggcctggttcaccacgcgggaaacggtctgataagagacaccggcatactctgcgacatcgtataacgttactggtttcacattcaccaccctgaattgactctcttccgggcgctatcatgccataccgcgaaaggttttgcgccattcgatggtg

SEQ ID NO: 1417 - DNA, 4906 bp, synthetic construct
  source 1..4906: mol_type = other DNA
tccgggattgacagctagctcagtcctaggtataatgctagcgtggagatatacctcgagctcaccacgaccgcgatatcaacgcagcgatcaatatcctgaacgaaggacgcaaaagagtcgcagcatctaagacataaaaaagaaccgccggaacggcggggatagcctgctcagataatttggccgctaccagtcatttggacgtgactggcaagccttgtattcgcaggaagcccccacttcaaacgctctaaagcgttaagtggaagcagttcacggacaagtggttcaccatgcgttgctttatggtatgatagctcgcggccgcaataatagactagcataaccccttggggcctctaaacgggtcttgaggggttttttgctgaacgtacgttttacggctagctcagtcctaggtactatgctagcgtggagatatacggtaccaaggagatataccatgatacagaaaaaagcctacacgtttcgtctgtatccaaccaaagaacaggtcaccttcttccatcagtgtatgggctctgcccgctttctgtataatgcgatgctaggcgagtttcaaagccgccggaaagcgggcgttccgccctttccactcccgaaggtgaccgactacaaaaaatcgtttccgtggatgaaagccgtggatagtctcgcactctgtaatgctcatcgcaacttagtgcaagccttcatcaaccatcgcgatcatccggaacactttggtttgccgatgttcaaaaagaagggcacatttccgtggacgtatacgaccaataatcagaaaggcaccatcaccatcgtaggtaataaaatcaaactgcctcgtctgaagcgcttagtgccaatccatctgcaccgacaggtaaaaggtgtcatcaagcatgcgactgtttccagacaggcaaatggtcagtactctatcgccattttggtcgaggaagatgtgaaagagcttcctaaaacaggcaaatcggtgggggttgaccttggtctacttgattttgcggcgctgtcaaacaggaataagattcctaacccgcattttagcaagcccttcgaacgtcgtcttcgtcgggaaaaacgcaagttgtcgcgtcgcatagtaaaagcgaaaaccctggtgcaaaaagatccgaacaaaaactggcgagactgcagtaacttggaaaagcaacgcctgaaagtggccaaactctatgcgaaagtgaataaccgcaaaaccgacttcctgcacaagcgttcaaccgagctggtaaaaagccacgatctgctggttgttgaagatctgccggtcaagcgcttagttaaaaaccatcacttagcaaaatcaattcatgacgtgagttggagccgctttacggacatgctgaagtataaaagcaaatggtacgggaaagcgttcattaaaattgatcgtttctttgcctccagccagatttgcagcgcttgtggacacaaagatggcaagaaagccctggcgatccgtgaatgggattgcccgcagtgcggcactcaccacgaccgcgatattaacgccgccatcaatattctgaacgaaggccgcaaacgtgtcgcagcaagcaaaacttaataagaattcctgctgccaccgctgagcaataactagcataaccccttggggcctctaaacgggtcttgaggggttttttgctgaaacctcaggcatttgagaagcacacggtcacactgcttccggtagtcaataaaccggtaaaccagcaatagacataagcggctatttaacgaccctgccctgaaccgacgaccgggtcatcgtggccggatcttgcggcccctcggcttgaacgaattgttagacattatttgccgactaccttggtgatctcgcctttcacgtagtggacaaattcttccaactgatctgcgcgcgaggccaagcgatcttcttcttgtccaagataagcctgtctagcttcaagtatgacgggctgatactgggccggcaggcgctccattgcccagtcggcagcgacatccttcggcgcgattttgccggttactgcgctgtaccaaatgcgggacaacgtaagcactacatttcgctcatcgccagcccagtcgggcggcgagttccatagcgttaaggtttcatttagcgcctcaaatagatcctgttcaggaaccggatcaaagagttcctccgccgctggacctaccaaggcaacgctatgttctcttgcttttgtcagcaagatagccagatcaatgtcgatcgtggctggctcgaagatacctgcaagaatgtcattgcgctgccattctccaaattgcagttcgcgcttagctggataacgccacggaatgatgtcgtcgtgcacaacaatggtgacttctacagcgcggagaatctcgctctctccaggggaagccgaagtttccaaaaggtcgttgatcaaagctcgccgcgttgtttcatcaagccttacggtcaccgtaaccagcaaatcaatatcactgtgtggcttcaggccgccatccactgcggagccgtacaaatgtacggccagcaacgtcggttcgagatggcgctcgatgacgccaactacctctgatagttgagtcgatacttcggcgatcaccgcttccctcatactcttcctttttcaatattattgaagcatttatcagggttattgtctcatgagcggatacatatttgaatgtatttagaaaaataaacaaatagctagctcactcggtcgctacgctccgggcgtgagactgcggcgggcgctgcggacacatacaaagttacccacagattccgtggataagcaggggactaacatgtgaggcaaaacagcagggccgcgccggtggcgtttttccataggctccgccctcctgccagagttcacataaacagacgcttttccggtgcatctgtgggagccgtgaggctcaaccatgaatctgacagtacgggcgaaacccgacaggacttaaagatccccaccgtttccggcgggtcgctccctcttgcgctctcctgttccgaccctgccgtttaccggatacctgttccgcctttctcccttacgggaagtgtggcgctttctcatagctcacacactggtatctcggctcggtgtaggtcgttcgctccaagctgggctgtaagcaagaactccccgttcagcccgactgctgcgccttatccggtaactgttcacttgagtccaacccggaaaagcacggtaaaacgccactggcagcagccattggtaactgggagttcgcagaggatttgtttagctaaacacgcggttgctcttgaagtgtgcgccaaagtccggctacactggaaggacagatttggttgctgtgctctgcgaaagccagttaccacggttaagcagttccccaactgacttaaccttcgatcaaaccacctccccaggtggttttttcgtttacagggcaaaagattacgcgcagaaaaaaaggatctcaagaagatcctttgatcttttctactgaaccgctctagatttcagtgcaatttatctcttcaaatgtagcacctgaagtcagccccatacgatataagttgtaattctcatgttagtcatgccccgcgcccaccggaaggagctgactgggttgaaggctctcaagggcatcggtcgagatcccggtgcctaatgagtgagctaacttacattaattgcgttgcgctcactgcccgctttccagtcgggaaacctgtcgtgccagctgcattaatgaatcggccaacgcgcggggagaggcggtttgcgtattgggcgccagggtggtttttcttttcaccagtgagacgggcaacagctgattgcccttcaccgcctggccctgagagagttgcagcaagcggtccacgctggtttgccccagcaggcgaaaatcctgtttgatggtggttaacggcgggatataacatgagctgtcttcggtatcgtcgtatcccactaccgagatgtccgcaccaacgcgcagcccggactcggtaatggcgcgcattgcgcccagcgccatctgatcgttggcaaccagcatcgcagtgggaacgatgccctcattcagcatttgcatggtttgttgaaaaccggacatggcactccagtcgccttcccgttccgctatcggctgaatttgattgcgagtgagatatttatgccagccagccagacgcagacgcgccgagacagaacttaatgggcccgctaacagcgcgatttgctggtgacccaatgcgaccagatgctccacgcccagtcgcgtaccgtcttcatgggagaaaataatactgttgatgggtgtctggtcagagacatcaagaaataacgccggaacattagtgcaggcagcttccacagcaatggcatcctggtcatccagcggatagttaatgatcagcccactgacgcgttgcgcgagaagattgtgcaccgccgctttacaggcttcgacgccgcttcgttctaccatcgacaccaccacgctggcacccagttgatcggcgcgagatttaatcgccgcgacaatttgcgacggcgcgtgcagggccagactggaggtggcaacgccaatcagcaacgactgtttgcccgccagttgttgtgccacgcggttgggaatgtaattcagctccgccatcgccgcttccactttttcccgcgttttcgcagaaacgtggctggcctggttcaccacgcgggaaacggtctgataagagacaccggcatactctgcgacatcgtataacgttactggtttcacattcaccaccctgaattgactctcttccgggcgctatcatgccataccgcgaaaggttttgcgccattcgatggtg

SEQ ID NO: 1418 - DNA, 4915 bp, synthetic construct
  source 1..4915: mol_type = other DNA
tccgggattgacagctagctcagtcctaggtataatgctagcgtggagatatacctcgagtggacatgcgagaactgtggtgttcatcatgatagagatatcaatgccagtattaacattctaaatcgtggacttgccacgttaacctaagtaaaaaatattaggcttggaacaagccgtggtaaaagagtctgacctctgattaaggtatgggtattgtccctcctaactaagtcagatgttcccagaaactcggtactttagtgccgatgtagttcatggacaagtggttcaccatgcgttgctttatggtatgatagctcgcggccgcaataatagactagcataaccccttggggcctctaaacgggtcttgaggggttttttgctgaacgtacgttttacggctagctcagtcctaggtactatgctagcgtggagatatacggtaccaaggagatataccatgctgcaaggtattaaactccgcctgtaccccaactataaacagcagttactgttgaagcagatgtttggaaatagccgtttcctgcacaacaaaatgttggatatgatgaacgagcggtataagaacaatccgttcctgccgacgctgaattgggtagccttgaataacctcttacccctggttaaacaggaacacccgcacctaaaagacagtgatagttctagcttacaagtggataatcaaatcctgattcagagctggaagaacttcttttccaatccgaaacattttggtaaaccgaagtttaaatcgcgtcgtcatcctcgccagtcctatacgggcaagtcggccactattaaagtgattgctcagcgctacgtgaagcttccgaaactgggcgtcatcaagacctcgaaaaccggctgcgtggaaggtaccatcaaacgctacacagtatcacttgaaccgagcgggaaatactacctgagcctgcaggttgaagccccggataaggactacctcccgaaaaccggtaaagcggtaggccttgatctgggtgtgagcgatctggccatcttgtcagatggccataagtttcctaaattcactgcacgctatgacgaaaaccaggtcatacagtggcagtgtaaatttagccgtcgcaggcaccaggcgaaagtgcaggtggcgatcgatcacaataaaggcgtcctgattccacgtgagttagaagacttctctaactggcaacgagcgcgtcaagttaaagcacgttatcaagagcgcgtcgccaataaacgcaaggactacctgcacaaactgacgagctatctggttaaaacctatgatcttatcgtgattgaagacttaaagaccaaaaacctgatgaaaaaccatcatctggcgaaatcaatcgccaatgcatcatggcacgaatttaaacggttgttagagtacaaatgtgagtggtatgggaagcagctcatagtagtgccagcgcaccataccagccaggaatgctcgaactgccatcataactccggcaaaaaaccactccatattcgcgaatggacatgcgaaaactgtggcgttcatcacgatcgcgatatcaatgcaagtattaacatccttaatcgaggacttgcgacgctgacctaataagaattcctgctgccaccgctgagcaataactagcataaccccttggggcctctaaacgggtcttgaggggttttttgctgaaacctcaggcatttgagaagcacacggtcacactgcttccggtagtcaataaaccggtaaaccagcaatagacataagcggctatttaacgaccctgccctgaaccgacgaccgggtcatcgtggccggatcttgcggcccctcggcttgaacgaattgttagacattatttgccgactaccttggtgatctcgcctttcacgtagtggacaaattcttccaactgatctgcgcgcgaggccaagcgatcttcttcttgtccaagataagcctgtctagcttcaagtatgacgggctgatactgggccggcaggcgctccattgcccagtcggcagcgacatccttcggcgcgattttgccggttactgcgctgtaccaaatgcgggacaacgtaagcactacatttcgctcatcgccagcccagtcgggcggcgagttccatagcgttaaggtttcatttagcgcctcaaatagatcctgttcaggaaccggatcaaagagttcctccgccgctggacctaccaaggcaacgctatgttctcttgcttttgtcagcaagatagccagatcaatgtcgatcgtggctggctcgaagatacctgcaagaatgtcattgcgctgccattctccaaattgcagttcgcgcttagctggataacgccacggaatgatgtcgtcgtgcacaacaatggtgacttctacagcgcggagaatctcgctctctccaggggaagccgaagtttccaaaaggtcgttgatcaaagctcgccgcgttgtttcatcaagccttacggtcaccgtaaccagcaaatcaatatcactgtgtggcttcaggccgccatccactgcggagccgtacaaatgtacggccagcaacgtcggttcgagatggcgctcgatgacgccaactacctctgatagttgagtcgatacttcggcgatcaccgcttccctcatactcttcctttttcaatattattgaagcatttatcagggttattgtctcatgagcggatacatatttgaatgtatttagaaaaataaacaaatagctagctcactcggtcgctacgctccgggcgtgagactgcggcgggcgctgcggacacatacaaagttacccacagattccgtggataagcaggggactaacatgtgaggcaaaacagcagggccgcgccggtggcgtttttccataggctccgccctcctgccagagttcacataaacagacgcttttccggtgcatctgtgggagccgtgaggctcaaccatgaatctgacagtacgggcgaaacccgacaggacttaaagatccccaccgtttccggcgggtcgctccctcttgcgctctcctgttccgaccctgccgtttaccggatacctgttccgcctttctcccttacgggaagtgtggcgctttctcatagctcacacactggtatctcggctcggtgtaggtcgttcgctccaagctgggctgtaagcaagaactccccgttcagcccgactgctgcgccttatccggtaactgttcacttgagtccaacccggaaaagcacggtaaaacgccactggcagcagccattggtaactgggagttcgcagaggatttgtttagctaaacacgcggttgctcttgaagtgtgcgccaaagtccggctacactggaaggacagatttggttgctgtgctctgcgaaagccagttaccacggttaagcagttccccaactgacttaaccttcgatcaaaccacctccccaggtggttttttcgtttacagggcaaaagattacgcgcagaaaaaaaggatctcaagaagatcctttgatcttttctactgaaccgctctagatttcagtgcaatttatctcttcaaatgtagcacctgaagtcagccccatacgatataagttgtaattctcatgttagtcatgccccgcgcccaccggaaggagctgactgggttgaaggctctcaagggcatcggtcgagatcccggtgcctaatgagtgagctaacttacattaattgcgttgcgctcactgcccgctttccagtcgggaaacctgtcgtgccagctgcattaatgaatcggccaacgcgcggggagaggcggtttgcgtattgggcgccagggtggtttttcttttcaccagtgagacgggcaacagctgattgcccttcaccgcctggccctgagagagttgcagcaagcggtccacgctggtttgccccagcaggcgaaaatcctgtttgatggtggttaacggcgggatataacatgagctgtcttcggtatcgtcgtatcccactaccgagatgtccgcaccaacgcgcagcccggactcggtaatggcgcgcattgcgcccagcgccatctgatcgttggcaaccagcatcgcagtgggaacgatgccctcattcagcatttgcatggtttgttgaaaaccggacatggcactccagtcgccttcccgttccgctatcggctgaatttgattgcgagtgagatatttatgccagccagccagacgcagacgcgccgagacagaacttaatgggcccgctaacagcgcgatttgctggtgacccaatgcgaccagatgctccacgcccagtcgcgtaccgtcttcatgggagaaaataatactgttgatgggtgtctggtcagagacatcaagaaataacgccggaacattagtgcaggcagcttccacagcaatggcatcctggtcatccagcggatagttaatgatcagcccactgacgcgttgcgcgagaagattgtgcaccgccgctttacaggcttcgacgccgcttcgttctaccatcgacaccaccacgctggcacccagttgatcggcgcgagatttaatcgccgcgacaatttgcgacggcgcgtgcagggccagactggaggtggcaacgccaatcagcaacgactgtttgcccgccagttgttgtgccacgcggttgggaatgtaattcagctccgccatcgccgcttccactttttcccgcgttttcgcagaaacgtggctggcctggttcaccacgcgggaaacggtctgataagagacaccggcatactctgcgacatcgtataacgttactggtttcacattcaccaccctgaattgactctcttccgggcgctatcatgccataccgcgaaaggttttgcgccattcgatggtg

SEQ ID NO: 1419 - DNA, 1957 bp, synthetic construct
  source 1..1957: mol_type = other DNA
tttgtttatttttctaaatacattcaaatatgtatccgctcatgagacaataaccctgataaatgcttcaataatattgaaaaaggaagagtatgagccatattcaacgggaaacgtcttgctctaggccgcgattaaattccaacatggatgctgatttatatgggtataaatgggctcgcgataatgtcgggcaatcaggtgcgacaatctatcgattgtatgggaagcccgatgcgccagagttgtttctgaaacatggcaaaggtagcgttgccaatgatgttacagatgagatggtcagactaaactggctgacggaatttatgcctcttccgaccatcaagcattttatccgtactcctgatgatgcatggttactcaccactgcgatccccgggaaaacagcattccaggtattagaagaatatcctgattcaggtgaaaatattgttgatgcgctggcagtgttcctgcgccggttgcattcgattcctgtttgtaattgtccttttaacagcgaccgcgtatttcgtctcgctcaggcgcaatcacgaatgaataacggtttggttgatgcgagtgattttgatgacgagcgtaatggctggcctgttgaacaagtctggaaagaaatgcataaacttttgccattctcaccggattcagtcgtcactcatggtgatttctcacttgataaccttatttttgacgaggggaaattaataggttgtattgatgttggacgagtcggaatcgcagaccgataccaggatcttgccatcctatggaactgcctcggtgagttttctccttcattacagaaacggctttttcaaaaatatggtattgataatcctgatatgaataaattgcagtttcatttgatgctcgatgagtttttctaagaattaattcatgagcggatacatatttgaatgtatttagaaaaataaacaaataggggttccgcgcacatttccccgaaaagtgccacttgcggagacccggtcgtcagcttgtcgtcggttcagggcagggtcgttaaatagccgcttatgtctattgctggtttaccggtttttatggacaagtggttcaccatgcgttgctttatggtatgataggttagctcactcattaggcaccgggatctcgaccgatgcccttgagagccttcaacccagtcagctccttccggtgggcgcggggcatgactaacatgagaattacaacttatatcgtatggggctgacttcaggtgctacatttgaagagataaattgcactgaaatctagagtgatggtgtcgggaatccgtaaaggatcttcttgagatccttttacgatcgtcgtaatctcctgctctgtaaacgaaaaaaccgcctggggaggcggtttgatcgaaggttaagtcagttggggaactgcttaacctggtaactggctttagtggagcgcagataccaaatactgtcctttcagtgtagcctctgttaggccaccacttcaagactctcgatatctaaatccactaattctcagttaccaatggctgctgccagtggcgttttgtcgtgtctttccgggttggactcaagatgatagttaccggataaggcgcagcagtcgggctgaacggggggttcttgcacacagcccagcttggagcgaactgtctacacggaacgggacgtggtgatttgggtaaagcctccaccacaacacggacgccgcaggacgggaacaggagagcgcaagagggagccatcagggggaaacgcctggtatctttatagtcctgtcgggtttcgccaccactgatttgagcgtcagatttcgtgatgttcgtcaggggggcggagcctatggaaaaacggcttcgctccggccttattgtctctctgctaagtatcctcctggcatcttctaggacgtttctgcgctagcatgccta

SEQ ID NO: 1420 - DNA, 1957 bp, synthetic construct
  source 1..1957: mol_type = other DNA
tttgtttatttttctaaatacattcaaatatgtatccgctcatgagacaataaccctgataaatgcttcaataatattgaaaaaggaagagtatgagccatattcaacgggaaacgtcttgctctaggccgcgattaaattccaacatggatgctgatttatatgggtataaatgggctcgcgataatgtcgggcaatcaggtgcgacaatctatcgattgtatgggaagcccgatgcgccagagttgtttctgaaacatggcaaaggtagcgttgccaatgatgttacagatgagatggtcagactaaactggctgacggaatttatgcctcttccgaccatcaagcattttatccgtactcctgatgatgcatggttactcaccactgcgatccccgggaaaacagcattccaggtattagaagaatatcctgattcaggtgaaaatattgttgatgcgctggcagtgttcctgcgccggttgcattcgattcctgtttgtaattgtccttttaacagcgaccgcgtatttcgtctcgctcaggcgcaatcacgaatgaataacggtttggttgatgcgagtgattttgatgacgagcgtaatggctggcctgttgaacaagtctggaaagaaatgcataaacttttgccattctcaccggattcagtcgtcactcatggtgatttctcacttgataaccttatttttgacgaggggaaattaataggttgtattgatgttggacgagtcggaatcgcagaccgataccaggatcttgccatcctatggaactgcctcggtgagttttctccttcattacagaaacggctttttcaaaaatatggtattgataatcctgatatgaataaattgcagtttcatttgatgctcgatgagtttttctaagaattaattcatgagcggatacatatttgaatgtatttagaaaaataaacaaataggggttccgcgcacatttccccgaaaagtgccacttgcggagacccggtcgtcagcttgtcgtcggttcagggcagggtcgttaaatagccgcttatgtctattgctggtttaccggttcttatggacaagtggttcaccatgcgttgctttatggtatgataggttagctcactcattaggcaccgggatctcgaccgatgcccttgagagccttcaacccagtcagctccttccggtgggcgcggggcatgactaacatgagaattacaacttatatcgtatggggctgacttcaggtgctacatttgaagagataaattgcactgaaatctagagtgatggtgtcgggaatccgtaaaggatcttcttgagatccttttacgatcgtcgtaatctcctgctctgtaaacgaaaaaaccgcctggggaggcggtttgatcgaaggttaagtcagttggggaactgcttaacctggtaactggctttagtggagcgcagataccaaatactgtcctttcagtgtagcctctgttaggccaccacttcaagactctcgatatctaaatccactaattctcagttaccaatggctgctgccagtggcgttttgtcgtgtctttccgggttggactcaagatgatagttaccggataaggcgcagcagtcgggctgaacggggggttcttgcacacagcccagcttggagcgaactgtctacacggaacgggacgtggtgatttgggtaaagcctccaccacaacacggacgccgcaggacgggaacaggagagcgcaagagggagccatcagggggaaacgcctggtatctttatagtcctgtcgggtttcgccaccactgatttgagcgtcagatttcgtgatgttcgtcaggggggcggagcctatggaaaaacggcttcgctccggccttattgtctctctgctaagtatcctcctggcatcttctaggacgtttctgcgctagcatgccta

SEQ ID NO: 1421 - DNA, 1957 bp, synthetic construct
  source 1..1957: mol_type = other DNA
tttgtttatttttctaaatacattcaaatatgtatccgctcatgagacaataaccctgataaatgcttcaataatattgaaaaaggaagagtatgagccatattcaacgggaaacgtcttgctctaggccgcgattaaattccaacatggatgctgatttatatgggtataaatgggctcgcgataatgtcgggcaatcaggtgcgacaatctatcgattgtatgggaagcccgatgcgccagagttgtttctgaaacatggcaaaggtagcgttgccaatgatgttacagatgagatggtcagactaaactggctgacggaatttatgcctcttccgaccatcaagcattttatccgtactcctgatgatgcatggttactcaccactgcgatccccgggaaaacagcattccaggtattagaagaatatcctgattcaggtgaaaatattgttgatgcgctggcagtgttcctgcgccggttgcattcgattcctgtttgtaattgtccttttaacagcgaccgcgtatttcgtctcgctcaggcgcaatcacgaatgaataacggtttggttgatgcgagtgattttgatgacgagcgtaatggctggcctgttgaacaagtctggaaagaaatgcataaacttttgccattctcaccggattcagtcgtcactcatggtgatttctcacttgataaccttatttttgacgaggggaaattaataggttgtattgatgttggacgagtcggaatcgcagaccgataccaggatcttgccatcctatggaactgcctcggtgagttttctccttcattacagaaacggctttttcaaaaatatggtattgataatcctgatatgaataaattgcagtttcatttgatgctcgatgagtttttctaagaattaattcatgagcggatacatatttgaatgtatttagaaaaataaacaaataggggttccgcgcacatttccccgaaaagtgccacttgcggagacccggtcgtcagcttgtcgtcggttcagggcagggtcgttaaatagccgcttatgtctattgctggtttaccggtttttaaggacaagtggttcaccatgcgttgctttatggtatgataggttagctcactcattaggcaccgggatctcgaccgatgcccttgagagccttcaacccagtcagctccttccggtgggcgcggggcatgactaacatgagaattacaacttatatcgtatggggctgacttcaggtgctacatttgaagagataaattgcactgaaatctagagtgatggtgtcgggaatccgtaaaggatcttcttgagatccttttacgatcgtcgtaatctcctgctctgtaaacgaaaaaaccgcctggggaggcggtttgatcgaaggttaagtcagttggggaactgcttaacctggtaactggctttagtggagcgcagataccaaatactgtcctttcagtgtagcctctgttaggccaccacttcaagactctcgatatctaaatccactaattctcagttaccaatggctgctgccagtggcgttttgtcgtgtctttccgggttggactcaagatgatagttaccggataaggcgcagcagtcgggctgaacggggggttcttgcacacagcccagcttggagcgaactgtctacacggaacgggacgtggtgatttgggtaaagcctccaccacaacacggacgccgcaggacgggaacaggagagcgcaagagggagccatcagggggaaacgcctggtatctttatagtcctgtcgggtttcgccaccactgatttgagcgtcagatttcgtgatgttcgtcaggggggcggagcctatggaaaaacggcttcgctccggccttattgtctctctgctaagtatcctcctggcatcttctaggacgtttctgcgctagcatgccta

SEQ ID NO: 1422 - DNA, 1937 bp, synthetic construct
  source 1..1937: mol_type = other DNA
tttgtttatttttctaaatacattcaaatatgtatccgctcatgagacaataaccctgataaatgcttcaataatattgaaaaaggaagagtatgagccatattcaacgggaaacgtcttgctctaggccgcgattaaattccaacatggatgctgatttatatgggtataaatgggctcgcgataatgtcgggcaatcaggtgcgacaatctatcgattgtatgggaagcccgatgcgccagagttgtttctgaaacatggcaaaggtagcgttgccaatgatgttacagatgagatggtcagactaaactggctgacggaatttatgcctcttccgaccatcaagcattttatccgtactcctgatgatgcatggttactcaccactgcgatccccgggaaaacagcattccaggtattagaagaatatcctgattcaggtgaaaatattgttgatgcgctggcagtgttcctgcgccggttgcattcgattcctgtttgtaattgtccttttaacagcgaccgcgtatttcgtctcgctcaggcgcaatcacgaatgaataacggtttggttgatgcgagtgattttgatgacgagcgtaatggctggcctgttgaacaagtctggaaagaaatgcataaacttttgccattctcaccggattcagtcgtcactcatggtgatttctcacttgataaccttatttttgacgaggggaaattaataggttgtattgatgttggacgagtcggaatcgcagaccgataccaggatcttgccatcctatggaactgcctcggtgagttttctccttcattacagaaacggctttttcaaaaatatggtattgataatcctgatatgaataaattgcagtttcatttgatgctcgatgagtttttctaagaattaattcatgagcggatacatatttgaatgtatttagaaaaataaacaaataggggttccgcgcacatttccccgaaaagtgccacttgcggagacccggtcgtcagcttgtcgtcggttcagggcagggtcgttaaatagccgcttatgtctattgctggtttaccggttgttatcgtctggtccaaaccaacctgttagctcactcattaggcaccgggatctcgaccgatgcccttgagagccttcaacccagtcagctccttccggtgggcgcggggcatgactaacatgagaattacaacttatatcgtatggggctgacttcaggtgctacatttgaagagataaattgcactgaaatctagagtgatggtgtcgggaatccgtaaaggatcttcttgagatccttttacgatcgtcgtaatctcctgctctgtaaacgaaaaaaccgcctggggaggcggtttgatcgaaggttaagtcagttggggaactgcttaacctggtaactggctttagtggagcgcagataccaaatactgtcctttcagtgtagcctctgttaggccaccacttcaagactctcgatatctaaatccactaattctcagttaccaatggctgctgccagtggcgttttgtcgtgtctttccgggttggactcaagatgatagttaccggataaggcgcagcagtcgggctgaacggggggttcttgcacacagcccagcttggagcgaactgtctacacggaacgggacgtggtgatttgggtaaagcctccaccacaacacggacgccgcaggacgggaacaggagagcgcaagagggagccatcagggggaaacgcctggtatctttatagtcctgtcgggtttcgccaccactgatttgagcgtcagatttcgtgatgttcgtcaggggggcggagcctatggaaaaacggcttcgctccggccttattgtctctctgctaagtatcctcctggcatcttctaggacgtttctgcgctagcatgccta

SEQ ID NO: 1423 - DNA, 1957 bp, synthetic construct
  source 1..1957: mol_type = other DNA
tttgtttatttttctaaatacattcaaatatgtatccgctcatgagacaataaccctgataaatgcttcaataatattgaaaaaggaagagtatgagccatattcaacgggaaacgtcttgctctaggccgcgattaaattccaacatggatgctgatttatatgggtataaatgggctcgcgataatgtcgggcaatcaggtgcgacaatctatcgattgtatgggaagcccgatgcgccagagttgtttctgaaacatggcaaaggtagcgttgccaatgatgttacagatgagatggtcagactaaactggctgacggaatttatgcctcttccgaccatcaagcattttatccgtactcctgatgatgcatggttactcaccactgcgatccccgggaaaacagcattccaggtattagaagaatatcctgattcaggtgaaaatattgttgatgcgctggcagtgttcctgcgccggttgcattcgattcctgtttgtaattgtccttttaacagcgaccgcgtatttcgtctcgctcaggcgcaatcacgaatgaataacggtttggttgatgcgagtgattttgatgacgagcgtaatggctggcctgttgaacaagtctggaaagaaatgcataaacttttgccattctcaccggattcagtcgtcactcatggtgatttctcacttgataaccttatttttgacgaggggaaattaataggttgtattgatgttggacgagtcggaatcgcagaccgataccaggatcttgccatcctatggaactgcctcggtgagttttctccttcattacagaaacggctttttcaaaaatatggtattgataatcctgatatgaataaattgcagtttcatttgatgctcgatgagtttttctaagaattaattcatgagcggatacatatttgaatgtatttagaaaaataaacaaataggggttccgcgcacatttccccgaaaagtgccacttgcggagacccggtcgtcagcttgtcgtcggttcagggcagggtcgttaaatagccgcttatgtctattgctggtttaccggtttccatggacaagtggttcaccatgcgttgctttatggtatgataggttagctcactcattaggcaccgggatctcgaccgatgcccttgagagccttcaacccagtcagctccttccggtgggcgcggggcatgactaacatgagaattacaacttatatcgtatggggctgacttcaggtgctacatttgaagagataaattgcactgaaatctagagtgatggtgtcgggaatccgtaaaggatcttcttgagatccttttacgatcgtcgtaatctcctgctctgtaaacgaaaaaaccgcctggggaggcggtttgatcgaaggttaagtcagttggggaactgcttaacctggtaactggctttagtggagcgcagataccaaatactgtcctttcagtgtagcctctgttaggccaccacttcaagactctcgatatctaaatccactaattctcagttaccaatggctgctgccagtggcgttttgtcgtgtctttccgggttggactcaagatgatagttaccggataaggcgcagcagtcgggctgaacggggggttcttgcacacagcccagcttggagcgaactgtctacacggaacgggacgtggtgatttgggtaaagcctccaccacaacacggacgccgcaggacgggaacaggagagcgcaagagggagccatcagggggaaacgcctggtatctttatagtcctgtcgggtttcgccaccactgatttgagcgtcagatttcgtgatgttcgtcaggggggcggagcctatggaaaaacggcttcgctccggccttattgtctctctgctaagtatcctcctggcatcttctaggacgtttctgcgctagcatgccta

SEQ ID NO: 1424 - DNA, 1957 bp, synthetic construct
  source 1..1957: mol_type = other DNA
tttgtttatttttctaaatacattcaaatatgtatccgctcatgagacaataaccctgataaatgcttcaataatattgaaaaaggaagagtatgagccatattcaacgggaaacgtcttgctctaggccgcgattaaattccaacatggatgctgatttatatgggtataaatgggctcgcgataatgtcgggcaatcaggtgcgacaatctatcgattgtatgggaagcccgatgcgccagagttgtttctgaaacatggcaaaggtagcgttgccaatgatgttacagatgagatggtcagactaaactggctgacggaatttatgcctcttccgaccatcaagcattttatccgtactcctgatgatgcatggttactcaccactgcgatccccgggaaaacagcattccaggtattagaagaatatcctgattcaggtgaaaatattgttgatgcgctggcagtgttcctgcgccggttgcattcgattcctgtttgtaattgtccttttaacagcgaccgcgtatttcgtctcgctcaggcgcaatcacgaatgaataacggtttggttgatgcgagtgattttgatgacgagcgtaatggctggcctgttgaacaagtctggaaagaaatgcataaacttttgccattctcaccggattcagtcgtcactcatggtgatttctcacttgataaccttatttttgacgaggggaaattaataggttgtattgatgttggacgagtcggaatcgcagaccgataccaggatcttgccatcctatggaactgcctcggtgagttttctccttcattacagaaacggctttttcaaaaatatggtattgataatcctgatatgaataaattgcagtttcatttgatgctcgatgagtttttctaagaattaattcatgagcggatacatatttgaatgtatttagaaaaataaacaaataggggttccgcgcacatttccccgaaaagtgccacttgcggagacccggtcgtcagcttgtcgtcggttcagggcagggtcgttaaatagccgcttatgtctattgctggtttaccggttttgatggacaagtggttcaccatgcgttgctttatggtatgataggttagctcactcattaggcaccgggatctcgaccgatgcccttgagagccttcaacccagtcagctccttccggtgggcgcggggcatgactaacatgagaattacaacttatatcgtatggggctgacttcaggtgctacatttgaagagataaattgcactgaaatctagagtgatggtgtcgggaatccgtaaaggatcttcttgagatccttttacgatcgtcgtaatctcctgctctgtaaacgaaaaaaccgcctggggaggcggtttgatcgaaggttaagtcagttggggaactgcttaacctggtaactggctttagtggagcgcagataccaaatactgtcctttcagtgtagcctctgttaggccaccacttcaagactctcgatatctaaatccactaattctcagttaccaatggctgctgccagtggcgttttgtcgtgtctttccgggttggactcaagatgatagttaccggataaggcgcagcagtcgggctgaacggggggttcttgcacacagcccagcttggagcgaactgtctacacggaacgggacgtggtgatttgggtaaagcctccaccacaacacggacgccgcaggacgggaacaggagagcgcaagagggagccatcagggggaaacgcctggtatctttatagtcctgtcgggtttcgccaccactgatttgagcgtcagatttcgtgatgttcgtcaggggggcggagcctatggaaaaacggcttcgctccggccttattgtctctctgctaagtatcctcctggcatcttctaggacgtttctgcgctagcatgccta

SEQ ID NO: 1425 - DNA, 1957 bp, synthetic construct
  source 1..1957: mol_type = other DNA
tttgtttatttttctaaatacattcaaatatgtatccgctcatgagacaataaccctgataaatgcttcaataatattgaaaaaggaagagtatgagccatattcaacgggaaacgtcttgctctaggccgcgattaaattccaacatggatgctgatttatatgggtataaatgggctcgcgataatgtcgggcaatcaggtgcgacaatctatcgattgtatgggaagcccgatgcgccagagttgtttctgaaacatggcaaaggtagcgttgccaatgatgttacagatgagatggtcagactaaactggctgacggaatttatgcctcttccgaccatcaagcattttatccgtactcctgatgatgcatggttactcaccactgcgatccccgggaaaacagcattccaggtattagaagaatatcctgattcaggtgaaaatattgttgatgcgctggcagtgttcctgcgccggttgcattcgattcctgtttgtaattgtccttttaacagcgaccgcgtatttcgtctcgctcaggcgcaatcacgaatgaataacggtttggttgatgcgagtgattttgatgacgagcgtaatggctggcctgttgaacaagtctggaaagaaatgcataaacttttgccattctcaccggattcagtcgtcactcatggtgatttctcacttgataaccttatttttgacgaggggaaattaataggttgtattgatgttggacgagtcggaatcgcagaccgataccaggatcttgccatcctatggaactgcctcggtgagttttctccttcattacagaaacggctttttcaaaaatatggtattgataatcctgatatgaataaattgcagtttcatttgatgctcgatgagtttttctaagaattaattcatgagcggatacatatttgaatgtatttagaaaaataaacaaataggggttccgcgcacatttccccgaaaagtgccacttgcggagacccggtcgtcagcttgtcgtcggttcagggcagggtcgttaaatagccgcttatgtctattgctggtttaccggttgttatggacaagtggttcaccatgcgttgctttatggtatgataggttagctcactcattaggcaccgggatctcgaccgatgcccttgagagccttcaacccagtcagctccttccggtgggcgcggggcatgactaacatgagaattacaacttatatcgtatggggctgacttcaggtgctacatttgaagagataaattgcactgaaatctagagtgatggtgtcgggaatccgtaaaggatcttcttgagatccttttacgatcgtcgtaatctcctgctctgtaaacgaaaaaaccgcctggggaggcggtttgatcgaaggttaagtcagttggggaactgcttaacctggtaactggctttagtggagcgcagataccaaatactgtcctttcagtgtagcctctgttaggccaccacttcaagactctcgatatctaaatccactaattctcagttaccaatggctgctgccagtggcgttttgtcgtgtctttccgggttggactcaagatgatagttaccggataaggcgcagcagtcgggctgaacggggggttcttgcacacagcccagcttggagcgaactgtctacacggaacgggacgtggtgatttgggtaaagcctccaccacaacacggacgccgcaggacgggaacaggagagcgcaagagggagccatcagggggaaacgcctggtatctttatagtcctgtcgggtttcgccaccactgatttgagcgtcagatttcgtgatgttcgtcaggggggcggagcctatggaaaaacggcttcgctccggccttattgtctctctgctaagtatcctcctggcatcttctaggacgtttctgcgctagcatgccta

SEQ ID NO: 1426 - DNA, 4751 bp, synthetic construct
  source 1..4751: mol_type = other DNA
tccgggattgacagctagctcagtcctaggtataatgctagcgtggagatatacctcgagatgagatacgaatttgtcaggcagttgatatacaaacaagagtggctgggtggtgaaattattcgccgggagagtaagctcttgtaacggttttttccgtgatgatgttgtactatgtgatgaattttaagcggcagggcatgtcgtttctgcttgtggaggaaggttaattcaacttccgttgaagcaagaatctcttgattgttattgagaatgtcaaattcagatctattatacctactcgcggccgcaataatagactagcataaccccttggggcctctaaacgggtcttgaggggttttttgctgaacgtacgttttacggctagctcagtcctaggtactatgctagcgtggagatatacggtaccaaggagatataccatggactacaaagaccatgacggtgattataaagatcatgacatcgattacaaggatgacgatgacaagggaggaagcggatccatgattaaaaaacaggcattcaaatttttgcttgaacctaacaaaggtcagttatctgactttttggcctttgctggctcctgtcgttttgtttacaacaaaggccttgctcttcttaacgagaattaccgtgcgggtaaaaaattcataggctacaataagctggcttctgaattggtggaatggaagaatgaagagagcctttcttggttgaaagaagctccgtctcagtgtttacagcaatcgttaagagatttagacagagcattcagaaactttttcaccggcaaatcacaatatccaaagtttaaaaagaaaggtcggcatgattctttccgtataccatgccaaagggttagagtagatcaagaaaaaaaactagtatctctccctaaagtcggctgggtaaagtatcgcaagagccgtgaaatcattggtgatttaaaaaacgcaactatttccctgaatcaggggaaatggtatatcagttttaatacagaacaaacagttcctgaaccaatacacccctctgatatcaaaactacaattatacttaataatgtgaatagcgttcatctgtcatctggggtcggcggtgataacacttaccaagcggaagaaaagaaaaagttagtccgtctcaataaaacactgaccagaagaaagagatacagcaaaaattggctaaaaaccaaaggtaaaatcgatagagtaaaatcaaaggcagcaaggataagactcgataatatccataaggcaaccacggcaatttgtaaaaatcacgctgttgttgaggttgtgaacttgatggattctgtatttgacaagaacgataacactctgagtatgcgttacgaatttgtgcgccagctgatttataaacaagaatggctgggcggtgaaatcattcgccgtgagagcaagcttttataataagaattcctgctgccaccgctgagcaataactagcataaccccttggggcctctaaacgggtcttgaggggttttttgctgaaacctcaggcatttgagaagcacacggtcacactgcttccggtagtcaataaaccggtaaaccagcaatagacataagcggctatttaacgaccctgccctgaaccgacgaccgggtcatcgtggccggatcttgcggcccctcggcttgaacgaattgttagacattatttgccgactaccttggtgatctcgcctttcacgtagtggacaaattcttccaactgatctgcgcgcgaggccaagcgatcttcttcttgtccaagataagcctgtctagcttcaagtatgacgggctgatactgggccggcaggcgctccattgcccagtcggcagcgacatccttcggcgcgattttgccggttactgcgctgtaccaaatgcgggacaacgtaagcactacatttcgctcatcgccagcccagtcgggcggcgagttccatagcgttaaggtttcatttagcgcctcaaatagatcctgttcaggaaccggatcaaagagttcctccgccgctggacctaccaaggcaacgctatgttctcttgcttttgtcagcaagatagccagatcaatgtcgatcgtggctggctcgaagatacctgcaagaatgtcattgcgctgccattctccaaattgcagttcgcgcttagctggataacgccacggaatgatgtcgtcgtgcacaacaatggtgacttctacagcgcggagaatctcgctctctccaggggaagccgaagtttccaaaaggtcgttgatcaaagctcgccgcgttgtttcatcaagccttacggtcaccgtaaccagcaaatcaatatcactgtgtggcttcaggccgccatccactgcggagccgtacaaatgtacggccagcaacgtcggttcgagatggcgctcgatgacgccaactacctctgatagttgagtcgatacttcggcgatcaccgcttccctcatactcttcctttttcaatattattgaagcatttatcagggttattgtctcatgagcggatacatatttgaatgtatttagaaaaataaacaaatagctagctcactcggtcgctacgctccgggcgtgagactgcggcgggcgctgcggacacatacaaagttacccacagattccgtggataagcaggggactaacatgtgaggcaaaacagcagggccgcgccggtggcgtttttccataggctccgccctcctgccagagttcacataaacagacgcttttccggtgcatctgtgggagccgtgaggctcaaccatgaatctgacagtacgggcgaaacccgacaggacttaaagatccccaccgtttccggcgggtcgctccctcttgcgctctcctgttccgaccctgccgtttaccggatacctgttccgcctttctcccttacgggaagtgtggcgctttctcatagctcacacactggtatctcggctcggtgtaggtcgttcgctccaagctgggctgtaagcaagaactccccgttcagcccgactgctgcgccttatccggtaactgttcacttgagtccaacccggaaaagcacggtaaaacgccactggcagcagccattggtaactgggagttcgcagaggatttgtttagctaaacacgcggttgctcttgaagtgtgcgccaaagtccggctacactggaaggacagatttggttgctgtgctctgcgaaagccagttaccacggttaagcagttccccaactgacttaaccttcgatcaaaccacctccccaggtggttttttcgtttacagggcaaaagattacgcgcagaaaaaaaggatctcaagaagatcctttgatcttttctactgaaccgctctagatttcagtgcaatttatctcttcaaatgtagcacctgaagtcagccccatacgatataagttgtaattctcatgttagtcatgccccgcgcccaccggaaggagctgactgggttgaaggctctcaagggcatcggtcgagatcccggtgcctaatgagtgagctaacttacattaattgcgttgcgctcactgcccgctttccagtcgggaaacctgtcgtgccagctgcattaatgaatcggccaacgcgcggggagaggcggtttgcgtattgggcgccagggtggtttttcttttcaccagtgagacgggcaacagctgattgcccttcaccgcctggccctgagagagttgcagcaagcggtccacgctggtttgccccagcaggcgaaaatcctgtttgatggtggttaacggcgggatataacatgagctgtcttcggtatcgtcgtatcccactaccgagatgtccgcaccaacgcgcagcccggactcggtaatggcgcgcattgcgcccagcgccatctgatcgttggcaaccagcatcgcagtgggaacgatgccctcattcagcatttgcatggtttgttgaaaaccggacatggcactccagtcgccttcccgttccgctatcggctgaatttgattgcgagtgagatatttatgccagccagccagacgcagacgcgccgagacagaacttaatgggcccgctaacagcgcgatttgctggtgacccaatgcgaccagatgctccacgcccagtcgcgtaccgtcttcatgggagaaaataatactgttgatgggtgtctggtcagagacatcaagaaataacgccggaacattagtgcaggcagcttccacagcaatggcatcctggtcatccagcggatagttaatgatcagcccactgacgcgttgcgcgagaagattgtgcaccgccgctttacaggcttcgacgccgcttcgttctaccatcgacaccaccacgctggcacccagttgatcggcgcgagatttaatcgccgcgacaatttgcgacggcgcgtgcagggccagactggaggtggcaacgccaatcagcaacgactgtttgcccgccagttgttgtgccacgcggttgggaatgtaattcagctccgccatcgccgcttccactttttcccgcgttttcgcagaaacgtggctggcctggttcaccacgcgggaaacggtctgataagagacaccggcatactctgcgacatcgtataacgttactggtttcacattcaccaccctgaattgactctcttccgggcgctatcatgccataccgcgaaaggttttgcgccattcgatggtg

SEQ ID NO: 1427 - DNA, 4751 bp, synthetic construct
  source 1..4751: mol_type = other DNA
tccgggattgacagctagctcagtcctaggtataatgctagcgtggagatatacctcgagatgagatacgaatttgtcaggcagttgatatacaaacaagagtggctgggtggtgaaattattcgccgggagagtaagctcttgtaacggttttttccgtgatgatgttgtactatgtgatgaattttaagcggcagggcatgtcgtttctgcttgtggaggaaggttaattcaacttccgttgaagcaagaatctcttgattgttattgagaatgtcaagccattgacagctagctcagctcgcggccgcaataatagactagcataaccccttggggcctctaaacgggtcttgaggggttttttgctgaacgtacgttttacggctagctcagtcctaggtactatgctagcgtggagatatacggtaccaaggagatataccatggactacaaagaccatgacggtgattataaagatcatgacatcgattacaaggatgacgatgacaagggaggaagcggatccatgattaaaaaacaggcattcaaatttttgcttgaacctaacaaaggtcagttatctgactttttggcctttgctggctcctgtcgttttgtttacaacaaaggccttgctcttcttaacgagaattaccgtgcgggtaaaaaattcataggctacaataagctggcttctgaattggtggaatggaagaatgaagagagcctttcttggttgaaagaagctccgtctcagtgtttacagcaatcgttaagagatttagacagagcattcagaaactttttcaccggcaaatcacaatatccaaagtttaaaaagaaaggtcggcatgattctttccgtataccatgccaaagggttagagtagatcaagaaaaaaaactagtatctctccctaaagtcggctgggtaaagtatcgcaagagccgtgaaatcattggtgatttaaaaaacgcaactatttccctgaatcaggggaaatggtatatcagttttaatacagaacaaacagttcctgaaccaatacacccctctgatatcaaaactacaattatacttaataatgtgaatagcgttcatctgtcatctggggtcggcggtgataacacttaccaagcggaagaaaagaaaaagttagtccgtctcaataaaacactgaccagaagaaagagatacagcaaaaattggctaaaaaccaaaggtaaaatcgatagagtaaaatcaaaggcagcaaggataagactcgataatatccataaggcaaccacggcaatttgtaaaaatcacgctgttgttgaggttgtgaacttgatggattctgtatttgacaagaacgataacactctgagtatgcgttacgaatttgtgcgccagctgatttataaacaagaatggctgggcggtgaaatcattcgccgtgagagcaagcttttataataagaattcctgctgccaccgctgagcaataactagcataaccccttggggcctctaaacgggtcttgaggggttttttgctgaaacctcaggcatttgagaagcacacggtcacactgcttccggtagtcaataaaccggtaaaccagcaatagacataagcggctatttaacgaccctgccctgaaccgacgaccgggtcatcgtggccggatcttgcggcccctcggcttgaacgaattgttagacattatttgccgactaccttggtgatctcgcctttcacgtagtggacaaattcttccaactgatctgcgcgcgaggccaagcgatcttcttcttgtccaagataagcctgtctagcttcaagtatgacgggctgatactgggccggcaggcgctccattgcccagtcggcagcgacatccttcggcgcgattttgccggttactgcgctgtaccaaatgcgggacaacgtaagcactacatttcgctcatcgccagcccagtcgggcggcgagttccatagcgttaaggtttcatttagcgcctcaaatagatcctgttcaggaaccggatcaaagagttcctccgccgctggacctaccaaggcaacgctatgttctcttgcttttgtcagcaagatagccagatcaatgtcgatcgtggctggctcgaagatacctgcaagaatgtcattgcgctgccattctccaaattgcagttcgcgcttagctggataacgccacggaatgatgtcgtcgtgcacaacaatggtgacttctacagcgcggagaatctcgctctctccaggggaagccgaagtttccaaaaggtcgttgatcaaagctcgccgcgttgtttcatcaagccttacggtcaccgtaaccagcaaatcaatatcactgtgtggcttcaggccgccatccactgcggagccgtacaaatgtacggccagcaacgtcggttcgagatggcgctcgatgacgccaactacctctgatagttgagtcgatacttcggcgatcaccgcttccctcatactcttcctttttcaatattattgaagcatttatcagggttattgtctcatgagcggatacatatttgaatgtatttagaaaaataaacaaatagctagctcactcggtcgctacgctccgggcgtgagactgcggcgggcgctgcggacacatacaaagttacccacagattccgtggataagcaggggactaacatgtgaggcaaaacagcagggccgcgccggtggcgtttttccataggctccgccctcctgccagagttcacataaacagacgcttttccggtgcatctgtgggagccgtgaggctcaaccatgaatctgacagtacgggcgaaacccgacaggacttaaagatccccaccgtttccggcgggtcgctccctcttgcgctctcctgttccgaccctgccgtttaccggatacctgttccgcctttctcccttacgggaagtgtggcgctttctcatagctcacacactggtatctcggctcggtgtaggtcgttcgctccaagctgggctgtaagcaagaactccccgttcagcccgactgctgcgccttatccggtaactgttcacttgagtccaacccggaaaagcacggtaaaacgccactggcagcagccattggtaactgggagttcgcagaggatttgtttagctaaacacgcggttgctcttgaagtgtgcgccaaagtccggctacactggaaggacagatttggttgctgtgctctgcgaaagccagttaccacggttaagcagttccccaactgacttaaccttcgatcaaaccacctccccaggtggttttttcgtttacagggcaaaagattacgcgcagaaaaaaaggatctcaagaagatcctttgatcttttctactgaaccgctctagatttcagtgcaatttatctcttcaaatgtagcacctgaagtcagccccatacgatataagttgtaattctcatgttagtcatgccccgcgcccaccggaaggagctgactgggttgaaggctctcaagggcatcggtcgagatcccggtgcctaatgagtgagctaacttacattaattgcgttgcgctcactgcccgctttccagtcgggaaacctgtcgtgccagctgcattaatgaatcggccaacgcgcggggagaggcggtttgcgtattgggcgccagggtggtttttcttttcaccagtgagacgggcaacagctgattgcccttcaccgcctggccctgagagagttgcagcaagcggtccacgctggtttgccccagcaggcgaaaatcctgtttgatggtggttaacggcgggatataacatgagctgtcttcggtatcgtcgtatcccactaccgagatgtccgcaccaacgcgcagcccggactcggtaatggcgcgcattgcgcccagcgccatctgatcgttggcaaccagcatcgcagtgggaacgatgccctcattcagcatttgcatggtttgttgaaaaccggacatggcactccagtcgccttcccgttccgctatcggctgaatttgattgcgagtgagatatttatgccagccagccagacgcagacgcgccgagacagaacttaatgggcccgctaacagcgcgatttgctggtgacccaatgcgaccagatgctccacgcccagtcgcgtaccgtcttcatgggagaaaataatactgttgatgggtgtctggtcagagacatcaagaaataacgccggaacattagtgcaggcagcttccacagcaatggcatcctggtcatccagcggatagttaatgatcagcccactgacgcgttgcgcgagaagattgtgcaccgccgctttacaggcttcgacgccgcttcgttctaccatcgacaccaccacgctggcacccagttgatcggcgcgagatttaatcgccgcgacaatttgcgacggcgcgtgcagggccagactggaggtggcaacgccaatcagcaacgactgtttgcccgccagttgttgtgccacgcggttgggaatgtaattcagctccgccatcgccgcttccactttttcccgcgttttcgcagaaacgtggctggcctggttcaccacgcgggaaacggtctgataagagacaccggcatactctgcgacatcgtataacgttactggtttcacattcaccaccctgaattgactctcttccgggcgctatcatgccataccgcgaaaggttttgcgccattcgatggtg

SEQ ID NO: 1428 - DNA, 4889 bp, synthetic construct
  source 1..4889: mol_type = other DNA
tccgggattgacagctagctcagtcctaggtataatgctagcgtggagatatacctcgaggtattgagtcagaggagatcgaaacagagttgtctttttctgaaagtacagaaaattcagagtatcttagaagccaaaaaatcttagaacgtggcttgtctaaacgagaaaccttataaatagaagaactgtagggactacagggatcgcctaggggatagaaaatgtacaccatgtgttgaaccatttatttctaggaagtcacattgggacagtccacattcagatctattatacctactcgcggccgcaataatagactagcataaccccttggggcctctaaacgggtcttgaggggttttttgctgaacgtacgttttacggctagctcagtcctaggtactatgctagcgtggagatatacggtaccaaggagatataccatggactacaaagaccatgacggtgattataaagatcatgacatcgattacaaggatgacgatgacaagggaggaagcggatccatgaaggcgctgaaagcgtataaatacagactttatccaaccagcaaacaggaagagttcatccaaaaaaccttctcttgcgttcgcctggtgtataatctgatgttacaggaccgcattgatatctacaaagagatgcgtaaaaatccgcaacaaacttttaaaatgcccacgccggccaaatacaagaagcagtaccctgtcttgcgcgaagtagacagtctggccctagccaatgcacaggtttatctggatcgtgcctttaaaaacttttaccgcgaaaaaggaatgggctttccaaaaaagaaaaagaaagaaaccgtgcattcctacactacgaacaaccagcacggcacggtcaaaattctggataaccgttatctcaaagtgccgaaactcaaatcgctgattaagatgaaggtacaccgccagccgctgggggagataaaatcggtaactattagcatgagcgcgagccacaattattatgtgtccatcttatgcgaagcgccgattgaaacgaaaaccaagcaacagaaaatggtgggaatttgcagcagtcgcgaaaaatttgcgctgatttcgaatggtgaaagcttcgaaaaaagctattgttcaaagcatctcaagcagaaactacgtcaggaagaacgaaaacttaacaagcgtaagatgattgcactggaaaaaggtgtcgatctttcgcaggcgaagaactatcaaaaacaaaaaataaaagtggcaaaaattcgcgaaaaaatagccaaccagcgcaccgatattttaaacaaaatcacaaccgaactggtttcaagttacgatgttatctgcatcgaaaaagcccatcactcaaatgagcggccgcccaaacatgaccgttccgaactggcttggtcgctgttcttggcgaaactgttgtacaaagcacagtggtatggcaaggaactcatctgtatcgagtcagaggaaattgaaacagagctgtctttcagcgaaagtaccgaaaacagcgagtaccttcgcagccagaaaatcttagaacgtggtctttctaaaagggaaaccctgtaataagaattcctgctgccaccgctgagcaataactagcataaccccttggggcctctaaacgggtcttgaggggttttttgctgaaacctcaggcatttgagaagcacacggtcacactgcttccggtagtcaataaaccggtaaaccagcaatagacataagcggctatttaacgaccctgccctgaaccgacgaccgggtcatcgtggccggatcttgcggcccctcggcttgaacgaattgttagacattatttgccgactaccttggtgatctcgcctttcacgtagtggacaaattcttccaactgatctgcgcgcgaggccaagcgatcttcttcttgtccaagataagcctgtctagcttcaagtatgacgggctgatactgggccggcaggcgctccattgcccagtcggcagcgacatccttcggcgcgattttgccggttactgcgctgtaccaaatgcgggacaacgtaagcactacatttcgctcatcgccagcccagtcgggcggcgagttccatagcgttaaggtttcatttagcgcctcaaatagatcctgttcaggaaccggatcaaagagttcctccgccgctggacctaccaaggcaacgctatgttctcttgcttttgtcagcaagatagccagatcaatgtcgatcgtggctggctcgaagatacctgcaagaatgtcattgcgctgccattctccaaattgcagttcgcgcttagctggataacgccacggaatgatgtcgtcgtgcacaacaatggtgacttctacagcgcggagaatctcgctctctccaggggaagccgaagtttccaaaaggtcgttgatcaaagctcgccgcgttgtttcatcaagccttacggtcaccgtaaccagcaaatcaatatcactgtgtggcttcaggccgccatccactgcggagccgtacaaatgtacggccagcaacgtcggttcgagatggcgctcgatgacgccaactacctctgatagttgagtcgatacttcggcgatcaccgcttccctcatactcttcctttttcaatattattgaagcatttatcagggttattgtctcatgagcggatacatatttgaatgtatttagaaaaataaacaaatagctagctcactcggtcgctacgctccgggcgtgagactgcggcgggcgctgcggacacatacaaagttacccacagattccgtggataagcaggggactaacatgtgaggcaaaacagcagggccgcgccggtggcgtttttccataggctccgccctcctgccagagttcacataaacagacgcttttccggtgcatctgtgggagccgtgaggctcaaccatgaatctgacagtacgggcgaaacccgacaggacttaaagatccccaccgtttccggcgggtcgctccctcttgcgctctcctgttccgaccctgccgtttaccggatacctgttccgcctttctcccttacgggaagtgtggcgctttctcatagctcacacactggtatctcggctcggtgtaggtcgttcgctccaagctgggctgtaagcaagaactccccgttcagcccgactgctgcgccttatccggtaactgttcacttgagtccaacccggaaaagcacggtaaaacgccactggcagcagccattggtaactgggagttcgcagaggatttgtttagctaaacacgcggttgctcttgaagtgtgcgccaaagtccggctacactggaaggacagatttggttgctgtgctctgcgaaagccagttaccacggttaagcagttccccaactgacttaaccttcgatcaaaccacctccccaggtggttttttcgtttacagggcaaaagattacgcgcagaaaaaaaggatctcaagaagatcctttgatcttttctactgaaccgctctagatttcagtgcaatttatctcttcaaatgtagcacctgaagtcagccccatacgatataagttgtaattctcatgttagtcatgccccgcgcccaccggaaggagctgactgggttgaaggctctcaagggcatcggtcgagatcccggtgcctaatgagtgagctaacttacattaattgcgttgcgctcactgcccgctttccagtcgggaaacctgtcgtgccagctgcattaatgaatcggccaacgcgcggggagaggcggtttgcgtattgggcgccagggtggtttttcttttcaccagtgagacgggcaacagctgattgcccttcaccgcctggccctgagagagttgcagcaagcggtccacgctggtttgccccagcaggcgaaaatcctgtttgatggtggttaacggcgggatataacatgagctgtcttcggtatcgtcgtatcccactaccgagatgtccgcaccaacgcgcagcccggactcggtaatggcgcgcattgcgcccagcgccatctgatcgttggcaaccagcatcgcagtgggaacgatgccctcattcagcatttgcatggtttgttgaaaaccggacatggcactccagtcgccttcccgttccgctatcggctgaatttgattgcgagtgagatatttatgccagccagccagacgcagacgcgccgagacagaacttaatgggcccgctaacagcgcgatttgctggtgacccaatgcgaccagatgctccacgcccagtcgcgtaccgtcttcatgggagaaaataatactgttgatgggtgtctggtcagagacatcaagaaataacgccggaacattagtgcaggcagcttccacagcaatggcatcctggtcatccagcggatagttaatgatcagcccactgacgcgttgcgcgagaagattgtgcaccgccgctttacaggcttcgacgccgcttcgttctaccatcgacaccaccacgctggcacccagttgatcggcgcgagatttaatcgccgcgacaatttgcgacggcgcgtgcagggccagactggaggtggcaacgccaatcagcaacgactgtttgcccgccagttgttgtgccacgcggttgggaatgtaattcagctccgccatcgccgcttccactttttcccgcgttttcgcagaaacgtggctggcctggttcaccacgcgggaaacggtctgataagagacaccggcatactctgcgacatcgtataacgttactggtttcacattcaccaccctgaattgactctcttccgggcgctatcatgccataccgcgaaaggttttgcgccattcgatggtg

SEQ ID NO: 1429 - DNA, 4889 bp, synthetic construct
  source 1..4889: mol_type = other DNA
tccgggattgacagctagctcagtcctaggtataatgctagcgtggagatatacctcgaggtattgagtcagaggagatcgaaacagagttgtctttttctgaaagtacagaaaattcagagtatcttagaagccaaaaaatcttagaacgtggcttgtctaaacgagaaaccttataaatagaagaactgtagggactacagggatcgcctaggggatagaaaatgtacaccatgtgttgaaccatttatttctaggaagtcacattgggacagtccacgccattgacagctagctcagctcgcggccgcaataatagactagcataaccccttggggcctctaaacgggtcttgaggggttttttgctgaacgtacgttttacggctagctcagtcctaggtactatgctagcgtggagatatacggtaccaaggagatataccatggactacaaagaccatgacggtgattataaagatcatgacatcgattacaaggatgacgatgacaagggaggaagcggatccatgaaggcgctgaaagcgtataaatacagactttatccaaccagcaaacaggaagagttcatccaaaaaaccttctcttgcgttcgcctggtgtataatctgatgttacaggaccgcattgatatctacaaagagatgcgtaaaaatccgcaacaaacttttaaaatgcccacgccggccaaatacaagaagcagtaccctgtcttgcgcgaagtagacagtctggccctagccaatgcacaggtttatctggatcgtgcctttaaaaacttttaccgcgaaaaaggaatgggctttccaaaaaagaaaaagaaagaaaccgtgcattcctacactacgaacaaccagcacggcacggtcaaaattctggataaccgttatctcaaagtgccgaaactcaaatcgctgattaagatgaaggtacaccgccagccgctgggggagataaaatcggtaactattagcatgagcgcgagccacaattattatgtgtccatcttatgcgaagcgccgattgaaacgaaaaccaagcaacagaaaatggtgggaatttgcagcagtcgcgaaaaatttgcgctgatttcgaatggtgaaagcttcgaaaaaagctattgttcaaagcatctcaagcagaaactacgtcaggaagaacgaaaacttaacaagcgtaagatgattgcactggaaaaaggtgtcgatctttcgcaggcgaagaactatcaaaaacaaaaaataaaagtggcaaaaattcgcgaaaaaatagccaaccagcgcaccgatattttaaacaaaatcacaaccgaactggtttcaagttacgatgttatctgcatcgaaaaagcccatcactcaaatgagcggccgcccaaacatgaccgttccgaactggcttggtcgctgttcttggcgaaactgttgtacaaagcacagtggtatggcaaggaactcatctgtatcgagtcagaggaaattgaaacagagctgtctttcagcgaaagtaccgaaaacagcgagtaccttcgcagccagaaaatcttagaacgtggtctttctaaaagggaaaccctgtaataagaattcctgctgccaccgctgagcaataactagcataaccccttggggcctctaaacgggtcttgaggggttttttgctgaaacctcaggcatttgagaagcacacggtcacactgcttccggtagtcaataaaccggtaaaccagcaatagacataagcggctatttaacgaccctgccctgaaccgacgaccgggtcatcgtggccggatcttgcggcccctcggcttgaacgaattgttagacattatttgccgactaccttggtgatctcgcctttcacgtagtggacaaattcttccaactgatctgcgcgcgaggccaagcgatcttcttcttgtccaagataagcctgtctagcttcaagtatgacgggctgatactgggccggcaggcgctccattgcccagtcggcagcgacatccttcggcgcgattttgccggttactgcgctgtaccaaatgcgggacaacgtaagcactacatttcgctcatcgccagcccagtcgggcggcgagttccatagcgttaaggtttcatttagcgcctcaaatagatcctgttcaggaaccggatcaaagagttcctccgccgctggacctaccaaggcaacgctatgttctcttgcttttgtcagcaagatagccagatcaatgtcgatcgtggctggctcgaagatacctgcaagaatgtcattgcgctgccattctccaaattgcagttcgcgcttagctggataacgccacggaatgatgtcgtcgtgcacaacaatggtgacttctacagcgcggagaatctcgctctctccaggggaagccgaagtttccaaaaggtcgttgatcaaagctcgccgcgttgtttcatcaagccttacggtcaccgtaaccagcaaatcaatatcactgtgtggcttcaggccgccatccactgcggagccgtacaaatgtacggccagcaacgtcggttcgagatggcgctcgatgacgccaactacctctgatagttgagtcgatacttcggcgatcaccgcttccctcatactcttcctttttcaatattattgaagcatttatcagggttattgtctcatgagcggatacatatttgaatgtatttagaaaaataaacaaatagctagctcactcggtcgctacgctccgggcgtgagactgcggcgggcgctgcggacacatacaaagttacccacagattccgtggataagcaggggactaacatgtgaggcaaaacagcagggccgcgccggtggcgtttttccataggctccgccctcctgccagagttcacataaacagacgcttttccggtgcatctgtgggagccgtgaggctcaaccatgaatctgacagtacgggcgaaacccgacaggacttaaagatccccaccgtttccggcgggtcgctccctcttgcgctctcctgttccgaccctgccgtttaccggatacctgttccgcctttctcccttacgggaagtgtggcgctttctcatagctcacacactggtatctcggctcggtgtaggtcgttcgctccaagctgggctgtaagcaagaactccccgttcagcccgactgctgcgccttatccggtaactgttcacttgagtccaacccggaaaagcacggtaaaacgccactggcagcagccattggtaactgggagttcgcagaggatttgtttagctaaacacgcggttgctcttgaagtgtgcgccaaagtccggctacactggaaggacagatttggttgctgtgctctgcgaaagccagttaccacggttaagcagttccccaactgacttaaccttcgatcaaaccacctccccaggtggttttttcgtttacagggcaaaagattacgcgcagaaaaaaaggatctcaagaagatcctttgatcttttctactgaaccgctctagatttcagtgcaatttatctcttcaaatgtagcacctgaagtcagccccatacgatataagttgtaattctcatgttagtcatgccccgcgcccaccggaaggagctgactgggttgaaggctctcaagggcatcggtcgagatcccggtgcctaatgagtgagctaacttacattaattgcgttgcgctcactgcccgctttccagtcgggaaacctgtcgtgccagctgcattaatgaatcggccaacgcgcggggagaggcggtttgcgtattgggcgccagggtggtttttcttttcaccagtgagacgggcaacagctgattgcccttcaccgcctggccctgagagagttgcagcaagcggtccacgctggtttgccccagcaggcgaaaatcctgtttgatggtggttaacggcgggatataacatgagctgtcttcggtatcgtcgtatcccactaccgagatgtccgcaccaacgcgcagcccggactcggtaatggcgcgcattgcgcccagcgccatctgatcgttggcaaccagcatcgcagtgggaacgatgccctcattcagcatttgcatggtttgttgaaaaccggacatggcactccagtcgccttcccgttccgctatcggctgaatttgattgcgagtgagatatttatgccagccagccagacgcagacgcgccgagacagaacttaatgggcccgctaacagcgcgatttgctggtgacccaatgcgaccagatgctccacgcccagtcgcgtaccgtcttcatgggagaaaataatactgttgatgggtgtctggtcagagacatcaagaaataacgccggaacattagtgcaggcagcttccacagcaatggcatcctggtcatccagcggatagttaatgatcagcccactgacgcgttgcgcgagaagattgtgcaccgccgctttacaggcttcgacgccgcttcgttctaccatcgacaccaccacgctggcacccagttgatcggcgcgagatttaatcgccgcgacaatttgcgacggcgcgtgcagggccagactggaggtggcaacgccaatcagcaacgactgtttgcccgccagttgttgtgccacgcggttgggaatgtaattcagctccgccatcgccgcttccactttttcccgcgttttcgcagaaacgtggctggcctggttcaccacgcgggaaacggtctgataagagacaccggcatactctgcgacatcgtataacgttactggtttcacattcaccaccctgaattgactctcttccgggcgctatcatgccataccgcgaaaggttttgcgccattcgatggtg

SEQ ID NO: 1430 - DNA, 4239 bp, synthetic construct
  source 1..4239: mol_type = other DNA
gaaagaataaaaaaagataaaaagaatagatcccagccctgtgtataactcactactttagtcagttccgcagtattacaaaaggatgtcgcaaacgctgtttgctcctctacaaaacagaccttaaaaccctaaaggcttaagtagcaccctcgcaagctcgggcaaatcgctgaatattccttttgtctccgaccatcaggcacctgagtcgctgtctttttcgtgacattcagttcgctgcgctcacggctctggcagtgaatgggggtaaatggcactacaggcgccttttatggattcatgcaaggaaactacccataatacaagaaaagcccgtcacgggcttctcagggcgttttatggcgggtctgctatgtggtgctatctgactttttgctgttcagcagttcctgccctctgattttccagtctgaccacttcggattatcccgtgacaggtcattcagactggctaatgcacccagtaaggcagcggtatcatcaacaggcttacccgtcttactgtccctagtgcttggattctcaccaataaaaaacgcccggcggcaaccgagcgttctgaacaaatccagatggagttctgaggtcattactggatctatcaacaggagtccaagcgagctctcgaaccccagagtcccgctcagaagaactcgtcaagaaggcgatagaaggcgatgcgctgcgaatcgggagcggcgataccgtaaagcacgaggaagcggtcagcccattcgccgccaagctcttcagcaatatcacgggtagccaacgctatgtcctgatagcggtccgccacacccagccggccacagtcgatgaatccagaaaagcggccattttccaccatgatattcggcaagcaggcatcgccatgggtcacgacgagatcctcgccgtcgggcatgcgcgccttgagcctggcgaacagttcggctggcgcgagcccctgatgctcttcgtccagatcatcctgatcgacaagaccggcttccatccgagtacgtgctcgctcgatgcgatgtttcgcttggtggtcgaatgggcaggtagccggatcaagcgtatgcagccgccgcattgcatcagccatgatggatactttctcggcaggagcaaggtgagatgacaggagatcctgccccggcacttcgcccaatagcagccagtcccttcccgcttcagtgacaacgtcgagcacagctgcgcaaggaacgcccgtcgtggccagccacgatagccgcgctgcctcgtcctgcagttcattcagggcaccggacaggtcggtcttgacaaaaagaaccgggcgcccctgcgctgacagccggaacacggcggcatcagagcagccgattgtctgttgtgcccagtcatagccgaatagcctctccacccaagcggccggagaacctgcgtgcaatccatcttgttcaatcatactcttcctttttcaatattattgaagcatttatcagggttattgtctcatgagcggatacatatttgaatgtatttagaaaaataaacaaataggggttccgcgcacatttccccgaaaagtgccattgacagctagctcagtcctaggtataatagatctgaatataacaaagaggagaaaggtaccatggcgagtagcgaagacgttatcaaagagttcatgcgtttcaaagttcgtatggaaggttccgttaacggtcacgagttcgaaatcgaaggtgaaggtgaaggtcgtccgtacgaaggtacccagaccgctaaactgaaagttaccaaaggtggtccgctgccgttcgcttgggacatcctgtccccgcagttccagtacggttccaaagcttacgttaaacacccggctgacatcccggactacctgaaactgtccttcccggaaggtttcaaatgggaacgtgttatgaacttcgaagacggtggtgttgttaccgttacccaggactcctccctgcaagacggtgagttcatctacaaagttaaactgcgtggtaccaacttcccgtccgacggtccggttatgcagaaaaaaaccatgggttgggaagcttccaccgaacgtatgtacccggaagacggtgctctgaaaggtgaaatcaaaatgcgtctgaaactgaaagacggtggtcactacgacgctgaagttaaaaccacctacatggctaaaaaaccggttcagctgccgggtgcttacaaaaccgacatcaaactggacatcacctcccacaacgaagactacaccatcgttgaacagtacgaacgtgctgaaggtcgtcactccaccggtgcttaaggatccaaactcgagtaaggatctccaggcatcaaataaaacgaaaggctcagtcgaaagactgggcctttcgttttatctgttgtttgtcggtgaacgctctctactagagtcacactggctcaccttcgggtgggcctttctgcgtttatacctagggtacgggttttgctgcccgcaaacgggctgttctggtgttgactagcctgacgtctaagaaaccattattatcatgacattaacctataaaaataggcgtatcacgaggcagaatttcagataaaaaaaatccttagctttcgctaaggatgatttctggaattctaaagatctttgacagctagctcagtcctaggtataatactagctgagaccagtgactactggtctcagttttagagctagaaatagcaagttaaaataaggctagtccgttatcaacttgaaaaagtggcaccgagtcggtgctttttttataaaacgaaaggctcagtcgaaagactgggcctttcgttttatccgaatacgggttcttgcatgttacattgtcgatctgttcatggtgaacagctttaaatgcaccaaaaactcgtaaaagctctgatgtatctatcttttttacaccgttttcatctgtgcatatggacagttttccctttgatatctaacggtgaacagttgttctacttttgtttgttagtcttgatgcttcactgatagatacaagagccataagaacctcagatccttccgtatttagccagtatgttctctagtgtggttcgttgtttttgcgtgagccatgagaacgaaccattgagatcatgcttactttgcatgtcactcaaaaattttgcctcaaaactggtgagctgaatttttgcagttaaagcatcgtgtagtgtttttcttagtccgttacgtaggtaggaatctgatgtaatggttgttggtattttgtcaccattcatttttatctggttgttctcaagttcggttacgagatccatttgtctatctagttcaacttggaaaatcaacgtatcagtcgggcggcctcgcttatcaaccaccaatttcatattgctgtaagtgtttaaatctttacttattggtttcaaaacccattggttaagccttttaaactcatggtagttattttcaagcattaacatgaacttaaattcatcaaggctaatctctatatttgccttgtgagttttcttttgtgttagttcttttaataaccactcataaatcctcatagagtatttgttttcaaaagacttaacatgttccagattatattttatgaatttttttaactggaaaagataaggcaatatctcttcactaaaaactaattctaatttttcgcttgagaacttggcatagtttgtccactggaaaatctcaaagcctttaaccaaaggattcctgatttccacagttctcgtcatcagctctctggttgctttagctaatacaccataagcattttccctactgatgttcatcatctgagcgtattggttataagtgaacgataccgtccgttctttccttgtagggttttcaatcgtggggttgagtagtgccacacagcataaaattagcttggtttcatgctccgttaagtcatagcgactaatcgctagttcatttgctttgaaaacaactaattcagacatacatctcaattggtctaggtgattttaatcactataccaattgagatgggctagtcaatgataattactagtccttttcccgggagatctgggtatctgtaaattctgctagacctttgctggaaaacttgtaaattctgctagaccctctgtaaattccgctagacctttgtgtgttttttttgtttatattcaagtggttataatttatagaataaa

SEQ ID NO: 1431 - DNA, 4239 bp, synthetic construct
  source 1..4239: mol_type = other DNA
gaaagaataaaaaaagataaaaagaatagatcccagccctgtgtataactcactactttagtcagttccgcagtattacaaaaggatgtcgcaaacgctgtttgctcctctacaaaacagaccttaaaaccctaaaggcttaagtagcaccctcgcaagctcgggcaaatcgctgaatattccttttgtctccgaccatcaggcacctgagtcgctgtctttttcgtgacattcagttcgctgcgctcacggctctggcagtgaatgggggtaaatggcactacaggcgccttttatggattcatgcaaggaaactacccataatacaagaaaagcccgtcacgggcttctcagggcgttttatggcgggtctgctatgtggtgctatctgactttttgctgttcagcagttcctgccctctgattttccagtctgaccacttcggattatcccgtgacaggtcattcagactggctaatgcacccagtaaggcagcggtatcatcaacaggcttacccgtcttactgtccctagtgcttggattctcaccaataaaaaacgcccggcggcaaccgagcgttctgaacaaatccagatggagttctgaggtcattactggatctatcaacaggagtccaagcgagctctcgaaccccagagtcccgctcagaagaactcgtcaagaaggcgatagaaggcgatgcgctgcgaatcgggagcggcgataccgtaaagcacgaggaagcggtcagcccattcgccgccaagctcttcagcaatatcacgggtagccaacgctatgtcctgatagcggtccgccacacccagccggccacagtcgatgaatccagaaaagcggccattttccaccatgatattcggcaagcaggcatcgccatgggtcacgacgagatcctcgccgtcgggcatgcgcgccttgagcctggcgaacagttcggctggcgcgagcccctgatgctcttcgtccagatcatcctgatcgacaagaccggcttccatccgagtacgtgctcgctcgatgcgatgtttcgcttggtggtcgaatgggcaggtagccggatcaagcgtatgcagccgccgcattgcatcagccatgatggatactttctcggcaggagcaaggtgagatgacaggagatcctgccccggcacttcgcccaatagcagccagtcccttcccgcttcagtgacaacgtcgagcacagctgcgcaaggaacgcccgtcgtggccagccacgatagccgcgctgcctcgtcctgcagttcattcagggcaccggacaggtcggtcttgacaaaaagaaccgggcgcccctgcgctgacagccggaacacggcggcatcagagcagccgattgtctgttgtgcccagtcatagccgaatagcctctccacccaagcggccggagaacctgcgtgcaatccatcttgttcaatcatactcttcctttttcaatattattgaagcatttatcagggttattgtctcatgagcggatacatatttgaatgtatttagaaaaataaacaaataggggttccgcgcacatttccccgagttatgccattgacagctagctcagtcctaggtataatagatctgaattcattaaagaggagaaaggtaccatggcgagtagcgaagacgttatcaaagagttcatgcgtttcaaagttcgtatggaaggttccgttaacggtcacgagttcgaaatcgaaggtgaaggtgaaggtcgtccgtacgaaggtacccagaccgctaaactgaaagttaccaaaggtggtccgctgccgttcgcttgggacatcctgtccccgcagttccagtacggttccaaagcttacgttaaacacccggctgacatcccggactacctgaaactgtccttcccggaaggtttcaaatgggaacgtgttatgaacttcgaagacggtggtgttgttaccgttacccaggactcctccctgcaagacggtgagttcatctacaaagttaaactgcgtggtaccaacttcccgtccgacggtccggttatgcagaaaaaaaccatgggttgggaagcttccaccgaacgtatgtacccggaagacggtgctctgaaaggtgaaatcaaaatgcgtctgaaactgaaagacggtggtcactacgacgctgaagttaaaaccacctacatggctaaaaaaccggttcagctgccgggtgcttacaaaaccgacatcaaactggacatcacctcccacaacgaagactacaccatcgttgaacagtacgaacgtgctgaaggtcgtcactccaccggtgcttaaggatccaaactcgagtaaggatctccaggcatcaaataaaacgaaaggctcagtcgaaagactgggcctttcgttttatctgttgtttgtcggtgaacgctctctactagagtcacactggctcaccttcgggtgggcctttctgcgtttatacctagggtacgggttttgctgcccgcaaacgggctgttctggtgttgactagcctgacgtctaagaaaccattattatcatgacattaacctataaaaataggcgtatcacgaggcagaatttcagataaaaaaaatccttagctttcgctaaggatgatttctggaattctaaagatctttgacagctagctcagtcctaggtataatactagctgagaccagtgactactggtctcagttttagagctagaaatagcaagttaaaataaggctagtccgttatcaacttgaaaaagtggcaccgagtcggtgctttttttataaaacgaaaggctcagtcgaaagactgggcctttcgttttatccgaatacgggttcttgcatgttacattgtcgatctgttcatggtgaacagctttaaatgcaccaaaaactcgtaaaagctctgatgtatctatcttttttacaccgttttcatctgtgcatatggacagttttccctttgatatctaacggtgaacagttgttctacttttgtttgttagtcttgatgcttcactgatagatacaagagccataagaacctcagatccttccgtatttagccagtatgttctctagtgtggttcgttgtttttgcgtgagccatgagaacgaaccattgagatcatgcttactttgcatgtcactcaaaaattttgcctcaaaactggtgagctgaatttttgcagttaaagcatcgtgtagtgtttttcttagtccgttacgtaggtaggaatctgatgtaatggttgttggtattttgtcaccattcatttttatctggttgttctcaagttcggttacgagatccatttgtctatctagttcaacttggaaaatcaacgtatcagtcgggcggcctcgcttatcaaccaccaatttcatattgctgtaagtgtttaaatctttacttattggtttcaaaacccattggttaagccttttaaactcatggtagttattttcaagcattaacatgaacttaaattcatcaaggctaatctctatatttgccttgtgagttttcttttgtgttagttcttttaataaccactcataaatcctcatagagtatttgttttcaaaagacttaacatgttccagattatattttatgaatttttttaactggaaaagataaggcaatatctcttcactaaaaactaattctaatttttcgcttgagaacttggcatagtttgtccactggaaaatctcaaagcctttaaccaaaggattcctgatttccacagttctcgtcatcagctctctggttgctttagctaatacaccataagcattttccctactgatgttcatcatctgagcgtattggttataagtgaacgataccgtccgttctttccttgtagggttttcaatcgtggggttgagtagtgccacacagcataaaattagcttggtttcatgctccgttaagtcatagcgactaatcgctagttcatttgctttgaaaacaactaattcagacatacatctcaattggtctaggtgattttaatcactataccaattgagatgggctagtcaatgataattactagtccttttcccgggagatctgggtatctgtaaattctgctagacctttgctggaaaacttgtaaattctgctagaccctctgtaaattccgctagacctttgtgtgttttttttgtttatattcaagtggttataatttatagaataaa

SEQ ID NO: 1432 - DNA, 4239 bp, synthetic construct; identical to SEQ ID NO: 1431
  source 1..4239: mol_type = other DNA

SEQ ID NO: 1433 - DNA, 4239 bp, synthetic construct
  source 1..4239: mol_type = other DNA
gaaagaataaaaaaagataaaaagaatagatcccagccctgtgtataactcactactttagtcagttccgcagtattacaaaaggatgtcgcaaacgctgtttgctcctctacaaaacagaccttaaaaccctaaaggcttaagtagcaccctcgcaagctcgggcaaatcgctgaatattccttttgtctccgaccatcaggcacctgagtcgctgtctttttcgtgacattcagttcgctgcgctcacggctctggcagtgaatgggggtaaatggcactacaggcgccttttatggattcatgcaaggaaactacccataatacaagaaaagcccgtcacgggcttctcagggcgttttatggcgggtctgctatgtggtgctatctgactttttgctgttcagcagttcctgccctctgattttccagtctgaccacttcggattatcccgtgacaggtcattcagactggctaatgcacccagtaaggcagcggtatcatcaacaggcttacccgtcttactgtccctagtgcttggattctcaccaataaaaaacgcccggcggcaaccgagcgttctgaacaaatccagatggagttctgaggtcattactggatctatcaacaggagtccaagcgagctctcgaaccccagagtcccgctcagaagaactcgtcaagaaggcgatagaaggcgatgcgctgcgaatcgggagcggcgataccgtaaagcacgaggaagcggtcagcccattcgccgccaagctcttcagcaatatcacgggtagccaacgctatgtcctgatagcggtccgccacacccagccggccacagtcgatgaatccagaaaagcggccattttccaccatgatattcggcaagcaggcatcgccatgggtcacgacgagatcctcgccgtcgggcatgcgcgccttgagcctggcgaacagttcggctggcgcgagcccctgatgctcttcgtccagatcatcctgatcgacaagaccggcttccatccgagtacgtgctcgctcgatgcgatgtttcgcttggtggtcgaatgggcaggtagccggatcaagcgtatgcagccgccgcattgcatcagccatgatggatactttctcggcaggagcaaggtgagatgacaggagatcctgccccggcacttcgcccaatagcagccagtcccttcccgcttcagtgacaacgtcgagcacagctgcgcaaggaacgcccgtcgtggccagccacgatagccgcgctgcctcgtcctgcagttcattcagggcaccggacaggtcggtcttgacaaaaagaaccgggcgcccctgcgctgacagccggaacacggcggcatcagagcagccgattgtctgttgtgcccagtcatagccgaatagcctctccacccaagcggccggagaacctgcgtgcaatccatcttgttcaatcatactcttcctttttcaatattattgaagcatttatcagggttattgtctcatgagcggatacatatttgaatgtatttagaaaaataaacaaataggggttccgcgcacatttccccgatttaagccattgacagctagctcagtcctaggtataatagatctgaattcattaaagaggagaaaggtaccatggcgagtagcgaagacgttatcaaagagttcatgcgtttcaaagttcgtatggaaggttccgttaacggtcacgagttcgaaatcgaaggtgaaggtgaaggtcgtccgtacgaaggtacccagaccgctaaactgaaagttaccaaaggtggtccgctgccgttcgcttgggacatcctgtccccgcagttccagtacggttccaaagcttacgttaaacacccggctgacatcccggactacctgaaactgtccttcccggaaggtttcaaatgggaacgtgttatgaacttcgaagacggtggtgttgttaccgttacccaggactcctccctgcaagacggtgagttcatctacaaagttaaactgcgtggtaccaacttcccgtccgacggtccggttatgcagaaaaaaaccatgggttgggaagcttccaccgaacgtatgtacccggaagacggtgctctgaaaggtgaaatcaaaatgcgtctgaaactgaaagacggtggtcactacgacgctgaagttaaaaccacctacatggctaaaaaaccggttcagctgccgggtgcttacaaaaccgacatcaaactggacatcacctcccacaacgaagactacaccatcgttgaacagtacgaacgtgctgaaggtcgtcactccaccggtgcttaaggatccaaactcgagtaaggatctccaggcatcaaataaaacgaaaggctcagtcgaaagactgggcctttcgttttatctgttgtttgtcggtgaacgctctctactagagtcacactggctcaccttcgggtgggcctttctgcgtttatacctagggtacgggttttgctgcccgcaaacgggctgttctggtgttgactagcctgacgtctaagaaaccattattatcatgacattaacctataaaaataggcgtatcacgaggcagaatttcagataaaaaaaatccttagctttcgctaaggatgatttctggaattctaaagatctttgacagctagctcagtcctaggtataatactagctgagaccagtgactactggtctcagttttagagctagaaatagcaagttaaaataaggctagtccgttatcaacttgaaaaagtggcaccgagtcggtgctttttttataaaacgaaaggctcagtcgaaagactgggcctttcgttttatccgaatacgggttcttgcatgttacattgtcgatctgttcatggtgaacagctttaaatgcaccaaaaactcgtaaaagctctgatgtatctatcttttttacaccgttttcatctgtgcatatggacagttttccctttgatatctaacggtgaacagttgttctacttttgtttgttagtcttgatgcttcactgatagatacaagagccataagaacctcagatccttccgtatttagccagtatgttctctagtgtggttcgttgtttttgcgtgagccatgagaacgaaccattgagatcatgcttactttgcatgtcactcaaaaattttgcctcaaaactggtgagctgaatttttgcagttaaagcatcgtgtagtgtttttcttagtccgttacgtaggtaggaatctgatgtaatggttgttggtattttgtcaccattcatttttatctggttgttctcaagttcggttacgagatccatttgtctatctagttcaacttggaaaatcaacgtatcagtcgggcggcctcgcttatcaaccaccaatttcatattgctgtaagtgtttaaatctttacttattggtttcaaaacccattggttaagccttttaaactcatggtagttattttcaagcattaacatgaacttaaattcatcaaggctaatctctatatttgccttgtgagttttcttttgtgttagttcttttaataaccactcataaatcctcatagagtatttgttttcaaaagacttaacatgttccagattatattttatgaatttttttaactggaaaagataaggcaatatctcttcactaaaaactaattctaatttttcgcttgagaacttggcatagtttgtccactggaaaatctcaaagcctttaaccaaaggattcctgatttccacagttctcgtcatcagctctctggttgctttagctaatacaccataagcattttccctactgatgttcatcatctgagcgtattggttataagtgaacgataccgtccgttctttccttgtagggttttcaatcgtggggttgagtagtgccacacagcataaaattagcttggtttcatgctccgttaagtcatagcgactaatcgctagttcatttgctttgaaaacaactaattcagacatacatctcaattggtctaggtgattttaatcactataccaattgagatgggctagtcaatgataattactagtccttttcccgggagatctgggtatctgtaaattctgctagacctttgctggaaaacttgtaaattctgctagaccctctgtaaattccgctagacctttgtgtgttttttttgtttatattcaagtggttataatttatagaataaa

SEQ ID NO: 1434 - DNA, 4963 bp, synthetic construct
  source 1..4963: mol_type = other DNA
tccgggattgacagctagctcagtcctaggtataatgctagcgtggagatatacctcgagcgtgtgcgaacgcgatgacaacttaaagccaattatagatgatgcctcaagcaaccattatggcaggcttagggctgagaagattttagcggcagggcatgccgttattgcctgtggaggagcggatttgttaggccatccgatgaaacaggaaccctcagaagatggcaaaagcaccgttatcttactgtaagctcgggttatccgcgccggatgtcaaggacaagtggttcaccatgcgttgctttatggtatgatagctcgcggccgcaataatagactagcataaccccttggggcctctaaacgggtcttgaggggttttttgctgaacgtacgttttacggctagctcagtcctaggtactatgctagcgtggagatatacggtaccaaggagatataccatggactacaaagaccatgacggtgattataaagatcatgacatcgattacaaggatgacgatgacaagggaggaagcggatccatgatccgccgtaaagcatacaagtttcagttgaaaccgaatccagaacagattgcttctatgaagtcgttcgcgggtgcgtgtcgttttgtctacaatcgtgctttaacgatgcagagcgacatctggcgcaatggtgatcgctacatcccgtataataaaatggcgccgtggctagtcgaatggaaaagccaagaggaaatgtcatggttgagtaatgccccttcccagatcctgcagcaatcgctgaaagacctggataaagcattcaacaacctctttgcacgtcgagccaccttcccctctccgaaaaaaaagggccgcaatgacgcttttcgttatcccactcagcgtgtgaagcttgatgaaggcaatgaacgcatccaactgccgaagctgggttggatgcgttaccggaaaagtcgatccattacaggcgtaattaaaaacgtcaccgtttcgatgaaacttgataaatggtatgtgagtctgcagacagaagcggaggttgatgatccttcaccgaaacagtcaagcatcatagggttggataccagcaacattaaatgcatcaccacttcggacagcattgattttctgtctcaggcgtcgctgcctaaaatggaaaaatccctggagaaaagcctcaaactgctgcgcaagaaaaaacgctttagctccaattgggccaagcaaaaacataaagtgaaccgtctgctgcatcgcatttcaaacatgcgtaaagaccatttccacaaaatttcgacggcactcagcaaaaaccacgccattgtggtaattgaaaacttagaggatgcgaccagtctatctaatcaccgcaagcgcacgagtggtttcacgttaaacgacatttatgagttgaaacgccagcttgactacaagctgaaatggaatggcggcgaactggtgaccgtgtgcgagcgcgacgataacctgaagccaatcattgatgacgccagcagcaaccattatggccggcttagggcggagaagatattagcagccgggcacgctgtcatcgcctgtggcggcgctgatctcttgggtcatccgatgaagcaggagccgtcagaagatggtaaaagcaccgtcattttgctgtaataagaattcctgctgccaccgctgagcaataactagcataaccccttggggcctctaaacgggtcttgaggggttttttgctgaaacctcaggcatttgagaagcacacggtcacactgcttccggtagtcaataaaccggtaaaccagcaatagacataagcggctatttaacgaccctgccctgaaccgacgaccgggtcatcgtggccggatcttgcggcccctcggcttgaacgaattgttagacattatttgccgactaccttggtgatctcgcctttcacgtagtggacaaattcttccaactgatctgcgcgcgaggccaagcgatcttcttcttgtccaagataagcctgtctagcttcaagtatgacgggctgatactgggccggcaggcgctccattgcccagtcggcagcgacatccttcggcgcgattttgccggttactgcgctgtaccaaatgcgggacaacgtaagcactacatttcgctcatcgccagcccagtcgggcggcgagttccatagcgttaaggtttcatttagcgcctcaaatagatcctgttcaggaaccggatcaaagagttcctccgccgctggacctaccaaggcaacgctatgttctcttgcttttgtcagcaagatagccagatcaatgtcgatcgtggctggctcgaagatacctgcaagaatgtcattgcgctgccattctccaaattgcagttcgcgcttagctggataacgccacggaatgatgtcgtcgtgcacaacaatggtgacttctacagcgcggagaatctcgctctctccaggggaagccgaagtttccaaaaggtcgttgatcaaagctcgccgcgttgtttcatcaagccttacggtcaccgtaaccagcaaatcaatatcactgtgtggcttcaggccgccatccactgcggagccgtacaaatgtacggccagcaacgtcggttcgagatggcgctcgatgacgccaactacctctgatagttgagtcgatacttcggcgatcaccgcttccctcatactcttcctttttcaatattattgaagcatttatcagggttattgtctcatgagcggatacatatttgaatgtatttagaaaaataaacaaatagctagctcactcggtcgctacgctccgggcgtgagactgcggcgggcgctgcggacacatacaaagttacccacagattccgtggataagcaggggactaacatgtgaggcaaaacagcagggccgcgccggtggcgtttttccataggctccgccctcctgccagagttcacataaacagacgcttttccggtgcatctgtgggagccgtgaggctcaaccatgaatctgacagtacgggcgaaacccgacaggacttaaagatccccaccgtttccggcgggtcgctccctcttgcgctctcctgttccgaccctgccgtttaccggatacctgttccgcctttctcccttacgggaagtgtggcgctttctcatagctcacacactggtatctcggctcggtgtaggtcgttcgctccaagctgggctgtaagcaagaactccccgttcagcccgactgctgcgccttatccggtaactgttcacttgagtccaacccggaaaagcacggtaaaacgccactggcagcagccattggtaactgggagttcgcagaggatttgtttagctaaacacgcggttgctcttgaagtgtgcgccaaagtccggctacactggaaggacagatttggttgctgtgctctgcgaaagccagttaccacggttaagcagttccccaactgacttaaccttcgatcaaaccacctccccaggtggttttttcgtttacagggcaaaagattacgcgcagaaaaaaaggatctcaagaagatcctttgatcttttctactgaaccgctctagatttcagtgcaatttatctcttcaaatgtagcacctgaagtcagccccatacgatataagttgtaattctcatgttagtcatgccccgcgcccaccggaaggagctgactgggttgaaggctctcaagggcatcggtcgagatcccggtgcctaatgagtgagctaacttacattaattgcgttgcgctcactgcccgctttccagtcgggaaacctgtcgtgccagctgcattaatgaatcggccaacgcgcggggagaggcggtttgcgtattgggcgccagggtggtttttcttttcaccagtgagacgggcaacagctgattgcccttcaccgcctggccctgagagagttgcagcaagcggtccacgctggtttgccccagcaggcgaaaatcctgtttgatggtggttaacggcgggatataacatgagctgtcttcggtatcgtcgtatcccactaccgagatgtccgcaccaacgcgcagcccggactcggtaatggcgcgcattgcgcccagcgccatctgatcgttggcaaccagcatcgcagtgggaacgatgccctcattcagcatttgcatggtttgttgaaaaccggacatggcactccagtcgccttcccgttccgctatcggctgaatttgattgcgagtgagatatttatgccagccagccagacgcagacgcgccgagacagaacttaatgggcccgctaacagcgcgatttgctggtgacccaatgcgaccagatgctccacgcccagtcgcgtaccgtcttcatgggagaaaataatactgttgatgggtgtctggtcagagacatcaagaaataacgccggaacattagtgcaggcagcttccacagcaatggcatcctggtcatccagcggatagttaatgatcagcccactgacgcgttgcgcgagaagattgtgcaccgccgctttacaggcttcgacgccgcttcgttctaccatcgacaccaccacgctggcacccagttgatcggcgcgagatttaatcgccgcgacaatttgcgacggcgcgtgcagggccagactggaggtggcaacgccaatcagcaacgactgtttgcccgccagttgttgtgccacgcggttgggaatgtaattcagctccgccatcgccgcttccactttttcccgcgttttcgcagaaacgtggctggcctggttcaccacgcgggaaacggtctgataagagacaccggcatactctgcgacatcgtataacgttactggtttcacattcaccaccctgaattgactctcttccgggcgctatcatgccataccgcgaaaggttttgcgccattcgatggtg

SEQ ID NO: 1435 - DNA, 4771 bp, synthetic construct
  source 1..4771: mol_type = other DNA
tccgggattgacagctagctcagtcctaggtataatgctagcgtggagatatacctcgagtcggccagaaaaactaagccactaccaatcaatttcaaaccatacgagtttttgaggcaaataacatacaaacagtcatggaatggtggttctgtatgtatggagcagtcttagcacattaaagataattggcggcagggcatgccgtcgttacctgtggagggttctttcaaggactcgctgaagcaggaaacctgatattttcaaggcaggaagtcaaggacaagtggttcaccatgcgttgctttatggtatgatagctcgcggccgcaataatagactagcataaccccttggggcctctaaacgggtcttgaggggttttttgctgaacgtacgttttacggctagctcagtcctaggtactatgctagcgtggagatatacggtaccaaggagatataccatggactacaaagaccatgacggtgattataaagatcatgacatcgattacaaggatgacgatgacaagggaggaagcggatccatgattaagcatcaagctttcaaatacatgttagacccaaatcaggaacagttatccatgatgactgttatctctggtgcgtgtcgttatgtttttaataaagctttagagatagcagtaaaaaaccatttagcaggtgagaagtacgttccttacaacaaaactgcgcccttgttggtacagtggaagtcacaggaaaacttatcatggttaaagcttgctccctctcagtctttgcaacaatcgctgaaagatctggacagagcatttcatggctacatctccagaaaatctggttttccaaaattcaggaagaaaggaactgatgaatctttccgtttccctcaacaaagggtgaaagtggatgagggaaataaaaaagtttatctgcctaaaattgggtgggtaaggtaccgtaaaagccgggatatcattggtgaaataaaaaacattaccatttcccagtcagccaataaatggtatgtcagctttcaaacacagattgaggtaccggaccctgtccatacatcaaactcaacgatcaaagtcaccttaagcgatgaaggaaccatatttttatcagacggtaaaaaatatgctctccccgcaacttatagcaaacattttaaccagctaaacaaactaattagacagaaacacagaaagataaaaaacagtcaaagctggctggcttttcatcatagtacaattttaaaaaaagcaaagttacgaaatatcctgattgatttcctgcataagacttcaactttaatttgcaataaccacgcgaaaatttcagttgatacgaaaaagggaaattcggcgcgcaaaaccaagccgttacctattaatttcaaaccgtatgaatttctgcgtcaaatcacgtacaaacagtcatggaacggtggcagcgtgtgcatggagcagagttaataagaattcctgctgccaccgctgagcaataactagcataaccccttggggcctctaaacgggtcttgaggggttttttgctgaaacctcaggcatttgagaagcacacggtcacactgcttccggtagtcaataaaccggtaaaccagcaatagacataagcggctatttaacgaccctgccctgaaccgacgaccgggtcatcgtggccggatcttgcggcccctcggcttgaacgaattgttagacattatttgccgactaccttggtgatctcgcctttcacgtagtggacaaattcttccaactgatctgcgcgcgaggccaagcgatcttcttcttgtccaagataagcctgtctagcttcaagtatgacgggctgatactgggccggcaggcgctccattgcccagtcggcagcgacatccttcggcgcgattttgccggttactgcgctgtaccaaatgcgggacaacgtaagcactacatttcgctcatcgccagcccagtcgggcggcgagttccatagcgttaaggtttcatttagcgcctcaaatagatcctgttcaggaaccggatcaaagagttcctccgccgctggacctaccaaggcaacgctatgttctcttgcttttgtcagcaagatagccagatcaatgtcgatcgtggctggctcgaagatacctgcaagaatgtcattgcgctgccattctccaaattgcagttcgcgcttagctggataacgccacggaatgatgtcgtcgtgcacaacaatggtgacttctacagcgcggagaatctcgctctctccaggggaagccgaagtttccaaaaggtcgttgatcaaagctcgccgcgttgtttcatcaagccttacggtcaccgtaaccagcaaatcaatatcactgtgtggcttcaggccgccatccactgcggagccgtacaaatgtacggccagcaacgtcggttcgagatggcgctcgatgacgccaactacctctgatagttgagtcgatacttcggcgatcaccgcttccctcatactcttcctttttcaatattattgaagcatttatcagggttattgtctcatgagcggatacatatttgaatgtatttagaaaaataaacaaatagctagctcactcggtcgctacgctccgggcgtgagactgcggcgggcgctgcggacacatacaaagttacccacagattccgtggataagcaggggactaacatgtgaggcaaaacagcagggccgcgccggtggcgtttttccataggctccgccctcctgccagagttcacataaacagacgcttttccggtgcatctgtgggagccgtgaggctcaaccatgaatctgacagtacgggcgaaacccgacaggacttaaagatccccaccgtttccggcgggtcgctccctcttgcgctctcctgttccgaccctgccgtttaccggatacctgttccgcctttctcccttacgggaagtgtggcgctttctcatagctcacacactggtatctcggctcggtgtaggtcgttcgctccaagctgggctgtaagcaagaactccccgttcagcccgactgctgcgccttatccggtaactgttcacttgagtccaacccggaaaagcacggtaaaacgccactggcagcagccattggtaactgggagttcgcagaggatttgtttagctaaacacgcggttgctcttgaagtgtgcgccaaagtccggctacactggaaggacagatttggttgctgtgctctgcgaaagccagttaccacggttaagcagttccccaactgacttaaccttcgatcaaaccacctccccaggtggttttttcgtttacagggcaaaagattacgcgcagaaaaaaaggatctcaagaagatcctttgatcttttctactgaaccgctctagatttcagtgcaatttatctcttcaaatgtagcacctgaagtcagccccatacgatataagttgtaattctcatgttagtcatgccccgcgcccaccggaaggagctgactgggttgaaggctctcaagggcatcggtcgagatcccggtgcctaatgagtgagctaacttacattaattgcgttgcgctcactgcccgctttccagtcgggaaacctgtcgtgccagctgcattaatgaatcggccaacgcgcggggagaggcggtttgcgtattgggcgccagggtggtttttcttttcaccagtgagacgggcaacagctgattgcccttcaccgcctggccctgagagagttgcagcaagcggtccacgctggtttgccccagcaggcgaaaatcctgtttgatggtggttaacggcgggatataacatgagctgtcttcggtatcgtcgtatcccactaccgagatgtccgcaccaacgcgcagcccggactcggtaatggcgcgcattgcgcccagcgccatctgatcgttggcaaccagcatcgcagtgggaacgatgccctcattcagcatttgcatggtttgttgaaaaccggacatggcactccagtcgccttcccgttccgctatcggctgaatttgattgcgagtgagatatttatgccagccagccagacgcagacgcgccgagacagaacttaatgggcccgctaacagcgcgatttgctggtgacccaatgcgaccagatgctccacgcccagtcgcgtaccgtcttcatgggagaaaataatactgttgatgggtgtctggtcagagacatcaagaaataacgccggaacattagtgcaggcagcttccacagcaatggcatcctggtcatccagcggatagttaatgatcagcccactgacgcgttgcgcgagaagattgtgcaccgccgctttacaggcttcgacgccgcttcgttctaccatcgacaccaccacgctggcacccagttgatcggcgcgagatttaatcgccgcgacaatttgcgacggcgcgtgcagggccagactggaggtggcaacgccaatcagcaacgactgtttgcccgccagttgttgtgccacgcggttgggaatgtaattcagctccgccatcgccgcttccactttttcccgcgttttcgcagaaacgtggctggcctggttcaccacgcgggaaacggtctgataagagacaccggcatactctgcgacatcgtataacgttactggtttcacattcaccaccctgaattgactctcttccgggcgctatcatgccataccgcgaaaggttttgcgccattcgatggtg

SEQ ID NO: 1436 - DNA, 4912 bp, synthetic construct
  source 1..4912: mol_type = other DNA
tccgggattgacagctagctcagtcctaggtataatgctagcgtggagatatacctcgagttcattatgaattaatacgtcagctaacttataaacaagaatggcatggtgggcttgttatcaagctttcggcagaaaaaaatgtagatgctgaaagtgcatggaccaaagcatgtaatttattggcggcagggcttgccgtcactgcctgtggaggagaggtgtcaaaagactctccgatgaagcaggaaccctaagtcagcaacgactgggaagtcaaggacaagtggttcaccatgcgttgctttatggtatgatagctcgcggccgcaataatagactagcataaccccttggggcctctaaacgggtcttgaggggttttttgctgaacgtacgttttacggctagctcagtcctaggtactatgctagcgtggagatatacggtaccaaggagatataccatggactacaaagaccatgacggtgattataaagatcatgacatcgattacaaggatgacgatgacaagggaggaagcggatccatgatcaaacagcaggcgttcaaatttgcattgaagctcaacgaccagcagaaggctaacatgctgctttttgctggcgcctgtcgttttgtttataataaaggacttgcgttgttaaaggagagctacgagtcaggtcagaaacatatgcattacaaccagcttgcaccattattggttgaatggaaatccgatcctgctttatcctggctgaaacaagcaccatcgcaatctctacaacagtcgctacgtgatcttgataaagctttttcgaactttttttacggaaaggcagaacatccgagatttaaaaagaaggggcagcacgacgcattccgctttccgagccagcgagtaaaagtggatcaggaaaagcaacttgttcttcttccgaagcttggctgggttaaataccggaaaagccggaatataacaggcgccataaaaaatgtctctatctcgggaaaactagggaactggtatataagttttaacacgcaaactgatattgcagaaccaatacatcctgccatatcaaaaataggtgtatatgttggcaccaagaaaaacattactttatctgatggcacacaatatattccacctcaaagcctcataacgttgccgaaacagatccagcgactcactaattgcttgcgtaaaaaaaatcgctacagcaataattggttaaaaagcaaacatagaattaaccgattatcatcaaggttaaaccaagtcaaggttgattatctgcataaagcttcaacggcgatcagcaaaaaccacgctatgatcgtaatagctgattttgaaaaaaaatcattctctgctgataagcagcagaaaaatctcacgacatgtgaaaaatcaacttcaatacactacgaactgatccgccagctgacgtacaaacaggaatggcatggtggtcttgtgatcaagctatcggcagagaaaaacgtggatgccgagagcgcatggaccaaagcgtgcaacctcctggcggcgggcttagccgtcaccgcctgtggaggcgaggtgagcaaagactcaccgatgaagcaggaaccataataagaattcctgctgccaccgctgagcaataactagcataaccccttggggcctctaaacgggtcttgaggggttttttgctgaaacctcaggcatttgagaagcacacggtcacactgcttccggtagtcaataaaccggtaaaccagcaatagacataagcggctatttaacgaccctgccctgaaccgacgaccgggtcatcgtggccggatcttgcggcccctcggcttgaacgaattgttagacattatttgccgactaccttggtgatctcgcctttcacgtagtggacaaattcttccaactgatctgcgcgcgaggccaagcgatcttcttcttgtccaagataagcctgtctagcttcaagtatgacgggctgatactgggccggcaggcgctccattgcccagtcggcagcgacatccttcggcgcgattttgccggttactgcgctgtaccaaatgcgggacaacgtaagcactacatttcgctcatcgccagcccagtcgggcggcgagttccatagcgttaaggtttcatttagcgcctcaaatagatcctgttcaggaaccggatcaaagagttcctccgccgctggacctaccaaggcaacgctatgttctcttgcttttgtcagcaagatagccagatcaatgtcgatcgtggctggctcgaagatacctgcaagaatgtcattgcgctgccattctccaaattgcagttcgcgcttagctggataacgccacggaatgatgtcgtcgtgcacaacaatggtgacttctacagcgcggagaatctcgctctctccaggggaagccgaagtttccaaaaggtcgttgatcaaagctcgccgcgttgtttcatcaagccttacggtcaccgtaaccagcaaatcaatatcactgtgtggcttcaggccgccatccactgcggagccgtacaaatgtacggccagcaacgtcggttcgagatggcgctcgatgacgccaactacctctgatagttgagtcgatacttcggcgatcaccgcttccctcatactcttcctttttcaatattattgaagcatttatcagggttattgtctcatgagcggatacatatttgaatgtatttagaaaaataaacaaatagctagctcactcggtcgctacgctccgggcgtgagactgcggcgggcgctgcggacacatacaaagttacccacagattccgtggataagcaggggactaacatgtgaggcaaaacagcagggccgcgccggtggcgtttttccataggctccgccctcctgccagagttcacataaacagacgcttttccggtgcatctgtgggagccgtgaggctcaaccatgaatctgacagtacgggcgaaacccgacaggacttaaagatccccaccgtttccggcgggtcgctccctcttgcgctctcctgttccgaccctgccgtttaccggatacctgttccgcctttctcccttacgggaagtgtggcgctttctcatagctcacacactggtatctcggctcggtgtaggtcgttcgctccaagctgggctgtaagcaagaactccccgttcagcccgactgctgcgccttatccggtaactgttcacttgagtccaacccggaaaagcacggtaaaacgccactggcagcagccattggtaactgggagttcgcagaggatttgtttagctaaacacgcggttgctcttgaagtgtgcgccaaagtccggctacactggaaggacagatttggttgctgtgctctgcgaaagccagttaccacggttaagcagttccccaactgacttaaccttcgatcaaaccacctccccaggtggttttttcgtttacagggcaaaagattacgcgcagaaaaaaaggatctcaagaagatcctttgatcttttctactgaaccgctctagatttcagtgcaatttatctcttcaaatgtagcacctgaagtcagccccatacgatataagttgtaattctcatgttagtcatgccccgcgcccaccggaaggagctgactgggttgaaggctctcaagggcatcggtcgagatcccggtgcctaatgagtgagctaacttacattaattgcgttgcgctcactgcccgctttccagtcgggaaacctgtcgtgccagctgcattaatgaatcggccaacgcgcggggagaggcggtttgcgtattgggcgccagggtggtttttcttttcaccagtgagacgggcaacagctgattgcccttcaccgcctggccctgagagagttgcagcaagcggtccacgctggtttgccccagcaggcgaaaatcctgtttgatggtggttaacggcgggatataacatgagctgtcttcggtatcgtcgtatcccactaccgagatgtccgcaccaacgcgcagcccggactcggtaatggcgcgcattgcgcccagcgccatctgatcgttggcaaccagcatcgcagtgggaacgatgccctcattcagcatttgcatggtttgttgaaaaccggacatggcactccagtcgccttcccgttccgctatcggctgaatttgattgcgagtgagatatttatgccagccagccagacgcagacgcgccgagacagaacttaatgggcccgctaacagcgcgatttgctggtgacccaatgcgaccagatgctccacgcccagtcgcgtaccgtcttcatgggagaaaataatactgttgatgggtgtctggtcagagacatcaagaaataacgccggaacattagtgcaggcagcttccacagcaatggcatcctggtcatccagcggatagttaatgatcagcccactgacgcgttgcgcgagaagattgtgcaccgccgctttacaggcttcgacgccgcttcgttctaccatcgacaccaccacgctggcacccagttgatcggcgcgagatttaatcgccgcgacaatttgcgacggcgcgtgcagggccagactggaggtggcaacgccaatcagcaacgactgtttgcccgccagttgttgtgccacgcggttgggaatgtaattcagctccgccatcgccgcttccactttttcccgcgttttcgcagaaacgtggctggcctggttcaccacgcgggaaacggtctgataagagacaccggcatactctgcgacatcgtataacgttactggtttcacattcaccaccctgaattgactctcttccgggcgctatcatgccataccgcgaaaggttttgcgccattcgatggtg

SEQ ID NO: 1437 - DNA, 4765 bp, synthetic construct
  source 1..4765: mol_type = other DNA
tccgggattgacagctagctcagtcctaggtataatgctagcgtggagatatacctcgagacttgttaggcaattattgtataaacaggaatggttaggtgggaaaataattcatctagatgcttagtatttattaaatatcctttgagagatttttcactcgttttttaatataaatcaaagtgattattggcggcagggcatgtcgtttcagtttgtggaggaaggtttttttaacttctgttgaagcaaaaatctcggatgtcattgagaatgtcaaggacaagtggttcaccatgcgttgctttatggtatgatagctcgcggccgcaataatagactagcataaccccttggggcctctaaacgggtcttgaggggttttttgctgaacgtacgttttacggctagctcagtcctaggtactatgctagcgtggagatatacggtaccaaggagatataccatggactacaaagaccatgacggtgattataaagatcatgacatcgattacaaggatgacgatgacaagggaggaagcggatccatgatcaaaaaaaaggcatttaaatttttgcttgaaccaagtaaaagtcagatttctgacgttttggtttttgctggtgcctgccgttttgtctataataaaggccttgctctcctaagcgaaaactataataacggcaagccgttcctgaactataataaacttgcacctttattagtcgagtggaaaaatgataataagttggagtggcttaaactttgtccatctcaatgcttacagcaatcattacgtgatctcgatagggcttttcagaatttcttttcaggaagatcacagtatcctcgattcaaaaagaaaggccgcagtgattcctttagagtcccatgccaaagagttagattagaccaagaaaaaggtttggtatcattgcctaaattaggatgggttaagtaccgtaaaagtcgtgcaatcactggagatttgaaaaatgttacagtgtcaagaaagtttgataagtggtacataagttttaatactgaggaggttgtttctaatccggttcatccatcagttgataagacaagaattttactcaatgatggatatgttaccctgtgcacggggggcgatctttcagtcaaaaaatttactagtctagttgatgaaaaaaaaataaaacgtcttaataaagagttaagtaggaaagttaaaaacagtaacaattggctgaaaaataaaaagaaaattgacaaaataagattaaagtcaggtagtttcagactggatgccatacataagataactacgacaatatgcaaaaaacacgcagttgtggaagtggttaacgtaaagaattttgtatcggataaaaataacattgcaacaagtatgagatacgaacttgttagacagttactttataaacaagaatggttaggtggaaaaattattcatttagatgcttaatgagaattcctgctgccaccgctgagcaataactagcataaccccttggggcctctaaacgggtcttgaggggttttttgctgaaacctcaggcatttgagaagcacacggtcacactgcttccggtagtcaataaaccggtaaaccagcaatagacataagcggctatttaacgaccctgccctgaaccgacgaccgggtcatcgtggccggatcttgcggcccctcggcttgaacgaattgttagacattatttgccgactaccttggtgatctcgcctttcacgtagtggacaaattcttccaactgatctgcgcgcgaggccaagcgatcttcttcttgtccaagataagcctgtctagcttcaagtatgacgggctgatactgggccggcaggcgctccattgcccagtcggcagcgacatccttcggcgcgattttgccggttactgcgctgtaccaaatgcgggacaacgtaagcactacatttcgctcatcgccagcccagtcgggcggcgagttccatagcgttaaggtttcatttagcgcctcaaatagatcctgttcaggaaccggatcaaagagttcctccgccgctggacctaccaaggcaacgctatgttctcttgcttttgtcagcaagatagccagatcaatgtcgatcgtggctggctcgaagatacctgcaagaatgtcattgcgctgccattctccaaattgcagttcgcgcttagctggataacgccacggaatgatgtcgtcgtgcacaacaatggtgacttctacagcgcggagaatctcgctctctccaggggaagccgaagtttccaaaaggtcgttgatcaaagctcgccgcgttgtttcatcaagccttacggtcaccgtaaccagcaaatcaatatcactgtgtggcttcaggccgccatccactgcggagccgtacaaatgtacggccagcaacgtcggttcgagatggcgctcgatgacgccaactacctctgatagttgagtcgatacttcggcgatcaccgcttccctcatactcttcctttttcaatattattgaagcatttatcagggttattgtctcatgagcggatacatatttgaatgtatttagaaaaataaacaaatagctagctcactcggtcgctacgctccgggcgtgagactgcggcgggcgctgcggacacatacaaagttacccacagattccgtggataagcaggggactaacatgtgaggcaaaacagcagggccgcgccggtggcgtttttccataggctccgccctcctgccagagttcacataaacagacgcttttccggtgcatctgtgggagccgtgaggctcaaccatgaatctgacagtacgggcgaaacccgacaggacttaaagatccccaccgtttccggcgggtcgctccctcttgcgctctcctgttccgaccctgccgtttaccggatacctgttccgcctttctcccttacgggaagtgtggcgctttctcatagctcacacactggtatctcggctcggtgtaggtcgttcgctccaagctgggctgtaagcaagaactccccgttcagcccgactgctgcgccttatccggtaactgttcacttgagtccaacccggaaaagcacggtaaaacgccactggcagcagccattggtaactgggagttcgcagaggatttgtttagctaaacacgcggttgctcttgaagtgtgcgccaaagtccggctacactggaaggacagatttggttgctgtgctctgcgaaagccagttaccacggttaagcagttccccaactgacttaaccttcgatcaaaccacctccccaggtggttttttcgtttacagggcaaaagattacgcgcagaaaaaaaggatctcaagaagatcctttgatcttttctactgaaccgctctagatttcagtgcaatttatctcttcaaatgtagcacctgaagtcagccccatacgatataagttgtaattctcatgttagtcatgccccgcgcccaccggaaggagctgactgggttgaaggctctcaagggcatcggtcgagatcccggtgcctaatgagtgagctaacttacattaattgcgttgcgctcactgcccgctttccagtcgggaaacctgtcgtgccagctgcattaatgaatcggccaacgcgcggggagaggcggtttgcgtattgggcgccagggtggtttttcttttcaccagtgagacgggcaacagctgattgcccttcaccgcctggccctgagagagttgcagcaagcggtccacgctggtttgccccagcaggcgaaaatcctgtttgatggtggttaacggcgggatataacatgagctgtcttcggtatcgtcgtatcccactaccgagatgtccgcaccaacgcgcagcccggactcggtaatggcgcgcattgcgcccagcgccatctgatcgttggcaaccagcatcgcagtgggaacgatgccctcattcagcatttgcatggtttgttgaaaaccggacatggcactccagtcgccttcccgttccgctatcggctgaatttgattgcgagtgagatatttatgccagccagccagacgcagacgcgccgagacagaacttaatgggcccgctaacagcgcgatttgctggtgacccaatgcgaccagatgctccacgcccagtcgcgtaccgtcttcatgggagaaaataatactgttgatgggtgtctggtcagagacatcaagaaataacgccggaacattagtgcaggcagcttccacagcaatggcatcctggtcatccagcggatagttaatgatcagcccactgacgcgttgcgcgagaagattgtgcaccgccgctttacaggcttcgacgccgcttcgttctaccatcgacaccaccacgctggcacccagttgatcggcgcgagatttaatcgccgcgacaatttgcgacggcgcgtgcagggccagactggaggtggcaacgccaatcagcaacgactgtttgcccgccagttgttgtgccacgcggttgggaatgtaattcagctccgccatcgccgcttccactttttcccgcgttttcgcagaaacgtggctggcctggttcaccacgcgggaaacggtctgataagagacaccggcatactctgcgacatcgtataacgttactggtttcacattcaccaccctgaattgactctcttccgggcgctatcatgccataccgcgaaaggttttgcgccattcgatggtg

SEQ ID NO: 1438 - DNA, 4765 bp, synthetic construct
  source 1..4765: mol_type = other DNA
tccgggattgacagctagctcagtcctaggtataatgctagcgtggagatatacctcgaggttagacagttaatgtataaacaagaatggttaggtggtcaggtaattcggttaggcgattagcgtagtttattaatgattaaataagagttatatacagctgtttatatgaccttagatgaattgctggcggcagggcatgtcgtgtcagtttgtggaggggggttatttcaacttccgatgaagcaaaaatctcggttattagtactgagaatgtcaaggacaagtggttcaccatgcgttgctttatggtatgatagctcgcggccgcaataatagactagcataaccccttggggcctctaaacgggtcttgaggggttttttgctgaacgtacgttttacggctagctcagtcctaggtactatgctagcgtggagatatacggtaccaaggagatataccatggactacaaagaccatgacggtgattataaagatcatgacatcgattacaaggatgacgatgacaagggaggaagcggatccatgattaagaaacaggcgtttaaatttttgcttgagccgaataaaaatcatatcaatgaatttttggttttcgcaggttcctgtcgatttgtatacaataaaggactcgctcttattaatgagaattatgattcgggtaagaaattcttaaactacaatcaactggcatcagaattagttaattggaaaaatgaagagtgccttgcatggctaaaaatggctccatctcagtgcttgcaacaatcattaagggatctggataaagcgtttaaaaatttcttttcgggaaaatcacagtaccctcgattcaaaaagaaaggccgtaatgattcttttagagtgccttgccaaagagtcaggctggaccaagaaaaacatttggtatcattacccaaactagggtgggttaagtatcgtaaaagccgagagataacaggagtattaaagaacgttactatttcaagaaagcttgataaatggtatataagttttaatacagaagtagttgttcctgaacccgttcatccatcattcagcaaagccaaagttttgctaaataatgaatgtattgtgcaacttacatcgaatgagagcctggtcgagcaatttaccagcatggaaggtaataaaaagctaaggaaccttaataatatactaggcagaaaagtaaaatacagcagcaattggctaaaaactaaaaagaaaattgatagcgtaaaagcaaggtcaagcaggcgcagactggatgccttacataaaataactacagcaatatgcaaaaaacacgctattgtagagttggttaatttaacggattctttacctgataaaaataatggttttgtaagcatgggttatgaatttgttcgccagctgatgtacaagcaggagtggctgggcggtcaggtgatccgtctgggcgactaataagaattcctgctgccaccgctgagcaataactagcataaccccttggggcctctaaacgggtcttgaggggttttttgctgaaacctcaggcatttgagaagcacacggtcacactgcttccggtagtcaataaaccggtaaaccagcaatagacataagcggctatttaacgaccctgccctgaaccgacgaccgggtcatcgtggccggatcttgcggcccctcggcttgaacgaattgttagacattatttgccgactaccttggtgatctcgcctttcacgtagtggacaaattcttccaactgatctgcgcgcgaggccaagcgatcttcttcttgtccaagataagcctgtctagcttcaagtatgacgggctgatactgggccggcaggcgctccattgcccagtcggcagcgacatccttcggcgcgattttgccggttactgcgctgtaccaaatgcgggacaacgtaagcactacatttcgctcatcgccagcccagtcgggcggcgagttccatagcgttaaggtttcatttagcgcctcaaatagatcctgttcaggaaccggatcaaagagttcctccgccgctggacctaccaaggcaacgctatgttctcttgcttttgtcagcaagatagccagatcaatgtcgatcgtggctggctcgaagatacctgcaagaatgtcattgcgctgccattctccaaattgcagttcgcgcttagctggataacgccacggaatgatgtcgtcgtgcacaacaatggtgacttctacagcgcggagaatctcgctctctccaggggaagccgaagtttccaaaaggtcgttgatcaaagctcgccgcgttgtttcatcaagccttacggtcaccgtaaccagcaaatcaatatcactgtgtggcttcaggccgccatccactgcggagccgtacaaatgtacggccagcaacgtcggttcgagatggcgctcgatgacgccaactacctctgatagttgagtcgatacttcggcgatcaccgcttccctcatactcttcctttttcaatattattgaagcatttatcagggttattgtctcatgagcggatacatatttgaatgtatttagaaaaataaacaaatagctagctcactcggtcgctacgctccgggcgtgagactgcggcgggcgctgcggacacatacaaagttacccacagattccgtggataagcaggggactaacatgtgaggcaaaacagcagggccgcgccggtggcgtttttccataggctccgccctcctgccagagttcacataaacagacgcttttccggtgcatctgtgggagccgtgaggctcaaccatgaatctgacagtacgggcgaaacccgacaggacttaaagatccccaccgtttccggcgggtcgctccctcttgcgctctcctgttccgaccctgccgtttaccggatacctgttccgcctttctcccttacgggaagtgtggcgctttctcatagctcacacactggtatctcggctcggtgtaggtcgttcgctccaagctgggctgtaagcaagaactccccgttcagcccgactgctgcgccttatccggtaactgttcacttgagtccaacccggaaaagcacggtaaaacgccactggcagcagccattggtaactgggagttcgcagaggatttgtttagctaaacacgcggttgctcttgaagtgtgcgccaaagtccggctacactggaaggacagatttggttgctgtgctctgcgaaagccagttaccacggttaagcagttccccaactgacttaaccttcgatcaaaccacctccccaggtggttttttcgtttacagggcaaaagattacgcgcagaaaaaaaggatctcaagaagatcctttgatcttttctactgaaccgctctagatttcagtgcaatttatctcttcaaatgtagcacctgaagtcagccccatacgatataagttgtaattctcatgttagtcatgccccgcgcccaccggaaggagctgactgggttgaaggctctcaagggcatcggtcgagatcccggtgcctaatgagtgagctaacttacattaattgcgttgcgctcactgcccgctttccagtcgggaaacctgtcgtgccagctgcattaatgaatcggccaacgcgcggggagaggcggtttgcgtattgggcgccagggtggtttttcttttcaccagtgagacgggcaacagctgattgcccttcaccgcctggccctgagagagttgcagcaagcggtccacgctggtttgccccagcaggcgaaaatcctgtttgatggtggttaacggcgggatataacatgagctgtcttcggtatcgtcgtatcccactaccgagatgtccgcaccaacgcgcagcccggactcggtaatggcgcgcattgcgcccagcgccatctgatcgttggcaaccagcatcgcagtgggaacgatgccctcattcagcatttgcatggtttgttgaaaaccggacatggcactccagtcgccttcccgttccgctatcggctgaatttgattgcgagtgagatatttatgccagccagccagacgcagacgcgccgagacagaacttaatgggcccgctaacagcgcgatttgctggtgacccaatgcgaccagatgctccacgcccagtcgcgtaccgtcttcatgggagaaaataatactgttgatgggtgtctggtcagagacatcaagaaataacgccggaacattagtgcaggcagcttccacagcaatggcatcctggtcatccagcggatagttaatgatcagcccactgacgcgttgcgcgagaagattgtgcaccgccgctttacaggcttcgacgccgcttcgttctaccatcgacaccaccacgctggcacccagttgatcggcgcgagatttaatcgccgcgacaatttgcgacggcgcgtgcagggccagactggaggtggcaacgccaatcagcaacgactgtttgcccgccagttgttgtgccacgcggttgggaatgtaattcagctccgccatcgccgcttccactttttcccgcgttttcgcagaaacgtggctggcctggttcaccacgcgggaaacggtctgataagagacaccggcatactctgcgacatcgtataacgttactggtttcacattcaccaccctgaattgactctcttccgggcgctatcatgccataccgcgaaaggttttgcgccattcgatggtg

SEQ ID NO: 1439 - DNA, 4765 bp, synthetic construct
  source 1..4765: mol_type = other DNA
tccgggattgacagctagctcagtcctaggtataatgctagcgtggagatatacctcgagagcatgagatacgaatttgtcagacagctaatttacaaacaagagtggctgggtggtgaagttattcgccgagagttagcctagtaacgcctgttttcgagatgatgtagtactaaatgatgaaatttatgcggcagggcatgtcgtttctgcttgtcgaggaaggttacttaaacttccgttgaagcaagaatctcatgattgcatctgagagtgtcaaggacaagtggttcaccatgcgttgctttatggtatgatagctcgcggccgcaataatagactagcataaccccttggggcctctaaacgggtcttgaggggttttttgctgaacgtacgttttacggctagctcagtcctaggtactatgctagcgtggagatatacggtaccaaggagatataccatggactacaaagaccatgacggtgattataaagatcatgacatcgattacaaggatgacgatgacaagggaggaagcggatccatgattaaaaaacaggcgttcaaattccggcttgaacctaataaaagccagtcgtctgacttttttatgtttgctggttcctgtcgttttgtttataacaaagcccttgctcttctcaacgataattaccattctggcaagaaattcatgggttacaatcaactagctacagagttagttgagtggaaaagtgaagaaagcctttcctggttgaaagcttctccttcccagtgcttgcagcaatctctaagagatttagatagagctttccggaattttttctccggaaaagcacaatatccaaagtttaaaaagaaagggcggcatgattccttccgtattccatgtcaaagggttagagtagatcaagataagaaaatggtgtctctccccaaagtcggttgggtaaaatatcgaaaaagtcgtgaaatcattggagagttaaaaaacgtaaccatttccatgaagcaagataagtggtacatcagttttaatacagagagtatggtccctgacccaatgcatccttctgatatcaaaacaaaaattgtacttagtgatcagtgtgagtttcctatccggttggatagcagcatggatagttctcatcagcttgatgaagtaaaaaaattagcccgacttaatagaatattaatcagaagaattaagtacagcagtaattggttgaaaactaaagggaaaattgacaggataaaggcaaggttagctaggtgcaggctagataacatccataaagtaactacagcaatttgtaaaaaacacgcagttgttgaggttttgagcttgatggattcagtatcggataaaaatgatatcactctgagcatgcgctacgaatttgttcgtcagcttatctataagcaggaatggcttggcggcgaagtgattcgccgtgaactcgcgtaataagaattcctgctgccaccgctgagcaataactagcataaccccttggggcctctaaacgggtcttgaggggttttttgctgaaacctcaggcatttgagaagcacacggtcacactgcttccggtagtcaataaaccggtaaaccagcaatagacataagcggctatttaacgaccctgccctgaaccgacgaccgggtcatcgtggccggatcttgcggcccctcggcttgaacgaattgttagacattatttgccgactaccttggtgatctcgcctttcacgtagtggacaaattcttccaactgatctgcgcgcgaggccaagcgatcttcttcttgtccaagataagcctgtctagcttcaagtatgacgggctgatactgggccggcaggcgctccattgcccagtcggcagcgacatccttcggcgcgattttgccggttactgcgctgtaccaaatgcgggacaacgtaagcactacatttcgctcatcgccagcccagtcgggcggcgagttccatagcgttaaggtttcatttagcgcctcaaatagatcctgttcaggaaccggatcaaagagttcctccgccgctggacctaccaaggcaacgctatgttctcttgcttttgtcagcaagatagccagatcaatgtcgatcgtggctggctcgaagatacctgcaagaatgtcattgcgctgccattctccaaattgcagttcgcgcttagctggataacgccacggaatgatgtcgtcgtgcacaacaatggtgacttctacagcgcggagaatctcgctctctccaggggaagccgaagtttccaaaaggtcgttgatcaaagctcgccgcgttgtttcatcaagccttacggtcaccgtaaccagcaaatcaatatcactgtgtggcttcaggccgccatccactgcggagccgtacaaatgtacggccagcaacgtcggttcgagatggcgctcgatgacgccaactacctctgatagttgagtcgatacttcggcgatcaccgcttccctcatactcttcctttttcaatattattgaagcatttatcagggttattgtctcatgagcggatacatatttgaatgtatttagaaaaataaacaaatagctagctcactcggtcgctacgctccgggcgtgagactgcggcgggcgctgcggacacatacaaagttacccacagattccgtggataagcaggggactaacatgtgaggcaaaacagcagggccgcgccggtggcgtttttccataggctccgccctcctgccagagttcacataaacagacgcttttccggtgcatctgtgggagccgtgaggctcaaccatgaatctgacagtacgggcgaaacccgacaggacttaaagatccccaccgtttccggcgggtcgctccctcttgcgctctcctgttccgaccctgccgtttaccggatacctgttccgcctttctcccttacgggaagtgtggcgctttctcatagctcacacactggtatctcggctcggtgtaggtcgttcgctccaagctgggctgtaagcaagaactccccgttcagcccgactgctgcgccttatccggtaactgttcacttgagtccaacccggaaaagcacggtaaaacgccactggcagcagccattggtaactgggagttcgcagaggatttgtttagctaaacacgcggttgctcttgaagtgtgcgccaaagtccggctacactggaaggacagatttggttgctgtgctctgcgaaagccagttaccacggttaagcagttccccaactgacttaaccttcgatcaaaccacctccccaggtggttttttcgtttacagggcaaaagattacgcgcagaaaaaaaggatctcaagaagatcctttgatcttttctactgaaccgctctagatttcagtgcaatttatctcttcaaatgtagcacctgaagtcagccccatacgatataagttgtaattctcatgttagtcatgccccgcgcccaccggaaggagctgactgggttgaaggctctcaagggcatcggtcgagatcccggtgcctaatgagtgagctaacttacattaattgcgttgcgctcactgcccgctttccagtcgggaaacctgtcgtgccagctgcattaatgaatcggccaacgcgcggggagaggcggtttgcgtattgggcgccagggtggtttttcttttcaccagtgagacgggcaacagctgattgcccttcaccgcctggccctgagagagttgcagcaagcggtccacgctggtttgccccagcaggcgaaaatcctgtttgatggtggttaacggcgggatataacatgagctgtcttcggtatcgtcgtatcccactaccgagatgtccgcaccaacgcgcagcccggactcggtaatggcgcgcattgcgcccagcgccatctgatcgttggcaaccagcatcgcagtgggaacgatgccctcattcagcatttgcatggtttgttgaaaaccggacatggcactccagtcgccttcccgttccgctatcggctgaatttgattgcgagtgagatatttatgccagccagccagacgcagacgcgccgagacagaacttaatgggcccgctaacagcgcgatttgctggtgacccaatgcgaccagatgctccacgcccagtcgcgtaccgtcttcatgggagaaaataatactgttgatgggtgtctggtcagagacatcaagaaataacgccggaacattagtgcaggcagcttccacagcaatggcatcctggtcatccagcggatagttaatgatcagcccactgacgcgttgcgcgagaagattgtgcaccgccgctttacaggcttcgacgccgcttcgttctaccatcgacaccaccacgctggcacccagttgatcggcgcgagatttaatcgccgcgacaatttgcgacggcgcgtgcagggccagactggaggtggcaacgccaatcagcaacgactgtttgcccgccagttgttgtgccacgcggttgggaatgtaattcagctccgccatcgccgcttccactttttcccgcgttttcgcagaaacgtggctggcctggttcaccacgcgggaaacggtctgataagagacaccggcatactctgcgacatcgtataacgttactggtttcacattcaccaccctgaattgactctcttccgggcgctatcatgccataccgcgaaaggttttgcgccattcgatggtg

SEQ ID NO: 1440 - DNA, 4771 bp, synthetic construct; identical to SEQ ID NO: 1410
  source 1..4771: mol_type = other DNA

SEQ ID NO: 1441 - DNA, 4286 bp, synthetic construct
  source 1..4286: mol_type = other DNA
gaaagaataaaaaaagataaaaagaatagatcccagccctgtgtataactcactactttagtcagttccgcagtattacaaaaggatgtcgcaaacgctgtttgctcctctacaaaacagaccttaaaaccctaaaggcttaagtagcaccctcgcaagctcgggcaaatcgctgaatattccttttgtctccgaccatcaggcacctgagtcgctgtctttttcgtgacattcagttcgctgcgctcacggctctggcagtgaatgggggtaaatggcactacaggcgccttttatggattcatgcaaggaaactacccataatacaagaaaagcccgtcacgggcttctcagggcgttttatggcgggtctgctatgtggtgctatctgactttttgctgttcagcagttcctgccctctgattttccagtctgaccacttcggattatcccgtgacaggtcattcagactggctaatgcacccagtaaggcagcggtatcatcaacaggcttacccgtcttactgtccctagtgcttggattctcaccaataaaaaacgcccggcggcaaccgagcgttctgaacaaatccagatggagttctgaggtcattactggatctatcaacaggagtccaagcgagctctcgaaccccagagtcccgctcagaagaactcgtcaagaaggcgatagaaggcgatgcgctgcgaatcgggagcggcgataccgtaaagcacgaggaagcggtcagcccattcgccgccaagctcttcagcaatatcacgggtagccaacgctatgtcctgatagcggtccgccacacccagccggccacagtcgatgaatccagaaaagcggccattttccaccatgatattcggcaagcaggcatcgccatgggtcacgacgagatcctcgccgtcgggcatgcgcgccttgagcctggcgaacagttcggctggcgcgagcccctgatgctcttcgtccagatcatcctgatcgacaagaccggcttccatccgagtacgtgctcgctcgatgcgatgtttcgcttggtggtcgaatgggcaggtagccggatcaagcgtatgcagccgccgcattgcatcagccatgatggatactttctcggcaggagcaaggtgagatgacaggagatcctgccccggcacttcgcccaatagcagccagtcccttcccgcttcagtgacaacgtcgagcacagctgcgcaaggaacgcccgtcgtggccagccacgatagccgcgctgcctcgtcctgcagttcattcagggcaccggacaggtcggtcttgacaaaaagaaccgggcgcccctgcgctgacagccggaacacggcggcatcagagcagccgattgtctgttgtgcccagtcatagccgaatagcctctccacccaagcggccggagaacctgcgtgcaatccatcttgttcaatcatactcttcctttttcaatattattgaagcatttatcagggttattgtctcatgagcggatacatatttgaatgtatttagaaaaataaacaaataggggttccgcgcacatttccccgaaaagtgccattgacagctagctcagtcctaggtataatagatctattgcgagtagcatggtgaaccacttgtccataactttattgtttaagaattcattaaagaggagaaaggtaccatggcgagtagcgaagacgttatcaaagagttcatgcgtttcaaagttcgtatggaaggttccgttaacggtcacgagttcgaaatcgaaggtgaaggtgaaggtcgtccgtacgaaggtacccagaccgctaaactgaaagttaccaaaggtggtccgctgccgttcgcttgggacatcctgtccccgcagttccagtacggttccaaagcttacgttaaacacccggctgacatcccggactacctgaaactgtccttcccggaaggtttcaaatgggaacgtgttatgaacttcgaagacggtggtgttgttaccgttacccaggactcctccctgcaagacggtgagttcatctacaaagttaaactgcgtggtaccaacttcccgtccgacggtccggttatgcagaaaaaaaccatgggttgggaagcttccaccgaacgtatgtacccggaagacggtgctctgaaaggtgaaatcaaaatgcgtctgaaactgaaagacggtggtcactacgacgctgaagttaaaaccacctacatggctaaaaaaccggttcagctgccgggtgcttacaaaaccgacatcaaactggacatcacctcccacaacgaagactacaccatcgttgaacagtacgaacgtgctgaaggtcgtcactccaccggtgcttaaggatccaaactcgagtaaggatctccaggcatcaaataaaacgaaaggctcagtcgaaagactgggcctttcgttttatctgttgtttgtcggtgaacgctctctactagagtcacactggctcaccttcgggtgggcctttctgcgtttatacctagggtacgggttttgctgcccgcaaacgggctgttctggtgttgactagcctgacgtctaagaaaccattattatcatgacattaacctataaaaataggcgtatcacgaggcagaatttcagataaaaaaaatccttagctttcgctaaggatgatttctggaattctaaagatctttgacagctagctcagtcctaggtataatactagctgagaccagtgactactggtctcagttttagagctagaaatagcaagttaaaataaggctagtccgttatcaacttgaaaaagtggcaccgagtcggtgctttttttataaaacgaaaggctcagtcgaaagactgggcctttcgttttatccgaatacgggttcttgcatgttacattgtcgatctgttcatggtgaacagctttaaatgcaccaaaaactcgtaaaagctctgatgtatctatcttttttacaccgttttcatctgtgcatatggacagttttccctttgatatctaacggtgaacagttgttctacttttgtttgttagtcttgatgcttcactgatagatacaagagccataagaacctcagatccttccgtatttagccagtatgttctctagtgtggttcgttgtttttgcgtgagccatgagaacgaaccattgagatcatgcttactttgcatgtcactcaaaaattttgcctcaaaactggtgagctgaatttttgcagttaaagcatcgtgtagtgtttttcttagtccgttacgtaggtaggaatctgatgtaatggttgttggtattttgtcaccattcatttttatctggttgttctcaagttcggttacgagatccatttgtctatctagttcaacttggaaaatcaacgtatcagtcgggcggcctcgcttatcaaccaccaatttcatattgctgtaagtgtttaaatctttacttattggtttcaaaacccattggttaagccttttaaactcatggtagttattttcaagcattaacatgaacttaaattcatcaaggctaatctctatatttgccttgtgagttttcttttgtgttagttcttttaataaccactcataaatcctcatagagtatttgttttcaaaagacttaacatgttccagattatattttatgaatttttttaactggaaaagataaggcaatatctcttcactaaaaactaattctaatttttcgcttgagaacttggcatagtttgtccactggaaaatctcaaagcctttaaccaaaggattcctgatttccacagttctcgtcatcagctctctggttgctttagctaatacaccataagcattttccctactgatgttcatcatctgagcgtattggttataagtgaacgataccgtccgttctttccttgtagggttttcaatcgtggggttgagtagtgccacacagcataaaattagcttggtttcatgctccgttaagtcatagcgactaatcgctagttcatttgctttgaaaacaactaattcagacatacatctcaattggtctaggtgattttaatcactataccaattgagatgggctagtcaatgataattactagtccttttcccgggagatctgggtatctgtaaattctgctagacctttgctggaaaacttgtaaattctgctagaccctctgtaaattccgctagacctttgtgtgttttttttgtttatattcaagtggttataatttatagaataaa

SEQ ID NO: 1442 - DNA, 4286 bp, synthetic construct
  source 1..4286: mol_type = other DNA
gaaagaataaaaaaagataaaaagaatagatcccagccctgtgtataactcactactttagtcagttccgcagtattacaaaaggatgtcgcaaacgctgtttgctcctctacaaaacagaccttaaaaccctaaaggcttaagtagcaccctcgcaagctcgggcaaatcgctgaatattccttttgtctccgaccatcaggcacctgagtcgctgtctttttcgtgacattcagttcgctgcgctcacggctctggcagtgaatgggggtaaatggcactacaggcgccttttatggattcatgcaaggaaactacccataatacaagaaaagcccgtcacgggcttctcagggcgttttatggcgggtctgctatgtggtgctatctgactttttgctgttcagcagttcctgccctctgattttccagtctgaccacttcggattatcccgtgacaggtcattcagactggctaatgcacccagtaaggcagcggtatcatcaacaggcttacccgtcttactgtccctagtgcttggattctcaccaataaaaaacgcccggcggcaaccgagcgttctgaacaaatccagatggagttctgaggtcattactggatctatcaacaggagtccaagcgagctctcgaaccccagagtcccgctcagaagaactcgtcaagaaggcgatagaaggcgatgcgctgcgaatcgggagcggcgataccgtaaagcacgaggaagcggtcagcccattcgccgccaagctcttcagcaatatcacgggtagccaacgctatgtcctgatagcggtccgccacacccagccggccacagtcgatgaatccagaaaagcggccattttccaccatgatattcggcaagcaggcatcgccatgggtcacgacgagatcctcgccgtcgggcatgcgcgccttgagcctggcgaacagttcggctggcgcgagcccctgatgctcttcgtccagatcatcctgatcgacaagaccggcttccatccgagtacgtgctcgctcgatgcgatgtttcgcttggtggtcgaatgggcaggtagccggatcaagcgtatgcagccgccgcattgcatcagccatgatggatactttctcggcaggagcaaggtgagatgacaggagatcctgccccggcacttcgcccaatagcagccagtcccttcccgcttcagtgacaacgtcgagcacagctgcgcaaggaacgcccgtcgtggccagccacgatagccgcgctgcctcgtcctgcagttcattcagggcaccggacaggtcggtcttgacaaaaagaaccgggcgcccctgcgctgacagccggaacacggcggcatcagagcagccgattgtctgttgtgcccagtcatagccgaatagcctctccacccaagcggccggagaacctgcgtgcaatccatcttgttcaatcatactcttcctttttcaatattattgaagcatttatcagggttattgtctcatgagcggatacatatttgaatgtatttagaaaaataaacaaataggggttccgcgcacatttccccgaaaagtgccattgacagctagctcagtcctaggtataatagatctattgcgagtattaaacaataaagttatggacaagtggttcaccatgcgaattcattaaagaggagaaaggtaccatggcgagtagcgaagacgttatcaaagagttcatgcgtttcaaagttcgtatggaaggttccgttaacggtcacgagttcgaaatcgaaggtgaaggtgaaggtcgtccgtacgaaggtacccagaccgctaaactgaaagttaccaaaggtggtccgctgccgttcgcttgggacatcctgtccccgcagttccagtacggttccaaagcttacgttaaacacccggctgacatcccggactacctgaaactgtccttcccggaaggtttcaaatgggaacgtgttatgaacttcgaagacggtggtgttgttaccgttacccaggactcctccctgcaagacggtgagttcatctacaaagttaaactgcgtggtaccaacttcccgtccgacggtccggttatgcagaaaaaaaccatgggttgggaagcttccaccgaacgtatgtacccggaagacggtgctctgaaaggtgaaatcaaaatgcgtctgaaactgaaagacggtggtcactacgacgctgaagttaaaaccacctacatggctaaaaaaccggttcagctgccgggtgcttacaaaaccgacatcaaactggacatcacctcccacaacgaagactacaccatcgttgaacagtacgaacgtgctgaaggtcgtcactccaccggtgcttaaggatccaaactcgagtaaggatctccaggcatcaaataaaacgaaaggctcagtcgaaagactgggcctttcgttttatctgttgtttgtcggtgaacgctctctactagagtcacactggctcaccttcgggtgggcctttctgcgtttatacctagggtacgggttttgctgcccgcaaacgggctgttctggtgttgactagcctgacgtctaagaaaccattattatcatgacattaacctataaaaataggcgtatcacgaggcagaatttcagataaaaaaaatccttagctttcgctaaggatgatttctggaattctaaagatctttgacagctagctcagtcctaggtataatactagctgagaccagtgactactggtctcagttttagagctagaaatagcaagttaaaataaggctagtccgttatcaacttgaaaaagtggcaccgagtcggtgctttttttataaaacgaaaggctcagtcgaaagactgggcctttcgttttatccgaatacgggttcttgcatgttacattgtcgatctgttcatggtgaacagctttaaatgcaccaaaaactcgtaaaagctctgatgtatctatcttttttacaccgttttcatctgtgcatatggacagttttccctttgatatctaacggtgaacagttgttctacttttgtttgttagtcttgatgcttcactgatagatacaagagccataagaacctcagatccttccgtatttagccagtatgttctctagtgtggttcgttgtttttgcgtgagccatgagaacgaaccattgagatcatgcttactttgcatgtcactcaaaaattttgcctcaaaactggtgagctgaatttttgcagttaaagcatcgtgtagtgtttttcttagtccgttacgtaggtaggaatctgatgtaatggttgttggtattttgtcaccattcatttttatctggttgttctcaagttcggttacgagatccatttgtctatctagttcaacttggaaaatcaacgtatcagtcgggcggcctcgcttatcaaccaccaatttcatattgctgtaagtgtttaaatctttacttattggtttcaaaacccattggttaagccttttaaactcatggtagttattttcaagcattaacatgaacttaaattcatcaaggctaatctctatatttgccttgtgagttttcttttgtgttagttcttttaataaccactcataaatcctcatagagtatttgttttcaaaagacttaacatgttccagattatattttatgaatttttttaactggaaaagataaggcaatatctcttcactaaaaactaattctaatttttcgcttgagaacttggcatagtttgtccactggaaaatctcaaagcctttaaccaaaggattcctgatttccacagttctcgtcatcagctctctggttgctttagctaatacaccataagcattttccctactgatgttcatcatctgagcgtattggttataagtgaacgataccgtccgttctttccttgtagggttttcaatcgtggggttgagtagtgccacacagcataaaattagcttggtttcatgctccgttaagtcatagcgactaatcgctagttcatttgctttgaaaacaactaattcagacatacatctcaattggtctaggtgattttaatcactataccaattgagatgggctagtcaatgataattactagtccttttcccgggagatctgggtatctgtaaattctgctagacctttgctggaaaacttgtaaattctgctagaccctctgtaaattccgctagacctttgtgtgttttttttgtttatattcaagtggttataatttatagaataaa

SEQ ID NO: 1443 - DNA, 4286 bp, synthetic construct
  source 1..4286: mol_type = other DNA
gaaagaataaaaaaagataaaaagaatagatcccagccctgtgtataactcactactttagtcagttccgcagtattacaaaaggatgtcgcaaacgctgtttgctcctctacaaaacagaccttaaaaccctaaaggcttaagtagcaccctcgcaagctcgggcaaatcgctgaatattccttttgtctccgaccatcaggcacctgagtcgctgtctttttcgtgacattcagttcgctgcgctcacggctctggcagtgaatgggggtaaatggcactacaggcgccttttatggattcatgcaaggaaactacccataatacaagaaaagcccgtcacgggcttctcagggcgttttatggcgggtctgctatgtggtgctatctgactttttgctgttcagcagttcctgccctctgattttccagtctgaccacttcggattatcccgtgacaggtcattcagactggctaatgcacccagtaaggcagcggtatcatcaacaggcttacccgtcttactgtccctagtgcttggattctcaccaataaaaaacgcccggcggcaaccgagcgttctgaacaaatccagatggagttctgaggtcattactggatctatcaacaggagtccaagcgagctctcgaaccccagagtcccgctcagaagaactcgtcaagaaggcgatagaaggcgatgcgctgcgaatcgggagcggcgataccgtaaagcacgaggaagcggtcagcccattcgccgccaagctcttcagcaatatcacgggtagccaacgctatgtcctgatagcggtccgccacacccagccggccacagtcgatgaatccagaaaagcggccattttccaccatgatattcggcaagcaggcatcgccatgggtcacgacgagatcctcgccgtcgggcatgcgcgccttgagcctggcgaacagttcggctggcgcgagcccctgatgctcttcgtccagatcatcctgatcgacaagaccggcttccatccgagtacgtgctcgctcgatgcgatgtttcgcttggtggtcgaatgggcaggtagccggatcaagcgtatgcagccgccgcattgcatcagccatgatggatactttctcggcaggagcaaggtgagatgacaggagatcctgccccggcacttcgcccaatagcagccagtcccttcccgcttcagtgacaacgtcgagcacagctgcgcaaggaacgcccgtcgtggccagccacgatagccgcgctgcctcgtcctgcagttcattcagggcaccggacaggtcggtcttgacaaaaagaaccgggcgcccctgcgctgacagccggaacacggcggcatcagagcagccgattgtctgttgtgcccagtcatagccgaatagcctctccacccaagcggccggagaacctgcgtgcaatccatcttgttcaatcatactcttcctttttcaatattattgaagcatttatcagggttattgtctcatgagcggatacatatttgaatgtatttagaaaaataaacaaataggggttccgcgcacatttccccgaaaagtgccattgacagctagctcagtcctaggtataatagatctattgcgagtagcatggtgaaccacttgtccttaaatttattgtttaagaattcattaaagaggagaaaggtaccatggcgagtagcgaagacgttatcaaagagttcatgcgtttcaaagttcgtatggaaggttccgttaacggtcacgagttcgaaatcgaaggtgaaggtgaaggtcgtccgtacgaaggtacccagaccgctaaactgaaagttaccaaaggtggtccgctgccgttcgcttgggacatcctgtccccgcagttccagtacggttccaaagcttacgttaaacacccggctgacatcccggactacctgaaactgtccttcccggaaggtttcaaatgggaacgtgttatgaacttcgaagacggtggtgttgttaccgttacccaggactcctccctgcaagacggtgagttcatctacaaagttaaactgcgtggtaccaacttcccgtccgacggtccggttatgcagaaaaaaaccatgggttgggaagcttccaccgaacgtatgtacccggaagacggtgctctgaaaggtgaaatcaaaatgcgtctgaaactgaaagacggtggtcactacgacgctgaagttaaaaccacctacatggctaaaaaaccggttcagctgccgggtgcttacaaaaccgacatcaaactggacatcacctcccacaacgaagactacaccatcgttgaacagtacgaacgtgctgaaggtcgtcactccaccggtgcttaaggatccaaactcgagtaaggatctccaggcatcaaataaaacgaaaggctcagtcgaaagactgggcctttcgttttatctgttgtttgtcggtgaacgctctctactagagtcacactggctcaccttcgggtgggcctttctgcgtttatacctagggtacgggttttgctgcccgcaaacgggctgttctggtgttgactagcctgacgtctaagaaaccattattatcatgacattaacctataaaaataggcgtatcacgaggcagaatttcagataaaaaaaatccttagctttcgctaaggatgatttctggaattctaaagatctttgacagctagctcagtcctaggtataatactagctgagaccagtgactactggtctcagttttagagctagaaatagcaagttaaaataaggctagtccgttatcaacttgaaaaagtggcaccgagtcggtgctttttttataaaacgaaaggctcagtcgaaagactgggcctttcgttttatccgaatacgggttcttgcatgttacattgtcgatctgttcatggtgaacagctttaaatgcaccaaaaactcgtaaaagctctgatgtatctatcttttttacaccgttttcatctgtgcatatggacagttttccctttgatatctaacggtgaacagttgttctacttttgtttgttagtcttgatgcttcactgatagatacaagagccataagaacctcagatccttccgtatttagccagtatgttctctagtgtggttcgttgtttttgcgtgagccatgagaacgaaccattgagatcatgcttactttgcatgtcactcaaaaattttgcctcaaaactggtgagctgaatttttgcagttaaagcatcgtgtagtgtttttcttagtccgttacgtaggtaggaatctgatgtaatggttgttggtattttgtcaccattcatttttatctggttgttctcaagttcggttacgagatccatttgtctatctagttcaacttggaaaatcaacgtatcagtcgggcggcctcgcttatcaaccaccaatttcatattgctgtaagtgtttaaatctttacttattggtttcaaaacccattggttaagccttttaaactcatggtagttattttcaagcattaacatgaacttaaattcatcaaggctaatctctatatttgccttgtgagttttcttttgtgttagttcttttaataaccactcataaatcctcatagagtatttgttttcaaaagacttaacatgttccagattatattttatgaatttttttaactggaaaagataaggcaatatctcttcactaaaaactaattctaatttttcgcttgagaacttggcatagtttgtccactggaaaatctcaaagcctttaaccaaaggattcctgatttccacagttctcgtcatcagctctctggttgctttagctaatacaccataagcattttccctactgatgttcatcatctgagcgtattggttataagtgaacgataccgtccgttctttccttgtagggttttcaatcgtggggttgagtagtgccacacagcataaaattagcttggtttcatgctccgttaagtcatagcgactaatcgctagttcatttgctttgaaaacaactaattcagacatacatctcaattggtctaggtgattttaatcactataccaattgagatgggctagtcaatgataattactagtccttttcccgggagatctgggtatctgtaaattctgctagacctttgctggaaaacttgtaaattctgctagaccctctgtaaattccgctagacctttgtgtgttttttttgtttatattcaagtggttataatttatagaataaa

SEQ ID NO: 1444 - DNA, 4286 bp, synthetic construct
  source 1..4286: mol_type = other DNA
gaaagaataaaaaaagataaaaagaatagatcccagccctgtgtataactcactactttagtcagttccgcagtattacaaaaggatgtcgcaaacgctgtttgctcctctacaaaacagaccttaaaaccctaaaggcttaagtagcaccctcgcaagctcgggcaaatcgctgaatattccttttgtctccgaccatcaggcacctgagtcgctgtctttttcgtgacattcagttcgctgcgctcacggctctggcagtgaatgggggtaaatggcactacaggcgccttttatggattcatgcaaggaaactacccataatacaagaaaagcccgtcacgggcttctcagggcgttttatggcgggtctgctatgtggtgctatctgactttttgctgttcagcagttcctgccctctgattttccagtctgaccacttcggattatcccgtgacaggtcattcagactggctaatgcacccagtaaggcagcggtatcatcaacaggcttacccgtcttactgtccctagtgcttggattctcaccaataaaaaacgcccggcggcaaccgagcgttctgaacaaatccagatggagttctgaggtcattactggatctatcaacaggagtccaagcgagctctcgaaccccagagtcccgctcagaagaactcgtcaagaaggcgatagaaggcgatgcgctgcgaatcgggagcggcgataccgtaaagcacgaggaagcggtcagcccattcgccgccaagctcttcagcaatatcacgggtagccaacgctatgtcctgatagcggtccgccacacccagccggccacagtcgatgaatccagaaaagcggccattttccaccatgatattcggcaagcaggcatcgccatgggtcacgacgagatcctcgccgtcgggcatgcgcgccttgagcctggcgaacagttcggctggcgcgagcccctgatgctcttcgtccagatcatcctgatcgacaagaccggcttccatccgagtacgtgctcgctcgatgcgatgtttcgcttggtggtcgaatgggcaggtagccggatcaagcgtatgcagccgccgcattgcatcagccatgatggatactttctcggcaggagcaaggtgagatgacaggagatcctgccccggcacttcgcccaatagcagccagtcccttcccgcttcagtgacaacgtcgagcacagctgcgcaaggaacgcccgtcgtggccagccacgatagccgcgctgcctcgtcctgcagttcattcagggcaccggacaggtcggtcttgacaaaaagaaccgggcgcccctgcgctgacagccggaacacggcggcatcagagcagccgattgtctgttgtgcccagtcatagccgaatagcctctccacccaagcggccggagaacctgcgtgcaatccatcttgttcaatcatactcttcctttttcaatattattgaagcatttatcagggttattgtctcatgagcggatacatatttgaatgtatttagaaaaataaacaaataggggttccgcgcacatttccccgaaaagtgccattgacagctagctcagtcctaggtataatagatctattgcgagtattaaacaataaatttaaggacaagtggttcaccatgcgaattcattaaagaggagaaaggtaccatggcgagtagcgaagacgttatcaaagagttcatgcgtttcaaagttcgtatggaaggttccgttaacggtcacgagttcgaaatcgaaggtgaaggtgaaggtcgtccgtacgaaggtacccagaccgctaaactgaaagttaccaaaggtggtccgctgccgttcgcttgggacatcctgtccccgcagttccagtacggttccaaagcttacgttaaacacccggctgacatcccggactacctgaaactgtccttcccggaaggtttcaaatgggaacgtgttatgaacttcgaagacggtggtgttgttaccgttacccaggactcctccctgcaagacggtgagttcatctacaaagttaaactgcgtggtaccaacttcccgtccgacggtccggttatgcagaaaaaaaccatgggttgggaagcttccaccgaacgtatgtacccggaagacggtgctctgaaaggtgaaatcaaaatgcgtctgaaactgaaagacggtggtcactacgacgctgaagttaaaaccacctacatggctaaaaaaccggttcagctgccgggtgcttacaaaaccgacatcaaactggacatcacctcccacaacgaagactacaccatcgttgaacagtacgaacgtgctgaaggtcgtcactccaccggtgcttaaggatccaaactcgagtaaggatctccaggcatcaaataaaacgaaaggctcagtcgaaagactgggcctttcgttttatctgttgtttgtcggtgaacgctctctactagagtcacactggctcaccttcgggtgggcctttctgcgtttatacctagggtacgggttttgctgcccgcaaacgggctgttctggtgttgactagcctgacgtctaagaaaccattattatcatgacattaacctataaaaataggcgtatcacgaggcagaatttcagataaaaaaaatccttagctttcgctaaggatgatttctggaattctaaagatctttgacagctagctcagtcctaggtataatactagctgagaccagtgactactggtctcagttttagagctagaaatagcaagttaaaataaggctagtccgttatcaacttgaaaaagtggcaccgagtcggtgctttttttataaaacgaaaggctcagtcgaaagactgggcctttcgttttatccgaatacgggttcttgcatgttacattgtcgatctgttcatggtgaacagctttaaatgcaccaaaaactcgtaaaagctctgatgtatctatcttttttacaccgttttcatctgtgcatatggacagttttccctttgatatctaacggtgaacagttgttctacttttgtttgttagtcttgatgcttcactgatagatacaagagccataagaacctcagatccttccgtatttagccagtatgttctctagtgtggttcgttgtttttgcgtgagccatgagaacgaaccattgagatcatgcttactttgcatgtcactcaaaaattttgcctcaaaactggtgagctgaatttttgcagttaaagcatcgtgtagtgtttttcttagtccgttacgtaggtaggaatctgatgtaatggttgttggtattttgtcaccattcatttttatctggttgttctcaagttcggttacgagatccatttgtctatctagttcaacttggaaaatcaacgtatcagtcgggcggcctcgcttatcaaccaccaatttcatattgctgtaagtgtttaaatctttacttattggtttcaaaacccattggttaagccttttaaactcatggtagttattttcaagcattaacatgaacttaaattcatcaaggctaatctctatatttgccttgtgagttttcttttgtgttagttcttttaataaccactcataaatcctcatagagtatttgttttcaaaagacttaacatgttccagattatattttatgaatttttttaactggaaaagataaggcaatatctcttcactaaaaactaattctaatttttcgcttgagaacttggcatagtttgtccactggaaaatctcaaagcctttaaccaaaggattcctgatttccacagttctcgtcatcagctctctggttgctttagctaatacaccataagcattttccctactgatgttcatcatctgagcgtattggttataagtgaacgataccgtccgttctttccttgtagggttttcaatcgtggggttgagtagtgccacacagcataaaattagcttggtttcatgctccgttaagtcatagcgactaatcgctagttcatttgctttgaaaacaactaattcagacatacatctcaattggtctaggtgattttaatcactataccaattgagatgggctagtcaatgataattactagtccttttcccgggagatctgggtatctgtaaattctgctagacctttgctggaaaacttgtaaattctgctagaccctctgtaaattccgctagacctttgtgtgttttttttgtttatattcaagtggttataatttatagaataaa

SEQ ID NO: 1445 - DNA, 6715 bp, synthetic construct
  source 1..6715: mol_type = other DNA
ctactgaaccgctctagatttcagtgcaatttatctcttcaaatgtagcacctgaagtcagccccatacgatataagttgtaattctcatgttagtcatgccccgcgcccaccggaaggagctgactgggttgaattgacagctagctcagtcctaggtataatgctagcggacaagtggttcaccatgcgttttagagctagaaatagcaagttaaaataaggctagtccgttatcaacttgaaaaagtggcaccgagtcggtgctttttttggtagtgcagcgcgatcgtaatcaggatcccatggtacgcgtgctagaggcatcaaataaaacgaaaggctcagtcgaaagactgggcctttcgttttatctgttgtttgtcggtgaacgctctcctgagtaggacaaatggatccgaattcgagctcggcgcgcctgcaggtcgacaagcttgcggccgcataatgcttaagtcgaacagaaagtaatcgtattgtacacggccgcataatcgaaattttacggctagctcagtcctaggtactatgctagcccccatcttagtatattagttaagtataagaaggagatatacatatggactacaaagaccatgacggtgattataaagatcatgacatcgattacaaggatgacgatgacaagggaggaagcggatcgatggataagaaatactcaataggcttagctatcggcacaaatagcgtcggatgggcggtgatcactgatgaatataaggttccgtctaaaaagttcaaggttctgggaaatacagaccgccacagtatcaaaaaaaatcttataggggctcttttatttgacagtggagagacagcggaagcgactcgtctcaaacggacagctcgtagaaggtatacacgtcggaagaatcgtatttgttatctacaggagattttttcaaatgagatggcgaaagtagatgatagtttctttcatcgacttgaagagtcttttttggtggaagaagacaagaagcatgaacgtcatcctatttttggaaatatagtagatgaagttgcttatcatgagaaatatccaactatctatcatctgcgaaaaaaattggtagattctactgataaagcggatttgcgcttaatctatttggccttagcgcatatgattaagtttcgtggtcattttttgattgagggagatttaaatcctgataatagtgatgtggacaaactatttatccagttggtacaaacctacaatcaattatttgaagaaaaccctattaacgcaagtggagtagatgctaaagcgattctttctgcacgattgagtaaatcaagacgattagaaaatctcattgctcagctccccggtgagaagaaaaatggcttatttgggaatctcattgctttgtcattgggtttgacccctaattttaaatcaaattttgatttggcagaagatgctaaattacagctttcaaaagatacttacgatgatgatttagataatttattggcgcaaattggagatcaatatgctgatttgtttttggcagctaagaatttatcagatgctattttactttcagatatcctaagagtaaatactgaaataactaaggctcccctatcagcttcaatgattaaacgctacgatgaacatcatcaagacttgactcttttaaaagctttagttcgacaacaacttccagaaaagtataaagaaatcttttttgatcaatcaaaaaacggatatgcaggttatattgatgggggagctagccaagaagaattttataaatttatcaaaccaattttagaaaaaatggatggtactgaggaattattggtgaaactaaatcgtgaagatttgctgcgcaagcaacggacctttgacaacggctctattccccatcaaattcacttgggtgagctgcatgctattttgagaagacaagaagacttttatccatttttaaaagacaatcgtgagaagattgaaaaaatcttgacttttcgaattccttattatgttggtccattggcgcgtggcaatagtcgttttgcatggatgactcggaagtctgaagaaacaattaccccatggaattttgaagaagttgtcgataaaggtgcttcagctcaatcatttattgaacgcatgacaaactttgataaaaatcttccaaatgaaaaagtactaccaaaacatagtttgctttatgagtattttacggtttataacgaattgacaaaggtcaaatatgttactgaaggaatgcgaaaaccagcatttctttcaggtgaacagaagaaagccattgttgatttactcttcaaaacaaatcgaaaagtaaccgttaagcaattaaaagaagattatttcaaaaaaatagaatgttttgatagtgttgaaatttcaggagttgaagatagatttaatgcttcattaggtacctaccatgatttgctaaaaattattaaagataaagattttttggataatgaagaaaatgaagatatcttagaggatattgttttaacattgaccttatttgaagatagggagatgattgaggaaagacttaaaacatatgctcacctctttgatgataaggtgatgaaacagcttaaacgtcgccgttatactggttggggacgtttgtctcgaaaattgattaatggtattagggataagcaatctggcaaaacaatattagattttttgaaatcagatggttttgccaatcgcaattttatgcagctgatccatgatgatagtttgacatttaaagaagacattcaaaaagcacaagtgtctggacaaggcgatagtttacatgaacatattgcaaatttagctggtagccctgctattaaaaaaggtattttacagactgtaaaagttgttgatgaattggtcaaagtaatggggcggcataagccagaaaatatcgttattgaaatggcacgtgaaaatcagacaactcaaaagggccagaaaaattcgcgagagcgtatgaaacgaatcgaagaaggtatcaaagaattaggaagtcagattcttaaagagcatcctgttgaaaatactcaattgcaaaatgaaaagctctatctctattatctccaaaatggaagagacatgtatgtggaccaagaattagatattaatcgtttaagtgattatgatgtcgatgccattgttccacaaagtttccttaaagacgattcaatagacaataaggtcttaacgcgttctgataaaaatcgtggtaaatcggataacgttccaagtgaagaagtagtcaaaaagatgaaaaactattggagacaacttctaaacgccaagttaatcactcaacgtaagtttgataatttaacgaaagctgaacgtggaggtttgagtgaacttgataaagctggttttatcaaacgccaattggttgaaactcgccaaatcactaagcatgtggcacaaattttggatagtcgcatgaatactaaatacgatgaaaatgataaacttattcgagaggttaaagtgattaccttaaaatctaaattagtttctgacttccgaaaagatttccaattctataaagtacgtgagattaacaattaccatcatgcccatgatgcgtatctaaatgccgtcgttggaactgctttgattaagaaatatccaaaacttgaatcggagtttgtctatggtgattataaagtttatgatgttcgtaaaatgattgctaagtctgagcaagaaataggcaaagcaaccgcaaaatatttcttttactctaatatcatgaacttcttcaaaacagaaattacacttgcaaatggagagattcgcaaacgccctctaatcgaaactaatggggaaactggagaaattgtctgggataaagggcgagattttgccacagtgcgcaaagtattgtccatgccccaagtcaatattgtcaagaaaacagaagtacagacaggcggattctccaaggagtcaattttaccaaaaagaaattcggacaagcttattgctcgtaaaaaagactgggatccaaaaaaatatggtggttttgatagtccaacggtagcttattcagtcctagtggttgctaaggtggaaaaagggaaatcgaagaagttaaaatccgttaaagagttactagggatcacaattatggaaagaagttcctttgaaaaaaatccgattgactttttagaagctaaaggatataaggaagttaaaaaagacttaatcattaaactacctaaatatagtctttttgagttagaaaacggtcgtaaacggatgctggctagtgccggagaattacaaaaaggaaatgagctggctctgccaagcaaatatgtgaattttttatatttagctagtcattatgaaaagttgaagggtagtccagaagataacgaacaaaaacaattgtttgtggagcagcataagcattatttagatgagattattgagcaaatcagtgaattttctaagcgtgttattttagcagatgccaatttagataaagttcttagtgcatataacaaacatagagacaaaccaatacgtgaacaagcagaaaatattattcatttatttacgttgacgaatcttggagctcccgctgcttttaaatattttgatacaacaattgatcgtaaacgatatacgtctacaaaagaagttttagatgccactcttatccatcaatccatcactggtctttatgaaacacgcattgatttgagtcagctaggaggtgactaatagcctaggctgctgccaccgctgagcaataactagcataaccccttggggcctctaaacgggtcttgaggggttttttgctgaaacctcaggcatttgagaagcacacggtcacactgcttccggtagtcaataaaccggtaaaccagcaatagacataagcggctatttaacgaccctgccctgaaccgacgaccgggtcatcgtggccggatcttgcggcccctcggcttgaacgaattgttagacattatttgccgactaccttggtgatctcgcctttcacgtagtggacaaattcttccaactgatctgcgcgcgaggccaagcgatcttcttcttgtccaagataagcctgtctagcttcaagtatgacgggctgatactgggccggcaggcgctccattgcccagtcggcagcgacatccttcggcgcgattttgccggttactgcgctgtaccaaatgcgggacaacgtaagcactacatttcgctcatcgccagcccagtcgggcggcgagttccatagcgttaaggtttcatttagcgcctcaaatagatcctgttcaggaaccggatcaaagagttcctccgccgctggacctaccaaggcaacgctatgttctcttgcttttgtcagcaagatagccagatcaatgtcgatcgtggctggctcgaagatacctgcaagaatgtcattgcgctgccattctccaaattgcagttcgcgcttagctggataacgccacggaatgatgtcgtcgtgcacaacaatggtgacttctacagcgcggagaatctcgctctctccaggggaagccgaagtttccaaaaggtcgttgatcaaagctcgccgcgttgtttcatcaagccttacggtcaccgtaaccagcaaatcaatatcactgtgtggcttcaggccgccatccactgcggagccgtacaaatgtacggccagcaacgtcggttcgagatggcgctcgatgacgccaactacctctgatagttgagtcgatacttcggcgatcaccgcttccctcatactcttcctttttcaatattattgaagcatttatcagggttattgtctcatgagcggatacatatttgaatgtatttagaaaaataaacaaatagctagctcactcggtcgctacgctccgggcgtgagactgcggcgggcgctgcggacacatacaaagttacccacagattccgtggataagcaggggactaacatgtgaggcaaaacagcagggccgcgccggtggcgtttttccataggctccgccctcctgccagagttcacataaacagacgcttttccggtgcatctgtgggagccgtgaggctcaaccatgaatctgacagtacgggcgaaacccgacaggacttaaagatccccaccgtttccggcgggtcgctccctcttgcgctctcctgttccgaccctgccgtttaccggatacctgttccgcctttctcccttacgggaagtgtggcgctttctcatagctcacacactggtatctcggctcggtgtaggtcgttcgctccaagctgggctgtaagcaagaactccccgttcagcccgactgctgcgccttatccggtaactgttcacttgagtccaacccggaaaagcacggtaaaacgccactggcagcagccattggtaactgggagttcgcagaggatttgtttagctaaacacgcggttgctcttgaagtgtgcgccaaagtccggctacactggaaggacagatttggttgctgtgctctgcgaaagccagttaccacggttaagcagttccccaactgacttaaccttcgatcaaaccacctccccaggtggttttttcgtttacagggcaaaagattacgcgcagaaaaaaaggatctcaagaagatcctttgatctttt

SEQ ID NO: 1446 - DNA, 4258 bp, synthetic construct
  source 1..4258: mol_type = other DNA
gaaagaataaaaaaagataaaaagaatagatcccagccctgtgtataactcactactttagtcagttccgcagtattacaaaaggatgtcgcaaacgctgtttgctcctctacaaaacagaccttaaaaccctaaaggcttaagtagcaccctcgcaagctcgggcaaatcgctgaatattccttttgtctccgaccatcaggcacctgagtcgctgtctttttcgtgacattcagttcgctgcgctcacggctctggcagtgaatgggggtaaatggcactacaggcgccttttatggattcatgcaaggaaactacccataatacaagaaaagcccgtcacgggcttctcagggcgttttatggcgggtctgctatgtggtgctatctgactttttgctgttcagcagttcctgccctctgattttccagtctgaccacttcggattatcccgtgacaggtcattcagactggctaatgcacccagtaaggcagcggtatcatcaacaggcttacccgtcttactgtccctagtgcttggattctcaccaataaaaaacgcccggcggcaaccgagcgttctgaacaaatccagatggagttctgaggtcattactggatctatcaacaggagtccaagcgagctctcgaaccccagagtcccgctcagaagaactcgtcaagaaggcgatagaaggcgatgcgctgcgaatcgggagcggcgataccgtaaagcacgaggaagcggtcagcccattcgccgccaagctcttcagcaatatcacgggtagccaacgctatgtcctgatagcggtccgccacacccagccggccacagtcgatgaatccagaaaagcggccattttccaccatgatattcggcaagcaggcatcgccatgggtcacgacgagatcctcgccgtcgggcatgcgcgccttgagcctggcgaacagttcggctggcgcgagcccctgatgctcttcgtccagatcatcctgatcgacaagaccggcttccatccgagtacgtgctcgctcgatgcgatgtttcgcttggtggtcgaatgggcaggtagccggatcaagcgtatgcagccgccgcattgcatcagccatgatggatactttctcggcaggagcaaggtgagatgacaggagatcctgccccggcacttcgcccaatagcagccagtcccttcccgcttcagtgacaacgtcgagcacagctgcgcaaggaacgcccgtcgtggccagccacgatagccgcgctgcctcgtcctgcagttcattcagggcaccggacaggtcggtcttgacaaaaagaaccgggcgcccctgcgctgacagccggaacacggcggcatcagagcagccgattgtctgttgtgcccagtcatagccgaatagcctctccacccaagcggccggagaacctgcgtgcaatccatcttgttcaatcatactcttcctttttcaatattattgaagcatttatcagggttattgtctcatgagcggatacatatttgaatgtatttagaaaaataaacaaataggggttccgcgcacatttccccgaaaagtgccattgacagctagctcagtcctaggtataatagatcttttaaggacaagtggttcaccatgcgggaaagaggagaaaggtaccatggcgagtagcgaagacgttatcaaagagttcatgcgtttcaaagttcgtatggaaggttccgttaacggtcacgagttcgaaatcgaaggtgaaggtgaaggtcgtccgtacgaaggtacccagaccgctaaactgaaagttaccaaaggtggtccgctgccgttcgcttgggacatcctgtccccgcagttccagtacggttccaaagcttacgttaaacacccggctgacatcccggactacctgaaactgtccttcccggaaggtttcaaatgggaacgtgttatgaacttcgaagacggtggtgttgttaccgttacccaggactcctccctgcaagacggtgagttcatctacaaagttaaactgcgtggtaccaacttcccgtccgacggtccggttatgcagaaaaaaaccatgggttgggaagcttccaccgaacgtatgtacccggaagacggtgctctgaaaggtgaaatcaaaatgcgtctgaaactgaaagacggtggtcactacgacgctgaagttaaaaccacctacatggctaaaaaaccggttcagctgccgggtgcttacaaaaccgacatcaaactggacatcacctcccacaacgaagactacaccatcgttgaacagtacgaacgtgctgaaggtcgtcactccaccggtgcttaaggatccaaactcgagtaaggatctccaggcatcaaataaaacgaaaggctcagtcgaaagactgggcctttcgttttatctgttgtttgtcggtgaacgctctctactagagtcacactggctcaccttcgggtgggcctttctgcgtttatacctagggtacgggttttgctgcccgcaaacgggctgttctggtgttgactagcctgacgtctaagaaaccattattatcatgacattaacctataaaaataggcgtatcacgaggcagaatttcagataaaaaaaatccttagctttcgctaaggatgatttctggaattctaaagatctttgacagctagctcagtcctaggtataatactagctgagaccagtgactactggtctcagttttagagctagaaatagcaagttaaaataaggctagtccgttatcaacttgaaaaagtggcaccgagtcggtgctttttttataaaacgaaaggctcagtcgaaagactgggcctttcgttttatccgaatacgggttcttgcatgttacattgtcgatctgttcatggtgaacagctttaaatgcaccaaaaactcgtaaaagctctgatgtatctatcttttttacaccgttttcatctgtgcatatggacagttttccctttgatatctaacggtgaacagttgttctacttttgtttgttagtcttgatgcttcactgatagatacaagagccataagaacctcagatccttccgtatttagccagtatgttctctagtgtggttcgttgtttttgcgtgagccatgagaacgaaccattgagatcatgcttactttgcatgtcactcaaaaattttgcctcaaaactggtgagctgaatttttgcagttaaagcatcgtgtagtgtttttcttagtccgttacgtaggtaggaatctgatgtaatggttgttggtattttgtcaccattcatttttatctggttgttctcaagttcggttacgagatccatttgtctatctagttcaacttggaaaatcaacgtatcagtcgggcggcctcgcttatcaaccaccaatttcatattgctgtaagtgtttaaatctttacttattggtttcaaaacccattggttaagccttttaaactcatggtagttattttcaagcattaacatgaacttaaattcatcaaggctaatctctatatttgccttgtgagttttcttttgtgttagttcttttaataaccactcataaatcctcatagagtatttgttttcaaaagacttaacatgttccagattatattttatgaatttttttaactggaaaagataaggcaatatctcttcactaaaaactaattctaatttttcgcttgagaacttggcatagtttgtccactggaaaatctcaaagcctttaaccaaaggattcctgatttccacagttctcgtcatcagctctctggttgctttagctaatacaccataagcattttccctactgatgttcatcatctgagcgtattggttataagtgaacgataccgtccgttctttccttgtagggttttcaatcgtggggttgagtagtgccacacagcataaaattagcttggtttcatgctccgttaagtcatagcgactaatcgctagttcatttgctttgaaaacaactaattcagacatacatctcaattggtctaggtgattttaatcactataccaattgagatgggctagtcaatgataattactagtccttttcccgggagatctgggtatctgtaaattctgctagacctttgctggaaaacttgtaaattctgctagaccctctgtaaattccgctagacctttgtgtgttttttttgtttatattcaagtggttataatttatagaataaa

SEQ ID NO: 1447 - DNA, 4289 bp, synthetic construct
  source 1..4289: mol_type = other DNA
gaaagaataaaaaaagataaaaagaatagatcccagccctgtgtataactcactactttagtcagttccgcagtattacaaaaggatgtcgcaaacgctgtttgctcctctacaaaacagaccttaaaaccctaaaggcttaagtagcaccctcgcaagctcgggcaaatcgctgaatattccttttgtctccgaccatcaggcacctgagtcgctgtctttttcgtgacattcagttcgctgcgctcacggctctggcagtgaatgggggtaaatggcactacaggcgccttttatggattcatgcaaggaaactacccataatacaagaaaagcccgtcacgggcttctcagggcgttttatggcgggtctgctatgtggtgctatctgactttttgctgttcagcagttcctgccctctgattttccagtctgaccacttcggattatcccgtgacaggtcattcagactggctaatgcacccagtaaggcagcggtatcatcaacaggcttacccgtcttactgtccctagtgcttggattctcaccaataaaaaacgcccggcggcaaccgagcgttctgaacaaatccagatggagttctgaggtcattactggatctatcaacaggagtccaagcgagctctcgaaccccagagtcccgctcagaagaactcgtcaagaaggcgatagaaggcgatgcgctgcgaatcgggagcggcgataccgtaaagcacgaggaagcggtcagcccattcgccgccaagctcttcagcaatatcacgggtagccaacgctatgtcctgatagcggtccgccacacccagccggccacagtcgatgaatccagaaaagcggccattttccaccatgatattcggcaagcaggcatcgccatgggtcacgacgagatcctcgccgtcgggcatgcgcgccttgagcctggcgaacagttcggctggcgcgagcccctgatgctcttcgtccagatcatcctgatcgacaagaccggcttccatccgagtacgtgctcgctcgatgcgatgtttcgcttggtggtcgaatgggcaggtagccggatcaagcgtatgcagccgccgcattgcatcagccatgatggatactttctcggcaggagcaaggtgagatgacaggagatcctgccccggcacttcgcccaatagcagccagtcccttcccgcttcagtgacaacgtcgagcacagctgcgcaaggaacgcccgtcgtggccagccacgatagccgcgctgcctcgtcctgcagttcattcagggcaccggacaggtcggtcttgacaaaaagaaccgggcgcccctgcgctgacagccggaacacggcggcatcagagcagccgattgtctgttgtgcccagtcatagccgaatagcctctccacccaagcggccggagaacctgcgtgcaatccatcttgttcaatcatactcttcctttttcaatattattgaagcatttatcagggttattgtctcatgagcggatacatatttgaatgtatttagaaaaataaacaaataggggttccgcgcacatttccccgaaaagtgccattgacagctagctcagtcctaggtataatagatctattgcgagtacccgcatggtgaaccacttgtccttaaatttattgtttaagaattcattaaagaggagaaaggtaccatggcgagtagcgaagacgttatcaaagagttcatgcgtttcaaagttcgtatggaaggttccgttaacggtcacgagttcgaaatcgaaggtgaaggtgaaggtcgtccgtacgaaggtacccagaccgctaaactgaaagttaccaaaggtggtccgctgccgttcgcttgggacatcctgtccccgcagttccagtacggttccaaagcttacgttaaacacccggctgacatcccggactacctgaaactgtccttcccggaaggtttcaaatgggaacgtgttatgaacttcgaagacggtggtgttgttaccgttacccaggactcctccctgcaagacggtgagttcatctacaaagttaaactgcgtggtaccaacttcccgtccgacggtccggttatgcagaaaaaaaccatgggttgggaagcttccaccgaacgtatgtacccggaagacggtgctctgaaaggtgaaatcaaaatgcgtctgaaactgaaagacggtggtcactacgacgctgaagttaaaaccacctacatggctaaaaaaccggttcagctgccgggtgcttacaaaaccgacatcaaactggacatcacctcccacaacgaagactacaccatcgttgaacagtacgaacgtgctgaaggtcgtcactccaccggtgcttaaggatccaaactcgagtaaggatctccaggcatcaaataaaacgaaaggctcagtcgaaagactgggcctttcgttttatctgttgtttgtcggtgaacgctctctactagagtcacactggctcaccttcgggtgggcctttctgcgtttatacctagggtacgggttttgctgcccgcaaacgggctgttctggtgttgactagcctgacgtctaagaaaccattattatcatgacattaacctataaaaataggcgtatcacgaggcagaatttcagataaaaaaaatccttagctttcgctaaggatgatttctggaattctaaagatctttgacagctagctcagtcctaggtataatactagctgagaccagtgactactggtctcagttttagagctagaaatagcaagttaaaataaggctagtccgttatcaacttgaaaaagtggcaccgagtcggtgctttttttataaaacgaaaggctcagtcgaaagactgggcctttcgttttatccgaatacgggttcttgcatgttacattgtcgatctgttcatggtgaacagctttaaatgcaccaaaaactcgtaaaagctctgatgtatctatcttttttacaccgttttcatctgtgcatatggacagttttccctttgatatctaacggtgaacagttgttctacttttgtttgttagtcttgatgcttcactgatagatacaagagccataagaacctcagatccttccgtatttagccagtatgttctctagtgtggttcgttgtttttgcgtgagccatgagaacgaaccattgagatcatgcttactttgcatgtcactcaaaaattttgcctcaaaactggtgagctgaatttttgcagttaaagcatcgtgtagtgtttttcttagtccgttacgtaggtaggaatctgatgtaatggttgttggtattttgtcaccattcatttttatctggttgttctcaagttcggttacgagatccatttgtctatctagttcaacttggaaaatcaacgtatcagtcgggcggcctcgcttatcaaccaccaatttcatattgctgtaagtgtttaaatctttacttattggtttcaaaacccattggttaagccttttaaactcatggtagttattttcaagcattaacatgaacttaaattcatcaaggctaatctctatatttgccttgtgagttttcttttgtgttagttcttttaataaccactcataaatcctcatagagtatttgttttcaaaagacttaacatgttccagattatattttatgaatttttttaactggaaaagataaggcaatatctcttcactaaaaactaattctaatttttcgcttgagaacttggcatagtttgtccactggaaaatctcaaagcctttaaccaaaggattcctgatttccacagttctcgtcatcagctctctggttgctttagctaatacaccataagcattttccctactgatgttcatcatctgagcgtattggttataagtgaacgataccgtccgttctttccttgtagggttttcaatcgtggggttgagtagtgccacacagcataaaattagcttggtttcatgctccgttaagtcatagcgactaatcgctagttcatttgctttgaaaacaactaattcagacatacatctcaattggtctaggtgattttaatcactataccaattgagatgggctagtcaatgataattactagtccttttcccgggagatctgggtatctgtaaattctgctagacctttgctggaaaacttgtaaattctgctagaccctctgtaaattccgctagacctttgtgtgttttttttgtttatattcaagtggttataatttatagaataaa

SEQ ID NO: 1448 - DNA, 6257 bp, synthetic construct
  source 1..6257: mol_type = other DNA
actgaaccgctctagatttcagtgcaatttatctcttcaaatgtagcacctgaagtcagccccatacgatataagttgtaattctcatgttagtcatgccccgcgcccaccggaaggagctgactgggttgaattgacagctagctcagtcctaggtataatgctagcaggcctcgaggtcaaaagacctttttaatttctactcttgtagattggacaagtggttcaccatgcgttgcgtcaaaagacctttttaatttctactcttgtagatgcggccgcaataactagcataaccccttggggcctctaaacgggtcttgaggggttttttgctgaagtcgacttaattttacggctagctcagtcctaggtactatgctagccaggtaccaaggagatataccatgacacagtttgaaggcttcaccaatctctaccaggtcagcaagacgctacgttttgagcttatcccgcagggaaaaaccctgaaacacattcaggaacaggggttcatagaggaagataaggcgcgtaacgaccattataaagaactgaagcctataatcgaccgtatttataaaacgtacgcggatcagtgcctgcagctggttcagctggattgggagaatctgtccgcggctattgatagctatcgcaaagagaagaccgaggaaacccgtaacgcactgattgaagagcaggcgacctatcggaatgcgatccatgattacttcatcggccgcaccgacaacctgaccgatgcaattaacaaacgtcacgcagagatttacaaaggtctgtttaaagcagagttattcaatggcaaggttctgaaacagctgggtacggtcaccaccaccgaacacgaaaacgcactgctgaggagctttgataaatttaccacatatttcagcggtttctatgaaaatcgtaagaatgtatttagcgccgaagatatttccaccgcaattcctcatcgtattgtgcaggataattttccgaagtttaaagaaaattgtcatatttttacccgtctgatcaccgcggtaccgagcctgcgagagcattttgaaaacgttaagaaagccattggaatttttgtcagtaccagcattgaagaagtgttttcgttcccgttctataaccaactgctgacccagacccagattgatctgtacaatcagctgctggggggcataagccgcgaggcaggtaccgaaaagataaagggactcaatgaggtgctgaatctggcaattcagaagaatgatgaaacggctcatatcattgctagcctgccgcatcgtttcattcccctgtttaagcaaatcctgagcgatcgcaatacactgagctttatcctcgaagagtttaaatcggacgaagaagttatccagagcttttgcaaatacaaaaccctgctgcggaacgaaaatgtgctggagaccgctgaagcactgtttaatgaactgaactcgatcgacctcacccatatttttatatcccacaaaaaactggaaaccataagcagcgctctgtgtgaccattgggataccctgcgcaacgccctgtatgaacggcgtatcagcgagctgaccgggaaaatcaccaaatccgcaaaggaaaaagttcagcgtagtctgaaacacgaggacatcaacctgcaagaaattattagcgcagcaggtaaagagctgagcgaagcattcaaacagaaaaccagcgaaatcctgagccatgcccatgctgcactggatcagccgctgccgaccaccctgaaaaaacaggaggaaaaggagattctgaaaagccaactggacagcctgctgggcctgtatcacctgctggactggtttgcagtcgatgagagcaacgaggttgatcctgagttctccgctcgtctgaccggaatcaagctggagatggaaccgagtctgtcgttttacaataaagcgcgtaattacgcgaccaagaaaccgtatagcgtggaaaaattcaaactgaactttcagatgccgacccttgcaagcggatgggacgttaacaaagaaaaaaacaatggggcaattctgtttgtgaaaaatggcctctattatctgggtatcatgccgaaacagaaagggcgctacaaagccctgtcatttgagccgaccgagaaaacctcagagggtttcgacaagatgtactacgattatttcccggatgcggcaaaaatgatacccaaatgtagcacccaactgaaggcagttacagcccactttcagacccataccaccccgatcctgctgtcgaacaattttatagagccgctggaaattaccaaagagatttatgatctgaataatccggaaaaggagcccaagaaatttcagacggcgtatgcaaaaaagaccggggatcagaaaggttatcgtgaagcgctgtgcaaatggattgactttacccgtgactttctgtcaaaatataccaaaacgacgagcattgatctgagcagcctacgtccgagcagccaatataaggatctgggcgaatattacgccgaactgaatccgctgctctaccatatttccttccaacgaatcgctgaaaaagaaataatggacgccgttgaaaccggcaaactgtatctgtttcaaatctacaacaaagatttcgccaaaggccatcacggtaagccgaacctgcataccctgtattggaccggtctgtttagcccggagaatctggccaaaaccagcatcaagctgaacggacaggcagaactgttttaccgccccaaaagccgtatgaaaaggatggcacaccgcctgggcgaaaaaatgctgaataagaaactcaaagatcagaaaacgccgataccggataccctttatcaggagctgtatgattatgttaaccaccggctgagccatgacctgagcgacgaagcgcgtgcactgctgccgaacgtgattaccaaggaagtctcgcatgaaattattaaagatcggcgcttcaccagtgataaatttttcttccatgtaccgatcaccctgaattatcaagccgcaaatagcccttccaaatttaatcaacgcgtgaatgcgtacctgaaagagcatccggagaccccaattattggcatagcccgaggagaacgcaatctcatttatatcaccgtcattgatagcaccggtaagatcctggaacagcgtagcctgaataccattcagcagtttgactaccagaaaaagctggacaacagagaaaaggaacgtgtagccgcccggcaggcttggagtgtggtgggtactatcaaggatctgaagcaggggtatctctcccaagttatccatgaaattgtcgatctaatgattcactatcaagcagtagtggtactggaaaatctgaatttcggtttcaaaagcaaacgtacagggatcgctgaaaaagccgtttatcagcagttcgagaaaatgctgatagacaagctgaattgcctggttctgaaagattatccggcagagaaggtgggcggtgtgctgaacccgtaccagctgactgatcaatttacgagctttgcaaaaatgggaacgcagagcggtttcctgttctatgttccggcgccatataccagcaagatagacccgctgacaggtttcgtagatccgtttgtctggaaaaccattaaaaatcatgaaagtcgcaaacattttctggagggctttgattttctgcactatgacgtgaaaaccggcgacttcattctgcattttaaaatgaaccgtaatctgtcctttcagcgcggcctgcctggctttatgccggcgtgggacattgtttttgaaaagaatgagacacagtttgatgccaaaggtaccccctttattgcggggaaacgcattgtgcccgttatagaaaatcaccgcttcaccggacggtatagggacttgtacccggcaaatgaattgatagcgctgctggaggagaaaggtattgtctttcgggatggatcaaacatcctgccgaagctgctggagaacgatgacagccacgcaatagacaccatggtagcgctgatccgaagcgtgctgcagatgcgtaacagtaatgcggctacgggggaagactacattaatagcccggtccgtgatctgaacggcgtttgtttcgatagcagatttcaaaatccggagtggccgatggatgccgatgccaatggagcttaccatatcgctctcaaaggtcagctcctactgaaccatttgaaagaatcaaaagatctgaaactgcagaacggcatctcgaatcaggactggctggcctacattcaagaactgagaaactgataacctaggctgctgccaccgctgagcaataactagcataaccccttggggcctctaaacgggtcttgaggggttttttgctgaaacctcaggcatttgagaagcacacggtcacactgcttccggtagtcaataaaccggtaaaccagcaatagacataagcggctatttaacgaccctgccctgaaccgacgaccgggtcatcgtggccggatcttgcggcccctcggcttgaacgaattgttagacattatttgccgactaccttggtgatctcgcctttcacgtagtggacaaattcttccaactgatctgcgcgcgaggccaagcgatcttcttcttgtccaagataagcctgtctagcttcaagtatgacgggctgatactgggccggcaggcgctccattgcccagtcggcagcgacatccttcggcgcgattttgccggttactgcgctgtaccaaatgcgggacaacgtaagcactacatttcgctcatcgccagcccagtcgggcggcgagttccatagcgttaaggtttcatttagcgcctcaaatagatcctgttcaggaaccggatcaaagagttcctccgccgctggacctaccaaggcaacgctatgttctcttgcttttgtcagcaagatagccagatcaatgtcgatcgtggctggctcgaagatacctgcaagaatgtcattgcgctgccattctccaaattgcagttcgcgcttagctggataacgccacggaatgatgtcgtcgtgcacaacaatggtgacttctacagcgcggagaatctcgctctctccaggggaagccgaagtttccaaaaggtcgttgatcaaagctcgccgcgttgtttcatcaagccttacggtcaccgtaaccagcaaatcaatatcactgtgtggcttcaggccgccatccactgcggagccgtacaaatgtacggccagcaacgtcggttcgagatggcgctcgatgacgccaactacctctgatagttgagtcgatacttcggcgatcaccgcttccctcatactcttcctttttcaatattattgaagcatttatcagggttattgtctcatgagcggatacatatttgaatgtatttagaaaaataaacaaatagctagctcactcggtcgctacgctccgggcgtgagactgcggcgggcgctgcggacacatacaaagttacccacagattccgtggataagcaggggactaacatgtgaggcaaaacagcagggccgcgccggtggcgtttttccataggctccgccctcctgccagagttcacataaacagacgcttttccggtgcatctgtgggagccgtgaggctcaaccatgaatctgacagtacgggcgaaacccgacaggacttaaagatccccaccgtttccggcgggtcgctccctcttgcgctctcctgttccgaccctgccgtttaccggatacctgttccgcctttctcccttacgggaagtgtggcgctttctcatagctcacacactggtatctcggctcggtgtaggtcgttcgctccaagctgggctgtaagcaagaactccccgttcagcccgactgctgcgccttatccggtaactgttcacttgagtccaacccggaaaagcacggtaaaacgccactggcagcagccattggtaactgggagttcgcagaggatttgtttagctaaacacgcggttgctcttgaagtgtgcgccaaagtccggctacactggaaggacagatttggttgctgtgctctgcgaaagccagttaccacggttaagcagttccccaactgacttaaccttcgatcaaaccacctccccaggtggttttttcgtttacagggcaaaagattacgcgcagaaaaaaaggatctcaagaagatcctttgatcttttct

SEQ ID NO: 1449 - DNA, 4286 bp, synthetic construct
  source 1..4286: mol_type = other DNA
gaaagaataaaaaaagataaaaagaatagatcccagccctgtgtataactcactactttagtcagttccgcagtattacaaaaggatgtcgcaaacgctgtttgctcctctacaaaacagaccttaaaaccctaaaggcttaagtagcaccctcgcaagctcgggcaaatcgctgaatattccttttgtctccgaccatcaggcacctgagtcgctgtctttttcgtgacattcagttcgctgcgctcacggctctggcagtgaatgggggtaaatggcactacaggcgccttttatggattcatgcaaggaaactacccataatacaagaaaagcccgtcacgggcttctcagggcgttttatggcgggtctgctatgtggtgctatctgactttttgctgttcagcagttcctgccctctgattttccagtctgaccacttcggattatcccgtgacaggtcattcagactggctaatgcacccagtaaggcagcggtatcatcaacaggcttacccgtcttactgtccctagtgcttggattctcaccaataaaaaacgcccggcggcaaccgagcgttctgaacaaatccagatggagttctgaggtcattactggatctatcaacaggagtccaagcgagctctcgaaccccagagtcccgctcagaagaactcgtcaagaaggcgatagaaggcgatgcgctgcgaatcgggagcggcgataccgtaaagcacgaggaagcggtcagcccattcgccgccaagctcttcagcaatatcacgggtagccaacgctatgtcctgatagcggtccgccacacccagccggccacagtcgatgaatccagaaaagcggccattttccaccatgatattcggcaagcaggcatcgccatgggtcacgacgagatcctcgccgtcgggcatgcgcgccttgagcctggcgaacagttcggctggcgcgagcccctgatgctcttcgtccagatcatcctgatcgacaagaccggcttccatccgagtacgtgctcgctcgatgcgatgtttcgcttggtggtcgaatgggcaggtagccggatcaagcgtatgcagccgccgcattgcatcagccatgatggatactttctcggcaggagcaaggtgagatgacaggagatcctgccccggcacttcgcccaatagcagccagtcccttcccgcttcagtgacaacgtcgagcacagctgcgcaaggaacgcccgtcgtggccagccacgatagccgcgctgcctcgtcctgcagttcattcagggcaccggacaggtcggtcttgacaaaaagaaccgggcgcccctgcgctgacagccggaacacggcggcatcagagcagccgattgtctgttgtgcccagtcatagccgaatagcctctccacccaagcggccggagaacctgcgtgcaatccatcttgttcaatcatactcttcctttttcaatattattgaagcatttatcagggttattgtctcatgagcggatacatatttgaatgtatttagaaaaataaacaaataggggttccgcgcacatttccccgaaaagtgccattgacagctagctcagtcctaggtataatagatctattgcgagtagcatggtgaaccacttgtccataaatttattgtttaagaattcattaaagaggagaaaggtaccatggcgagtagcgaagacgttatcaaagagttcatgcgtttcaaagttcgtatggaaggttccgttaacggtcacgagttcgaaatcgaaggtgaaggtgaaggtcgtccgtacgaaggtacccagaccgctaaactgaaagttaccaaaggtggtccgctgccgttcgcttgggacatcctgtccccgcagttccagtacggttccaaagcttacgttaaacacccggctgacatcccggactacctgaaactgtccttcccggaaggtttcaaatgggaacgtgttatgaacttcgaagacggtggtgttgttaccgttacccaggactcctccctgcaagacggtgagttcatctacaaagttaaactgcgtggtaccaacttcccgtccgacggtccggttatgcagaaaaaaaccatgggttgggaagcttccaccgaacgtatgtacccggaagacggtgctctgaaaggtgaaatcaaaatgcgtctgaaactgaaagacggtggtcactacgacgctgaagttaaaaccacctacatggctaaaaaaccggttcagctgccgggtgcttacaaaaccgacatcaaactggacatcacctcccacaacgaagactacaccatcgttgaacagtacgaacgtgctgaaggtcgtcactccaccggtgcttaaggatccaaactcgagtaaggatctccaggcatcaaataaaacgaaaggctcagtcgaaagactgggcctttcgttttatctgttgtttgtcggtgaacgctctctactagagtcacactggctcaccttcgggtgggcctttctgcgtttatacctagggtacgggttttgctgcccgcaaacgggctgttctggtgttgactagcctgacgtctaagaaaccattattatcatgacattaacctataaaaataggcgtatcacgaggcagaatttcagataaaaaaaatccttagctttcgctaaggatgatttctggaattctaaagatctttgacagctagctcagtcctaggtataatactagctgagaccagtgactactggtctcagttttagagctagaaatagcaagttaaaataaggctagtccgttatcaacttgaaaaagtggcaccgagtcggtgctttttttataaaacgaaaggctcagtcgaaagactgggcctttcgttttatccgaatacgggttcttgcatgttacattgtcgatctgttcatggtgaacagctttaaatgcaccaaaaactcgtaaaagctctgatgtatctatcttttttacaccgttttcatctgtgcatatggacagttttccctttgatatctaacggtgaacagttgttctacttttgtttgttagtcttgatgcttcactgatagatacaagagccataagaacctcagatccttccgtatttagccagtatgttctctagtgtggttcgttgtttttgcgtgagccatgagaacgaaccattgagatcatgcttactttgcatgtcactcaaaaattttgcctcaaaactggtgagctgaatttttgcagttaaagcatcgtgtagtgtttttcttagtccgttacgtaggtaggaatctgatgtaatggttgttggtattttgtcaccattcatttttatctggttgttctcaagttcggttacgagatccatttgtctatctagttcaacttggaaaatcaacgtatcagtcgggcggcctcgcttatcaaccaccaatttcatattgctgtaagtgtttaaatctttacttattggtttcaaaacccattggttaagccttttaaactcatggtagttattttcaagcattaacatgaacttaaattcatcaaggctaatctctatatttgccttgtgagttttcttttgtgttagttcttttaataaccactcataaatcctcatagagtatttgttttcaaaagacttaacatgttccagattatattttatgaatttttttaactggaaaagataaggcaatatctcttcactaaaaactaattctaatttttcgcttgagaacttggcatagtttgtccactggaaaatctcaaagcctttaaccaaaggattcctgatttccacagttctcgtcatcagctctctggttgctttagctaatacaccataagcattttccctactgatgttcatcatctgagcgtattggttataagtgaacgataccgtccgttctttccttgtagggttttcaatcgtggggttgagtagtgccacacagcataaaattagcttggtttcatgctccgttaagtcatagcgactaatcgctagttcatttgctttgaaaacaactaattcagacatacatctcaattggtctaggtgattttaatcactataccaattgagatgggctagtcaatgataattactagtccttttcccgggagatctgggtatctgtaaattctgctagacctttgctggaaaacttgtaaattctgctagaccctctgtaaattccgctagacctttgtgtgttttttttgtttatattcaagtggttataatttatagaataaa

SEQ ID NO: 1450 - DNA, 4287 bp, synthetic construct
  source 1..4287: mol_type = other DNA
gaaagaataaaaaaagataaaaagaatagatcccagccctgtgtataactcactactttagtcagttccgcagtattacaaaaggatgtcgcaaacgctgtttgctcctctacaaaacagaccttaaaaccctaaaggcttaagtagcaccctcgcaagctcgggcaaatcgctgaatattccttttgtctccgaccatcaggcacctgagtcgctgtctttttcgtgacattcagttcgctgcgctcacggctctggcagtgaatgggggtaaatggcactacaggcgccttttatggattcatgcaaggaaactacccataatacaagaaaagcccgtcacgggcttctcagggcgttttatggcgggtctgctatgtggtgctatctgactttttgctgttcagcagttcctgccctctgattttccagtctgaccacttcggattatcccgtgacaggtcattcagactggctaatgcacccagtaaggcagcggtatcatcaacaggcttacccgtcttactgtccctagtgcttggattctcaccaataaaaaacgcccggcggcaaccgagcgttctgaacaaatccagatggagttctgaggtcattactggatctatcaacaggagtccaagcgagctctcgaaccccagagtcccgctcagaagaactcgtcaagaaggcgatagaaggcgatgcgctgcgaatcgggagcggcgataccgtaaagcacgaggaagcggtcagcccattcgccgccaagctcttcagcaatatcacgggtagccaacgctatgtcctgatagcggtccgccacacccagccggccacagtcgatgaatccagaaaagcggccattttccaccatgatattcggcaagcaggcatcgccatgggtcacgacgagatcctcgccgtcgggcatgcgcgccttgagcctggcgaacagttcggctggcgcgagcccctgatgctcttcgtccagatcatcctgatcgacaagaccggcttccatccgagtacgtgctcgctcgatgcgatgtttcgcttggtggtcgaatgggcaggtagccggatcaagcgtatgcagccgccgcattgcatcagccatgatggatactttctcggcaggagcaaggtgagatgacaggagatcctgccccggcacttcgcccaatagcagccagtcccttcccgcttcagtgacaacgtcgagcacagctgcgcaaggaacgcccgtcgtggccagccacgatagccgcgctgcctcgtcctgcagttcattcagggcaccggacaggtcggtcttgacaaaaagaaccgggcgcccctgcgctgacagccggaacacggcggcatcagagcagccgattgtctgttgtgcccagtcatagccgaatagcctctccacccaagcggccggagaacctgcgtgcaatccatcttgttcaatcatactcttcctttttcaatattattgaagcatttatcagggttattgtctcatgagcggatacatatttgaatgtatttagaaaaataaacaaataggggttccgcgcacatttccccgaaaagtgccattgacagctagctcagtcctaggtataatagatctattgcgagtattaaacaataaattttatggacaagtggttcaccatgcgaattcattaaagaggagaaaggtaccatggcgagtagcgaagacgttatcaaagagttcatgcgtttcaaagttcgtatggaaggttccgttaacggtcacgagttcgaaatcgaaggtgaaggtgaaggtcgtccgtacgaaggtacccagaccgctaaactgaaagttaccaaaggtggtccgctgccgttcgcttgggacatcctgtccccgcagttccagtacggttccaaagcttacgttaaacacccggctgacatcccggactacctgaaactgtccttcccggaaggtttcaaatgggaacgtgttatgaacttcgaagacggtggtgttgttaccgttacccaggactcctccctgcaagacggtgagttcatctacaaagttaaactgcgtggtaccaacttcccgtccgacggtccggttatgcagaaaaaaaccatgggttgggaagcttccaccgaacgtatgtacccggaagacggtgctctgaaaggtgaaatcaaaatgcgtctgaaactgaaagacggtggtcactacgacgctgaagttaaaaccacctacatggctaaaaaaccggttcagctgccgggtgcttacaaaaccgacatcaaactggacatcacctcccacaacgaagactacaccatcgttgaacagtacgaacgtgctgaaggtcgtcactccaccggtgcttaaggatccaaactcgagtaaggatctccaggcatcaaataaaacgaaaggctcagtcgaaagactgggcctttcgttttatctgttgtttgtcggtgaacgctctctactagagtcacactggctcaccttcgggtgggcctttctgcgtttatacctagggtacgggttttgctgcccgcaaacgggctgttctggtgttgactagcctgacgtctaagaaaccattattatcatgacattaacctataaaaataggcgtatcacgaggcagaatttcagataaaaaaaatccttagctttcgctaaggatgatttctggaattctaaagatctttgacagctagctcagtcctaggtataatactagctgagaccagtgactactggtctcagttttagagctagaaatagcaagttaaaataaggctagtccgttatcaacttgaaaaagtggcaccgagtcggtgctttttttataaaacgaaaggctcagtcgaaagactgggcctttcgttttatccgaatacgggttcttgcatgttacattgtcgatctgttcatggtgaacagctttaaatgcaccaaaaactcgtaaaagctctgatgtatctatcttttttacaccgttttcatctgtgcatatggacagttttccctttgatatctaacggtgaacagttgttctacttttgtttgttagtcttgatgcttcactgatagatacaagagccataagaacctcagatccttccgtatttagccagtatgttctctagtgtggttcgttgtttttgcgtgagccatgagaacgaaccattgagatcatgcttactttgcatgtcactcaaaaattttgcctcaaaactggtgagctgaatttttgcagttaaagcatcgtgtagtgtttttcttagtccgttacgtaggtaggaatctgatgtaatggttgttggtattttgtcaccattcatttttatctggttgttctcaagttcggttacgagatccatttgtctatctagttcaacttggaaaatcaacgtatcagtcgggcggcctcgcttatcaaccaccaatttcatattgctgtaagtgtttaaatctttacttattggtttcaaaacccattggttaagccttttaaactcatggtagttattttcaagcattaacatgaacttaaattcatcaaggctaatctctatatttgccttgtgagttttcttttgtgttagttcttttaataaccactcataaatcctcatagagtatttgttttcaaaagacttaacatgttccagattatattttatgaatttttttaactggaaaagataaggcaatatctcttcactaaaaactaattctaatttttcgcttgagaacttggcatagtttgtccactggaaaatctcaaagcctttaaccaaaggattcctgatttccacagttctcgtcatcagctctctggttgctttagctaatacaccataagcattttccctactgatgttcatcatctgagcgtattggttataagtgaacgataccgtccgttctttccttgtagggttttcaatcgtggggttgagtagtgccacacagcataaaattagcttggtttcatgctccgttaagtcatagcgactaatcgctagttcatttgctttgaaaacaactaattcagacatacatctcaattggtctaggtgattttaatcactataccaattgagatgggctagtcaatgataattactagtccttttcccgggagatctgggtatctgtaaattctgctagacctttgctggaaaacttgtaaattctgctagaccctctgtaaattccgctagacctttgtgtgttttttttgtttatattcaagtggttataatttatagaataaa

SEQ ID NO: 1451 - DNA, 6716 bp, synthetic construct
  source 1..6716: mol_type = other DNA
cagctgtctcttatacacatctccgctgtgctttcagtggatttcggataacagaaaggccgggaaatacccagcctcgctttgtaacggagtagacgaaagtgattgcgcctacccggatattatcgtgaggatgcgtcatcgccattgctccccaaatacaaaaccaatttcagccagtgcctcgtccattttttcgatgaactccggcacgatctcgtcaaaactcgccatgtacttttcatcccgctcaatcacgacataatgcaggccttcacgcttcatacgcgggtcatagttggcaaagtaccaggcattttttcgcgtcacccacatgctgtactgcacctgggccatgtaagctgactttatggcctcgaaaccaccgagccggaacttcatgaaatcccgggaggtaaacgggcatttcagttcaaggccgttgccgtcactgcataaaccatcgggagagcaggcggtacgcatactttcgtcgcgatagatgatcggggattcagtaacattcacgccggaagtgaactcaaacagggttctggcgtcgttctcgtactgttttccccaggccagtgctttagcgttaacttccggagccacaccggtgcaaacctcagcaagcagggtgtggaagtaggacattttcatgtcaggccacttctttccggagcggggttttgctatcacgttgtgaacttctgaagcggtgatgacgccgagccgtaatttgtgccacgcatcatccccctgttcgacagctctcacatcgatcccggtacgctgcaggataatgtccggtgtcatgctgccaccttctgctctgcggctttctgtttcaggaatccaagagcttttactgcttcggcctgtgtcagttctgacgatgcacgaatgtcgcggcgaaatatctgggaacagagcggcaataagtcgtcatcccatgttttatccagggcgatcagcagagtgttaatctcctgcatggtttcatcgttaaccggagtgatgtcgcgttccggctgacgttctgcagtgtatgcagtattttcgacaatgcgctcggcttcatccttgtcatagataccagcaaatccgaaggccagacgggcacactgaatcatggctttatgacgtaacatccgtttgggatgcgactgccacggccccgtgatttctctgccttcgcgagttttgaatggttcgcggcggcattcatccatccattcggtaacgcagatcggatgattacggtccttgcggtaaatccggcatgtacaggattcattgtcctgctcaaagtccatgccatcaaactgctggttttcattgatgatgcgggaccagccatcaacgcccaccaccggaacgatgccattctgcttatcaggaaaggcgtaaatttctttcgtccacggattaaggccgtactggttggcaacgatcagtaatgcgatgaactgcgcatcgctggcatcacctttaaatgccgtctggcgaagagtggtgatcagttcctgtgggtcgacagaatccatgccgacacgttcagccagcttcccagccagcgttgcgagtgcagtactcattcgttttatacctctgaatcaatatcaacctggtggtgagcaatggtttcaaccatgtaccggatgtgttctgccatgcgctcctgaaactcaacatcgtcatcaaacgcacgggtaatggattttttgctggccccgtggcgttgcaaatgatcgatgcatagcgattcaaacaggtgctggggcaggcctttttccatgtcgtctgccagttctgcctctttctcttcacgggcgagctgctggtagtgacgcgcccagctctgagcctcaagacgatcctgaatgtaataagcgttcatggctgaactcctgaaatagctgtgaaaatatcgcccgcgaaatgccgggctgattagtaatccggaatcgcacttacggccaatgcttcgtttcgtatcacacaccccaaagccttctgctttgaatgctgcccttcttcagggcttaatttttaagagcgtcaccttcatggtggtcagtgcgtcctgctgatgtgctcagtatcaccgccagtggtatttatgtcaacaccgccagagataatttatcaccgcagatggttatctgtatgttttttatatgaatttattttttgcaggggggcattgtttggtaggtgagagatctgaattgctatgtttagtgagttgtatctatttatttttcaataaatacaattggttatgtgttttgggggcgatcgtgaggcaaagaaaacccggcgctgaggccgggttaagagttggtagctcttgatccggcaaacaaaccaccgctggtagcggtggtttttttgtttgcaagcagcagattacgcgcagaaaaaaaggatctcaagaagatcctttgatcttttctacggggtctgacgctcagtggaacgaaaactcacgttaagggattttggtcatgagattatcaaaaaggatcttcacctagatccttttaaattaaaaatgaagttttaaatcaatctaaagtatatatgagtaaacttggtctgacagttaccaatgcttaatcagtgaggcacctatctcagcgatctgtctatttcgttcatccatagttgcctgactccccgtcgtgtagataactacgatacgggagggcttaccatctggccccagtgctgcaatgataccgcgagacccacgctcaccggctccagatttatcagcaataaaccagccagccggaagggccgagcgcagaagtggtcctgcaactttatccgcctccatccagtctattaattgttgccgggaagctagagtaagtagttcgccagttaatagtttgcgcaacgttgttgccattgctgcaggcatcgtggtgtcacgctcgtcgtttggtatggcttcattcagctccggttcccaacgatcaaggcgagttacatgatcccccatgttgtgcaaaaaagcggttagctccttcggtcctccgatcgttgtcagaagtaagttggccgcagtgttatcactcatggttatggcagcactgcataattctcttactgtcatgccatccgtaagatgcttttctgtgactggtgagtactcaaccaagtcattctgagaatagtgtatgcggcgaccgagttgctcttgcccggcgtcaacacgggataataccgcgccacatagcagaactttaaaagtgctcatcattggaaaacgttcttcggggcgaaaactctcaaggatcttaccgctgttgagatccagttcgatgtaacccactcgtgcacccaactgatcttcagcatcttttactttcaccagcgtttctgggtgagcaaaaacaggaaggcaaaatgccgcaaaaaagggaataagggcgacacggaaatgttgaatactcatactcttcctttttcaatattattgaagcatttatcagggttattgtctcatgagcggatacatatttgaatgaattcaatccatttactatgttatgttctgaggggagtgaaaattcccctaattcgatgaagattcttgctcaattgttatcagctatgcgccgaccagaacaccttgccgatcagccaaacgtctcttcaggccactgactagcgataactttccccacaacggaacaactctcattgcatgggatcattgggtactgtgggtttagtggttgtaaaaacacctgaccgctatccctgatcagtttcttgaaggtaaactcatcacccccaagtctggctatgcagaaatcacctggctcaacagcctgctcagggtcaacgagaattaacattccgtcaggaaagcttggcttggagcctgttggtgcggtcatggaattaccttcaacctcaagccagaatgcagaatcactggcttttttggttgtgcttacccatctctccgcatcacctttggtaaaggttctaagcttaggtgagaacatccctgcctgaacatgagaaaaaacagggtactcatactcacttctaagtgacggctgcatactaaccgcttcatacatctcgtagatttctctggcgattgaagggctaaattcttcaacgctaactttgagaatttttgtaagcaatgcggcgttataagcatttaatgcattgatgccattaaataaagcaccaacgcctgactgccccatccccatcttgtctgcgacagattcctgggataagccaagttcatttttctttttttcataaattgctttaaggcgacgtgcgtcctcaagctgctcttgtgttaatggtttcttttttgtgctcatacgttaaatctatcaccgcaagggataaatatctaacaccgtgcgtgttgactattttacctctggcggtgataatggttgcatgtactaaggaggttgtatggaacaacgagatgtgtataagagacagctgacgggttttgctgcccgcaaacgggctgttctggtgttgctagtttgttatcagaatcgcagatccggcttcaggtttgccggctgaaagcgctatttcttccagaattgccatgattttttccccacgggaggcgtcactggctcccgtgttgtcggcagctttgattcgataagcagcatcgcctgtttcaggctgtctatgtgtgactgttgagctgtaacaagttgtctcaggtgttcaatttcatgttctagttgctttgttttactggtttcacctgttctattaggtgttacatgctgttcatctgttacattgtcgatctgttcatggtgaacagctttgaatgcaccaaaaactcgtaaaagctctgatgtatctatcttttttacaccgttttcatctgtgcatatggacagttttccctttgatatgtaacggtgaacagttgttctacttttgtttgttagtcttgatgcttcactgatagatacaagagccataagaacctcagatccttccgtatttagccagtatgttctctagtgtggttcgttgtttttgcgtgagccatgagaacgaaccattgagatcatacttactttgcatgtcactcaaaaattttgcctcaaaactggtgagctgaatttttgcagttaaagcatcgtgtagtgtttttcttagtccgttatgtaggtaggaatctgatgtaatggttgttggtattttgtcaccattcatttttatctggttgttctcaagttcggttacgagatccatttgtctatctagttcaacttggaaaatcaacgtatcagtcgggcggcctcgcttatcaaccaccaatttcatattgctgtaagtgtttaaatctttacttattggtttcaaaacccattggttaagccttttaaactcatggtagttattttcaagcattaacatgaacttaaattcatcaaggctaatctctatatttgccttgtgagttttcttttgtgttagttcttttaataaccactcataaatcctcatagagtatttgttttcaaaagacttaacatgttccagattatattttatgaatttttttaactggaaaagataaggcaatatctcttcactaaaaactaattctaatttttcgcttgagaacttggcatagtttgtccactggaaaatctcaaagcctttaaccaaaggattcctgatttccacagttctcgtcatcagctctctggttgctttagctaatacaccataagcattttccctactgatgttcatcatctgagcgtattggttataagtgaacgataccgtccgttctttccttgtagggttttcaatcgtggggttgagtagtgccacacagcataaaattagcttggtttcatgctccgttaagtcatagcgactaatcgctagttcatttgctttgaaaacaactaattcagacatacatctcaattggtctaggtgattttaatcactataccaattgagatgggctagtcaatgataattactagtccttttcctttgagttgtgggtatctgtaaattctgctagacctttgctggaaaacttgtaaattctgctagaccctctgtaaattccgctagacctttgtgtgttttttttgtttatattcaagtggttataatttatagaataaagaaagaataaaaaaagataaaaagaatagatcccagccctgtgtataactcactactttagtcagttccgcagtattacaaaaggatgtcgcaaacgctgtttgctcctctacaaaacagaccttaaaaccctaaaggcttaagtagcaccctcgcaagctcgggcaaatcgctgaatattccttttgtctccgaccatcaggcacctgagtcgctgtctttttcgtgacattcagttcgctgcgctcacggctctggcagtgaatgggggtaaatggcactacaggcgccttttatggattcatgcaaggaaactacccataatacaagaaaagcccgtcacgggcttctcagggcgttttatggcgggtctgctatgtggtgctatctgactttttgctgttcagcagttcctgccctctgattttccagtctgaccacttcggattatcccgtgacaggtcattcagactggctaatgcacccagtaaggcagcggtatcatcaacaggcttacccgtcttactgtc

SEQ ID NO: 1452 - DNA, 5599 bp, synthetic construct
  source 1..5599: mol_type = other DNA
gccctcctgccagagttcacataaacagacgcttttccggtgcatctgtgggagccgtgaggctcaaccatgaatctgacagtacgggcgaaacccgacaggacttaaagatccccaccgtttccggcgggtcgctccctcttgcgctctcctgttccgaccctgccgtttaccggatacctgttccgcctttctcccttacgggaagtgtggcgctttctcatagctcacacactggtatctcggctcggtgtaggtcgttcgctccaagctgggctgtaagcaagaactccccgttcagcccgactgctgcgccttatccggtaactgttcacttgagtccaacccggaaaagcacggtaaaacgccactggcagcagccattggtaactgggagttcgcagaggatttgtttagctaaacacgcggttgctcttgaagtgtgcgccaaagtccggctacactggaaggacagatttggttgctgtgctctgcgaaagccagttaccacggttaagcagttccccaactgacttaaccttcgatcaaaccacctccccaggtggttttttcgtttacagggcaaaagattacgcgcagaaaaaaaggatctcaagaagatcctttgatcttttctactgaaccgctctagatttcagtgcaatttatctcttcaaatgtagcacctgaagtcagccccatacgatataagttgtaattctcatgttagtcatgccccgcgcccaccggaaggagctgactgggttgaaggctctcaagggcatcggtcgagatcccggtgcctaatgagtgagctaacttacattaattgcgttgcgctcactgcccgctttccagtcgggaaacctgtcgtgccagctgcattaatgaatcggccaacgcgcggggagaggcggtttgcgtattgggcgccagggtggtttttcttttcaccagtgagacgggcaacagctgattgcccttcaccgagaaatgaagagattagaggtttataagagggagccagtttgtcaaacgagatagtttatttacgatgctcaacttattgaattatatggctttattatggtgggttgaagggcgttaagacgaacttatcacaagcatacagttctgtttcgcttggggcctgaaagcagatggggacggttttcactttttcttctaaaggtccagaatactttgccgatagtgaacatagcggcgcaggagccaaatggtggaagccgtaaacttaatttaagttcagtcaaataggaattactatcatggcacaagtcatcaataccaacagcctctcgctgatcactcagaacaacatcaacaagaaccagtctgcgatgtcaacagccattgagcgtctgtcatccggcctgcgtatcaatagtgcaaaagatgacgctgctggccaggcgattgccaaccgcttcacctctaacattaaaggtctgactcaggctgcgcgtaacgccaacgacggtatctccgttgcgcagaccactgaaggcgcactgtctgaaatcaacaacaacttacagcgtatccgtgaacttaccgttcagtcttctacaggtactaactcccagtctgatctggactccatccaggacgaaatcaaatcccgtctggacgaaattgaccgcgtttccggacagactcagttcaacggtgtgaacgtgctggctaaagacggctctatgaaaattcaggttggtgcaaacgatggtcagaccatcagtattgaccttaaaaaaatcgattcggatactttgaatctgaaagggtttaatgtaaatggtaaaggtgctgttgataatgctaaactgaccgaagcagacctgaccggctttactaagactccaggagcaaacggtaacaacacctggactaaaaatgatgttactacttatcagtcagcgactacagctgacttgctgaatagcgttgcaaacggcagtaaaatcagccagacagcaccaaccatctctaacggtttaggcgttgatgctgacgctgattacacctttgatacagccagcaagtcctacaaatttgatgcaacagatgtaacatcagcaaatgccctcaactatctgaccaagggtggttccgctactgctacagttaaaattggtacaaccactcaagatgttatcattgatagcgcaggaaatatcactgcggctgatgataatgcacaactgtatcttgatactactggtaacttgaccaagaacagtgcaggcacgcctccagcagctacgcttgcaggattgatgtctggcgcttctgctgttgcaagcgaaattaccacggctgataaaggtacgttaacaactactggttcaggtgcaacaggatttaaaattacaggtgcatcgatctctgctgacgatatggcaacagcattatctggtaaagtttatactgttactaacggtgctgcttcttacgacgctgatgcaggtggagcggtaactgctggcggtaaagctgttaacctggatttagatggaaagctaactactgatacagaaaaaacggtaactactacttatcaagaatttgctaacggaagctttattgatgataaaggagctgctctgtataaggcagccgatggttcaataaccacagaagcgcaaggtgcttcggcagctacttctgacccgttgaaagcgctggacgatgctatcgcctctatcgataagttccgttcttctctgggtgcagtacagaaccgtctgagctctgcggtaactaacttgaataacaccactaccaacctgtctgaagcgcagtcccgtattcaggatgccgactatgcgactgaagtgtcgaatatgtccaaagcgcagatcattcagcaggcaggtaactccgtgctgtccaaagctaaccaagttcctcagcaggttctgtctctgctgcaaggctaatttcatattaagtgtcaaagccccatatatgtggggcttttttattggctgaataagctcgttaaaagtagtcaaatcctctaatcaaagctcgcacgatgatttagaatttcaccagttttgctccgtttacacaggtccagttgtgattaaaaaacaggcattcaaatttttgcttgaaccaaacaaaggtcagttatctgactttttggcctttgctggttcctgtcgttttgtttacaacaaaggccttgctcttcttaacgagaattaccgttcgggtaaaaaattcataggctacaatcagctggcttctgaattagtggaatggaagaatgaagagagcctttcttggttgaaagaagctccatctcagtgtttacagcaatcgttaagagatttagacagagcattcagaaactttttcaccggcaaatcacaatatccaaagtttaaaaagaaaggtcggcatgattctttccgtataccatgccaaagggttagagtagatcaagaaaaaaaactggtatctctccctaaagtcggctgggtaaagtatcgcaagagccgtgaaatcattggtgatttaaaaaatgcaactatttcccttaatcagggaaaatggtatatcagttttaatacagagcaaacagttcctgatccaatacacccctctgatatcaaaactacaattgtacttaataatgtgaatagcgttcatctgtcatctggggttggcggtgataacacttaccaagcggaagaaaagaaaaagttaatccgtctcaataaaacactggcgagaagaaagaaatacagcaaaaattggctaaaaaccaaaggtaaaattgatagagtaagatcaaaggcatcaaggataagacttgataatatccataaagcaaccacggcaatttgtaaaaatcacgcagttgttgaggttgtgaacttgatggattctgtatctgccaagaacgataacactccgagtacgagatacgaatttgtcaggcagttgatatacaaacaagagtggctgggtggtgaaattattcgccgggagagtaaactcttgtaacggttttttccgtgatgatgttgtactatgtgacgaattttaagcggcagggcatgtcgtttctgcttgtggaggaaggttaattcaacttccgttgaagcaagaatctcttgattgttattgagaatgtcaacgtctggtccaatactttacaagtagaagtatataagtatgttgaaatggatttgcgagttttcagttgtcctggccctgagagagttgcagcaagcggtccacgctggtttgccccagcaggcgaaaatcctgtttgatggtggttgctgctgccaccgctgagcaataactagcataaccccttggggcctctaaacgggtcttgaggggttttttgctgaaacctcaggcatttgagaagcacacggtcacactgcttccggtagtcaataaaccggtaaaccagcaatagacataagcggctatttaacgaccctgccctgaaccgacgaccgggtcatcgtggccggatcttgcggcccctcggcttgaacgaattgttagacattatttgccgactaccttggtgatctcgcctttcacgtagtggacaaattcttccaactgatctgcgcgcgaggccaagcgatcttcttcttgtccaagataagcctgtctagcttcaagtatgacgggctgatactgggccggcaggcgctccattgcccagtcggcagcgacatccttcggcgcgattttgccggttactgcgctgtaccaaatgcgggacaacgtaagcactacatttcgctcatcgccagcccagtcgggcggcgagttccatagcgttaaggtttcatttagcgcctcaaatagatcctgttcaggaaccggatcaaagagttcctccgccgctggacctaccaaggcaacgctatgttctcttgcttttgtcagcaagatagccagatcaatgtcgatcgtggctggctcgaagatacctgcaagaatgtcattgcgctgccattctccaaattgcagttcgcgcttagctggataacgccacggaatgatgtcgtcgtgcacaacaatggtgacttctacagcgcggagaatctcgctctctccaggggaagccgaagtttccaaaaggtcgttgatcaaagctcgccgcgttgtttcatcaagccttacggtcaccgtaaccagcaaatcaatatcactgtgtggcttcaggccgccatccactgcggagccgtacaaatgtacggccagcaacgtcggttcgagatggcgctcgatgacgccaactacctctgatagttgagtcgatacttcggcgatcaccgcttccctcatactcttcctttttcaatattattgaagcatttatcagggttattgtctcatgagcggatacatatttgaatgtatttagaaaaataaacaaatagctagctcactcggtcgctacgctccgggcgtgagactgcggcgggcgctgcggacacatacaaagttacccacagattccgtggataagcaggggactaacatgtgaggcaaaacagcagggccgcgccggtggcgtttttccataggctcc

SEQ ID NO: 1453 - protein, 1409 aa, Linnemannia hyalina
MDLADLKGIRVSGGIVVTSQDLVEDAGRPILQDRTFTAIWRFYKYTTGKRVKDSFWHISNWIPTRPIEQVPVLTRGWRTEEFAPETSTKSPPKPKTNVEKAPASAKKPLAEMKKECFRLAAGKKREAQRLIGIFVETLRIRTDSAEEALRIKLPPGKLTVSEEQRTKARRGAASGTEREIFDHLCERIKPKDYVEDDDEDATDKKRENNSDLRDLKGFGARELLPKDKDDDRDKDKGKKEKTSLGIVVNYLIDWLVTGHFYKPSRRRGEIEVKMPYTPTYVVRSVAGQLAVELKKLYGNGSHELRKKVLTVHKKGVLDASIDIVIQEQVSAFENFLFLNKLTSSSRRIVPLTTSHQPFVSFSERIDQQTEEEGWTSTSCLDALDDIRSHLQQFLQEDEKVKKNIKDDDEGVFHWAMYKEKGYVLRGSILTDGFRVKLQSFKLRELQDVRYRRWKEDRLPSRLTSTVGGIDFFLQEIRNVLTCKEDIERLWPGVDVKDIRTLTLDAGQACIIGAFAHLPEEIAKRARSLGYLVVGLNEYYTSKKCPRCGQFVGQVDMRRFYCSQFQVFHHRDVMAAENMANIVQGYLLDLQRLDCLHPIAPDGNMPWKEASSGLGTPSTTGPTATKIAATSGPTRVALRSKGQRKRSSTASSLKQATSNQSLWCIVDGDPMLRAFELVIPSSVTTLGQLRSYIHLRKPIWFKYLEAEDLTLWSVSIPITKDNEDTPILLEDVPSSDKNKLGPTDDVSELFQQVPLKKTIHVIVQRPPPAVTMKRLLEQDPQYLPQKKRIRIEEGWKPFTASDGILVDLPPYWIDILASTEFVPKPRAAFDHLKGNLQAGDAIIVPSMGQNPKDFGLYGQDHNLFVTEQMLELWDEMRGDQEFTYRRILSGPMGVGKSYLSYFLAARAYAEGWLVLYISDAGVLDKNKQDESALQAVKRFLALNKDILTGAEMEMLVNDYNGTDDISGNAMSVIFGTLLKSRDRKTLLLVDEHGKLFEKEPYVPDKFRSLVPLLLYNWWGEDAKGSRVVFTGTAHAKYEMGILEESYRFTSLVLVGPLSMHVFSKLLDMYPRLAAPAIRKEVTAITNCVPRELVHLSVYLELFPDPIAIDNLQVWTSKRTKVFLSTAKTYYESRTPFRKNDFYEALVHTFLGSTSIVDFEWDFLDLGLIYRCKDVGRIGTHHHILCRPAQRALLELFKNISLPDAIKKRICDGSLDENEFEGVLYHQLICATKPIVLGTTDLNGKNPDTISLDFSLCETLRAGMTCLESDHEMALTRGYDSHPRFDFMLGPMFMQVSVSDFGKHNTASAELGKAFNDRDNNGTNQIERYLNDLYGPGHSAKIDNSKFIVTKNGVDVLGFRIVYICGSPGQPSHSKWVKKFPDVRHVSFEEVKENLFKNIVTSTVAIAPMTT

SEQ ID NO: 1454 - protein, 2787 aa, Polychytrium aggregatum
MTIRHTSRVPARRSTFFEQACPVIRTLIEQDPFQTGPVLQCKLESILQRKVSLSLCHTAIQRAGLSHKRATHLYKSKRLDERVAQFRDQVRSIDPRRFVFVDETGIRKSIFPLYGYSPKGAPLRQCNHMKHKSVSAAFAINHSGVLHRMYIPTSFKTHSMVEFFERATFPDDSVVVMDNVSMHKTRAVLDCIERRGWSVIFTPPASPDFNPIENFFGVVKHQYRKAAALNASEGFKVGMVTLFEVTSPTSPQRRAPALGHPAFSGPMPPKRKGTGDGQPRPPRPKKAKSQSEPVSDPMDVDPTEPGPSTSSSTGKRCRQCDGTDHERCNTSKCPKYRPLKSSVVPLVDGRSSAPQFSCFKQTMDGCCLNPALRDKIQATVEAMTQIQFEASRLLNLHILRCIEQDLPVPVISKATPAFIRQCFTIVEAGALSPTGDNEKYNEHLVASFRDYQTTRHADLPPAPRLPDGAHSQLLTLAVNAYATNCTTHLNLAYWRLLRRFCAAVFPANKHKHEAIEACLELFEKPGQTPPKADLEFLYPDFGHVLDEFRYSNDQDRFRALHRLSHHVRILARDKMVDDVHKWIDCDMPALRVTELQRQAKLDELTTQGIPSDDKRFTTAKSELGTTKAKINKLASRINWALKQLALDTPPAVCTIVPLCTAKVKYVKIDTVTLWQLLDTEQHLGLTWDMLKEEGEDGINNQDRLWRSCFKLRSSLFQERDVNKKLFNYEISTDGIGCTIGLVKFVRRTDHTETTTPVKTAEQRIQAHIGSPDPDKTTWIGIDPGVGSIFTAVIQAPGHQDEVVSFSNGHYQHMCGHKSNTDWHNTMKYRLSIETWMSTTPSPKVSSSEAFKVHLTHVLRPELRVQLDFHLGKKARHHRFTGHKRRQVAVDRMCKAVLKHAPIRTDVVIAFGNASWRQGKGYASSPRRQRFARYFEQFEHHRRRPNHPHGSVKVASTNEFNTSQVCSKCLEPVRLEGLDAPSVANSHFVRSCKNPSCRTVWNRDVNAARNMITSTRIRSVKGQLRIRLKDYITKQTKEIVPLSKEASERAKRFWEIVRKAFLRKDIDAFALLAGTKAPVPYPITIRQGFQFKYRLRSKHAIVCAIQHPRVPIRFEGGCLGTEADAGYEESEDESSLEDDHDHPDGKESTKVKKSRPYTIACVDRARGIIVWDVTRVSFSTKPRIMLKLKTDLTNFVFLSKFGMYCGCSYDKSIKFFNARFELANIYYTMKAVQFVRYNSISHELVTAGSHNICPTLKYEIETDLSTDEWITSIYLDEANHRMYAIIDTRILICCILHYSEYNYTIIACADGSIKIKNLTNAVVHEFTSHTKRVTGLAVYPFGPIIMSCALDMTVRMYNLKNFKEVYCFHIREQPMGIEIADKAVLNIYTREGILAWNLNHINTSFSSINSQAKRLVNYQGTRTPCRILAWSDDSVIRLISPATGKSITTVLPLVESESITALSYCPSIEKLFIMLTNSEIWVIATNVNPCLVVDIWRPNGPIREDCTCICVCDGVFQHHQPSPSGYERSKGFAFLFGGTGNGQVLVYTRFGVLHNGEVTQIIYISKQQLLITGGADELIKICTLEPMSSELIQVKVSIKAGFIPRLISISDNAVAATSDDWSIHMFQFNLHRNESRKMPTHLRSDDHTDAVTAICPIPMLGLFISSSRDGTLRLWDSFNTLIREVQFTQPLEAVCVNSERGDILVGIQNRVDIIQYSLYLPPGYIATVQSLEFPEMPVEPSLPFDDNQAIWKAVPLQSYSTRQDFFHAINLVSTGVEALSSQSLSSATTFELETPMLSKEHQLSSTENIYRMLDVLMLRRQEVVDRAKKRISEELSNVRRKDQILHEEYEKYIKYRPLMQRELEEDSEKAGYRSYSLSYLQFSAPITPRGEVAEELTLLREVKEIQMNEAESIESVAALEQAAESIQSVTLEEPSVPIIQEVPQESISQIIAKMPVTPKHRLKVAPDGEIPNSVLSHNVESWRSKHTGYQRAGAIRGIRRKKKEAPKPADTVERKKKSDEYKERLKNLLENMAKKEEEEKAQANEANIVVIEDEDENEAEEEEEVYRSRLPANTGLRNVQMYDPIVQVVAEKVPMIVQKALAFSWFPDDEKINPTPEAIAEIIVGKLWEYSKPEIKLEMLDFINWIYEELGIRDTTMIMRTLCRYLQSRLTESMDDTDVKLREKIIGVLTKFSVPYTEVISTLIMQLILPYEPIVAPSKHLMSALGIACAESQFLKMQIEEIYNESQNQLMAFNAARGESGSRPQTLTKPKDFRELATLWIRTCLKNYLMKTLKDKDAIALLKKLTPFGIEDRGSTSNSSAPSTPAQASSTGTAKTSNPSTPSNQIDKSRRSSVKGRRESTATQSRRPTSPQKTRSRQTSIATGANQGRPRASSVSFHPDVGESGPEDPKDQLRRLAVTLESSNEKLDEETNEAIVSRPVTAIGDSTIEGVVIETRDPGSRDPVSILRNPSGQDFVDAVNYFIVTLEKKAAKEEQERLAKLREQSAQAQRQRLEAEKKAQLEEYLRQKEEERQARSAARRERIASLRAQEKAKADESQKRRRGVNWKTVGQTHQSKCHPSRETLNVALDKFPSMCGSFLRSFTNEITLNMASLAKTMPMEHVVLSPFGEPPLSQRILSAAAREKVHGRDYPYSPFVNSQHTLVPEWKEYHADERRSSTTRSDVSYIRAPLTFRENNVRIVKDLYLQEFDPEGDESAKFKTQKKYFIPSLAVPDIDDELNDELQNMDESERPSQAHSHRHSHSHSHSQSFHRLSETDQQLQRMKNRRYI

SEQ ID NO: 1455 - protein, 2787 aa, Polychytrium aggregatum; identical to SEQ ID NO: 1454

SEQ ID NO: 1456 - protein, 441 aa, Bacillus cereus
MSLSIQEEFHLFAQELQQYLSPHILQQLAQETGFVKRKSKYGARDLAALCIWISQHVASDSLTRLCSQLYANTATLMSPEGLNQRFNRCAVLFLQRVFSLLIKSKLNDFSQISNQYTSYFQRIRILDATIFQVPNHLAPIYPGSGGCAQTAGIKIQLEYDLHSGKFLNFQMEPGKNNDKTFGTDCLDTLRPGDLCIRDLGYFSLKDLDQMDQRGVFYVSRLKLNNRVYVKNDYPEFFRDGTVKKQSLYVLLNLEDIMHQIKPGDTYENPKFFRSLEDKLAKAQRVLSRRLKGSSRWNKQRVKVSRIHEYISNTRKDYLDKISTEIIKNHDVIGIEDLHVSNMLKNHKLAKAISEVSWSQFRSMLEYKAKWYGKQVIVVSKTFASSQLCSCCGYQNKDVKNLNLRKWDCPSCCTHHDRDINASINLKNEAIRLLTARTAGLA

SEQ ID NO: 1457 - protein, 441 aa, Bacillus cereus; identical to SEQ ID NO: 1456

SEQ ID NO: 1458 - protein, 441 aa, Bacillus cereus
MSLSIQEEFHLFAQELQQYLSPHILQQLAQETGFVKRKSKYGARDLAALCIWISQHVASDSLTRLCSQLYANTATLMSPEGLNQRFNRCAVLFLQRVFSLLIKSKLNDFSQISNQYTSYFQRIRILDATIFQVPNHLAPIYPGSGGCAQTAGIKIQLEYDLHSGKFLNFQMEPGKNNDKTFGTDCLDTLRPGDLCIRDLGYFSLKDLDQMDQRGVFYVSRLKLNNRVYVKNDYPEFFRDGTVKKQSLYVLLNLEDIMHQIKPGDTYENPKFFRSLEDKLAKAQRVLSRRLKGSSRWNKQRVKVSRIHEYISNTRKDYLDKISTEIIKNHDVIGIEDLHVSNMLKNHKLAKAISEVSWSQFRSMLEYKAKWYGKQVIVVSKTFASSQLCSCCGYQNKDVKNLNLREWDCFFCRTHHDRDINASINLKNEAIRLLTARTAGLA

SEQ ID NO: 1459 - protein, 441 aa, Bacillus cereus
MSLSIQEEFHLFAQELQQYLSPHILQQLAQETGFVKRKSKYGARDLAALCIWISQHVASDSLTRLCSQLYANTATLMSPEGLNQRFNRCAVLFLQRVFSLLIKSKLNDFSQISNQYTSYFQRIRILDATIFQVPNHLAPIYPGSGGCAQTAGIKIQLEYDLHSGKFLNFQMEPGKNNDKTFGTDCLDTLRPGDLCIRDLGYFSLKDLDQMDQRGVFYVSRLKLNNRVYVKNDYPEFFRDGTVKKQSLYVLLNLEDIMHQIKPGDTYENPKFFRSLEDKLAKAQRVLSRRLKGSSRWNKQRVKVSRIHEYISNTRKDYLDKISTEIIKNHDVIGIEDLHVSNMLKNHKLAKAISEVSWSQFRSMLEYKAKWYGKQVIVVSKTFASSQLCSCCGYQNKDVKNLNLREWDCPSCCTHHDRDINASINLKNEAIRLLTARTAGLA

SEQ ID NO: 1460 - protein, 441 aa, Bacillus cereus
MSLSIQEEFHLFAQELQQYLSPHILQQLAQETGFVKRKSKYGARDLAALCIWISQHVASDSLTRLCSQLYANTATLMSPEGLNQRFNRCAVLFLQRVFSLLIKSKLNDFSQISNQYTSYFQRIRILDATIFQVPNHLAPIYPGSGGCAQTAGIKIQLEYDLHSGKFLNFQMEPGKNNDKTFGTDCLDTLRPGDLCIRDLGYFSLKDLDQMDQRGVFYVSRLKLNNRVYVKNDYPEFFRDGTVKKQSLYVLLNLEDIMHQIKPGDTYENPKFFRSLEDKLAKAQRVLSRRLKGSSRWNKQRVKVSRIHEYISNTRKDYLDKISTEIIKNHDVIGIEDLHVSNMLKNHKLAKAISEVSWSQFRAMLEYKAKWYGKQVIVVSKTFASSQLCSCCGYQNKDVKNLNLRKWDCPSCQTNHDRDINASINLKNEAIRLLTARTAGLA

SEQ ID NO: 1461 - protein, 630 aa, Allocatelliglobosispora scoriae
MRWRVRVGAPWRDVPPCYGTWQAVYGLFRRKQRAGVWLRLVAGLQRRADALGLIGWDVSVDATTVRAHQHAAGARRNGDAQAEPPVGEPADHAFGRSRGGWTTKLHLACEQGRKPLSMLLTAGHRGDSPQFAAVLAGIRVVGRVVGGVWHGVVARFTAFRFTVDPTPGQEVLLRRYAGASRFGYNQCLRLVKDALDAKVRGGVMKVPWTGFDLVNAFNAWKRSGDAGRVMVAAGDGTVSIEATGLVWRAEVSQQVFEEAAVDLGRALAAYTGSKAGARAGRRVGFPRFKSKKRTRLGFRVRCKTSRAGKADVRVGDNVARSVTLPGIGVLVVREDTRQLRRMLSKGRAKVLSATVGYRAGRWFVSLTCEAADLHQARQHPQPDPADAATGTTGCGWVGVDRGLSAFVVAARADGTPVLRVDDPPRPSRAGMGWQRRLARSVSRKQLGSANRRDAAARLANHHAYVRTVRQRFLHHVSNQLVKTHDRLALETLNITGMLRTHRLAAAIADAAWAELARQVTYKQAWHGGRVVLVDRWYPSTKTCSACRTITPAMPLGQRVSTCGTCGYRADRDHNAAVNLAVWAEQHHARPGTSTQGARSPTPAEGKALARAPARVKPAPTTWEPHPPPPE

SEQ ID NO: 1462 - protein, 794 aa, Streptomyces sp.
MDENTTTVVVRETLDPTADQRAILQRYADASRCSFNYALGLKHGAQQLWAHGRDQLVAQGQTPAEAARNAPKIEVPSQFAVQKIFLAQRDQPLPGPQLPGQEPRLLFPWWKGVNAIVCQQAFRDADAAFSNWKSAGRRKGVPVGYPRFKRRGRRRDSFRMFAVRLVEQDLRHVRIGGGGGQPAFSVRLHRPARRLARLLARGGVAKSVTISREGHRWVAAFNVRVPVGPVPRPSRRQREAGAVGVDLGVKVFVATSDPVVINDHKIQLFENARHLENTRRQLRKWQRRMARRHVRGLRSHEQSQGWRDARDQVARLHALVAARRASSQHLVTKRLVTQYAHVALEDLRVKSMTASARGAVESPGRNVRAKAGLNRAILDVGFGEIRRQIEYKAVLNGTRVTVVDPAYTSQTCNRCGHVDAKSRRTAISSPAPTAATPLTPTIPSRSCWRRSSPSSPPTSPVSRSRSTRRCTAYTSRICVTTLQTSSSPGSPPWTPSGSRSPTPTKAGDSAAPFVAFGRLRTFTPKGCCRRLSSGHFPCMGGVLRAEPVWVETFTGLRMDRFVKLVKVVRERGGNGPGGGRPWCLPLPDRVLLVAVYYRTNLTMRQLAPLFGISPATVCRVIQRLRPLLALERAPQPVVDTERLWIVDGTLIPVRDRKVGASSRNYRFSANVQVIIDADTRLVIAAARPAPGNKADAHVWRGSDLPALAAGTTVIADGAYLGTGLIVPHRKRAGRPLLRGQEEDNAEHRRVRARVEHTFARMKNWKILRDCRQKGDGLHHAIQAAATMHNLAMTR

SEQ ID NO: 1463 - protein, 1374 aa, Linnemannia hyalina
MDSSLEFLGSFDVSDSQGTVVASAEEVDEAQEEEEELLFSVRCRTRPTPGTDSSGDEEEEKAGDEGVIDASAPPTKKIFSDPVLTDLADNTNAYAASKGAGTGEGSRQWVKTTPDELRTFLGIIVYMGVFRQNSVSEYWSTFPECPQHNITTFMSLVRFEQLKRFFHVSNPNEPEQHWFSKVEPQASSGPERAADVDGAGMSTHTTTSTRQASSSPKRAADVDDADTADTASSNKRLRPLQISSGSSTLVEDMQRLLATQPSQIRFDESGALTTICAQEKDFRSVGAAIEKILSSRLSKDITMLHMDGLRSMEKEWAHGKRDQALSKQLETLERDYTEGKLHNKRQLYKRLKASYRAPPEALRAVSEVLRQSGWTICQCLNQSDTCIARTVNNAAVPGDIRVITKDSDLMAFESIMSVTMPVKNTWTTFHKDELLNEHGLPTPVHLTLAALVSNNDYTNGVFSYGLTSNVDTIRQFKMTGLDGTVGQDRVEVVRIYVRRYLDIIHQKARTIKDSATQSARRRLRCNPNPTVKAHDKDLRRIETADRQLRVDVTEFGHALKTFGAATDAEATPPPLPTAPKAGSAPYPQATSAGSPSIRQTHGPAEHPPSHKQKIKKQRRHGSRALQRRRQKWRRSRFRSRTDVQDRYVPDTVFLEKASPVDVVELSGLKPSTPRPSKPKEQSPRIDQVPAPTAKKKKKKLLGEPKGIAGPKALKRAFQSVFATVTLTTGSLQGCLGRSTNLSKAEVAQLTQHVSSAVSTVNSAKHIVYKLIEMRILQPLIETGLNQAEDGPDESFLEKILDSDWAERFVQNLLSFVLRNSIVPQGRPPASDKSKDAVAEAISTFNEFKKTLCPGFKALNSTDLALSNIIAELAPKICLDQKLHYRRIPETLRTKLSKLSIDCDGLPEIDQDGTDAGGDAGAADVNEGVDDDDALKRSKKIIFKPGHIQLCWRYFLLLPSSKRPRFCTQAKTSDSFIDINEEALVALLWGEKAVQLDNVWEDTRYTHNWAAAKQRSSYGEVIKELFIGDRDVIKEARNKQQTTYGKRTTTMAEREEAHPHIYGQLELARYLTNKVNFFRERHNASLTAPTPPLPSSTPSSSTTASSHPTSAAAIEKLYPTRQHLIDAFGDDLDSVIVVGIDPGEVVSGAFCLTLPGGKVINLLIKRASLYQPTLAFRDWEQHWKRRHPTAGPGDVVDSSLWTRITDLDKLTTLPSVHDLENSLPSTNYDTSLDALTAAHKKYYEQEPLIHGIYASREWKVAVHEHRMAKMSELDLAVAGVLRMVDEACEGVPSAALGYKAALVDEYLTSTMCPTCVVENRATRLAKPSMRTCACVECTRWIHRDGVGAHNIALIGEQYLKSLGRPEPLARPPKQT

SEQ ID NO: 1464 - protein, 1376 aa, Linnemannia hyalina
MDSSLEFLGSFDVSDSQGTVVASAEEVDEAQEEEELLFSVRCRTRPTPGTDSSGDEEEEKAGDEGVIDASAPPTKKIFSDPVLTDLADNTNAYAASKGAGTGEGSRQWVKTTPDELRTFLGIIVYMGVFRQNSVSEYWSTFPECPQHNITTFMSLVRFEQLKRFFHVSNPNEPEQHWFSKVEPQASSGPERAADVDGAGMSTHTTTSTRQASSSPKRAADVDDADTADTASSNKRLRPLQISSGSSTLVEDMQRLLATQPSQIRFDESGALTTICAQEKVIDFRSVGAAIEKILSSRLSKDITMLHMDGLRSMEKEWAHGKRDQALSKQLETLERDYTEGKLHNKRQLYKRLKASYRAPPEALRAVSERQCIARTVNNAAVPGDIRVITKDFDLMAFESIMSVTMPVKNTWTTFHKDELLNEHGLPTPVHLTLAALVSNNDYTNGVFSYGLTSNVDTVRQFKMTGLDGTVGQDRVEVVRIYVRRYLDIIHQKARTIKDSATQSARRRLRCNPNPTVKAHDKDLRRIETADRQLRVDVTEFGHALKTFGAATDAEATPPPLPTAPKAGSAPYPQATSAGSPSIRQTHGPAEHPPSHKQKIKKQRRHGSHALQRRRQKWRRSRFRSRTDVQDRYVPDTVFLEKASPVDVVELSGLKPSTPRPSKPKEQPPRIDQVPAPAAKKKKKKLLGEPKGIAGPKALKRAFQSVFATVTLTTGSLQGCLGRSTNLSKAEVAQLTQHVSSAVSTVNSAKHIVYKLIEMRILQPLIETGLNQAEDGPDESFLEKILDSDWAERFVQNLLSFVLRNSIVPQGRPPASDKSKDAVAEAISTFNEFKKTLCPGFKALNSTDLALSNIIAELAPKICLDQKLHYRRIPETLRTKLSKLSIDCDGLPEIDQDGTDAGGDAGAADVNEGVDDDDALKRSKKIIFKPGHIQLCWRYFLLLPSSKRPRFCTQAKMSDSFIDINEEALVALLWGEKAVQLDNVWEDTRYTHNWAAAKQRSSYGEVIKELFIGDRDVIKEARNKQQTTYGKRTTTMAEQRHNASLTAPTPPLPSSTPSSSTTSTPPPLPTPRQQPRSYRYALNNYIRTDGHQLQILAYDLTKPRQSPNYSEFLSRIEKLYPTRQHLIDAFGDDLDSVIVVGIDPGEVVSGAFCLTLPGGKVINLLIKRASLYQPTLAFRDWEQHWKRRHPTAGPGDVVDSSLWTRITDLDKLTTLPSVHDLENSLPSTNYDTSLDALTAAHKKYYEQEPLIHGIYASREWKVAVHEHRMAKMSELDLAVAGVLRMVDEACEGVPSAALGYKAALVDEYLTSTMCPTCVVENRATRLAKPSMRTCACVECTRWIHRDGVGAHNIALIGEQYLKSLGRPEPLARPPKQT

SEQ ID NO: 1465 - protein, 1416 aa, Linnemannia hyalina
MDSSLEFLGSFDVSDSQGTVVASAEEVDEAQEEEELLFSVRCRTRPTPGTDSSGDEEEEKAGDEGVIDASAPPTKKIFSDPVLTDLADNTNAYAASKGAGTGEGSRQWVKTTPDELRTFLGIIVYMGVFRQNSVSEYWSTFPECPQHNITTFMSLVRFEQLKRFFHVSNPNEPEQHWFSKVEPQASSGPERAADVDGAGMSTHTTTSTRQASSSPKRAADVDDADTADTASSNKRLRPLQISSGSSTLVEDMQRLLATQPSQIRFDESGALTTICAQEKVIDFRSVGAAIEKILSSRLSKDITMLHMDGLRSMEKEWAHGKRDQALSKQLETLERDYTEGKLHNKRQLYKRLKASYRAPPEALRAVSEVLRQSGWTICQCLNQSDTCIARTVNNAAVPGDIRVITKDSDLMAFESIMSVTMPVKNTWTTFHKDELLNEHGLPTPVHLTLAALVSNNDYTNGVFSYGLTSNVDTIRQFKMTGLDGTVGQDRVEVVRIYVRRYLDIIHQKARTIKDSATQSARRRLRCNPNPTVKAHDKDLRRIETADRQLRVDVTEFGHALKTFGAATDAEATPPPLPTAPKAGSAPYPQATSAGSPSIRQTHGPAEHPPSHKQKIKKQRRHGSRALQRRRQKWRRSRFRSRTDVQDRYVPNTVFLEKASPVDVVELSGLKPSTPRPSKPKEQSPRINQVPAPAAKKKKKKLLGEPKGIAGPKALKRAFQSVFATVTLTTGSLQGCLGRSTNLSKAEVAQLTQHVSSAVSTVNSAKHIVYKLIEMRILQPLIETGLNQAEDGPDESFLEKILDSDWAERFVQNLLSFVLRNSIVPQGRPPASDKSKDAVAEAISTFNEFKKTLCPGFKALNSTDLALSNIIAELAPKICLDQKLHYRRIPETLRTKLSKLSIDCDGLPEIDQDDTDAGGDAGAADVNEGVDDDDALKRSKKIIFKPGHIQLCWRYFLLLSSSKRPRFCTQAKMSDSFIDINEEALVALLWGEKAAQLDNVWEDTRYTHNWAAAKQRSSYGEVIKELFIGDRDVIKEARNKQQTTYGKRTTTMAEREEAHPHIYGQLELARYLTNKVNFFRERHNASLTAPTPPLPSSTSSSSTTSTPPPLPTPRQQPRSYRYALNNYIRTDGHQLQILAYDLTKPRQSPNYSEFLSRIEKLYPTRQHLIDAFGDDLDSVIVVGIDPGEVVSGAFCLTLPGGKVINLLIKRASLYQPTLAFRDWEQHWKRRHPTAGPGDVVDSSLWTRITDLDKLTTLPEFSPSTNYDTSLDALTAAHKKYYEQEPLIHGIYASREWKVAVHEHRMAKMSELDLAVAGVLRMVDEACEGVPSAALGYKAALVDEYLTSTMCPTCVVENRATRLAKPSMRTCACVECTRWIHRDGVGAHNIALIGEQYLKSLGRPEPLARPPNKPNLYR

SEQ ID NO: 1466 - protein, 1418 aa, Linnemannia hyalina
MDSSLEFLGSFDVSDSQGTVVASAEEVDEAQEEEELLFSVRCRTRPTPGTDSSGDEEEEKAGDEGVIDASAPPTKKIFSDPVLTDLADNTNAYAASKGAGTGEGSRQWVKTTPDELRTFLGIIVYMGVFRQNSVSEYWSTFPECPQHNITTFMSLVRFEQLKRFFHVSNPNEPEQHWFSKVEPQASSGPERAADVDGAGMSTHTTTSTRQASSSPKRAADVDDADTADTASSNKRLRPLQISSGSSTLVEDMQRLLATQPSQIRFDESGVLTTICAQEKVIDFRSVGAAIEKILSSRLSKDITMLHMDGLRSMEKEWAHGKRDQALSKQLETLERDYTEGKLHNKRQLYKRLKASYRAPPEALRAVSEVLRQSGWTICQCLNQSDTCIARTVNNAAVPGDIRVITKDSDLMAFESIMSVTMPVKNTWTTFHKDELLNEHGLPTPVHLTLAALVSNNDYTNGVFSYGLTSNVDTIRQFKMTGLDGTVGQDRVEVVRIYVRRYLDIIHQKARTIKDSATQSARRRLRCNPNPTVKAHDKDLRRIETADRQLRVDVTEFGHALKTFGAATDAEATPPPLPTAPKAGSAPYPQATSAGSPSIRQTHGPAEHPPSHKQKIKKQRRHGSRALQRRRQKWRRSRFRSRTDVQDRYVPDTVFLEKASPVDVVELSGLKPSTPRPSKPKEQSPRIDQVPAPAAKKKKKKLLGEPKGIAGPKALKRAFQSVFATVTLTTGSLQGCLGRSTNLSKAEVAQLTQHVSSAVSTVNSAKHIVYKLIEMRILQPLIETGLNQAEDGPDESFLEKILDSDWAERFVQNLLSFVLRNSIVPQGRPPASDKSKDAVAEAISTFNEFKKTLCPGFKALNSTDLALSNIIAELAPKICLDQKLHYRRIPETLRTKLSKLSIDCDGLPEIDQDGTDAGGDAGAADVNEGVDDDDALKRSKKIIFKPGHIQLCWRYFLLLPSSKRPRFCTQAKMSDSFIDINEEALVALLWGEKAVQLDNVWEDTRYTHNWAAAKQRSSYGEVIKELFIGDRDVIKEARNKQQTTYGKRTTTMAEREEAHPHIYGQLELARYLTNKVNFFRERHNASLTAPTPPLPSSTPSSSTTSTPPPLPTPRQQPRSYRYALNNYIRTDGHQLQILAYDLTKPRQSPNYSEFLSRIEKLYPTRQHLIDAFGDDLDSVIVVGIDPGEVVSGAFCLTLPGGKVINLLIKRASLYQPTLAFRDWEQHWKRRHPTAGPGDVVDSSLWTRITDLDKLTTLPSVHDLENSLPSTNYDTSLDALTAAHKKYYEQEPLIHGIYASREWKVAVHEHRMAKMSELDLAVAGVLRMVDEACEGVPSAALGYKAALVDEYLTSTMCPTCVVENRATRLAKPSMRTCACVECTRWIHRDGVGAHNIALIGEQYLKSLGRPEPLARPPKQT

SEQ ID NO: 1467 - protein, 1479 aa, Linnemannia hyalina
MDSSLEFLGSFDVSDSQGTIVASAEEVDEAQEEELLFSVRCRTRPTPGTDSSGDEEEEEKKAGDEGVIGAPTPPTKKKAAKKAAKKPVRETRELPPVLDFDNIFRHYKDGHPAQSNLPRALRLDSELSPLTIFTLFFSDPVLTDLADNTNAYAASKGAGTGEGSRQWVKTTPDELRTFLGIIVYMGVFRQNSVSEYWSTFPECPQHNITTFMSLVRFEQLKRFFHVSNPNEPEQHWFSKVEPQASSGPERAADVDGAGMSTHTTTSTRQASSSPKRAADVDDVDTADTASSNKRLRPLQISSGSSTLVEDMQRLLATQPSQIRFDESGALTTICAQEKVIDFRSVGAAIEKILSSRLSKDITMLHMDGLRSMEKEWAHGKRDQALSKQLETLERDYTEGKLHNKRQLYKRLKASYRAPPEALRAVSEVLRQSGWTICQCLNQSDTCIARTVNNAAVPGDIRVITKDSDLMAFESIMSVTMPVKNTWTTFHKDELLNEHGLPTPVHLTLAALVSNNDYTNGVFSYGLTSNVDTIRQFKMTGLDGTVGQDRVEVVRIYVRRYLDIIHQKARTIKDSATQSARRRLRCNPNPTVKAHDKDLRRIETADRQLRVDVTEFGHALKTFGAATDAEATPPPLPTAPKAGSAPYPQATSAGSPSIRQTHGPAEHPPSHKQKIKKQRRHGSRALQRRRQKWRRSRFRSRTDVQDRYVPDTVFLEKASPVDVVELSGLKPSIPRPSKPKEQSPRIDQVPAPAAKKKKKKLLGEPKGIAGPKALKRAFQSVFATVTLTTGSLQGCLGRSTNLSKAEVAQLTQHVSSAVSTVNSAKHIVYKLIEMRILQPLIETGLNQAEDGPDESFLEKILDSDWAERFVQNLLSFVLRNSIVPQGRPPASDKSKDAVAEAISTFNEFKKTLCPGFKALNSTDLALSNIIAELAPKICLDQKLHYRRIPETLRTKLSIDCDGLPEIDQDDTDAGGDAGAADVNEGVDDDDALKRSKKIIFKPGHIQLCWRYFLLLPSSKRPRFCTQAKMSDSFIDINEEALVALLWGEKAVQLDNVWEDTRYTHNWAAAKQRSSYGEVIKELFIGDRDVIKEARNKQQTTYGKRTTTMAEREEAHPHIYGQLELARYLTNKVNFFRERHNASLTAPTPPLPSSTPSSSTTSTPPPLPTPRQQPRSYRYALNNYIRTDGHQLQILAYDLTKPRQSPNYSEFLSRIEKLYPTRQHLIDAFGDDLDSVIVVGIDPGEVVSGAFCLTLPGGKVINLLIKRASLYQPTLAFRDWEQHWKRRHPTAGPGDVVDSSLWTRITDLDKLTTLPSVHDLENSLPSTNYDTSLDALTAAHKKYYEQEPLIHGIYASREWKVAAHEHRMAKMSELDLAVAGVLRMVDEACEGVPVHQRKSAALGYKAALVDEYLTSTMCPTCVVENRATRLAKPSMRTCACVECTRWIHRDGVGAHNIALIGEQYLKSLGRPEPLARPPKQT

SEQ ID NO: 1468 - protein, 1511 aa, Linnemannia hyalina
MDSSLEFLGSFDVSDSQGTVVASAEEVDEAQEEEELLFSVRCRTRPTPGTDSSGDEEEEKAGDEGVIDASAPPTKKIFSDPVLTDLADNTNAYAASKGAGTGEGSRQWVKTTPDELRTFLGIIVYMGVFRQNSVSEYWSTFPECPQHNITTFMSLVRFEQLKRFFHVSNPNEPEQHWFSKVEPQASSGPERAADVDGAGMSTHTTTSTRQASSSPKRAADVDDADTADTASSNKRLRPLQISSGSSTLVEDMQRLLATQPSQIRFDESGALTTICAQEKVIDFRSVGAAIEKILSSRLSKDITMLHMDGLRSMEKEWAHGKRDQALSKQLETLERDYTEGKLHNKRQLYKRLKASYRAPPEALRAVSEVLRQSGWTICQCLNQSDTCIARTVNNAAVPGDIRVITKDSDLMAFESIMSVTMPVKNTWTTFHKDELLNEHGLPTPVHLTLAALVSNNDYTNGVFSYGLTSNVDTIRQFKMTGLDGTVGQDRVEVVRIYVRRYLDIIHQKARTIKDSATQSARRRLRCNPNPTVKAHDKDLRRIETADRQLRVDVTEFGHALKTFVLCEETTLDNNRISPAADTHTRLMAIIKETEFNKAYNDWRRFSASRTGSLPPGLLVDPASQGAATDAEATPPPLPTAPKAGSAPYPQATSAGSPSIRQTHGPAEHPPSHKQKIKKQRRHGSRALQRRRQKWRRSRFRSRTDVQDRYVPNTVFLEKASPVDVVELSGLKPSTPRPSKPKEQSPRINQVPAPAAKKKKKKLLGEPKGIAGPKALKRAFQSVFATVTLTTGSLQGCLGRSTNLSKAEVAQLTQHVSSAVSTVNSAKHIVYKLIEMRILQPLIETGLNQAEDGPDESFLEKILDSDWAERFVQNLLSFVLRNSIVPQGRPPASDKSKDAVAEAISTFNEFKKTLCPGFKALNSTDLALSNIIAELAPKICLDQKLHYRRIPETLRTKLSIDCDGLPEIDQDDTDAGGDAGAADVNEGVDDDDALKRSKKIIFKPGHIQLCWRYFLLLSSSKRPRFCTQAKMSDSFIDINEEALVALLWGEKAAQLDNVWEDTRYTHNWAAAKQRSSYGEVIKELFIGDRDVIKEARNKQQTTYGKRTTTMAEREEAHPHIYGQLELARYLTNKVNFFRERHNASFTAPTPPLPSSTSSSSTTSTPPPLPTPRQQPRSYRYALNNYIRTDGHQLQILAYDLTKPRQSPNYSEFLSRIEKLYPTRQHLIDAFGDDLDSVIVVGIDPGEVVSGAFCLTLPGGKVINLLIKRASLYQPTLAFRDWEQHWKRRHPTAGPGDVVDSSLWTRITDLDKLTTLPSVHDLENSLPSTNYDTSLDALTAAHKKYYEQEPLIHGIYASREWKVAVHEHRMAKMSELDLAVAGVLRMVDEACEGVPVHQRKVFFALGNGTFRSGFNLSSVHITFLRRLLQQSAALGYKAALVDEYLTSTMCPTCVVENRATRLAKPSMRTCACVECTRWIHRDGVGAHNIALIGEQYLKSLGRPEPLARPPKQT

SEQ ID NO: 1469 - protein, 1530 aa, Linnemannia hyalina
MDSSLEFLGSFDVSDSQGTVVASAEEVDEAQEEEELLFSVRCRTRPTPGTDSSGDEEEEKAGDEGVIDASAPPTKKMKAAKKAAKKPVRETRELPPVPDFDNIFRHYKDGHPAQSNLPRALRLDSELSPLTIFTLFFSDPVLTDLADNTNAYAASKGAGTGEGSCQWVKTTPYELRTFLGIIVYMGVFRQNSVSEYWSTFPECPQHNITTFMSLVRFEQLKRFFHVSNPNEPEQHWFSKVEPQTSSGPERAADVDGAGMSTHTTTSTRQASSSPKRAADVDDADTADTASSNKRLRPLQISSGSSTLVEDMQRLLSTQPSQIRFDESGALTTICAQEKVIDFRSVGAAIEKILSSRLSKDITMLHMDGLRSMEKEWAHGKRDQALSKQLETLERDYTEGKLHNKRQLYKRLKASYRAPPEALRAVSEVLRQSGWTICQCLNQSDTCIARTVNNAAVPGDIRVITKDSDLMAFESIMSVTMPVKNTWTTFHKDELLNEHGLPTPNNDYTNGVFSYGLTSNVDTIRQFKMTGLDGTVGQDRVEVVRIYVRRYLDIIHQKARTIKDSATQSARRRLRCNPNPTVKAHDKDLRRIETADRQLRVDVTEFGHALKTFVLCEETTLDNNRISPAADTHTRLMAIIKETEFNKAYNDWRRFSASRRGSLPPGLLVDPASQGAATDAEATPPPLPTAPKAGSAPYPQATSAGSPSIRQTHGPAEHPPSHKQKIKKQRRHGSRALQRRRQKWRRSRFRSRTDVQDRYVPDTVFLEKASPVDVVELSGLKPSTPRPSKPKEQSPRIDQVPAPAAKKKKKKLLGEPKGIAGPKALKRAFQSVFATVTLTTGSLQGCLGRSTNLSKAEVAQLTQHVSSAVSTVNSAKHIVYKLIEMRILQPLIETGLNQAEDGPDESFLEKILDSDWAERFVQNLLSFVLRNSIVPQGRPPASDKSKDAVAEAISTFNEFKKTLCPGFKALNSTDLALSNIIAELAPKICLDQKLHYRRIPETLRTKLSIDCDGLPEIDQDDTDADGDAGAADVNEGVDDDDALKRSKKIIFKPGHIQLCWRYFLLLPSSKRPRFCTQAKMSDSFIDINEEALVALLWGEKAVQLDNVWEDTRYTHNWAAAKQRSSYGEVIKELFIGDRDVIKEARNKQQTTYGKRTTTMAEREEAHPHIYGQLELARYLTNKVNFFRERHNASLTAPTPPLPSSTSSSSTTSTPPPLPTPRQQPRSYRYALNNYIRTDGHQLQILAYDLTKPRQSPKYSEFLSRIEKLYPTRQHLIDAFGDDLDSVIVVGIDPGEVVSGAFCLTLPGGKVINLLIKRASLYQPTLAFRDWEQHWKRRHPTAGPGDVVDSSLWTRITDLDKLTTLPSVHDLENSLPSTNYDTSLDALTAAHKKYYEQEPLIHGIYASREWKVAVHEHRMAKMSELDLAVAGVLRMVDEACEGVPVHQRKSAALGYKAALVDEYLTSTMCPTCVVENRATRLAKPSMRTCACVECTRWIHRDGVGAHNIALIGEQYLKSLGRPEPLARPPKPT

SEQ ID NO: 1470 - protein, 1543 aa, Linnemannia hyalina
MDSSLEFLGSFDVSDSQGTVVASAEEVDEAQEEEELFSVRCRTRPTPGTDSSGDEEEEEKAGDEGVIDATAPPTKKMKAAKKAAKKPVRETRELPPVLDFDNIFRHYKDGHPAQSNLPRALRLDSELSPLTIFTLFFSDPVLTDLADNTNAYAASKGAGTGEGSRQWVKTTPDELRTFLGIIVYMGVFRQNSVSEYWSTFPECPQHNITTFMSLVRFEQLKRFFHVSNPNEPEQHWFSKVEPQTSSGPERAADVDGAGMSTHTTTSTRQASSSPKRAADVDDADTADTASSNKRLRPLQISSGSSTLVEDMQRLLATQPSQIRFDESGALTTICAQEKVIDFRSVGAAIEKILSSRLSKDITMLHMDGLRSMEKEWAHGKRDQALSKQLETLERDYTEGKLHNKRQLYKRLKASYRAPPEALRAVSEVLRQSGWTICQCLNQSDTCIARTVNNAAVPGDIRVITKDSDLMAFESIMSVTMPVKNTWTTFHKDELLNEHGLPTPVHLTLAALVSNNDYTNGVFSYGLTSNVDTIRQFKMTGLDGTVGQDRVEVVRIYVRRYLDIIHQKARTIKDSATQSARRRLRCNPNPTVKAHDKDLRRIETADRQLRVDVTEFGHALKTFVLCEETTLDNNRISPAADTHTRLMAIIKETEFNKAYNDWRRFSASRTGSLPPGLLVDPASQGAATDAEATPPPLPTAPKAGSAPYPQATSAGSPSIRQTHGPAEHPPSHKQKIKKQRRHGSRALQRRRQKWRRSRFRSRTDVQDRYVPDTVFLEKASPVDVVELSGLKPSTPRPSKPKEQSPRIDQVPAPAAKKKKKKLLGEPKGIAGPKALKRAFQSVFATVTLTTGSLQGCLGRSTNLSKAEVAQLTQHVSSAVSTVNSAKHIVYKLIEMRILQPLIETGLNQAEDGPDESFLEKILDSDWAERFVQNLLSFVLRNSIVPQGRPPASDKSKDAVAEAISTFNEFKKTLCPGFKALNSTDLALSNIIAELAPKICLDQKLHYRRIPETLRTKLSIDCDGLPEIDQDGTDAGGDAGAADVNEGVDDDDALKRSKKIIFKPGHIQLCWRYFLLLPSSKRPRFCTQAKMSDSFIDINEEALVALLWGEKAVQLDNVWEDTRYTHNWAAAKQRSSYGDVIKELFIGDRDVIKEARNKQQTTYGKRTTTMAEREEAHPHIYGQLELARYLTNKVNFFRERHNASLTAPTPPLPSSTSSSSTTSTPPPLPTPRQQPRSYRYALNNYIRTDGHQLQILAYDLTKPRQSPNYSEFLSRIEKRYPTRQHLIDAFGDDLDSVIVVGIDPGEVVSGAFCLTLPGGKVINLLIKRASLYQPTLAFRDWEQHWKRRHPTAGPGDVVDSSLWTRITDLDKLTTLPSVHDLENSLPSTNYDTSLDALTAAHKKYYEQEPLIHGIYASREWKVAVHEHRMAKMSELDLAVAGVLRMVDEACEGVPVHQRKSAALGYKAALVDEYLTSTMCPTCVVENRATRLAKPSMRTCACVECTRWIHRDGVGAHNIALIGEQYLKSLGRPEPLARPPKQTKPL

SEQ ID NO: 1471 - protein, 2191 aa, Linnemannia hyalina
MVIRHLAVESDRRSLASLLRVNKYVCSATQPVMYADPFYLRPFSAFSMETPFSLIRLLSLIKLLLLSLPEGQVVTDLLRIAYLSTASASADDKTTEHQEQEAPPLISATFEVHSFSAGIFFTPPFPSYSAILDYLENNGLAERYTARDVTSRLKHYEQPRIIRQGVKRDLRRDLTWALSIVGRLQVLSNVTLLLDSDLEPFLLFGQQFEEGDQEVLELQQREREEHMEEMILFVQEHRQRFPNTLNQGQCVTDTFTKEEWPKEVHDRLLQSLPPLYKPRFIDNTNWVQFFARVEDVDLSAVKFIRTQLIKPEEPVFDQVIEQVGPFLHRCRALEDVQISSSGEEAFRWAVDERKQFERDIEDGRTTPRRPLVPLHQLHVSFDDHPSSGGLFDDIVFAFQETLEKIFIGICVSVEQNSTQSLEFSIGDNNNNNNNNNNNYYQSYWELPQLSRLAVATGHIFLHVHPKFLQRCTQVMHISLADMRREYSLDQVNHWEPAKMPRLESLTLQGTAAISFHPDTPKYALELQKLHLQMVQNEDGMTCFIPPAEELDAIIEGESTIDRGGSDNVDDGMTPSLLAPLARRPVWTWDWELPKLTDMTLTGEHAYRFQFRMLDGTPNLINFSLDIVSTTALHQRTIHLKDLIKPGSQQQQQQQQKQQQQQQQKQQQQQHQQTQDGEEIYEEQQDLEYILVSTLKRLSLYGSWQMTTHILQTLFSRVAPEISNLTMSSCLGHDFSEWVDATKQYLHGLVAAELNMDVSEEEEMADAGLVEAMMEEGILEFLGSFDVSDSQGTVVASAEEVDEAQEEEELLFSVRCRTRPTPGTDSSGDEEEEKAGDEGVIDASAPPTKKIFSDPVLTDLADNTNAYAASKGAGTGEGSRQWVKTTPDELRTFLGIIVYMGVFRQNSVSEYWSTFPECPQHNITTFMSLVRFEQLKRFFHVSNPNEPEQHWFSKVEPQASSGPERAADVDGAGMSTHTTTSTRQASSSPKRAADVDDADTADTASSNKRLRPLQISSGSSTLVEDMQRLLATQSSQIRFDESGALTTICAQEKVIDFRSVGAAIEKILSSRLSKDITMLHMDGLRSMEKEWAHGKRDQALSKQLETLERDYTEGKLHNKRQLYKRLKASYRAPPEALRAVSEVLRQSGWTICQCLNQSDTCIARTVNNAAVPGDIRVITKDSDLMAFESIMSVTMPVKNTWTTFHKDELLNEHGLPTPVHLTLAALVSNNDYTNGVFSYGLTSNVDTVRQFKMTGLDGTVGQDRVEVVRIYVRRYLDIIHQKARTIKDSATQSARRRLRCNPNPTVKAHDKDLRRIETADRQLRVDVTEFGHALKTFGAATDAEATPPPLPTAPKAGSAPYPQATSAGSPSIRQTHGPAEHPPSHKQKIKKQRRHGSRALQRRRQKWRRSRFRSRTDVQDRYVPDTVFLEKASPVDVVELSGLKPSTPRPSKPKEQSPRIDQVPAPAAKKKKKKLLGEPKGIAGPKALKRAFQSVFATVTLTTGSLQGCLGRSTNLSKAEVAQLTQHVSSAVSTVNSAKHIVYKLIEMRILQPLIETGLNQAEDGPDESFLEKILDSDWAERFVQNLLSFVLRNSIVPQGRPPASDKSKDAVAEAISTFNEFKKTLCPGFKALNSTDLALSNIIAELAPKICLDQKLHYRRIPETLRTKLSKLSIDCDGLPEIDQDGTDAGGDAGAADVNEGVDDDDALKRSKKIIFKPGHIQLCWRYFLLLPSSKRPRFCTQAKMSDSFIDINEEALVALLWGEKAVQLDNVWEDTRYTHNWAAAKQRSSYGEVIKELFIGDRDVIKEARNKQQTTYGKRTTTMAEREEAHPHIYGQLELARYLTNKVNFFRERHNASLTAPTPPLPSSTPSSSTTSTPPPLPTPRQQPRSYRYALNNYIRTDGHQLQILAYDLTKPRQSPNYSEFLSRIEKLYPTRQHLIDAFGDDLDSVIVVGIDPGEVVSGAFCLTLPGGKVINLLIKRASLYQPTLAFRDWEQHWKRRHPTAGPGDVVDSSLWTRITDLDKLTTLPSVHDLENSLPSTNYDTSLDALTAAHKKYYEQEPLIHGIYASREWKVAVHEHRMAKMSELDLAVAGVLRMVDEACEGVPSAALGYKAALVDEYLTSTMCPTCVVENRATRLAKPSMRTCACVECTRWIHRDGVGAHNIALIGEQYLKSLGRPEPLARPPKQT

SEQ ID NO: 1472 - protein, 794 aa, Streptomyces sp.; identical to SEQ ID NO: 1462

SEQ ID NO: 1473 - protein, 524 aa, Scutellospora calospora
FWSQKAKEISEKLWLPDKHDLKKSNLNSHSWFNIKKLEQVFLKNVEVPIISRQQQNIIDSEDDRLKCRKIRIYPNKKEKQTLKKWIGDARWTYNQCLDSLNDIRDMKTKKEKIQYMRQKHIVLETPKAIRDAAMMDLFKNIKSNHILKRARFILKKRRKKDVNQSITIQVENIRCKTGMYSFVKKIKTKEKIPEIKHALNIVMNRLKHFYICISIDIEKHEIVNEDIISLDPGVRTFMTGYDPKGNILEFGNKDIDKIQEKCQRYDKLQSCMNQELDKRLSSQDCEIYLSELPDCVSMLTWSHYKFKMFLRHKVREYPDMNMIEYTEEYTSKTCTRCGIINEKLGGSKNFNCGSCGLKIDRDHNAERITLFLDNITKIIKNKSDKENKDMNDDDYLSEGEKRVFLKIVEKRDKETIKKIIEDHVEKGSIVHTDCWGGYLGIEDLGVAHETVNHSKNFTDPETGVNTNMIEGLWNGIKLQIAPRNRNKNLINDHLLEYIWRRINKDKLWEAFIYALRSTAYYDNK

SEQ ID NO: 1474 - protein, 540 aa, Scutellospora calospora
MNLYKLLISLLVLQIIFVVLFSNICLADSDEKNDGNKKENKNLSPNFDITKAKEISERLWLPEKHDLKISNFISHSWFNIKRSEQVSIKNVEIPIIPRYQEHIDSENDELKTKKIRIYPTKEEKQKLKSWIGTARWTYNQCLDSLDEIRNLKTKKEKIQYMRQKHIVASNYKNTELSWVIDTPSSVRDAAMMDLFKNIKSNHARKIARFTLKKQKKKDKNQSITIEHLWFNKSKIFSFLRNIKTKEKIPEIKHAVNIIMNRLKYFYICIPIPTNINKHESINEDVLTLDPGVRTFMTGYDTKGNISEFGNKDIDKIQIRCLRYDKLQSCLNQESDKGLSLQDSEISMSELSDCVTARNMLTWSHYKFKMFLRHKIREYLDMNLIECTEEYTSKTCTRCGMINKLGGSKNFTCGSCGLKIDRDHNEKRDSETIRKIIEDHVEKGSIVHTDRWKGYLGIENLGVTHKSVNYSKNFTDPITGVHTNMIEGLWNGIKLQIALRNRNKNLIKDHLLEFIWRRINKDKLWDAFIYALQSTAYYENK

SEQ ID NO: 1475 - protein, 721 aa, Blautia wexlerae
MARPRAKKKKVSSGTHTRSVFLYGSPNAEKRSTLEKLQADYTDAVNFYISLLSDREECLLQLLQNDKKDPLLRKLEKESRIEGLSSAYSQNAFDEAVTKLHNRLDNIRKDVIAATGGSVFAVSILLFHAVLSGQSREEMCGMLARIRDSYKAKEKIQYYDKLHDTVKTMEEKEFLDSVSEVAMFYHIISDEYRIPVVKKAHVLSVTIPDRKRERMQVPVQADRDALRRMEQYGVSGSMRYTITDGGSLKLTCSFEKKTRTPEEHSAVIGVDVGITDAFHTSEGQAIESFQPVIEFYQTEVEPAFGKLSTLRNRKQQLRRFLKKHKGVLPEKVILNLRKRIDHLEKDIRQAHAPYRRKRHYYQLVEYTVRNAVNTYIESLNGDKTVLTAMELLDIKEFNKSRRVNGMLSDFSRGKLAEKLMEELSWHGFPFVQVEPAYTSQICPVCGCLDKASRIIHKVFINGLVKNAIAELTEHTAELRKESGLKELFLCRIKSQNNKIAPYTETHWNDKKLRYFIERHDIRDNKGDLYPLTSHQFRSTFVRELIKRKVPIAMIMKQYSHVSIEMTAHYLTLQEEEVKEIYSDMILSPESKIAGLRAKEIKGKLDDLFHGKTEDEIDDVISGLAKTMSFNPLPTGVCLYDFRRGNCTDGDGCFFYNCPNYITEVQFYPILKDELDLLEKEMVRLKELGQEPAYQVQAVKYKYLKPLVESLEVQLNGKESVG

SEQ ID NO: 1476 - protein, 721 aa, Blautia wexlerae; identical to SEQ ID NO: 1475

SEQ ID NO: 1477 - protein, 721 aa, Blautia wexlerae; identical to SEQ ID NO: 1475

SEQ ID NO: 1478 - protein, 721 aa, Blautia wexlerae; identical to SEQ ID NO: 1475

SEQ ID NO: 1479 - protein, 721 aa, Blautia wexlerae; identical to SEQ ID NO: 1475

SEQ ID NO: 1480 - protein, 721 aa, Blautia wexlerae; identical to SEQ ID NO: 1475

SEQ ID NO: 1481 - protein, 721 aa, Blautia wexlerae; identical to SEQ ID NO: 1475

SEQ ID NO: 1482 - protein, 721 aa, Blautia wexlerae; identical to SEQ ID NO: 1475

SEQ ID NO: 1483 - protein, 721 aa, Blautia wexlerae; identical to SEQ ID NO: 1475

SEQ ID NO: 1484 - protein, 409 aa, Thermoplasmata archaeon
MKLSDRARKNGIDYRTAYRLYRSGRFPGPTGQLATGTKLVHEPEPGHAPAERVVLYARVSSADRKSGTGRQMKRLEDYAAARGSHAGAEISEIGSGLNRLKKGSLSWMYEISKCAPQEALRDLDSAFTRFFDGNADFPKFKSKKHGCGSFRLTGAMKAQGYSIQLPCIGTMSLKENGCLPADGHIPSTTVSERGGRWFVSLAVIEEHTVPENSGSICGVDLGVKNLATVSDGTVFENPRSLSTYIRKLKGQQREVSRKVKRSNSRRKAVHRLNRTHLKISYMRMDAIHKATTWLAKNKSAIVIEDLNAGGMMCNHRLAAAISDASFGEFRRQLEYKAGWYGSRIVVADRFYPSSRTCSACGHVKQELKLSERVFECEMCNSMIDRDLNAAINLSGLAASSAESLNACLR

SEQ ID NO: 1485 - protein, 427 aa, Diversispora epigaea
MLDPLKSNFNKHGSVSSSHFLTKTTFLTFLTKPPFYNLAQLNTTYQSAHKIQETYDVSVETLRRWADSGRIAIVRTPGGKRLYSITNIQEIFRDNQQTQITQKAKICYAKVSSEHQRDDLERQIANLRQYYPEYEIISDIGSGLNWKRRGTDCADLDPSLWNGSLRKMGLSSWYSVRISVLKVVKPENLRKTYSQSSRYLWQDIMECVPPPIVEEDEKLPKPKKNKSSKIPAGKTQRIRLFPTQEEKSKLKRWMGTARWTYNRCLVAVEKEGIERTKKALRAQCLNAANFNNTELQWVLETPYDIRNEAINDLLKSYSSNFAAKRKKFKMKFRFKKDQQQSIAILSKHWDKSKGVYTFLCKIKSAENLPAELHYDSRLVMNQLGEFYLCIPQPLEIWAENQGPIQSDAVIALDPGVRTFITIQVDKL

SEQ ID NO: 1486 - protein, 433 aa, Selenomonas sp.
MNTSNITNYKPKEFAELLNVTVKTLQRWDREKTLVANRTPTNRRYYTYDQYLQFKGIGKDADFRKIVIYTRVSTRNQTDDLENQVDFLQTYVNAKGLIADEIIRDYGSGLNYNRKKWNQLLGEVMENKVKMILVSHKDRFVRFGFDWFEKFCNKFNVEIVVVKNEKLSPQKELVQDIVSILHVFSCRLYGLRKYKKQIEGMRILLKAFRTEIAPTNEQKMKIIRSIGVARFLYNQYIAYNRHLYKMYQRGILDEKQKHFVTANDFDKYVNHKLKKELPWIDQCGSKARKKALVNAEQAFRRFFSGTSGFPNFKKKVNQDVKLYFPKNNKGDWTIWRHKLMIPTLKQVRLKEFGYLPVGAKVTNGTVSYMAGRFYVSVVVDIDEKSKYNKDLEASYHTVTEGVGIDLGVKDLAIVSDGKVFKNINKSSKVKRLE

SEQ ID NO: 1487 - protein, 434 aa, Ktedonobacter racemifer
MYSAAQFAKQVGVSVKTLQRWDREGRLKAKRTLSGRRYYDEADLATALNLPKPPAIRRTVAYCRVSSPAQRPDLQNQRAALERYAVSKQLVVDEWIVEIGGGLNFERKRFLRLVDAIVEGEVSCLLIAHQDRLARFGFALIKHLCETHHTELVVMNTQTLSPEQELVVQDLMSIIHGFSSRLYGLRNYRKALEKALKDENRAQDQDDPTPEQVEYLKRACGTRRFIYNWGREQWEKQYQAYKLEQETVFEEQRVLTPPNTFALKKQFHQIREQDYPWTYQVTKCVVEGAFADLKSAYDNFFAGRSNYPQYKKKGKSHESFYLSNDKFTVGTHWISIPGLGRFILDQRQTKKDRGKLLRRLGAVNVAEKLRFVEKGKATTPAKKRNKRKQVVCERVKILGATVSCEAGHWYVSIQVEIKKQRPLTPTAVVGWMSD

SEQ ID NO: 1488 - protein, 435 aa, Candidatus Thermoplasmatota
MKLSDRARKNGIDYRTAYRLYRSGRFPGPTGQLATGTKLVHEPEPGHAPAERVVLYARVSSADRKSGTGRQMKRLEDYAAARGSHAGAEISEIGSGLNRLKKGSLSWMYEISKCAPQEALRNLDSAFTRFFDGNADFPKFKSKKHGCGSFRLTGAMKAQGYSIQLPCIGTMSLKENGCLPADGHIPSTTVSERGGRWFVSLAVIEEHTVPENSGSICGVDLGVKNLATVSDGTVFENPRSLSTYIRKLKRQQREVSRKVKRSNSRRKAVHRLNRTHLKISDMRMDAIHKATTWLAKNKSAIVIEDLNAGGMMCNHRLAAAISDASFGEFRRQLEYKAGWYGSCIVLADRFYPSGRTCSVCGHVRQELKLSERIFECEMCNSMIDSDLNAAINLSGLAASSAESLNACLRLEVAELLAQCPPVIQEMNTISLGMSG

SEQ ID NO: 1489 - protein, 442 aa, Mycobacterium tuberculosis; identical to SEQ ID NO: 133

SEQ ID NO: 1490 - protein, 453 aa, Mycobacterium tuberculosis
MNLAAWAERNGVARVTAYRWFHAGLLPVPARKVGRLILVDELASEAGAQPKTAVYARVSSADQKSDLDRQVARVTSWATAEQIPVDKVVTEVGSVLNGHRRKFPAVLRDLSVTRIVVEHRDRFCRFGSEYVHAALAAQGRELVVVDSAEVDDDLVWDMTEILTSMCARLYGKRAAQNRAKRAVAAXXXXXXXXXXLPLSMIMRRPEMPRLEIPNGWCVQAFRFTLDPTAEQAHALARHFGARRKAYNWTVAQLKADIQAWRATGAQTAKPSLRVLRKRWNTVKDEVCVNAETGTVWWPECSKEAYADGIAGAVDAYWNWQQRRAGKRDGKRMGFPRFKKKGRDADRVSFTTGAMRVEPDRRHLTLPVIGCVRTHENTRRIERLIAKDRARVLAITVRRNGTRLDASVRVLVQRPQQPNVELPESRIGVDVGVRRLATVATADGACCPVLVPDG

SEQ ID NO: 1491 - protein, 471 aa, Desulfofundulus thermocisternus
MKGVSELLNMTRQPLSSSSRNTSARRRWSYSGHDQKADLQRQVEVLKGAYGSKFSDVVVLTDVGSGLSTNRRSLRKAMQMARERKIRAVAVTYPDRLTRFCFEYLKEYFNSFGVEVLVLNREEDRSPQQELVEDLLTIVTSFAGKLYGHRSHAELQEKLAAGGTLCAPDLRLKVKPGGELVALLDVKVDVPEEKPSGDPGRALSVDWGLRKLVTCTVVSRKGQLTPPFFVFWSGLKARLFRIREDIKKLQKERDRYEKGTPDWKKYNRKIAAAWQKYHRVQHTLAHAVSTLLVLLARAFGCRHIFIEWLVTLHGKKGRNRDLNWWVSTVVRGLLFRLLRYKAKLAGIRVFMVPPGGTSRVCPRCLGAGKHVISPGNKAEKDSGSWFVCPSCGWQADRDYAGSLNIARVGFNLARPLSYKVGGAAMPFPSRVASAEVLREAMTFTTTLGYTCSVFPGNIGCLVKLLDLQCRT

SEQ ID NO: 1492 - protein, 490 aa, Fischerella thermalis
MAYVPLREAVKRLGLHPNTLRKYADNGKIESIKNEAGQRLFNVESYLRGATRASIVCYCRVSSTKQRDDLDRQIAYMQSLYPEAEIIKDIGSGINFKRKGLQTLLDRLMRGDKLTLVVACRDRLCRFGFELPRSTWSSKTVDKSWFSKTLYTVPNQNLPRIFSPSSTSSLVECTDSGNTVKKSRKIRIFLKATQKQIIKQWFGVSRFVYNTTVKLLQDSTIKANWKAVKTDILNGLPDFCKSVPYQIKSIAIKDACKAVSNAKKKFKNGGGISKVKFRSRKDPIQSCYIPKSAVSDKGIYHTILGEVTFKEALPQSFGDCRLVKAYGDYYLTVPEEVSRQQSENQGRVVALDPGIRTFITFFSESSFGEIGISANIQIQKLCFRLDKVISKIAKAKCKSKRRLKLAATRLRGKIKNLVDELHKKTARFLVDNFDVILLPTFETSRMSKKAKRRIRSKSVRQMLTLSHYRFKQFLKHKAFETSKVVMDVNE

SEQ ID NO: 1493 - protein, 491 aa, unidentified
MKHYKIPRETSAILGISIDRLRRLAENGTISTIGTPGGQKHYDVQGYLDEQTGTDITTIGYCRVSGKGQAEDLASQVAYLQKHYPEAEIIKDFGSGINFKRKGLRTLLERLLRGDKLRVVVAHRDRLARFGGEAKDTPKNFKGLVPIVFDQLPEWHVETPRQIKAGAVIDACQAIKNAKVKCKETDKFQKVSFRSRKNPRQTLYLRADSLKKNGFYVRLLGQMKMSEPLPAKPQGTGKVSERDTNAEVKDSQLIMENGRYFLCVSYVEKKKTREPSGRIVALDPGVRDFMTFFSEDRFGWLGQQCINRIQRLCQHCDNLLSRATQEQRPLRRALRKAANRIKVKIRNLIDELHKKIAHFLVTNFDIILLPTFETKQMTKRGARKLRKKSVRQMLTLSHYRFKVFLKHKAKEYGAQVIDVCEAYTSKTVSWTGELITNLGGSRVIKSSEGHRMDRDLNGARGIFIKNVARALTVRPCTANLGASKSLIPSAT

SEQ ID NO: 1494 - protein, 506 aa, Ambispora gerdemannii
DLERQIANLRQYYPEYEIISDIGSGLNWKRRGFVALLERIHTEGIEEVVVTRKDRLCRLGSELVEWIFEKNGTRLVVLGMDVSAESSEAGELAEDLLSIVTVFVARHNGMRSAANRRRRREVAKAQEEQELQDSSRQDTTYPSLSYARGEVETQTLDGNSAMDLQSGIERTKKALRAQCLNAANFNNTELQWVLETPYDIRDEAMNDLLKSYSSNFAAKRKKFKMKFRSKKDQQQSIAILSKHWGKSKGVYTFLCKMKSAENLPAELHYDARLVMNRLGEFYLCIPQPLEIWAENQGPTQSDAVIALDPGVRTFITGYDPSGQAVEWGKNDISRIYRLSHIYDKIQSTHDSIHGKVHKRKRYKLRRVMLRIHKKIRCLINDCHHKLAKWLCQSYRIILLPEFKTQGMVRRGKRRIRSKTARMMLTWSHFRFRQYLLHKVREYPWCRVIICTEGYTSKTCGCCGHIHRKLGGSKVFRCPSCTAELDRDINGARNILLRYLTVTSKEP

SEQ ID NO: 1495 - protein, 521 aa, Scutellospora calospora
MTSKYKPAEKIKKIYGVSTSTLRRWNDKGDVAYITMPGGKRLYSTDDIDNIFGRESTQKKKICYARVSSEKQKDDLGRQRAYLVSEFPDHEIITDIGSGLNWKRRGFTSLLERVYARDIEEVVVTRKDRLCRFAYELVEWIFSKHDVKLVVLGSDVGSNDPDTGELAEDLLSIVTEREKLKKWMGTAKWTYNRALDLIKNGESRTKKNLRQKCIKVENFRHENTWVLETPYGVRDEVLIELLEAGEYAFLKNIRTSEKLPDINHAVNIIRDSFKRFYVCVPVPIKEQYRENDDFISIDPGVRTFMTGYDPKGKIFEYGKGDISRVYRLCKRHDEYQSQRSVLKGGSNKRERYKLKRKMLKIHDKIKNLIRDCHHKIVKELCENYNTILLPRFETKNMVRKKDKELDNQESKSIKNHKKKFKRKIKSKTARMMLTWSHHRFQQHLVHKIREYPGRLLILCDEHYTSKTCGNCGYIKHNLGGAKIYRCNRCGFEIDRDHNGARNILLKHLSQRDLTLGPTPFE

SEQ ID NO: 1496 - protein, 548 aa, Fischerella thermalis
MTYVPLREAVKRLGLHPNTLRKYADNGKIESIKNEAGQRLFNVESYLRGATRASIVCYCRVSSTKQRDDLDRQIAYMQSLYPEAEIIKDIGSGINFKRKGLQTLLGRLMRGDKLTLVVACRDRLCRFGFELPRSIWSNKTVDKSWFSKTLYTVPNQNLPRIFSPSSTSSLVECTDSGNTVKKSRKIRIFLKATQKQIIKQWFGVSRFVYNTTVKLLQDSTIKANWKAVKTDILNGLPDFCKSVPYQIKSIAIKDACKAVSNAKKKFKNGGGISKVKFRSRKDPIQSCYIPKSAVSDKGIYHTILGEVIFKEALPQSFGDCRLVKAYGDYYLTVPEEVSRQQSENQGRVVALDPGIRTFITFFSESSFGEIGISANIQIQKLCFRLDKVISKIAKAKCKSKRRLKLAATRLRGKIKNLVDELHKKTARFLVDNFDVILLPTFETSRMSKKAKRRIRSKSVRQMLTLSHYRFKQFLKHKAFETSKVVMDVNEAYTSKTVSWTGEIIHNLGGAKFIKSPTDGRVMPRDLNGARGIFLRALVDTPSLRECIC

SEQ ID NO: 1497 - protein, 549 aa, Streptomyces mirabilis
MPVPVVQTPSVIWPVEEPTPEVVGRTVAYCRFSSGDQKAELDRQVSRVVQGAIGLGLAVAEVVTEAGSGLNGNRRKLHRVLSDPAVAVIVVEHRDRPARFGVEQLESALSASGRRLVFEARPGFHIVGHRLALDPNASALQALASHCGAARVAYNWAVRHVPANWSQRAAEETYGVPEAERVAWRSWSLPSLRKAFNEAEHNDPCLREWWAQNSKEAYNTGLANAAAAFDNYAKSRRGERKGTRMGRPRFKSKRKARPACKFTTGTIRLDDRRHIVLPRLGRIRLHEDVQPLVDAIAEGGTRILSVTVRFERGRWFAVLQTEERPTIAPATRPYTAVGIDLGVKTLLVMADSAGEVREVANPKDYDQTLTQLRKASRTVSRRRGPNRRTGQAPSRRWEKANAVRNRVHHRVANLRENHLHQATARIPAEYGTVVVEDLNVKGMVRNRRLSRRISDAAFGELRRRLTYKTQRHGGCLIVADRWMPSSKTCSRCGVVKAKLSLGVRVFERAVGAAPRQGTELDRTPSASNSRSGDTVTNLPGGNTRNAESR

SEQ ID NO: 1498 - protein, 549 aa, Klebsormidium nitens
MGYVSLSSARHHFGVSGKTLYRWEASGKVTVKRSPGNRRLFLVDDPQPQYEPTRESVVYVRVSSSKQQDDMRRQEKYLLDQHPGSRVVRDIGSGLNFKRKGLLSLLERSEEGLLRRVVVASEDRLCRFGFDLLAWQFKRHGVELLVCDKADKSPEAELAEDVLAVIQVFGCRWNGKRSYNRAVSLMHETSVYNKMRLRNMITPAEVNQDNLWLLETPKDIRAGAVFEAAKNIKAAFTNKARGNIENFKMGYRSRKKEDSCGWTINVPKTALKVKGERCLQVYRDSCPWLFQTLGRIGPLSMDCKIQFDGMRYFLIVPYERHVVSPRREGVIALDPGVRTFQTAYSPDGHCYELGRSCCRRLEALCVHLDRLISLASVTPKTLRRTKWAMGLRIKKLRRRLQSLRDEMHYKAADYLTRTAHIILLPTFETKDMTRRTTRRLRSRTVRNLSLLSHYKFKQRLIAKAAVRGVKVLQVSEHYTSKTCGRCGSIHETLGGRRVFKCPRCGVVLDRDCNGARNVLLRAMREEPPSRGAMQDGATVDMPCLAWTNE

SEQ ID NO: 1499 - protein, 551 aa, Quaeritorhiza haematococci
MTVVAVVEFFLHIQPFSKPATARVALSAATLPPSNPKQSQVEKEPDGTDQDTDQGTEQGTAKQPHPVLPRRVHIHLGAVERLPVHRLGDYFEDVVRWACRVHLNLNVENIQWTIPAEIRSVCATIDHWGLGQPVHVQPSRDMQYRYKLTPLNATRTLFDASVQYSRPMDIGSGLNFKRKGLKRLLERVMSGTVEEIVVTHKDRLCRFGFELIEFMVNKFGGRILVQNHAVRTPEEELTQDLLTIIHRKVCSATDCDEPIDPATNGYLCEAHYDPGASQCQGVAMTGRNKGQRCSYASSAGFCSHHAKKATKEKVKENENVTCRLYRLRPNKTQVKLLRQWFGVAREYYNATIEYLVKEKAKACFQDIRPIIKDKLDNAKPYRLQVPDKIRQGAIQDACQAMNNAKLKYQQNQVFSKLSFRTRRDPSQSIYLDKSAIKVEAEAVVFYPEITKAYLEEARSKDDKSEIDSEIRTTEAVEINRACRIVLKHNKYFQLASPRSQAVQQGPTYGECVALDPGGRSFLTLYSPDLCGHLSYEPRKRIEATYNEYDKV

SEQ ID NO: 1500 - protein, 555 aa, Klebsormidium nitens
MTNEQRYLGTHAAKQVLGVCGATLRQWADSGLITSFKTPGGKYRYLIDNVISGGSADTRAEELQRPATEKQKVCYCRVSSLGQKADLDRQAQYMQSRYPEHTIIRDIGSGINFKRKGLQTILELAFRGRLEEVVVAYRDRLCRFAYELVAWIFHQHGVRLVVLNEEEGRTILKRWFGCARKTYNMALEALKKRTAHKRTEAWLKNRFTRASNVSKANSFLLDTPTHVRDGAIADLMKGLRNEVAKKRKNGSHAFEMRYRSKKEVQSLYLEKTAIKKLIHADSHSDFLSMYPTHVTNAIFLISKKASLLNCRGKVSFDARLVMDKLGHFHIHATVEKDEIPSENQGRGIVALDPGVRTFMTAYSPSDNVAFQIAPGCIQRMVRLEHHIDRLRSEISLLPPQCKGRARRMRKAALRLHKRVSNLTSEVHWKVAQFLTDRFQTIVLPPFATQEMCSRTGDRQRRIGKSTSRKMHLWGHYTFRTRLAMKCKERGCDLKVLDEVYTTKTCTGCGWVHDTIGGSKVFLCQGCGLETDRDINGARNIFLKHHKRLMGGSLPS

SEQ ID NO: 1501 - protein, 556 aa, unidentified
MKYYSIGEFANKIGKTIQTLRNWDKSCSLKPHHITKAGTRYYSQEQLNHFLGLKPQDKLNKKTIGYCRVSSYKQKDGLERQIENVKTYMYAKGYQFEIISDIGSGINYNKKGLNKLLDMVTNSEVDKIVVLYKDRLIRFGYELIENLCEKYGTAIEIIDNTEKTEDQELVEDLIQIVTVFSCRLQGRRAEKARLYPSELQEQKLWQSVGTARFIYNWTLARQEENYKNGGKFISDKVLRKELTQLKKSELSWLNEVSNNVSKQAVKDACNAYKRFFKGLSGKPKFKSKRKGKKSFYNDNIKLKVKESKLVSIEKIGWIKTNEQLPAGVKYSNPRINYDNKYWYISVGAEQEEIKEDLTDISLGVDLGLKNLAICSSGTVYKNINKTYTVRKIEKRLKKLQRQVSRKYEQNKKGKEYVKTKNIIKLEKQIQQVDRRLANIRNNYLHQTTTSIVKTKPYRVVIEDLNVKGMMKNKHLSDAIRKQGFYEFRRQLGYKCKFRGIELVVADRFYPSSKTCSQCGKINKDLKLKDRVYSCSCGLSIDRDLNACINLSRYKLA

SEQ ID NO: 1502 - protein, 582 aa, Diversispora epigaea
MYMLKSNFNKHGSVSSSHFLTKTTFLTFLTKPPFYNLAQLNTTYQSAHKIQETYDVSVETLRRWADSRRIAIVRTPGGKRLYSITDIQEIFRDNQQTQITQKAKICYARVSSKHQRDDLERQIANLRQYYPEYEIISDIGSGLNWKRRGTDCADLDPSLWNGSLRKMGLSSWYSVRMSVLKVVKPENLRKTYSQSSRYLWQDIMECVPPPIVEEDEKLPKPKKNKSSKIPAGKTQRIRLFPTQEEKSKLKRWMGTARWTYNRCLVAVEKEGIEQTKKALRAQCLNAANFNNTELQWVLETPYDIRDEAMNDLLKSYSSNFAAKRKKFKMKFRSKKDQQQSIAILSKHWGKSKGVYTFLSLRAQCLNAANFNNTELQWVLETPYDIRDEAMNDLLKSYSSNFAAKRKKFKMKFRSKKDQQQSIAILSKHWGKSKGVYTFLCKMKSAENLPAKLHYDSRLVMNRLGEFYLCIPQPLKIWAKNQGLTQSDAVIALDPGVRTFITGYDPSGQAVEWDKNDISRIYRLSHIYDKIQSTHDSIHGKVHKQKRYKLRKVMLIHVPKIDFGFLRYFDFLRFMQNLFYIWK

SEQ ID NO: 1503 - protein, 584 aa, Rhizoclosmatium hyalinum
MRRGKQFYNVEDIERILGTKTKSEQLRGGQRPVCYACVSSSHQRKDLERQIEDLKSRYPDAIVITDIASGLNWKRPGLNSLLELVHARSVSEIVVTHRDRLARFGVNLLDWIFAKAGVKLVVLCGSADHQPTQYLELDNNGDRDGSTENSGPTAAPGNAFNELAEDLLAITNFFVARNNGLRAQAPTSDPEPSGSSSTTNPQKPKKAAPDRETHKQILVKWFGVTRFVYNQCVALSSSSNRVKPKRDSLRAAIINDEDYKSLMSKQNRKWLKEYHYDLKDEAICTYLKNLKSNFAKLAKGGQNKFCIKFKLRKDPVASILVLAKHYNKANNFFSPILNVRKMKSAEPLPVKLNWDSKLIRNQLGEYYLVFPQAIKKKSDSEEKEPRVVALDPGFKNFMIGYDPSGTVFSWGKQDIVRIGRLLHHKRNLHAKLSEVKDAKRNKRMKKAWLRMSKRIQDLVSEMHKKLALFLVQSYTHIYIPRLDFRHFKRIGKQYREKMATFSHCKFVDRLKDKVREYLNTKVFDKITEEYTSKTCTNCGCLDLNLRNKEVYSCIHCGTVIGRDFNGARNILLKTMKEVSALQIN

SEQ ID NO: 1504 - protein, 593 aa, Ktedonospora formicarum
MCIENIYTPKEFGQLIGRTTNTLQKWDRKGLPKAHRSPTNRRYYTHDQYLKYRGLKAAKQGLTMVYARVSSAAQKPDLRNQVNALEAYCKQHSIAVDEWMFDIGSRLNYKRKHFNRLMEMVALGQVRRLIIAHRDRLVCFGFEYFEAFCERHHTQILVINGDSLSPEQDLVQDLIAIVTIFSARLHGLRSYKKVLKDAAQQKEEERMNRSHVIRLNPTPEQEVYFRKACGVARHAYNWALDHWKQARSEGKRVKMRELKAEYNRVKHEQFPWCADVTKCAPEQEFRHLGQAFDNYWRMKKDGTQPKLKHPRKDGEEAGFPHFKNKKRDRLSFYLNNDKFSVEGNWIRIPKLGKVNMTEQLRFSGKTLSAVVSERAGWWFVSIAVEVEHQAPTHQGDAVGIDLGIKTLVTLSDGEVFENQKHYRQNLGRIKGLSKGLARKKEGSQNWWKNKKKLAKAHYRVANQRSDKLHKMTTRIALTYALIGLEDLNAKGMLANSCLAQAVNDASFFEVKRQLLYKAEQHGGYVQLVSRWYPSSKTCSSCGYVKPELLLSERVFICEDCGYVSDRDYNASLNIRNEASRLRTSVPVVASSAR

SEQ ID NO: 1505 - protein, 626 aa, unidentified
MKIYRLNEFAKLIGKSVQTLQRWDREGIFKAYRNKLNRRYYIHDQYLEYIGQKASPEKKNIVYYRVSSSGQKGDLENQKKAIEQFCIAQGIAVSEWLSDIGSGLNYTRKNFLSLMEMVERGEVAQIIIAHKGRVVRFGYMKKTIKNYCFNATQSKLNELYEIALRYTSVKNEIFQRYGSISGLNYLSYPRQIRNEWVKTNYANKFGLQARYWKQAVDEVFSNIKSNWSNGFRKIKNNIYKNKNYTEVEKHYAFYLLKASILLYKAITFQSFDLPEIFKDKDIRRDKIHKYLKSRLRKYLRTKSYQNKNRSFQIDRNMYDIHKDNKGRTWIGIMGLTPRKRVRLQMTSSTESTGNLRIVLKGKHIEIHQAEDIQVNPIEGKDKRAIDKGFSEVITSSSGRKYGEQFNQLLKKESDRLSEKNKKRNKIRALTDKYEKKGDIVKSEIIKKNNLGKRKYFYQKEINLNEIKQFINLSLNRFITEERPAVMVTEDLRFTNWNKKLSKNVKRYFSSWLKGYLQERIDYKVMLNGVQQVVVNSAYGSQICHLCGRFGVRNGDKFYCEIHGVLDADHNAALNYLARMSDPDITIYTPYRKVKDILQERLRLSNQDSRYSVIKTGQWESERTDYV

SEQ ID NO: 1506 - protein, 633 aa, Klebsormidium nitens
MFLGFKAAKAHFGVSSCTLRRWANEAKVVSKRTAGNHRVFLAATSQAEEGRERLAYCRVSSSKQRDDLQRQKDFLAHQYPGHRIVTDVGSGINFKRPGLLSLLERVLQGRVSQVVVTSKDRLCRFAFELLQWICLRQGTQILVLDSGDKSPNEEKIRAFPTAQQRNILRRLVGGCRKLYNEAVSMIRDRRLPFASEAEFREAERERGLRLAERKRKARSGQEEESGRGEGAGAYKGTKHPWLDKVYVKNFLVPEKSAFVRANPYLKDVPKETRQQAVEDAIEACKAALSNVRAGNIEHFSLGFRKKKDPRWSLAVAFNAVSGSRFWPRKIKEFGQLRVAEPGHLRPHYDRELKVSKDELGRYWMLVLSAKGPARGTNEAAARVEALAESTRENQAGDRPVAAIDPGVRTRHSIYMTDGRVVDVGGGDIARVVRLCRHVDRCISALKKGEFCVSRKHVRREPGASTMRLFDHYRPAKKEQGAHVVPLDGRSREHIRAKMHRLRAKVQALKDEVDNQTVAYLVRECKAVLLPPFDTHRMATRLNHKTARAMMQWRHGAFKAKLLERAARMGVQVMVVPEAYTSKTCGACGWLHPSLGGAKTFQCRSCGVELDRDHNGARNIFLRAIRSWGVDSPE

SEQ ID NO: 1507 - protein, 659 aa, Micromonospora saelicesensis
MLIRVLGAGVNLKEWAAATGVSYATARRRYEAGALPVPTYRLGRLMVGEPGTGTLAEVGRVVVYARVSSADQKTDLDRQVARVTVWATGQRLAVDSVVTEVGSALNGHREKFLALLRDPAVTTIVVEHRYRFARFGAEYVEAALSAQRRRLLVVDPAEVDDDLVRDPHLAVRTPIRSPCRGEPSSERGRSGYRGTVVKTLQAYRFALDLSPRQERAVLAHAGAARVAHNWALARVKAVMSQRAAERTYGVPDELLSPPISWSLPSLRKAWNAAKDEVAPWWAECSKEAFNTGLDALARALKNWSDSRKGARKGRAVGFPRFKSRRRSTPTVRFTTGVMRIEADRGHVVLPRLGALRLHESARKLARRLEAGTARIMSATVRREGGRWFVSFTCEVERAVRAPARPGSMVGVDLGVKHLAVLSTGERVANPRHLVVAARRMRRLARAVSRCVTPDRRVRRVGSNRWARAQQELSRAHARVVGLRRDGLHQFTTRLTREHGTVVVEDLNVAGMLRNRRLARHVADASFAEVRRQLTYKSEWNGGRLVTAGRWYPSSKTCSGCGAVKTKLTLAERTYTCTACGLSLDRDLNAALNLAALAREVTDDRSGRESLNGRGADQKTRSRGQVAVKRLPGTARAGQAGTVPPQGGTTAQRSLLSTRR

SEQ ID NO: 1508 - protein, 659 aa, Micromonospora saelicesensis
MLIRVLGAGVNLKEWAAATGVSYATARRRYEAGALPVPTYRLGRLMVGEPGTGTLAEVGRVVVYARVSSADQKTDLDRQVARVTVWATGQRLAVDSVVTEVGSALNGHREKFLALLRDPAVTTIVVEHRYRFARFGAEYVEAALSAQRRRLLVVDPAEVDDDLVRDPHLAVRTPIRSPCRGEPSSARGRSGYRGTVVKTLQAYRFALDLSPRQERAVLAHAGAARVAHNWALARVKAVMSQRAAERTYGVPDELLSPPISWSLPSLRKAWNAAKDEVAPWWAECSKEAFNTGLDALARALKNWSDSRKGARKGRAVGFPRFKSRRRSTPTVRFTTGVMRIEADRGHVVLPRLGALRLHESARKLARRLEAGTARIMSATVRREGGRWFVSFTCEVERAVRAPARPGSMVGVDLGVKHLAVLSTGERVANPRHLVVAARRMRRLARAVSRCVTPDRRVRRVGSNRWARAQQELSRAHARVVGLRRDGLHQFTTRLTREHGTVVVEDLNVAGMLRNRRLARHVADASFAEVRRQLTYKSEWNGGRLVTAGRWYPSSKTCSGCGAVKTKLTLAERTYTCTACGLSLDRDLNAALNLAALAREVTDDRSGRESLNGRGADQKTRSRGQVAVKRLPGTARAGQAGTVPPQGGTTAQRSLLSTRR

SEQ ID NO: 1509 - protein, 661 aa, Mycobacterium tuberculosis
MNLAVWAERNGVARVTAYRWFHAGLLPVPARKAGRLILVDDQPADRSRRARTAVYARVSSADQKPDLDRQVARVTAWATTEQIAVDKVVTEVGSALNGHRRKFLALLRDPSVKRIVVEHRDRFCRFGSEYVEAALAAQGRELVVVDSAEVDDDLVRDMTEILTSMCARLYGKRAAQNRAKRALAAXXXXXXGARRRRVGGCLMAKFEIPEGWMVQAFRFTLDPTAEQARALARHFGARRKAYNWTVATLKADIDAWQATGIQTAKPSLRVLRKRWNTVKNDVCVNIETGVVWWPECSKEAYADGIDGAVDAYWNWQNSRSGKRDGKRMGFPRFKKKGRDPDRVTFTTGAMRVEPDRSHLTLPVIGTVRTHENTRRVERLIAKGRSRVLAITVRRNGTRIDASVRVLVQRPQQPKVTDPGSRVGVDVGVRRLATVATADGAVLERVPNPRPLDAALNELRHVCRARSRCTKGSRRYRERTTEISRLHRRVNDVRTHHLHCLTTHLAKTHGRIVVEGLDAAGMLRQQGLSGARARRRGLSDAALGTPRRHLSYKTGWYGSQLVVADRWFPSSKTCHVCGHVQEIGWAEHWQCDSCSASHQRDDCAAINLARYEDTSSVVGPVGAAVKRGADRKTRPGRAGGREARKGSSRKAAEQPRDGVQVA

SEQ ID NO: 1510 - protein, 734 aa, Acanthamoeba castellanii
MQGPLADLPTNSTSRPWLVGPRNTTKLNHRTRQILESGEDAFVPSNEVTKYYNVTAACLRQWANKGEVRVLRIGELGKRLYNAKDLKSKLVGRDGGAQQQRQQQRKRFAYAQVSSEHQRGDLERQVGELRRLCPNHKIVTNVASGLNWKRKGVRAILDQCLEGMVEEVAVLHRDRLARFGVELMEYLFAKNDVRLVVVGEGATADAETHAVLEAVVDPAQELADDLIAQPWRKQQAANLKTAQKKANRKKASAAKTKVMEASGDGDTNQPGGKRKRKGKERAPISEEGEEEEEPAPYDGKCRKIRVFPNRWQKDLLKSWMGTVRWTFNACNAAVRAGLSGHSEAELRSRFVDNEAFGKPHLPGPSTLWVLDTPRDIRDQAAKELSAAYKNGTKAHGKGKFEVKFKSPKKMAQQCITSNARDWGRGRTSVFHGLFDSGRALRASEPLPREMKHEFKIVRTRLGRYYLCVPMDLETRGESQAPSSSDDVGAECVFIDPGVRTFVTTFDLSGRIHEFGTGSIGRIEKLCRRLDDLISRTYAKKPDDRQRFLRGKKKRWRMRRAALRMRRRIRDLIDEAHRKIALWLCENHRVILWPLSGVSNMVVAKEDLKQRKRRIGAKSVRAMLTWSWYRFQEWLKHKVREFPWCRLVLTSEAHTTKTCTHCGTPNHDVGRSEVFRCADAACPNRSAHRDHHGARNNGLRFLTEWANLPTTTTTTTMTQRLPTRVIDLTTSGLND

SEQ ID NO: 1511 - protein, 734 aa, Acanthamoeba castellanii; identical to SEQ ID NO: 1510

SEQ ID NO: 1512 - protein, 771 aa, Acanthamoeba castellanii
MQGPLGETNERPWLHNPRNTAIVRHRTRQLIEAGGDTYVPSSEATKYFGVTAACLRKLADRGNLRTRRIGDKGKRLYHCGDLLSQFPAVTRSEDGRTIQTTTRPPRKRIAYARVSSEKQRPDLERQIAELRRLCPDHEIVSEVASGLNFRRKGLCAILDRCFAGLVDEVAVLHRDRLARFATELLEHVFKRHDVRLVVVGQGDPAAAATLDALDPQRELADDLIAVTTFFVARQNGLRSAAHRRARRDRAALEEGRGSTTSEPSEEESEERGGSEESERDETDGSSSSSSSDDGGGRRKRQRTSRRRRRRREAEAEGTAGAEGGGDGEGGMVAFDGKTRKICVFPTAQQKTLLKRWIGTVRWTYNQCVAAVRGRQCAPTKKALRARFVTEFGLREAERIKRAKSGVGGGGDDDDVGISWVFETPHDLRDQAVGQFVTAYKNAVQAHGRGKFDIAFRSAKRLQQETVVIRSRDWNRTRGEYAPIFGNTVLRSSESLPAKMDHEFRVMRTKLGRYYISIPVPLDVKHPIQQQQPDAVGGGDNQAPAVAPHAAAAIDPGVRTPFTVYSPDEARVYELGANDFGRIRRLCHHLDDLVSRTTDRDVRKKRRRRMRRAAARMRRRIRDLVDDLHRRAAKWLCETFETIIYPHYETSNMVVGKSKRRGLHSKTVRAMLTWSHFRFKQHLLHKIREYPSGCRVVLVDESYTSKTCGGCGRINHGLGKSKLFWCEQCGFRTDRDWNGARNIWLKFLTEWCNGSSRGNDDDDKEQQQQQQQ

SEQ ID NO: 1513 - protein, 771 aa, Acanthamoeba castellanii; identical to SEQ ID NO: 1512

SEQ ID NO: 1514 - protein, 788 aa, Diversispora epigaea
MCIVIRDQLTFLNKNHLFNFLTKPPFYNLAQLNTTYQSAHKIQETYDVSVETLRRWADSGRIAIVRTPGGKRLYSITDIQEIFRDNQQTQITQKAKICYARVSSEHQRDDLERQIANLRQYYPEYKIISDIRLGLNWKRKGFVALLERIHTEGIEEVVVTRKDRLCRFGSELVEWIFEKNGTRLVVLGTDVSAESSEAGELAEDLLSIVTVFVARHNGMQTYDVSVETLRRWADSGRIAIVRTPGGKRLYSITDIQEIFRDNQQTQITQKAKICYARVSSEHQRDDLERQIANLRQYYPEYKIISDIRLGLNWKRKGFVALLERIHTEGIEEVVVTRKDRLCRFGSELVEWIFEKNGTRLVVLGTDVSAESSEAGELAEDLLSIVTVFVARHNGMRSAANRRRRREVVKAQEEQELQNSSRQDTTYLSLSYARGEVKTQTLDGNTVEKKGIEQTKKALRAQCLNAANFNNTELQWVLETPYDIRDEAMNDLLKSYSSNFAAKRKKFKMKFCSKKNQQQSITILSKHWGKSKGVYTFLCKMKSAENLPAELHYDSRLVMNRLGEFYLCIPQPLEIWAENQDPTQSDAVIALDPAVEWGKNDISRIYQLSHIYDKIQSTHDSIHGKVHKRKRYKLRRVMLRIHKKICCLINDCYHKLAKWLCQSYRIILLSKFQTQGMVRREKWRIRSKTARMMLTWSHFRFRQYLLHKVREYPWCRVIICTEEYTSKTCGCCGHIHRKLGGSKVFRCPSCTAELDWDINSARNILLRYLTITSKEPVYAGAGIYPLEPS

SEQ ID NO: 1515 - protein, 788 aa, Diversispora epigaea; identical to SEQ ID NO: 1514

SEQ ID NO: 1516 - protein, 865 aa, Klebsormidium nitens
MWWFYLKEEKRTKRPVGVVGSCDTERVVQPQESEKTPELQDIPPGHEKYANVFEKHAERFDDAYDKIREETLCLAKRRRQYSIMLDASSSSFRRAKDHFGVSSSTPRRWANEGKIATKRTAGNHRVFSIPSLEEKETRACIAYCRVSSSKQRDDLQRQRRFLSDQLPRHESVSDVGSGINFERPGLLSILERVLQGRVSEVVVASKDRLCRVHKSGGAIKEAEVALAFPSRCRKIRAFPTGHQRLILRKMVGGCRKLYNETVAMIRDRRLPFANVEAFEEAERRRKTRLEDRKRKKAEDDGSEFEEVHYKGTSHPWMDKVYVKNFLVPEDSDFMKANPYLKEIPKETRQQAVEDAIEAYKAAFSNMAVGNISNFEVGFRKKKDPRWSIAVAFNAVSGSRFWPRKVKDFGELVVAEPRHLRKRYGRELKISKDQLGRYWMVIMNDKGPKATTEEAAKGVEELRESTRENQAGDKPVAAIDPGIRTRHTIYMTDGRLVEVENQDIQRIVRLCRHVDRCISALSKGELAVSKKHLKRNPKASVMALFDHYRPSKKVQGQHVVRLSGEDKNRIRQKMHQLKAKIESLKNEIDDQTVAYLLRECKTVLLPPFDMHSMSTRLHHKTARAMMQWRHGTFKTKLVERAPGRGVRVMIVSEAYTSKTCGACGWLHPSLGHKVFCTADWTAAAPVFKPLQGDGMLRNLSLSGTSLCGADARPGVDNIFCSNDFISKPLTQVQGSGNVTAQGKGRLCVVAKDQRVFCTDSIVQNPVWTKRGDLAIDLAMNESGGICALNPDGTIFCQPDLTSGKWVATNVAEKKNVNLATNIHGTKLCIFNSDKAPAYCHDNVFAGDKAGWYGLAAAGQRFGLEKV

SEQ ID NO: 1517 - protein, 1309 aa, Ectocarpus sp.
MAFVNTKTAIERLGVSNVTLRKWDKLEAIPTIRTPGGQRVYDIETFQKTQALRSEEARLCARRMAKDKKNASRIDIGYARVSFSKQKEDLGRQEQFIRDSCPGISILSDIGSGLNFKRKGFKKLLRCIMQGQIDRVLVAYKDRLCRFAFEIIQFICDENNTELVVLNQNENGSAEAELMEDLMAVVHVFSSRLYGKRSTGKRKRYTEGGAEDGALVETIREKLSDIEPHSTRAKKVRMYPTRKQKKILTKYMSDGRRVYNECVRKLIDGVSTSKIRDKAIRAPCMDKTMEKTLRTPEHVRQKAVDQFVAAQKGVETRETGSLHFRSKFNQKQRIGLQKKDSRIHGSSVHLTFKEFDENILLGEELVSDDGILTEIVRDRGVYYATVTKTRPVTPKSDGLRVVSLDMGSRKFGSFYSSDGSIGFIGEEAGEKLSRLIKKREYLKKLKESKSKLTKGWRKVSKRIANLVNEMHNKVALYLVRNYDIIMVGRLSNGVMKTKSHRNQKLLHASLKHYQFRQRLINNGNDHGKKVAIVPEQLTTKLCDRCGFINWKMKAEEVFTCPKCKHSCDRDIHSVDPGARPVAAIGGRNDVGGGGATGERSGGAVDAPVSGKGVAKATQRKNKTKPKQVSPDESDGVRAVVAALRKAFAQAKLRNNDAKAAGKQEDDVHKYNGSFRACNLLRSRRSSTIGAGPNSGEICDAKVHSRPPRENVQVQRVLQGLQPPEVKKVFYDRCWAAINIRISGKNTRNDFSDLLDEIIDQSGFDTSLFPPKVPCRLQETVTREKEVSAKNSIVVHLEAKIKGFLRFRLMNDSQLAFQHLPAKDRSRIIVSLSNDCLEREMRGDLDPGYVPHVLQVRDPLAQVYATEPDVPVLKILKKKTHLFVELISMISNVAEEASDNNRALREETKTRSDEEKVRKAFYMSERIKRGLVDRPKTCTVLPVWKLAPCFPHYSSSVVGSIFHKEGHDFSSVSRFISEHFDLRRVNRKGYKPSGFRSDGYQVQVTFMALVSKKPHVPGTTDLAKSGYQIAKKVVSLETQERGLFVLSQARKDSRKIVADRVHANNLTVVDPGCASVVSVRSCPLEFCRCCRERSRESTDWEMKGTEYSVKSGRTMLEGREKKRRSNDEYGRCFPRFSAVKKKTARKSSFLAYCRVAAETFKVMFAEKMKRARKRSRFHSSRLVQKTVDKLASNIAACPSDRKNIVLFGNGSFRAMKGHASAPRKKLVRAICSRVNVGMLDEFRTSKMCPGGCGGEMTDVQGGQRVRQCTTVCVGVENPCPLFENGVAFRCDRDASATLNFCLAGYCGLVX

SEQ ID NO: 1518 - protein, 1578 aa, Cetraspora pellucida
MKTREFFTGDIYPNDNVYSMQIVEDHEDYYTKEYYMKIKCVATNSLDAYIFLSGFPVYCEFKINNGFDDGIDEKIVKEILNYISLTNYKDYRSVKREDILGNEFYFLRVFFKNHNIRKKIIKKVRDCIKNKEDNYQIFDLYEDDISTPYSMFIAPRIKIKINGFEQGFPLSKTFKLNRTLSRKIYENKFHYSNLRFIDDIDTYISMFFDFETVDIENMKKGILGRVSIGCEIDQAFMGVFLFFKGRDIIPFHTVAVLLQNEEFPVEYERIDEKLDLIYVKNQKEFFLTKALLYYNFRPEKTGGWNNLGYDWKFTIRKLYELGIFEEFIQIATGKTKSIENIIKFDYRNEYNTVNANEKACHYFLKILGTEEYDQSTMFRQHYQTLSKWSLNTILGKLGLKLKLEFSIKEMYEILYNVYKGNFDEKTKKEKCTLILDYCIRDCIAPKEAIEFINKITEYRIISNLTYIPMYEYSYGNKTKMINNLIVYFANREGFDISIKYDKKNVKEEYEGGLVKDPLKEFSVVSDGCLDFNSLYPSVMMQHNICFLTKLKKNEKEEGCHEISYKNSKGITKIIRFSKKRKGLIPTILELLVKRRKEAKKDRDRHEKSNPMYNYYNILQDTLKKIANSIYGQFGNQYSIICDYEVSASVTGAYARKYIKMASEYMQTKEISETNKEKKFIWKYTDTDSIFFRLSPILINEIIKRYENHLLDKNINEKDFIDVIYNIQKEMVFVTYNESMKLQDEINEWMANENQAPRIIMEMEKIVSPNLYISKKKYNGLIFENSNYFFDDEWKDLEKHIKEEYKIDNVTKEIVNDFVKKNDEYKLLANGKKFSNLLAKGTDLVRRNSTLICRVILKKLLYTLFDYREYGRYLYNMKFTKIEEYQDFINGVNKNDFAKETSKRVVEDFIKYLYSKETELNLELFEQNARNNEEEEDMMTFTETKDPLSITKYTMTSKYKPAEKIKKTYGVSTSTLRRWGDKGDVSCITMPGGKRMYSTEDIDNMFGRESKEKKKICYARVSSEKQKEDLERQCNHLRSEYPEHEIITDIGSGLNWKRKGFTSLLERIYQGDIEEVVVTRKDRLCRFAYELVEWIFKKHEVKLMVLGTDVGSNEPETGELAEDLLSIVTVFTARHNGLRSAANKRKRKEIENSKDTDILRQKCIKIENFQNENKWVLETPYGIRDEALIDLLDAHKSNFKLKRQKFNIRYKKKKDKQHSITIQARDWKRKRGEYAFLKNIRMSEELPNIEHAFNIILDKLGKFYICIPISIEEYYREDNEIISLDPGIRTFMTGYDPIDDCHMKLAKFLCDNYNTILLPKFETQEMVKRIKRKIRNKTARMMITWSHYRFRRFLEHKISEYPGRLLILCNEHYTSKTCGNCGYIKRNFGGSKIYKCDECGFVIDRDYNENQTDWERSEKKDKEYTETILKQENDETTSMVKKFVRDMKMINVEVPKPRFNYYVIYKHGVKEVYKRMVLVDRFDPKKQRIDKYHYLKGIKSFLSVCIEETEKETDEWIKSIIDKNTNKSIDEYSLKEDEQKGGKKRKKKEYDILIPKKQMKISSFFKKQNNDNDDNDFFI

SEQ ID NO: 1519 - protein, 441 aa, Streptomyces sp.
MSGAEPAGSGKKKRRGFEARPGFHVVGHRLALDPSASALQALASHCGAARVAYNWAVRHVLASWSQRAAEETYGVPEAERVAWRSWSLPSLRKAFNEAKHNDPFLREWWAQNSKEAYNTGLANAAAAFDNYVKSRRGERKGARMGRPRFKPKRKTRPACKFTTGTIRLDDRRHIVLPRLGRIRLHEDVQPLVDAIAEGCRSNQGSKVHEQAVSSAQQASDVGRPLKGSAPIAEGGTRILSVTVRSERGRWFAVLQTEERHTIAPAGRPGTAVGIDLGVKALLVMADSAGEVREVANPKHYDQALTQLRKASRTVSRRRGPNRRTGQAPSRRWEKANAVPRSSSAETSRTGTLCCVLWESAWAEFVPFLSFDVEIRKVICSTNAIESVNARIRKAVLEFQWLSQHRSTTMVPSRPARRAADTQRQPSSGATWVRMLSSTWAL

SEQ ID NO: 1520 - protein, 420 aa, Methylobacterium sp.
MEADPTLAVAEIVNRFKSRSSRLMRQEFPALRSRLPTLWSRSYYPGSVGHVSAKVVEAYIAAQKGTGAVAVRSYKYRLRPNRAQTAALDAMLRDFCGLYNACLQQRVEAYRRRGLNLRYGPQASELKACRACDPDGLGRWSFSALQQVLRRLDQTYAAFFKRGHGFPRFRASARYHAATFRIGDGLTVKKDRRIGVVGVVGVPGGLKVAWHRDLPDEAKLGTAILTRQQGKWFMVLSVEAEFAETCGTGTVGIDLGLNSLIATSDGETVEMPRFARKAQKAQRWRQRALARCKRGSKRRLKAKARLAAGSAKIARQRRDHLHKLSRSLVSRYWGIAFEDLTMTGLNLSRVWDSQSQDTRDPNPRLQMWRGSGPGCCCGDRRASAGFRAGTRPSGHKPAGCRIAVPRSRLLQRAELSRLGS

SEQ ID NO: 1521 - protein, 425 aa, unidentified
MEYRRDEHRIHLVVYHLIWCPRRRKPVLMGDVARDCRSLIEAKCAEHGWTIETLAIRPDHVHLFVRAWPKDSAADVLKAVKGVTAHALRKKYPHLRKTPSLWTRSYFASTAGNVSQETIRRSIEAQKGLEMIRTHILPCTIPRARADELNRASGAIYTGILVAHWRLVRKKGLWLSEASGTRWSDTRTDARMHAHSIDAAQQGFYKACETARGLRQAGIAEAKFPYHRKKFRTTIWKATGIKREGNILRLSGGGRTKKERDERAVEVPIPEQLRDCLKFLEVRLVYDKYARRYTWHVVVENGLKPKPAPGRNVVSVDLGEIHPAVVGDRTHAIVITCRERRSRSQGHAKRLATISRAIARKAKTSRRRRRLIRAKVRMKAKHARILRDIEHKVSHEVVAFAAERQAGTIVIGDIRDIADGIACGT

SEQ ID NO: 1522 - protein, 430 aa, Frankia sp.
MSGWAGGVYDLGYHVVWCPKYRRAVLVGQVRDRLDTLIQQKCAEHGWPIVALEIEPDQVHNAALQERRDAYAHPSKTKVRYGDQSAQLKEIRAYDPDLARWSFSSQQATLRRLNLAFEAFFRRVKAGETPGYPRFKGAGWFDTVTWPVDNDGCRWDSQPEHPTRTFVRLQGVRHVRVHQHRPVRGRVKTLSVKRESARWYLILSCDDVPSKPLPPTGAVVGIDLGVASLVTDSNGEHYGNPRFLRRSADRLADAQRDLSRKRRGSKRRRMAVQRVAVLSRQVARQRVDLANKTVNEIVADHDLIVVEKLNIKGMVKRARPRPDPDSAGGFLPNGQAAKSGLNKSIHDAGWGVFLNVLRAKAESAGRLVVEVNPRHTSQRCPGCGHVAAENRLTQATFLCVRCGHAAHADVNAAVNILRAGLALQAATPSS

SEQ ID NO: 1523 - protein, 439 aa, Clostridium botulinum
MRALKGVSARLLMKEYGDELKKKLWGGHLWNPSYFIATVSENTEEQIRDIFKVKNKNRRVVDLFMKIIIKGFKYRIYPTKEQEIQLNKTFGCVRFVYNQILAKKIDLYKNESKSISKTICNNYCNRELKKEYPWLKEVDKFALTNSIYNLDSAYQKFFKEHTGFPKFKSKKNHYYSYTTNFTNNNIKVDFENNKIQLPKLKWIKAKLHKEFQGRILFATVSKTPSNKYFVSLNIECEHQELKQNNNKIAMDLGIKDLLITSNGTKIDNKKLSYKYEQKLAKLQRQIAKKKIGSNNWRKQRIKIARLHEKIANIRKDNLHKISHKIVKENQLIFSENLNIKGMVKNHNLAKSIHDCGWYELTRQLTYKSEWNNRIYHKVDRFHPSSQLCNVCGYKNEDTKNLNIRFWECLQCHTKHDRDENASINILNQGLKELKLEKVS

SEQ ID NO: 1524 - protein, 443 aa, Effusibacillus lacus
MTEVMFTFYSRLIPIQKYPKFINAYKSASSRLVKKEFPVIRKSLWKEYFWSRSYCLLSTEVPPLKLSKSTLKHKVNESDFRMDSVLHFEIRPTAEQEKQLFHTFDLCRKLYNYALDQRIRSYKETGKGLTYRDQQNMLPAFKEANPEYKAVQSQVLQDVLRRLDRAFVNFFEKRAGYPRFKDKLRFRSITIPQSDVRRNFGKEGYIYIPKIGHIKLNAHQAFDPSKVKIINVKFQNGKWYTNLTVETDSKPPVSDIQLAVGIDMGLFQIAVTSDGEQYENPRWITKSEKRLKKLQRRLSQKHKGSQNRQKAKHQLQKLHDHISNQRKDYLHKISHRLVQKYVLICIEDLQVKGMMKNHRLAKSIANASWNRLANYLEYKSRRFGKTLVKVNPKNTSQKCSNCRQIVKKNLSERIHQCPYCHVVLDRDLNAAINILQAGLNMIA

SEQ ID NO: 1525 - protein, 449 aa, Youngiibacter sp.
MYHVVWCSKYRRTVLTDQVELRLKEIIASVCKEKEVELFEMEVMPEHIHLLLEVDPQFGIHRVVKALKGQSSRELREEQNMQLTVQMKLIPDNEQKALIEYILNSYIATVNDIVADFVSMGQIDKRTSADISTSMPSALKNQAIQDAMSVFKKYTKDLKSAIRFNESNPSKKHKTVIVPVLKKPVAIWNNQNYSIGEDVISFPVWKDGKSKKLSFRIVATEYQKTLLQNKLGTLRITRKSGKYIAQIAVDIPCESYHGSSMMGIDLGLKVPAVAVTDTGKIQFFGNGRENKYKKRMARAKRKALGKAKKIKALKKLDNKEQRWMKDKDHKLSKEIVNFAKTNKVKTIQLEELAGIRQTARTSRKNAKNLHTWSFYRLAQFIQYKANLVGIEVVYVNPKYTSQTCPVCGTKNHANDRKYKCPCGFKTHRDILGAMNIITAPVIDGNSLSA

SEQ ID NO: 1526 - protein, 458 aa, Thermomonospora cellulosilytica
MVRVKLVKPIKGRSSRVLREEFPHLKSQLPTLWTNSSFVATVGGAPLSEVKRYVEQQKSWQMLTGRRYLLAFTPGQETFAELVGDACRMVWNTGLEQRRAYRRRGAFIGYVEQARQMAEAKKDFPWLAEAPSHTLQQTLRDLEKACKTHGTFKVRWRSKRKNAPSFRFPDPKHIAVERVSRRWGRVRLPKLGWVRFRWTRPLGGMVRNVTVLKDGGRWYISFCVEDGLAESTPNGKPPVGVDRGVAVAVATSDGWMRDREFVTLGEAVRLKRLQQQLARQRKGSARRSATKAKIGRLNARVRARRTDFVAWTANRLTRDHGLVVVEDLKVKNMTASAKGTLEQPGSRVRQKAGLNRSILAKGWGGLLAALEHKARCNGSRIVRVPPAYTSQTCAACGHCAPDNRESQAVFRCRACGHQANADVNAAKNILAAGLAVTGRGDLAAGRSAKRQPPETEAV

SEQ ID NO: 1527 - protein, 464 aa, unidentified
MKLDNNAHSVFSLNYHLVLVVKYRRQIFNDDISDRAKEIFEYIAPNYNIILEEWNHDKDHVQILFRAHPNTEISKFINAYKSASSRLLKKEFPQIRKKLWKEHFWSQSFCLLAKTFGCVRMVYNHWLDRKIRQYEENKTNVTYTACAKEMAEMKKTEEYAFLREVDSISLQQSLRHLDTAFQNFFKQPKTGFPRFKSKKRNKNSYSTVCINSNITISNGYLKLPKIGQVRLKQHRDVPKEYRLRSVTVSQTSSGKYYASILFEYEDQVQEKEIETFLGLDFSMHGLYRDSNGNEPAYPRYYRKAEKKLAREQRRLSKMQKGSNNRRKQRMKVAKLHEKVCNQRKDFLHKQSRQIANAYDCVCVEDLDMKAMSQSLKFGKSVSDNGWGMFTTFLKYKLKEQGKKLVKVDRFFASSQICSACGYKNMKTKDLALRQWDCPQCGTHHDRDINAAINIRNEGMRLVMA

SEQ ID NO: 1528 - protein, 468 aa, Drancourtella sp.
MDKNYIFAEHTNVTHGSGYVYLLQYHIVWVTKYRKPVLVGMVAAETKRHLLETMEQLQMECLAMEVMPDHIHLLVMELIPDDSQRAGFAQQIGNARFMRNQYLNDRIAYYKETRKTLPVDVYKKKYFPKLKEQYSFLTLSDKFALESAIEHVDTAYKNFFEGRAAFPKFASKWKPSGNTYTTKWTGNNIRLEEHDGLPYIKLPKVGLVRFILPKKQTIQTLVPHGTSILSVAVKKKGDRYTASLQLETVVESPVQLNQMSVRDIMAADMGIKLFAIIGGEDWEKEIPNPRWIRIHEKRLRRLQKSLSRKKYDKETHTGSKNWEKAKQKVAAEHRKIANQRKDFQHKLSRRIVDRCSVFCCEDLNIRGMVKNRRLAKEISSASWGQFLTMVKYKMERQGKHFIQVSRWFPSSQTCSRCGFQNTVVKDLVIRSWKCPKCGTYHNRDVNAKNNILAEGIRLLQKNGIIVTV

SEQ ID NO: 1529 - protein, 468 aa, Drancourtella sp.; identical to SEQ ID NO: 1528

SEQ ID NO: 1530 - protein, 471 aa, unidentified
MVDLVTNRNCLYQTAYHVIWCPQYRRAALTGPIAAEVGTLLEAICGERGWPVISKEIQPDHIHLVVSIPPAIAVANAVKVLKGVSARHLLQRFPALKKRLWGGHLWSPSYYVGTAGTLSAADACNRLVPLVQAARCWNRVALHQLGYRALRQQTSLGAQMVCNAIFSVCKAYRSQGALGRIPQDTPVPPLSFHRTSVHFDHRTYTLKDETVSLNTLQGRMRVPMILGDHQRKILTSGLPKEAELVFRAGQWFFNLAVESADGERVASGPVMGVDVGENTLAATSTGRVWGGETLRHRRDQHLALRRRLQSNGSQSATQRLRQVSGKERRRVRHVNHETSKAILEEARRIGAATIVMEDLTHIRDRLRAGRRMRARLHRWAFRQLQGFLEYKARAIGISVVYVNPAYSSQTCSACGQLGTRRKHRFECSCGLRAHADLNASRNLARIGETAVSPRAVVNTPDVGCVACHASP

SEQ ID NO: 1531 - protein, 495 aa, Bacillus thuringiensis
MMNDYRRTKTTISLINYHFVFYPRYIRKIFLNTKVEERFKELVQEICNELDIVIVAMECDTDHVHLFLNTLPTLSPADTMAKIKGVTSKKLREEFPHLQHLPSLWTRSYFVSTAGNVSSETIKHYVESQKTRGVKFVTQTITVKAKLLPTKEQIRLLKQSSSDYIKLINTLVFEMVESKQSTKKSTKDIEANLPSAVKNQAIKDAKSVFSTKVKKNKYKIVPILKRSVCVWNNQNYSFDYTHISIPFMVNGKPTRLKVRTLLIDKHNRNFDLLKHKLGTLRITKKSGKWIAQISVTVPTIEKTGTKILGVDLGLKVPAVAITDDDKVRFFGNGRKNKYMKRKFRSVRKKLGKAKKLNALRQLDDKEQRWMQDQDHKVSREIVDFVTNNTISVIRLKQLTNIRQTARTSRKNEKNLHTWSFFRLAQFIEYKAKLVGIKVEYVTPSYTSQTCPKCTKKNKAQDRKYKCQCGFEKHRDIVGAMNIRYATVVDGNSQSA

SEQ ID NO: 1532 - protein, 495 aa, Bacillus thuringiensis; identical to SEQ ID NO: 1531

SEQ ID NO: 1533 - protein, 510 aa, Desulfofarcimen acetoxidans
MERKTNHCVYNINYHIVFCPKYRRKAITGKVEDAVKQIIQEICNTYGYLRALPPTEYLSLPWLKKKYFWGSGLWSRGYYIGTAGNVSTETFANILKPRNIPGGGEIVSKCKNNQSKKSKGIDILVNKFPVYLTPEQTSLARTLQREAAKVWNTTCIVHRTIYIKHHCWLDEGAMKAFVKGKYGVHSQSAQAIVETYFECCERTGKLREQGVTDWRYPHRRKRFFTVTWKPLGINYEGKMLTLSNGRGRESLILNLPKRLSGAVIKLVQLVWHRNLYWLHVTVEKPALKKVQGGVTAAIDPGEVHAVAITDGKKSLVVSGRLLRSLSRLRNKVLRRLQKAISKTKKGSKQHNKLLAAKYRFLNNIERRIEHVIHTISAIVSKWCFEHNVNTVYIGNPEGVRKKDCGKKHNQRMSQWTFGELRRMLEYKLKRHGIKLISVDERGTSGTCPACAEYTKQTGRIYKCGNCGFAGPHRDMVGASGILDKSVNGKFTKGRKLPEKVEYARLKVKTA

SEQ ID NO: 1534 - protein, 510 aa, unidentified
MGSRRDEHRIHLVVDHLLGCPKRRKPVLVGDVARDCRSLIEAECHDHGWTIEDLAIQPDHVHLFIRVWPMDSAADVLKAVQGVPAHAPRKRYPHLRKTPSLWTRSSFASTAGNVSQETIRRSIGAQKGMEMFKAFVFRLYPSASHRRRLEAVRETCRRFYNTLLRQRKDASELRGVSITKTEQLRLVKVEKDTSPYASGIHSPILQAVVADLDKAFQAFFRRVQAGEEPGYPRFKGRDRFAGFGFKEYGNGFKIDGRRLKLSGIDRIAVRWHRALEGTIKTARISCRAGKGFVSFACAVERPEPLPKTGKDIGVDVGLLRLATLSDGEPVENPRWYRTLLRELRVLGRKISRAVLGGRNRRKLVRRLQRLLAKVANSRKDFLNKFADTLIKRFDRIVLEDLRVAALACGRFALSILDAGRSYLVARLAHKAESAGREVVLVDPAYTSKTCSGCGTVFEHLSLSDRWISCACGVSLDRDHNAAINILRRGRNRPLGAKLLAGGVRPEAAPL

SEQ ID NO: 1535 - protein, 540 aa, unidentified
MRRVPRLRVSTRPFSSGALVPRVECPDPLDRESRRDERRIHLVVDHLIGCPTRRKPVLVGDGARDCRALSEAGCHDHGWTIEDSAIQPDHVHLFIRAWPKDSAADVLEAVQGVPAHELRAKSPHLRETPSLWTRPSFASTAGNVSQGTIRRSVEAQEGMEMFQAFVSRLDPGASHRRRPEAVRETCRRFYNTPLRRRKDASELRGVSITKTEQPRPVEVEKDTSPYASGIHSHILRAVVADLDDAPRASFRRVEAGEEPGYPRFKGRDRFAGFGFKEYGDGFTIDGRRPKLSGIGRIAVRWHRALEGTIETARISCRAGKWSVSLACAVEGPGPLPETGKEIGVDVGLLRLATLSDGAPVEGPRWYRTIPRELRVPRRKISRAVLGGRDRRELVRRLRRSPAEVANARKDFLNKFADELIKRLDRIALEDLRVAAPACGRFALSILDAGRSYLVSRLAHKAESAGREVVLVDPASTSKTCSGCGRVFEHLSPSDRWISCACGVSLDRDHNAAINILQRGRNRPMGAKLSAGRVCPEAAPL

SEQ ID NO: 1536 - protein, 541 aa, unidentified
MEYRRDEHRLHLVVYHHIWCPKRRKPVLVGDLARDCRALIEAKCNDLGWTIEDLAIQPDHVHLFIRVWPKDSAADVLKAVKGVPAHAPRKRYPHLRKTPSLWTRSDFASTAGNVSRETIRRSIEAQKGLEMIRTHILPCTIPRARADELNRASGAIYTGILVAHWRLVRKKGLWLSEASGTRWSDTRTDARMHAHAIDAAQQGFYKACETARGLRQAGSAEAKFPYHRKKFRTTVWKNSGIKRAGDILRLSGGGRTKEEREKRAVKVAIPPPLRDCLRFLEVRLVYDQRARRYTWHVVVENGLKPKPAPGRNVVSVDLGEIHPAVVGDKEHAIVITCRERRHQSQGHAKRLAKIQRAISRKKKDSRRRQRLVRAKARMNAKHRQVLRDIEHKVSREIVKCAAERQAGTIVIGDIRDIADGIDCGAVHNGRMSRWNHGKIRTYVAYKAAAEGIKLPPPVDEAYTTQTCPSCGHRHKPRGRTFRCPSCGLQAHRDIVGQINILSRFLEGDVGKLPAPAEIKHRIPHNLRVMRRCRDTGQGGAL

SEQ ID NO: 1537 - protein, 541 aa, unidentified
MEYRRDEHRLHLVVYHHIWCPKRRKPVLVGDLARDCRALIEAKCNDLGWAIENLAIQPDHAHLFIRVWPKDSAADVLKAVKGVPAHAPRKRYPHLRKTPSLWTRSDFASTAGNVSRETIRRSIEAQKGLEMIRTHILPCTIPRARADELNRASGAIYTGILVAHWRLVRKKGLWLSEASGTRWSDTRTDARMHAHAIDAAQQGFYKACETARGLRQAGIAEAKFPYHRKKFRTTVWKNSGIKRAGDILRLSGGGRTKEEREKRAVKVAIPPPLRDCLRFLEVRLVYDQRARRYTWHVVVENGLKPKPAPGRNVVSVDLGEIHPAVVGDKEHAIVITCRERRHQSQGHAKRLAKIQRAISRKKKDSRRRQRLVRAKARMNAKHRQVLRDIEHKVSREIVKCAAERQAGTIVIGDIRDIADGIDCGAVHNGRMSRWNHGKIRTYVAYKAAAEGIKLPPPVDEAYTTQTCPSCGHRHKPRGRTFRCPSCGLQAHRDIVGQINILSRFLEGDVGKLPAPAEIKHRIPHNLRVMRRCRDTGQGGAL

SEQ ID NO: 1538 - protein, 551 aa, Singulisphaera sp.
MEHRRDEHRIHLVVDHLIGCPTRRKPVLVGDVARGCRALSEAKGNELGWIIENLAIQPDHVHPVVRVWPKDSAADVPKAVKGVTAHELRAKSPHLRKTPSLWTRSSFASTAGNVSQETIRRSIEAQKGMEMIRTHILPCTIPRARADELNRASGEIYTGILVAHWRLVRKKRLWLSEGAGRRWSDTRTDARMHAHSIDAAQEGFYKACDVTRALRRAGSAEAKFPYRRKKFRTTVWKTSGIQREGDILRLSGGGRTKKERDERAVVVPIPERLRDCLRFLEVRLVYDKYARRYTWHVVVENGLKPKPAPGANVVSVDLGEIHPAVVGDTERAIVVTCRERRSRSQGHAKRLATISRAIARKAKTSRRRRRLVRARVRMKAKHARILRDIEHKVSREVVAFAAERQAGTIVIGDVRDIADGVDCGAEHNGRMSRLNHGKIRAYIEYKAAAEGIKVELVDEHHTTKTCPGCGQRHKPRGRTYRCPSCRFQAHRDVVGQVNILSRFLEGDVGRIPAPADVKYRIPRNVRVMRRRCGHQPGSNPRSPGATPWNLG

SEQ ID NO: 1539 - protein, 565 aa, unidentified
MRRVPRLRVSTRPFSSGALVPRVECPDPLDRESRRDERRIHLVVDHLIGCPTRRKPVLVGDGARDCRALSEAGCHDHGWTIEDSAIQPDHVHLFIRAWPKDSAADVLKAVQGVPAHELRAKSPHLRETPSLWTRPSFASTAGNVSQGTIRRSVEAQEGMEMFQAFVSRLDPGASHRRRPEAVRETCRRFYNTPLRRRKDASELRGVSITKTEQPRPVEVEKDTSPYASGIHSHILRAVVADLDDAPRASFRRVEAGEEPGYPRFKGRDRFAGFGFKEYGDGFTIDGRRPKLSGIGRIAVRWHRALEGTIETARISCRAGKWSVSLACAVEGPGPLPETGKEIGVDVGLLRLATLSDGAPVEGPRWYRTIPRELRVPRRKISRAVLGGRDRRELVRRLRRSPAEVANARKDFLNKFADELIKRLDRIALEDLRVAAPACGRFALSILDAGRSYLVSRLAHKAESAGREVVLVDPASTSKTCSGCGRVFEHLSPSDRWISCACGVSLDRDHNAAINILQRGRNRPLGAKPLAGGVRPEAAPLEWVRSVTGRLSRRRGSRRGCGRRSY

SEQ ID NO: 1540 - RNA, 58 nt, synthetic construct
  source 1..58: mol_type = other RNA
tgcgaagtgagaatcacgcgactttagtcgtgtgaggttcaagagtcccttggcgccc

SEQ ID NO: 1541 - protein, 5 aa, synthetic construct
GLDAG

SEQ ID NO: 1542 - protein, 5 aa, synthetic construct
GIDVG

SEQ ID NO: 1543 - protein, 5 aa, synthetic construct
GLDTS

SEQ ID NO: 1544 - protein, 5 aa, synthetic construct
KVTLS

SEQ ID NO: 1545 - protein, 5 aa, synthetic construct
GVYVG

SEQ ID NO: 1546 - protein, 5 aa, synthetic construct
RILLN

SEQ ID NO: 1547 - protein, 5 aa, synthetic construct
KVLLN

SEQ ID NO: 1548 - protein, 5 aa, synthetic construct
KIVLS

SEQ ID NO: 1549 - protein, 5 aa, synthetic construct
TIILN

SEQ ID NO: 1550 - protein, 5 aa, synthetic construct
VIEDL

SEQ ID NO: 1551 - protein, 5 aa, synthetic construct
CIEDL

SEQ ID NO: 1552 - protein, 5 aa, synthetic construct
VIENL

SEQ ID NO: 1553 - protein, 5 aa, synthetic construct
SVDTK

SEQ ID NO: 1554 - protein, 5 aa, synthetic construct
VIADF

SEQ ID NO: 1555 - protein, 5 aa, synthetic construct
EVVNV

SEQ ID NO: 1556 - protein, 5 aa, synthetic construct
ELVNL

SEQ ID NO: 1557 - protein, 5 aa, synthetic construct
EVLSL

SEQ ID NO: 1558 - protein, 5 aa, synthetic construct
EVVNL

SEQ ID NO: 1559 - protein, 5 aa, synthetic construct
NADVN

SEQ ID NO: 1560 - protein, 5 aa, synthetic construct
NADIN

SEQ ID NO: 1561 - protein, 5 aa, synthetic construct
NADVV

SEQ ID NO: 1562 - protein, 5 aa, synthetic construct
ESAWT

SEQ ID NO: 1563 - DNA, 31 bp, synthetic construct
  source 1..31: mol_type = other DNA
tccggtccatatgaagaatatggaaaatggt

SEQ ID NO: 1564 - DNA, 15 bp, synthetic construct
  source 1..15: mol_type = other DNA
tccgggccatcttaa

SEQ ID NO: 1565 - DNA, 26 bp, synthetic construct
  source 1..26: mol_type = other DNA
gtcaaatgaagaatatggaaaatggt

SEQ ID NO: 1566 - DNA, 36 bp, synthetic construct
  source 1..36: mol_type = other DNA
tcattgagaatgtcaacgtctggtccaatactaatt

SEQ ID NO: 1567 - DNA, 36 bp, synthetic construct
  source 1..36: mol_type = other DNA
gcgtggaggatgtcaatgaggcgcttgttcttctga

SEQ ID NO: 1568 - DNA, 36 bp, synthetic construct
  source 1..36: mol_type = other DNA
gcgtggaggatgtcaacaaacaggttgaattaactc

SEQ ID NO: 1569 - DNA, 36 bp, synthetic construct
  source 1..36: mol_type = other DNA
tgggggaggatgtcaaatgaagaatatggaaaatgg

SEQ ID NO: 1570 - DNA, 36 bp, synthetic construct
  source 1..36: mol_type = other DNA
caggggaggatgtcaagttccgtcgaatctggaaat

SEQ ID NO: 1571 - DNA, 16 bp, synthetic construct
  source 1..16: mol_type = other DNA
cgtctggtccaatact

SEQ ID NO: 1572 - DNA, 31 bp, synthetic construct
  source 1..31: mol_type = other DNA
aaggttggtttggaccagacgataacacctt

SEQ ID NO: 1573 - DNA, 31 bp, synthetic construct
  source 1..31: mol_type = other DNA
aaggtgttatcgtctggtccaaaccaacctt

SEQ ID NO: 1574 - DNA, 27 bp, synthetic construct
  source 1..27: mol_type = other DNA
ttatcgtctgtcgtaaaacaaccttta

SEQ ID NO: 1575 - DNA, 16 bp, synthetic construct
  source 1..16: mol_type = other DNA
gatgaattttaagcgg

SEQ ID NO: 1576 - DNA, 29 bp, synthetic construct
  source 1..29: mol_type = other DNA
tgtcaacgtctggtccaaaccaacctctc

SEQ ID NO: 1577 - DNA, 21 bp, synthetic construct
  source 1..21: mol_type = other DNA
gttatcgtctgtcgtaaaaca

SEQ ID NO: 1578 - DNA, 21 bp, synthetic construct
  source 1..21: mol_type = other DNA
gttatcgtctggtccaaacca

SEQ ID NO: 1579 - DNA, 12 bp, synthetic construct
  source 1..12: mol_type = other DNA
gttatcgtgtgg

SEQ ID NO: 1580 - protein, 5 aa, synthetic construct
GIDLG

SEQ ID NO: 1581 - protein, 5 aa, synthetic construct
GVDLG

SEQ ID NO: 1582 - protein, 5 aa, synthetic construct
GLDLG

SEQ ID NO: 1583 - protein, 5 aa, synthetic construct
GYDLN

SEQ ID NO: 1584 - protein, 5 aa, synthetic construct
GICSS

SEQ ID NO: 1585 - protein, 5 aa, synthetic construct
GITLG

SEQ ID NO: 1586 - protein, 5 aa, synthetic construct
GIAYD

SEQ ID NO: 1587 - protein, 5 aa, synthetic construct
GIAYH

SEQ ID NO: 1588 - protein, 5 aa, synthetic construct
GIAYC

SEQ ID NO: 1589 - protein, 5 aa, synthetic construct
AIVYD

SEQ ID NO: 1590 - protein, 5 aa, synthetic construct
RLSFD

SEQ ID NO: 1591 - protein, 5 aa, synthetic construct
EIAYD

SEQ ID NO: 1592 - protein, 5 aa, synthetic construct
CIEDL

SEQ ID NO: 1593 - protein, 5 aa, synthetic construct
VVEDL

SEQ ID NO: 1594 - protein, 5 aa, synthetic construct
VIEDL

SEQ ID NO: 1595 - protein, 5 aa, synthetic construct
VGENL

SEQ ID NO: 1596 - protein, 5 aa, synthetic construct
CIEKA

SEQ ID NO: 1597 - protein, 5 aa, synthetic construct
CIEDI

SEQ ID NO: 1598 - protein, 5 aa, synthetic construct
FVESI

SEQ ID NO: 1599 - protein, 5 aa, synthetic construct
FVESF

SEQ ID NO: 1600 - protein, 4 aa, synthetic construct
YLEE

SEQ ID NO: 1601 - protein, 5 aa, synthetic construct
YLEQI

SEQ ID NO: 1602 - protein, 5 aa, synthetic construct
EIVEP

SEQ ID NO: 1603 - protein, 5 aa, synthetic construct
IITKP

SEQ ID NO: 1604 - protein, 5 aa, synthetic construct
DRDIN

SEQ ID NO: 1605 - protein, 5 aa, synthetic construct
IRDYN

SEQ ID NO: 1606 - protein, 5 aa, synthetic construct
NSEYL

SEQ ID NO: 1607 - protein, 5 aa, synthetic construct
DPETA

SEQ ID NO: 1608 - DNA, 16 bp, synthetic construct
  source 1..16: mol_type = other DNA
ttataaatagaagaac

SEQ ID NO: 1609 - DNA, 28 bp, synthetic construct
  source 1..28: mol_type = other DNA
gtccacggacaagtggttcaccatgcgt

SEQ ID NO: 1610 - DNA, 12 bp, synthetic construct
  source 1..12: mol_type = other DNA
aaatagaagaac

SEQ ID NO: 1611 - DNA, 23 bp, synthetic construct
  source 1..23: mol_type = other DNA
ctaattattaatgatcaaaatac

SEQ ID NO: 1612 - DNA, 13 bp, synthetic construct
  source 1..13: mol_type = other DNA
ataaatagaagaa

SEQ ID NO: 1613 - DNA, 24 bp, synthetic construct
  source 1..24: mol_type = other DNA
ccacggacaagtggttcaccatgc

SEQ ID NO: 1614 - skipped

SEQ ID NO: 1615 - DNA, 31 bp, synthetic construct
  source 1..31: mol_type = other DNA
ttccatagcaataaataattattaaattctg

SEQ ID NO: 1616 - DNA, 31 bp, synthetic construct
  source 1..31: mol_type = other DNA
cagaatttaataattatttattgctatggaa

SEQ ID NO: 1617 - DNA, 33 bp, synthetic construct
  source 1..33: mol_type = other DNA
ttgaatttttaataattattatttaaaattgca

SEQ ID NO: 1618 - DNA, 33 bp, synthetic construct
  source 1..33: mol_type = other DNA
tgcaattttaaataataattattaaaaattcaa

SEQ ID NO: 1619 - DNA, 16 bp, synthetic construct
  source 1..16: mol_type = other DNA
taattatgaaaaacca

SEQ ID NO: 1620 - DNA, 93 bp, synthetic construct
  source 1..93: mol_type = other DNA
tgttgattttttaataattattcattaaactcttaaacaacttcagaaaatattaattattctgaaaattccaataaaggggtacgtaaaatg

SEQ ID NO: 1621 - DNA, 31 bp, synthetic construct
  source 1..31: mol_type = other DNA
ttgattttaataattattcttttcgtacgtc

SEQ ID NO: 1622 - DNA, 16 bp, synthetic construct
  source 1..16: mol_type = other DNA
taattatgaaaaacca

SEQ ID NO: 1623 - DNA, 31 bp, synthetic construct
  source 1..31: mol_type = other DNA
cattgtttaataattatcaccgaaaaacaca

SEQ ID NO: 1624 - DNA, 16 bp, synthetic construct
  source 1..16: mol_type = other DNA
taattatgaaaaacca

SEQ ID NO: 1625 - DNA, 31 bp, synthetic construct
  source 1..31: mol_type = other DNA
ccttctttaataattatacggtcaatcacaa

SEQ ID NO: 1626 - DNA, 16 bp, synthetic construct
  source 1..16: mol_type = other DNA
taattatgaaaaacca

SEQ ID NO: 1627 - DNA, 31 bp, synthetic construct
  source 1..31: mol_type = other DNA
gaatttttaataattattatttaaaattgca

SEQ ID NO: 1628 - DNA, 16 bp, synthetic construct
  source 1..16: mol_type = other DNA
taattatgaaaaacca

SEQ ID NO: 1629 - DNA, 31 bp, synthetic construct
  source 1..31: mol_type = other DNA
taaactttaataattataacaatagctaaat

SEQ ID NO: 1630 - DNA, 16 bp, synthetic construct
  source 1..16: mol_type = other DNA
taattatgaaaaacca

SEQ ID NO: 1631 - DNA, 31 bp, synthetic construct
  source 1..31: mol_type = other DNA
atttttttaataattattattctatatcaac

SEQ ID NO: 1632 - DNA, 16 bp, synthetic construct
  source 1..16: mol_type = other DNA
taattatgaaaaacca

SEQ ID NO: 1633 - DNA, 31 bp, synthetic construct
  source 1..31: mol_type = other DNA
tattctttaataattattcttccatgatcac

SEQ ID NO: 1634 - DNA, 16 bp, synthetic construct
  source 1..16: mol_type = other DNA
taattatgaaaaacca

SEQ ID NO: 1635 - DNA, 21 bp, synthetic construct
  source 1..21: mol_type = other DNA
gttatcgtctgaccactcaca

SEQ ID NO: 1636 - DNA, 21 bp, synthetic construct
  source 1..21: mol_type = other DNA
gttatcgtctggtccaaacca

SEQ ID NO: 1637 - DNA, 21 bp, synthetic construct
  source 1..21: mol_type = other DNA
gttatcgtctgtcgtaaaaca

SEQ ID NO: 1638 - DNA, 21 bp, synthetic construct
  source 1..21: mol_type = other DNA
gttatcgtctggtccaaacca

SEQ ID NO: 1639 - DNA, 21 bp, synthetic construct
  source 1..21: mol_type = other DNA
tttaaggacaacatcgccgta

SEQ ID NO: 1640 - DNA, 21 bp, synthetic construct
  source 1..21: mol_type = other DNA
tttaaggacaagtggttcacc

SEQ ID NO: 1641 - DNA, 21 bp, synthetic construct
  source 1..21: mol_type = other DNA
tttaaggataagaatatgcct

SEQ ID NO: 1642 - DNA, 21 bp, synthetic construct
  source 1..21: mol_type = other DNA
tttaaggacaagtggttcacc

SEQ ID NO: 1643 - DNA, 21 bp, synthetic construct
  source 1..21: mol_type = other DNA
tttaaggacaacacttaaggg

SEQ ID NO: 1644 - DNA, 21 bp, synthetic construct
  source 1..21: mol_type = other DNA
tttaaggacaagtggttcacc

SEQ ID NO: 1645 - DNA, 12 bp, synthetic construct
  source 1..12: mol_type = other DNA
acgaattttaag

SEQ ID NO: 1646 - DNA, 13 bp, synthetic construct
  source 1..13: mol_type = other DNA
agtgaattattgg

SEQ ID NO: 1647 - DNA, 12 bp, synthetic construct
  source 1..12: mol_type = other DNA
atgaattttaag

SEQ ID NO: 1648 - DNA, 24 bp, synthetic construct
  source 1..24: mol_type = other DNA
aacgtctggtccaatactttacaa

SEQ ID NO: 1649 - DNA, 24 bp, synthetic construct
  source 1..24: mol_type = other DNA
aacgtctggtccaatactaattgg

SEQ ID NO: 1650 - DNA, 24 bp, synthetic construct
  source 1..24: mol_type = other DNA
aacgtctggtccaatactttacaa

SEQ ID NO: 1651 - RNA, 113 nt, synthetic construct
  source 1..113: mol_type = other RNA
attttaagcggcagggcatgtcgtttctgcttgtggaggaaggttaattcaacttccgttgaagcaagaatctcttgattgttattgagaatgtcaannnnnnnnnnnnnnnn

SEQ ID NO: 1652 - DNA, 97 bp, synthetic construct
  source 1..97: mol_type = other DNA
attttaagcggcagggcatgtcgtttctgcttgtggaggaaggttaattcaacttccgttgaagcaagaatctcttgattgttattgagaatgtcaa

SEQ ID NO: 1653 - DNA, 96 bp, synthetic construct
  source 1..96: mol_type = other DNA
ataattggcggcagggcatgccgtcgttacctgtggagggttctttcaaggactcgctgaagcaggaaacctgatattttcaaggcaggaagtcaa

SEQ ID NO: 1654 - DNA, 102 bp, synthetic construct
  source 1..102: mol_type = other DNA
tttattggcggcagggcttgccgtcactgcctgtggaggagaggtgtcaaaagactctccgatgaagcaggaaccctaagtcagcaacgactgggaagtcaa

SEQ ID NO: 1655 - DNA, 95 bp, synthetic construct
  source 1..95: mol_type = other DNA
attattggcggcagggcatgtcgtttcagtttgtggaggaaggtttttttaacttctgttgaagcaaaaatctcggatgtcattgagaatgtcaa

SEQ ID NO: 1656 - DNA, 98 bp, synthetic construct
  source 1..98: mol_type = other DNA
attgctggcggcagggcatgtcgtgtcagtttgtggaggggggttatttcaacttccgatgaagcaaaaatctcggttattagtactgagaatgtcaa

SEQ ID NO: 1657 - DNA, 96 bp, synthetic construct
  source 1..96: mol_type = other DNA
atttatgcggcagggcatgtcgtttctgcttgtcgaggaaggttacttaaacttccgttgaagcaagaatctcatgattgcatctgagagtgtcaa

SEQ ID NO: 1658 - DNA, 139 bp, synthetic construct
  source 1..139: mol_type = other DNA
gattttagcggcagggcatgccgttattgcctgtggaggagcggatttgttaggccatccgatgaaacaggaaccctcagaagatggcaaaagcaccgttatcttactgtaagctcgggttatccgcgccggatgtcaa

SEQ ID NO: 1659 - DNA, 16 bp, synthetic construct
  source 1..16: mol_type = other DNA
cgtctggtccaatact

SEQ ID NO: 1660 - DNA, 70 bp, synthetic construct
  source 1..70: mol_type = other DNA
ctaaaaaaaatgacgcgatcctgaaaaaaaatctaaaggttgttttggaccagacgataacaccattgac

SEQ ID NO: 1661 - DNA, 70 bp, synthetic construct
  source 1..70: mol_type = other DNA
gctaaaaaaatgatgcgatcctgaaaaaaaatctaaaggttgttttggaccagacgataacacctttgac

SEQ ID NO: 1662 - DNA, 70 bp, synthetic construct
  source 1..70: mol_type = other DNA
ctaaaaaaattaacgcgatcctgaaaaaatatctaaaggttggtttggaccagacgataacacctttgac

SEQ ID NO: 1663 - DNA, 70 bp, synthetic construct
  source 1..70: mol_type = other DNA
ctaaaaaaattaacgcgatcctgaaaaaaaatctaaaggttgttttggaccagacgataacacctttgac

SEQ ID NO: 1664 - DNA, 70 bp, synthetic construct
  source 1..70: mol_type = other DNA
ctaacaaaaaatggctgtttttgaaaaaaattctaaaggttgttttacgacagacgataacagggttgac

SEQ ID NO: 1665 - DNA, 38 bp, synthetic construct
  source 1..38: mol_type = other DNA
ttgccgatagtgaacatagcggcgcaggagccaaatgg

SEQ ID NO: 1666 - DNA, 160 bp, synthetic construct
  source 1..160: mol_type = other DNA
cagttctgtttcgcttggggcctgaaagcagatggggacggttttcactttttcttctaaaggtccagaatactttgccgatagtgaacatagcggcgcaggagccaaatggtggaagccgtaaacttaatttaagttcagtcaaataggaattactatc

SEQ ID NO: 1667 - DNA, 161 bp, synthetic construct
  source 1..161: mol_type = other DNA
caactatctttcgtttgatgcctgaaagcagatggggatggtttttcactttttcttctaaaggtccagagtacgttgccgatagtgaacatagcggcgcaggagccaaatggtggaagccgtaaacttaatttaagttcagtcaaataggaattactatc

SEQ ID NO: 1668 - DNA, 169 bp, synthetic construct
  source 1..169: mol_type = other DNA
taggtatgtacgattcaggataaacaatttataaaacagtaggatattgtttttttgttttttttctaaaggatctgcaatggttgccgatagtaaatttagcggcgcaagagcctagtggtggaagccgtaaacttaaattacgaccagtcaaacaggaattactatc

SEQ ID NO: 1669 - DNA, 167 bp, synthetic construct
  source 1..167: mol_type = other DNA
gtattataaatttttcaagaaatacaacgcgtaaattatttcgtttaactttgctatttttttctaaaggttccgaagggcttgccgatagtaaattcaacggcgcaggagcccaaaggtggaagccgtaaacttaaattacgaccagtcaaacaggaattgtaatc

SEQ ID NO: 1670 - DNA, 166 bp, synthetic construct
  source 1..166: mol_type = other DNA
gtattttaaatttttcaagaaatacaatgcgtaaattatttcgtttaactttgctatttttttctaaaggttccgaagggcttgccgatagtaattcaacggcgcaggagcccaaaggtggaagccgtaaacttaaattacgaccagttaaacaggaattgtaatc

SEQ ID NO: 1671 - DNA, 169 bp, synthetic construct
  source 1..169: mol_type = other DNA
taggtatgtacgattcaggataaacaagttataaaacagcaggatattgtttttttattttttttctaaaggatctgcaatggttgccgatagtaaatttagcggcgcaagagcctagtggtggaagccgtaaacttaaattacgaccagtcaaacaggaacaactatc

SEQ ID NO: 1672 - RNA, 36 nt, synthetic construct
  source 1..36: mol_type = other RNA
gcgtggaggatgtcaatgaggcgcttgttcttctga

SEQ ID NO: 1673 - RNA, 36 nt, synthetic construct
  source 1..36: mol_type = other RNA
gcgtggaggatgtcaacaaacaggttgaattaactc

SEQ ID NO: 1674 - RNA, 36 nt, synthetic construct
  source 1..36: mol_type = other RNA
tgggggaggatgtcaaatgaagaatatggaaaatgg

SEQ ID NO: 1675 - RNA, 36 nt, synthetic construct
  source 1..36: mol_type = other RNA
caggggaggatgtcaagttccgtcgaatctggaaat

SEQ ID NO: 1676 - RNA, 36 nt, synthetic construct
  source 1..36: mol_type = other RNA
ccgcgccggatgtcaacgtctgcccttaactttgag

SEQ ID NO: 1677 - RNA, 36 nt, synthetic construct
  source 1..36: mol_type = other RNA
caaggcaggaagtcaacgtctggttactttaacact

SEQ ID NO: 1678 - RNA, 36 nt, synthetic construct
  source 1..36: mol_type = other RNA
acgactgggaagtcaacgtctggtcatttttaaaaa

SEQ ID NO: 1679 - RNA, 36 nt, synthetic construct
  source 1..36: mol_type = other RNA
tcattgagaatgtcaacgtctggtccaatactaatt

SEQ ID NO: 1680 - RNA, 36 nt, synthetic construct
  source 1..36: mol_type = other RNA
gtactgagaatgtcaacgtctggtcaatactttggc

SEQ ID NO: 1681 - RNA, 36 nt, synthetic construct
  source 1..36: mol_type = other RNA
catctgagagtgtcaacgtctggtccaatatgttta

SEQ ID NO: 1682 - RNA, 36 nt, synthetic construct
  source 1..36: mol_type = other RNA
ttattgagaatgtcaacgtctggtccaatactttac

SEQ ID NO: 1683 - RNA, 36 nt, synthetic construct
  source 1..36: mol_type = other RNA
gtggtgagtagttcacctcaaaccactcttcagata

SEQ ID NO: 1684 - RNA, 35 nt, synthetic construct
  source 1..35: mol_type = other RNA
agtggagcagttcactagtaagaaatctcttagtg

SEQ ID NO: 1685 - RNA, 36 nt, synthetic construct
  source 1..36: mol_type = other RNA
tgccgatgtagttcatcacctatgctttacagtgac

SEQ ID NO: 1686 - RNA, 36 nt, synthetic construct
  source 1..36: mol_type = other RNA
gtgaatggtagttgactctttattaactctatcttt

SEQ ID NO: 1687 - RNA, 36 nt, synthetic construct
  source 1..36: mol_type = other RNA
cattgggacagtccactaattattaatgatcaaaat

SEQ ID NO: 1688 - RNA, 36 nt, synthetic construct
  source 1..36: mol_type = other RNA
actagaaatagttcactaattattagttaatgaaaa

SEQ ID NO: 1689 - RNA, 36 nt, synthetic construct
  source 1..36: mol_type = other RNA
tttcagagaagctcactaattatgacaaaccaaaaa

SEQ ID NO: 1690 - RNA, 36 nt, synthetic construct
  source 1..36: mol_type = other RNA
ttgaagaaaagctcactaattatgacaaaccaataa

SEQ ID NO: 1691 - RNA, 36 nt, synthetic construct
  source 1..36: mol_type = other RNA
taggaatattgttcactaattataaagaaccgtaaa

SEQ ID NO: 1692 - RNA, 36 nt, synthetic construct
  source 1..36: mol_type = other RNA
taggaaccacgttcactaattatgattaaccagcaa

SEQ ID NO: 1693 - RNA, 36 nt, synthetic construct
  source 1..36: mol_type = other RNA
taggaaaagtgcccactaattatgaaaaaccacaaa

SEQ ID NO: 1694 - RNA, 36 nt, synthetic construct
  source 1..36: mol_type = other RNA
actaattatgattaaccattccggcttcttttaaag

SEQ ID NO: 1695 - DNA, 14 bp, synthetic construct
  source 1..14: mol_type = other DNA
ttaaaaaaataact

SEQ ID NO: 1696 - DNA, 22 bp, synthetic construct
  source 1..22: mol_type = other DNA
ccacggacaagtggttcaccat

SEQ ID NO: 1697 - DNA, 14 bp, synthetic construct
  source 1..14: mol_type = other DNA
aacagaagctagaa

SEQ ID NO: 1698 - DNA, 25 bp, synthetic construct
  source 1..25: mol_type = other DNA
tcacggacaagtggttcaccatgcg

SEQ ID NO: 1699 - DNA, 12 bp, synthetic construct
  source 1..12: mol_type = other DNA
gttatcgtctgg

SEQ ID NO: 1700 - DNA, 12 bp, synthetic construct
  source 1..12: mol_type = other DNA
tttaaggacaag

SEQ ID NO: 1701 - DNA, 31 bp, synthetic construct
  source 1..31: mol_type = other DNA
gtaattttaactcaaaccactcttcagatac

SEQ ID NO: 1702 - DNA, 31 bp, synthetic construct
  source 1..31: mol_type = other DNA
gtatatttaatagtaagaaatctcttagtgc

SEQ ID NO: 1703 - DNA, 31 bp, synthetic construct
  source 1..31: mol_type = other DNA
tacattttatcacctatgctttacagtgaca

SEQ ID NO: 1704 - DNA, 31 bp, synthetic construct
  source 1..31: mol_type = other DNA
atctttttattctttattaactctatcttta

SEQ ID NO: 1705 - protein, 5 aa, synthetic construct
ALDPG

SEQ ID NO: 1706 - protein, 5 aa, synthetic construct
GLDLG

SEQ ID NO: 1707 - protein, 5 aa, synthetic construct
GVDVG

SEQ ID NO: 1708 - protein, 5 aa, synthetic construct
GVDLG

SEQ ID NO: 1709 - protein, 5 aa, synthetic construct
ANDLG

SEQ ID NO: 1710 - protein, 5 aa, synthetic construct
LGDMG

SEQ ID NO: 1711 - protein, 5 aa, synthetic construct
AADMG

SEQ ID NO: 1712 - protein, 5 aa, synthetic construct
GLDFS

SEQ ID NO: 1713 - protein, 5 aa, synthetic construct
  VARIANT 2: note = x is glycine (Gly), alanine (Ala), valine (Val), leucine (Leu), isoleucine (Ile), proline (Pro), phenylalanine (Phe), methionine (Met), or tryptophan (Trp)
SXDLG

SEQ ID NO: 1714 - protein, 5 aa, synthetic construct
GVDRG

SEQ ID NO: 1715 - protein, 17 aa, synthetic construct
KWCFEHNVNTVYIGNPE

SEQ ID NO: 1716 - protein, 13 aa, synthetic construct
SRYWGIAFEDLTI

SEQ ID NO: 1717 - protein, 17 aa, synthetic construct
EEARRIGAATIVMEDLT

SEQ ID NO: 1718 - protein, 17 aa, synthetic construct
DFVTNNTISVIRLKQLT

SEQ ID NO: 1719 - protein, 12 aa, synthetic construct
KENQLIFSENLN

SEQ ID NO: 1720 - protein, 12 aa, synthetic construct
QKYVLICIEDLQ

SEQ ID NO: 1721 - protein, 12 aa, synthetic construct
DRCSVFCCEDLN

SEQ ID NO: 1722 - protein, 13 aa, synthetic construct
NAYDCVCVEDLDI

SEQ ID NO: 1723 - protein, 17 aa, synthetic construct
AFAAERQAGTIVIGDVR

SEQ ID NO: 1724 - protein, 17 aa, synthetic construct
KCAAERQAGTIVIGDIR

SEQ ID NO: 1725 - protein, 12 aa, synthetic construct
KRLDRIALEDLR

SEQ ID NO: 1726 - protein, 12 aa, synthetic construct
RDHGLVVVEDLK

SEQ ID NO: 1727 - protein, 17 aa, synthetic construct
NFAKTNKVKTIQLEELA

SEQ ID NO: 1728 - protein, 12 aa, synthetic construct
ADHDLIVVEKLN

SEQ ID NO: 1729 - protein, 12 aa, synthetic construct
KRFDRIVLEDLR

SEQ ID NO: 1730 - protein, 5 aa, synthetic construct
HRDMV

SEQ ID NO: 1731 - protein, 5 aa, synthetic construct
SGHKP

SEQ ID NO: 1732 - protein, 5 aa, synthetic construct
HADLN

SEQ ID NO: 1733 - protein, 5 aa, synthetic construct
HRDIV

SEQ ID NO: 1734 - protein, 5 aa, synthetic construct
DRDEN

SEQ ID NO: 1735 - protein, 5 aa, synthetic construct
DRDLN

SEQ ID NO: 1736 - protein, 5 aa, synthetic construct
NRDVN

SEQ ID NO: 1737 - protein, 5 aa, synthetic construct
DRDIN

SEQ ID NO: 1738 - protein, 5 aa, synthetic construct
HRDVV

SEQ ID NO: 1739 - protein, 5 aa, synthetic construct
DRDHN

SEQ ID NO: 1740 - protein, 5 aa, synthetic construct
NADVN

SEQ ID NO: 1741 - protein, 5 aa, synthetic construct
HRDIL

SEQ ID NO: 1742 - protein, 5 aa, synthetic construct
HADVN

SEQ ID NO: 1743 - protein, 5 aa, synthetic construct
NTYGY

SEQ ID NO: 1744 - protein, 22 aa, synthetic construct
GERGWPVISKEIQPDHIHLVVS

SEQ ID NO: 1745 - protein, 22 aa, synthetic construct
NELDIVIVAMECDTDHVHLFLN

SEQ ID NO: 1746 - protein, 20 aa, synthetic construct
EQLQMECLAMEVMPDHIHLL

SEQ ID NO: 1747 - protein, 22 aa, synthetic construct
PNYNIILEEWNHDKDHVQILFR

SEQ ID NO: 1748 - protein, 22 aa, synthetic construct
NELGWIIENLAIQPDHVHPVVR

SEQ ID NO: 1749 - protein, 22 aa, synthetic construct
AEHGWTIETLAIRPDHVHLFVR

SEQ ID NO: 1750 - protein, 22 aa, synthetic construct
NDLGWTIEDLAIQPDHVHLFIR

SEQ ID NO: 1751 - protein, 22 aa, synthetic construct
NDLGWAIENLAIQPDHAHLFIR

SEQ ID NO: 1752 - protein, 22 aa, synthetic construct
HDHGWTIEDSAIQPDHVHLFIR

SEQ ID NO: 1753 - protein, 22 aa, synthetic construct
KEKEVELFEMEVMPEHIHLLLE

SEQ ID NO: 1754 - protein, 18 aa, synthetic construct
AEHGWPIVALEIEPDQVH

SEQ ID NO: 1755 - protein, 22 aa, synthetic construct
HDHGWTIEDLAIQPDHVHLFIR

SEQ ID NO: 1756 - protein, 11 aa, synthetic construct
STETFANILKP

SEQ ID NO: 1757 - protein, 11 aa, synthetic construct
SAKVVEAYIAA

SEQ ID NO: 1758 - protein, 7 aa, synthetic construct
SAADACN

SEQ ID NO: 1759 - protein, 11 aa, synthetic construct
SSETIKHYVES

SEQ ID NO: 1760 - protein, 11 aa, synthetic construct
TEEQIRDIFKV

SEQ ID NO: 1761 - protein, 11 aa, synthetic construct
PLKLSKSTLKH

SEQ ID NO: 1762 - protein, 11 aa, synthetic construct
SQETIRRSIEA

SEQ ID NO: 1763 - protein, 11 aa, synthetic construct
SRETIRRSIEA

SEQ ID NO: 1764 - protein, 11 aa, synthetic construct
SQGTIRRSVEA

SEQ ID NO: 1765 - protein, 11 aa, synthetic construct
PLSEVKRYVEQ

SEQ ID NO: 1766 - protein, 11 aa, synthetic construct
SQGTIRRSVEA

SEQ ID NO: 1767 - protein, 11 aa, synthetic construct
SQETIRRSIGA

SEQ ID NO: 1768 - protein, 373 aa, unidentified
MNKAYKYRIIPNREQEELIKKTFGCVRFVYNQMLSNRKEIYEEYKHDKLALKQEKYLTPANYKGEFPWLKEVDSLALANAQLNLNTAYGNFFRDHSIGFPKFKSKHRDKKSYTTNNQKGTIRLMDNSHIRVPKLKDIKIKMHRQLPENSVIKSATISQTAIGKYYISILVEFDIQTDLVMATKETTLGLDYSSKELYVDNEGDRGNYPRYYRQAEEKLQKEQRKLSKRKKGSQNREKQRQKVAKLHEKVANQRKDFLHKKSRQIANAYDVVVIEDLNMRSMAQGLKLAKSTNDNGFGMLKTFLEYKLKEQGKQLVVIDKWYPSSKLCRFCNRVNKELTLSERVWTCFCGEVIERDINAAINIRNEGCRIIGVA

SEQ ID NO: 1769 - protein, 373 aa, unidentified
MNKAYKYRIIPNREQEELIKKTFGCVRFVYNQMLSNRKEIYEEYKHDKLALKQEKYLTPANYKGEFPWLKEVDSLALANAQLNLNTAYGNFFRDHSIGFPKFKSKHRDKKSYTTNNQKGTIRLMDNSHIRVPKLKDIKIKMHRQLPENSVIKSATISQTATGKYYISILVEFDIQTDLVMATKETTLGLDYSSKELYVDNEGDRGNYPRYYRQAEEKLQKEQRKLSKRKKGSQNREKQRQKVAKLHEKVANQRKDFLHKKSRQIANAYDVVVIEDLNMRSMAQGLKLAKSTNDNGFGMLKTFLEYKLKEQGKQLVVIDKWYPSSKLCRFCNRVNKELTLSERVWTCSCGEVIERDINAAINIRNEGCRIIGVA

SEQ ID NO: 1770 - protein, 373 aa, unidentified
MNKAYKYRIIPNREQEELIKKTFGCVRFIYNQMLSNRKEIYEKYKHDKLALKQQKYLTPANYKGEFPWLKEVDSLALANAQLNLNTAYGNFFRDHSIGFPKFKSKHRDKKSYTTNNQKGTIRLVDNSHIRVPKLKGVKIKMHRQLPEDSVIKSATISETATGKYYISILVEFDIQIDLVMATKETTLGLDYSSKELYVDNEGDIGNYPRYYRQAEAKLKKEQRKLSKRKKGSQNREKQRQKVAKLHEKVANQRKDFLHKKSRQIANAYDAIVIEDLNMRSMAQGLKLAKSTNDNGFGMLRTFLEYKLKEQGKQLVVINKWYPSSKLCRFCNRVNRDLTLSERVWTCFCGEVIERDINAAINIRNEGCRIIGVA

SEQ ID NO: 1771 - protein, 402 aa, unidentified
MKRLQAFKFQLRPDGQQEREMRRFTGSCRFVFNRALALQNENYEAGNKFIPYTNMASWLVEWKNSPEMQWLKDAPSQPLQQSLKDLERAYKNFFQKRAAFPRFKKRGQNDAFRYPQGVKLDQKNSRIFLPKLGWLRYRNSRQVTGIVKNVTVSQSCGKWYISIQTESEVSTPVHPSASMVGLDAGVAKLATLSDGTVFEPVNSFQKKQKKLARLQRQLSRKVKFSNNWQKQKRKIQRLHSRIANIRRDYLHKVTTTISKKHAMIVIEDLKVSNMSRSAAGTVSQPGRNVRAKSGLNRSILDQGWYEMRRQLEYKQLWRGGQVFAVPPAYTSQRCACCGYAAKENRLSQSKFRCQACGYIANADVNGARNILAAGHAVLACGGRVQSDRPLKQEPTEMIQATA

SEQ ID NO: 1772 - protein, 434 aa, unidentified
MLEAVKVALDPTPRQERLLESHAGAARFAYNAGLAHVKDMLERQEKPEWSYYALRRWWNANKDALAVSMETGKPWWPENSKESYNSGLESLADALKNFSKSRKGQRKGRRMGFPRFKSKDKAVPGFAYTTGSFGLIDCDPYALRLPKIGRVHCMENVSKRVDGAKVLRMSVSRHAGRWMASLTVERKDGPMPTPLKGGSVGIDLGVKQLATLSDGTIIRNPRALDSNLRRLRREQKNLSRKRKGSNRRREARTRVARLHARVADLRRDLLDKTTTMLARTYADISIEDLNVAGMVRNHRLARSVEDAAFAEFRRQLEYKTARTGARLHVIDRWYPSSKTCSNCGTVKAKLSLSERVYHCEECGLVIDRDLNAAINIQVAGSAPETLNARGGSGRRADASRRATRHPVKREPSGGVSRVRLGAGLGNEAMQMTSL

SEQ ID NO: 1773 - protein, 374 aa, unidentified
MIKAFKYRLYPNKEQDVLLQKTFGCVRFIYNQMLANRMAVYEQYRDNKEALKQQKYALPADYKKEYPWLKEVDSLALANAQLNLNAAYRNFYRDPAIGFPNFKSKHRSKKSYTTNNQRGTIRLIDSKTIRLPKLKNVHIKLHRQLPKNAAIKSATISQKATGKYEISILVEWEAVIKPITPTIESTIGLDYSSRSLFVDSQASSPEYPKFYRLAEARLKKEQRKLSRRKKGSKNREKQRQIVAKLHEKVVNQRKDFLHNVSRKIANNFDAVVIEDLNLQNMAQGLNLAKSTNDNGFGMLKRFLQYKLAEQGKQLITIDKWYPSSKLCHCCGEKNNQLSLSERTWTCQRCETTLDRDVNAAINIKLEGCRILGIA

SEQ ID NO: 1774 - protein, 374 aa, unidentified
MIKAFKYRLYPNKEQDILLQKTFGCVRFIYNQMLANRMAVYEQYRDNKEALKQQKYALPADYKKRYPWLKEVDSLALANAQLNLNAAYRNFYRDPSIGFPNFKSKHKSKKSYTTNNQKGTIRLIDSKTIRLPKLKNVHIKLHRQLPKNAVIKSATISQKATGKYEISILVEWEAAIKPVAPTIESTIGLDYSSGSLFVDSQASSPEYPKFYRLAEARLKKEQSKLSRRKKGSKNREKQRQIVAKLHEKVVNQRKDFLHNVSRKIANNYDAVVIEDLNLQYMAQGLNLAKSTNDNGFGMLKRFLQYKLAEQGKQLITIDKWYPSSKLCHCCGEKNNQLSLSERTWTCQRCGTTLDRDVNAAINIKLEGCRILGIA

SEQ ID NO: 1775 - protein, 434 aa, unidentified
MLEAVKVALDPTPRQERLLESHAGAARFAYNAGLAHVKDMLERQEKPEWSYYALRRWWNANKDALAVSMETGKPWWPENSKESYNSGLESLADALKNFSKSRKGQRKGRRMGFPRFKSKDRAVPGFAYTTGSFGLIDCDPYALRLPKIGCVHCMENVSKRVDGAKVLRMSVSRHAGRWMASLTVERKDGPMPTPLKGGSVGIDLGVKQLATLSDGTVIHNPHALKSNLGRLKKAQRNLSRKRKGSNRRREARTRVARLHARVADLRRDLLDKTTTMLARAYADISIEDLNVAGMVRNHRLARSVEDAAFAEFRRQLEYKTARTGARLHVIDRWYPSSKTCSNCGTVKAKLSLSERVYHCEECGLVIDRDLNAAINIQVAGSAPETLNARGGSGRRTDASRRATRHPVKREPSDGVSRVRLGAGLGNEAMQMTSL

SEQ ID NO: 1776 - protein, 410 aa, unidentified
MIVMQLRYSFRVYPNTVQQAALARAFGCARVVFNDAVRAREDARRAGQPFPTAGQLSRKLITEAKQTPERAWLGEVSAVVLQQSLRDAETAYRNFFASLKGTREGPKLGAPRFKSRKDARQSIRFTANARWHLTDSGRLNLPKIGAVKVKWSRTLPNTPTSVTVIKDAAGRFFASFVIDTDPDADQARMPETDRTIGIDLGLTHFAVLSDGTKIDSPRFLRRAEKKLKKAQRELSRKQKGSRNRAKARLKVARAHTKVTDARREFHHQLSTRLISENQGIAVENLSVAGLARTRLAKSVHDAGWSSFIGMLEYKAARYGRTLVKTGRFEPTSQTCSTCGAVDGPKPLNVREWTCTACGTVHDRDLNAAINIKTAAGLAVSACGAPVRPEPVLAQREETGSHGFPTGNRAA

SEQ ID NO: 1777 - protein, 410 aa, unidentified
MQLRYNYRVYPTPGQQIELARAFGCARVVFNDGLRLRQQAREAGEKYISDGELSRRLITEAKATPERAWLGEVSTVVLQQALADLNTAYRNFFNSITGKRKGRKVAPPRFRSRKDNRQAIRFTKNSRFKVLDNDRLRLPKIGDLAVRWSRTLPSDPSSVAIIRDAAGRYFASFVVQTGEDEALPPVDSEVGIDLGLTHFAVLSDGTKVAAPTFLRRAARKLKRLQHDLSRKQKGSANRKKAVVKVARAHARVADMRRDWQHKLSTAIIRENQAVYVEDLCVVGLGRTRLAKSVHDAGWASFTAMMEYKAARYGRTFGRVDRFFPSTRMCSDCGRINEKMALNVRAWDCPCGAAHDRDVNAAKNVKAAGQADFNARGAHVRPGLVPAARNEAGTHPDAACSTRSVEGISVP

SEQ ID NO: 1778 - protein, 434 aa, unidentified
MLEAVRVALDPTPRQERLLGSHAGAARFAYNAGLAHVRDMLERGDKPEWSYYGLRRWWNQAKNTLAVDGTTGETWWPENSKESYNSGLESLADALRNFSKSRKGQRKGRRMGFPRFKSKDRAVPGFAYTTGSFGLIDCDPYALRLPRIGRVHCMEDVSRRVNGAKVLRMSVSKRGGRWQASLTVERADLPIPSPPKGGSVGIDLGVKELATLSDGTVIHNPHVLKSNLGRLKKAQRNLSRKRKGSNRRRKARTRVARLHARVADLRRDLLDKTTTMLARAYADISIEDLNVAGMVRNHRLARSVEDAAFAEFRRQLEYKTARTGARLHVIDRWYPSSKTCSNCGTVKAKLSLSERVYHCEECGLVIDRDLNAAINIQVAGSAPETLNARGGSGRRTDASRRATRHPVKREPSDGVSRVSLGAGLGNEAMQMTSL

SEQ ID NO: 1779 - protein, 434 aa, unidentified
MLEAVRVALDPTPRQERLLESHAGAARFAYNAGLAHVKAMLERQEKPEWSYYALRRWWNANKDALAVSMETGKPWWPENSKESYNSGLESLADALKNFSKSRKGQRKGRRMGFPRFKSKDRAVPGFAYTTGSFGLIDCDPYALRLPKIGRVHCMENVSRRVNGAKVLRMSVSKRGGRWQASLTVERADLPIPSPPKGGSVGIDLGVKELATLSDGTVIHNPHVLKSNLGRLKKAQRNLSRKRKGSNRRRKARAQVARLYARVANLRSDALNKTTIMLAHAYSDIGIEDLNVAGLVKNHGLARSIQDAAFAEFRRQLTYKTARTGARLHVIDRWYPSSKTCSNCGTVKAKLSLSERVYHCDKCGLSIDRDVNAAINIQVAGSAPETLNARGGSVRQTRLECGTMRHPAKREPSGGGNRVRLGAGLGNEAMQMTSL

SEQ ID NO: 1780 - protein, 412 aa, unidentified
MCVQLRYNYRVYPTPGQQIELARAFGCARVVFNDGLRLRQQAREAGEKYISDGELSRRLITEAKATPERAWLGEVSTVVLQQALADLNTAYRNFFNSITGKRKGRKVAPPRFRSRKDNRQAIRFTKNSRFKVLDNDRLRLPKIGDLAVRWSRTLPSDPSSVAIIRDAAGRYFASFVVQTGEDEALPPVDSEVGIDLGLTHFAVLSDGTKVAAPTFLRRAARKLKRLQHDLSRKQKGSANRKKAVVKVARAHARVADMRRDWQHKLSTAIIRENQAVYVEDLCVVGLGRTRLAKSVHDAGWASFTAMMEYKAARYGRTFGRVDRFFPSTRMCSDCGRINEKMALNVRAWDCPCGAAHDRDVNAAKNVKAAGQADFNARGAHVRPGLVPAARNEAGTHPDAACSTRSVEGISVP

SEQ ID NO: 1781 - protein, 412 aa, unidentified
MCVQLRYNYRVYPTPGQQIELARAFGCARVVFNDGLRLRQQAREAGEKYISDGELSRRLITEAKATPERAWLGEVSTVVLQQALADLNTAYRNFFNSITGKRKGRKVAPPRFRSRKDNRQAIRFTKNSRFKVLDNDRLRLPKIGDLAVRWSRTLPSGPSSVAIIRDAAGRYFASFVVQTGEDEALPPVDSEVGIDLGLTHFAVLSDGTKVAAPTFLRRAARKLKRLQHDLSRKQKGSANRKKAVVKVARAHGRVADMRRDWQHKLSTAIIRENQAVYVEDLCVVGLGRTRLAKSVHDAGWASFTAMMEYKAARYGRTFGRVDRFFPSTRMCSDCGRINEKMALNVRAWDCPCGAAHDRDVNAAKNVKAAGQADFNARGAHVRPGLVPAARNEAGTHPDAACSTRSVEGISVP

SEQ ID NO: 1782 - protein, 402 aa, unidentified
MKRLQAFKFQLRPGDQQECEMRRFAGACRFVFNRALALQNENHEAGNKYIPYGKMASWLVEWKNATETQWLKDSPSQPLQQSLKDLERAYKNFFRKRAAFPRFKKRGQNDAFRYPQGVKLDQENSRIFLPKLGWMRYRNSRQVTGVVKNVTVSQSCGKWYISIQTESEVSTPVHPSASMIGLDAGVAKLATLSDGTVFGPVNSFQKNQKTLARLQRQLSRKVKFSNNWQKQKRKIQRLHSRIANIRRDYLHKVTTTVSKNHAMIVIEDLKVSNMSKSAAGTVSQPGRNVRAKSGLNRSILDQGWYEMRRQLEYKQLWRGGQVLAVPPAYTSQRCACCGHTAKENRLSQSQFRCQVCGYTANADVNGARNILAAGHAVLACGEMVQSGRSLKQEPTEMIQATA

SEQ ID NO: 1783 - protein, 368 aa, unidentified
MLKAYKFRIYPTKSQRTKMERTIDLCRWTYNQTLAYRKDAWEKEGKSVSKYETHNLLPAWKEEKPELNDVFSQTLQNAQERVDLGLKAFFRRVKAGENPGYPRFRGRGWYDSFTYPQKGFKLNAGKLYLSKIGNIKIKLHRSIEGKIKRLTVRRAATGKWFACFSVEIEDQLKPPWKVGSLVGVDVGLESFATLSNGETFREEEKELARVQRKLSKAPKGTPERKKALRMVERVHERIANKRYDFAHKVSRYLVNRFGLIAFEDLSIQNMLKNHCLAKSISDVAWNMLVTLTSYKAESAGSMVVLVDPRNTSKMCSRCGILVGKTLSDRVHNCPQCGLSMDRDWNAAINILRLGLQSVGIKSVEAPVF

SEQ ID NO: 1784 - protein, 374 aa, unidentified
MLKAYKFRIYPTKSQRTKMERTLDLCRWTYNQTLAYRKDAWEKEGKSVSKYETHNLLPTWKEEKPELNDVFSQTLQNAQERVDLALKAFFRRVKAGENPGYPRFRGRGWYDSFTYPQKGFKLNAGKLYLSKIGNIKIKLHRSIEGKIKRLTVRRAATGKWFACFSVEIEDQLKPPWKDGSLVGVDVGLESFATLSNGETIANPRFFREEEKELARVQRKISKAPKGTPERKKALRMVERVHERIANKRYDFAHKVSRYLVNRFGLIAFEDLSIQNMLKNHCLAKSISDVAWNMLVTLTSYKAASAGSMVVLVDPRNTSKMCSRCGILVEKTLSNRVHNCTQCGLSLDRDWNAAINILRLGLQSVGIKTVEACPF

SEQ ID NO: 1785 - protein, 374 aa, unidentified
MLKAYKFRIYPTKSQRTKMERTLDLCRWTYNQTLAYRKDAWEKEGKSVSKYETHNLLPTWKEEKPELNDVFSQTLQNAQERVDLALKAFFRRVKAGENPGYPRFRGRGWYDSFTYPQKGFKLNAGKLYLSKIGNIKIKLHRSIEGKIKRLTVRRAATGKWFACFSVEIEDQLKPPWKDGSLVGIDVGLESFATLSNGETIANPRFFREEETELARVQRKLSKAPKGTPERKKALRMVERVHERITNKRCDFAHKVSRYLVNRFGLIAFEDLSIQNMLKNHCLAKSISDVAWNMLVTLTSYKAASAGSMVVLVDPRNTSKMCSRCGILVEKTLSDRVHNCTQCGLSLDRDWNAAINILRLGLQSVGIKTVEACPF

SEQ ID NO: 1786 - protein, 381 aa, unidentified
MLKAYKFRIYPTKSQRTKMEQTLDLCRWTYNQTLAYRKNAWEKEGKSISKYETHNLLPTWKEIKPELSGVFSQTLQNAQERVDLALKAFFRRVKAGENPGYPRFRGRGWYDSFTYPQKGFKLNAGKLYLSKIGNIKIKLHRPIEGKIKRLTVRRAATGKWFACFTVEMEDQPKPPWKDGSLVGVDVGLESFATFSNGEKIANPRFFREEEKELTRVQRKLSKAPKGTLERRSASKVVERVHERIANKRYEFAHQVSRDLVNRFGLIAFEDLSIQNMLKNHCLAKSISDVAWNMLVTLTSYKAASAGSVVILVDPRNTSKMCSRCGILVEKTLSDRVHNCPHCGLSVDRDWNAAINILRLGLQSVGIKTVEACPFKGAGVVT

SEQ ID NO: 1787 - protein, 374 aa, unidentified
MLKAYKFRIYPTKSQRTKMERTLDLCRWTYNQTLAYRKDAWEKEGKSVSKYETHNLLPTWKEEKPELNDVFSQTLQNAQERVDLALKAFFRRVKAGENPGYPRFRGRGWYDSFTYPQKGFKLNAGKLYLSKIGNIKIKLHRSIEGKIKRLTVRRAATGKWFACFSVEIEDQLKPPWKDGSLVGVDVGLESFATLSNGETIANPRFFREEETELARVQRKLSKAPKGTPERKKALRMVERVHERIANKRYDFAHKVSRYLVNRFGLIAFEDLSIQNMLKNHCLAKSISDVAWNMLVTLTSYKAVSAGSMVVLVDPRNTSKMCSRCGILVEKTLSDRVHSCPQCGLSLDRDWNAAINILRLGLQSVGIKTVEACPF

SEQ ID NO: 1788 - protein, 406 aa, unidentified
MNAASTAVKLKNYISYNSLTISMSMLKAYKFRIYPTKSQRTKMERTLDLCRWTYNETLEIRKTAWEDEGKSLSKYETNNLLPEWKENKPELKEVFSQVLQNVHERVDLALKAFFRRVKAGEKPGYPRFKGIGRYDSFTYPQKGFKVDSGKLYLSKIGEIKIKLHRPIEGKIKRLTVRRSATGKWYACFSVDLEDLPKPPWKDGSLVGVDVGLESFATLSNGVKIANPRFFREEEHELARVQRKLSKAPKGTPERKKALKVVERVHERIANKRYEFAHRISNQLVNRYGLIAFEDLNIKGMMHNHNLAKSIGDVAWNMLVTLTSYKAASAGSMVVLVDPRNTSKMCSRCGILVQKDLSERVHNCTQCGLSMDRDWNAAINILRLGLQSVGIQSVQARPLSRAGVVTG

SEQ ID NO: 1789 - protein, 374 aa, unidentified
MLKAYKFRIYPTKSQRTKMERTLDLCRWTYNQTLAYRKDAWEKEGKSVSKYETHNLLPTWKEEKPELNDVFSQTLQNAQERVDLALKAFFRRVKAGENPGYPRFRGRGWYDSFTYPQKGFKLNAGKLYLSKIGNIKIKLHRSIEGKIKRLTVRRAATGKWFACFSVEIEDQLRPPWKDGSLVGVDVGLESFATLSNGETIANPRFFREEETELARVQRKLSKAPKGTPERKKALRMVERVHERIANKRYDFAHKVSRYLVNRFGLIAFEDLSIQNMLKNHCLAKSISDVAWNMLVTLTSYKAASAGSMVVLVDPRNTSKMCSRCGILVEKTLSDRVHSCPQCGLSLDRDWNAAINILRLGLQSVGIKTVEACPF

SEQ ID NO: 1790 - protein, 351 aa, unidentified
MHTKTLKLRVRDKHCSELKQQARQVNFVWNYINDLSSRSIRERGVFLSAYDIQKYTNGAAKELGLHSQTVQCVSKEYVTRRKQFKKRQLNWRKSRGVRRSLGWIPVNTGAAKWKNGQIYFNGKHYSVWDSYGLSKYTFRTASFSEDARGRWYFNVVVSIKAEPSKGTSLLGIDLGCKDSATASNGEQLTNGEYRKLQQQLGIAQRARKKQRVKAIHAKIANRRKDNIHKFTRKLVNTSSAIFVGNVSSQAMVKTKLAKSVLDASWGSIKTVLEYKCAHAGIHFEEINEAYSTQTCSCCGTIPTSSPKGRIGLRIRQWTCSDCGTQNHRDINAARNIAAAGHRRLEGGIPVL

SEQ ID NO: 1791 - protein, 376 aa, unidentified
MLKAFKYRIYPTKAQRSKMEQTLELCRWTYNETLAYRKNSFEQEGKSVSKYETHNLLPEWKKNKPELKEVFSQTLQNVQERVDLAFKAFFRRVKAGETPGYPRFKGKGWYDSFTYPQLGFKLSFGKLRLSKIGDIKIKLHRPIEGKIKRLTVRRSSTGKWFACFSVEIDDPQKPPWKDGLMAGIDVGLESFATLSNGEKIDNPRFFRSEEKALAKAQRRLSKYEKGTPERWKALKVVQRTHERIANRRYDFAHQVSHNLVERFGLIAFEDLSITNMLENHCLAKSISDAAWRMLVITTSYKAESAGSMVVLVDPRNTSQLCSRCGLKVNKSLSDRVHECPQCGLVMDRDENAAINILRLGLQSLPKARSSALQGGE

SEQ ID NO: 1792 - protein, 373 aa, unidentified
MLKAYKFRLFPTKTQRSKMERTLDLCRWVYNQTLAYRKDAWEKEGRSTSKYETNNLLPNWKVEKPDLNEVFSQVLQNTQERVDLALKAFFRRVKAGEKPGYPRFRGSGWYDSFTYPQFGFKLLCGKLRLSKIGDIKIKLHRPIEGKIKRLTVRRSSTGKWFACFTVEIDDPPKPPWKDGLSVGIDVGLESFATISNGEKIGNPRFFRSDETALAKAQRRLSKCAKGTSQRRAAVKVVQRVHERIANRRYNFAHQMSNQLVSKYGLIVFEDLNIKNMLKNHCVAKSISDAAWRMLVTTTSYKAESAGSKVVLVDPRNTSQLCSRCGVKVPKSLSDRVHECTQCGLVMDRDENAAINILRLGMQSLRKSDRSPSL

SEQ ID NO: 1793 - protein, 376 aa, unidentified
MRKSFKYPIYPTKSQQSRMERTLDLCRWVYNQTLAYRKDAWEKEGRSTSKYETHNLLPEWKVEKPELIEVHSQVLQNVQERVELAFKAFFRRVKSGEKPGYPRFRGLGWYDSFTYPQSGFKLSFGKLRLSKVGDVKIKLHRPIEGKIKRLTIRRTSTGKWFACFSVEIDDPPKPPWKDGSMVGIDVGLESFATLSNGEKIDNPRFFRSEEKALAKAQRRLSKCEKGTPDRMKALKVVQRIHERIANKRYYFAHQVSHNLVERFGLIAFEDLSITKMLNNHCLAKSISDAAWRMLVTIISYKAESAGSIVVLVDPRNTSQLCSRCGLKVTKSLSDRVHECPQCGLIMDRDENAAINILRLGLQSLPKARSPALQGGE

SEQ ID NO: 1794 - protein, 376 aa, unidentified
MLKAFKYRIYPTKAQRSKMEQTLELCRWTYNETLAYRKNSFEQEGKSVSKYETHNLLPEWKKNKPELTEVFSQTLQNVQERVDLAFKAFFRRVKAGEAPGYPRFKGKGWYDSFTYPQLGFKLSLGKLRLSKIGDIKIKLHRPIEGKIKRLTVRRSSTGKWFACFSVEIDDPPKPPWKDGLMAGIDVGLESFATLSNGEKIDNPRFFRSEEKALAKAQRRLSKYEKGTPERWKALKVVQQTHERIANRRYDFAHQVSHNLVERFGLIAFEDLSITNMLKNHCLAKGISDAAWRMLVITTSYKAESAGSKVVLVDPRNTSQLCSRCGLKVNKSLSDRVHECPQCGLVMDRDENAAINILRLGLQSLPKARSSALQGGE

SEQ ID NO: 1795 - protein, 376 aa, unidentified
MLKAFKYRIYPTKAQRSKMEQTLELCRWTYNETLAYRKNSFEQQGKSISKYETHNLLPVWKKNKPELNEVFSQTLQNVQERVDLAFKAFFRRVKAGETPGYPRFKGKGWYDSFTYPQLGFKLSFGKLRLSKIGDIKIKLHRPIEGKIKRLTVRRSSTGKWFACFSVEIDDPPKPPWKDGLMAGIDVGLESFATLSNGEKIDNPRFFRSEEKALAKAQRRLSKYEKGTPERWKALKVVQRTHERIANRRYDFAHQVSHNLVERFGLIAFEDLSITNMLKNHCLAKGISDAAWRMLVITTSYKAESAGSKVVLVDPRNTSQLCSRCGLKVNKSLSDRVHECPQCGLVMDRDENAAINILRLGLQSLPKARSSALQGGE

SEQ ID NO: 1796 - protein, 374 aa, unidentified
MNKAYNFRLMPTKEQELLFAKTFGCVRFVYNKMLEERIELYEQFKDNEAELKKYKSPTPAKYKAEFVWLKEVDSLALANAQMNLQTAYNNFFRDKRIGFPKFKAKHRDKNSYTTNNVNNNIRLGDKQIKLPKLGFVKLKQHREIPGNQIIKSCTISKSSSGNYFVSILVEYFQDVQPISPTRENVLGLDFDMKNLYTDSQCVRAEYPGFYRKAIEKLAREQRKLAKCTKGSNNRRKQRVRVAKVHEKVANCRKDFLHKRSRELVDSYDAIVIEDLNMKEMSQCLNFGKSVSDNAWGMFTTFLKYKLENEGKLLVKVNKWFPSSKTCHYCGGINKELELSDKEWICSSCGCTVDRDYNASKNIRDEGLRLLALIA

SEQ ID NO: 1797 - protein, 374 aa, unidentified
MNKAYNFRLYPTKEQELLFAKTFGCVRFVYNKMLEERIELYEQFKDNEAELKKYKSPTPAKYKAVFVWLKEVDSLALANAQMNLQTAYNNFFRDKSIGFPKFKAKHRDKNSYTTNNVNNNIRFRDKQIKLPKLGFVKLKQHREIPGNQIIKSCTISKSPSGNYYVSILVEFFQDVQPISPTRENVLGLDFDMKNLYTDSQCERAEYPRFYRKALEKLAREQRKLAKCTKGSKNRRKQRVKVAKVHEKVANCRKDFLHKRSRELVESYDAIVIEDLNMKAMSQCLNFGKSVGDNAWGMFTTFLKYKLENEGKLLVKVDKWFPSSKACHYCGEINKELELSDKEWTCSNCGCTVDRDYNASKNIRDEGLRLLALTG

SEQ ID NO: 1798 - protein, 399 aa, unidentified
MLCSTKIRIYPTPEQAEFLGRQFGAVRFVYNKALAVKKHRYRVRGQKLSAYHDLKKLLSIAKKSRRYAWLADYDAMALQQACINLDKAFRNFFEGRARFPRFKRKHGEQSSYHCSGKIAVLEDSILLPKMAKPIKAVIHRPVSGALKSITVTRTATGKYFASLLFKDGKEKPEPVKVVPEDAIVGVDIGVIDLAVESNGRRTPNPRFLKRAQRNLRRKQRALSRKSKGSRNRAKARLKVAAAHERLANARHDFQHKLSKRLTDENQAVCVETLAVKNMLKNHCLARAIADAAWYSLIAKLAYKAERSGKHLVRIDRWTASSKTCSCCDMVKDDLDLGERRWTCDGCGTEHDRDGNASENIRRVGVLELRAGGWHVPVCGGLRQTVHATAAANEAESLAA

SEQ ID NO: 1799 - protein, 376 aa, unidentified
MIRAIRFRIYPTSDQKKYLAGLFGAVRFCYNKALYLKTHFYKVKGVNLHPIHDLKKLIAIAKKSKKYAWLAEYDCMALQESVRNLNKAYGRFFKKEAGYPRFKSRRGEQSSYHCTGVSAGDDFVKVPKMKKIKAVMHRKIEGKVKSITLSMDACGDYWASVLYEDGLPEAVPATCVRQSKTVGVDVGIETFGTCSDGEKIKSPKALKRAEKKLKKAQRAFSRKQKGNKNREKARKRLAKLHRKVKRRRSDFLHKTSRRLVNENQALIFETLKIQGMMKNHHLAKAIADAGWGEFMRQCEYKAKHEGRIFAKIGTFCPSSKTCSACGHKLKELSLATRSWTCPHCGAHHDRDLNASLNIKQEGIRMLKAAGLTVLRS

SEQ ID NO: 1800 - protein, 376 aa, unidentified
MIRAIRIRLYPTPDQKKYLAGLFGAVRFCFNKALYLKTHFYKVKGVNLHPIHDLKKLIAIAKNTEKYAWLAEYDCMALQESVRNLNKAYSRFFKKEAGYPRFKSRRGEQSSYHCTGVSAGDDFVKVPKMKKIKAVMHRKIEGKVKSITLSMDACGDYWASVLYEDGLPEAVPATCVRQSKTVGVDVGIETFGTCSDGEKIKSPKALKRAEKKLKKAQRAFSRKQKGSKNREKARKRLAKLHRKVKRRRSDFLHKTSRRLVNENQALIFETLKIQGMMKNHHLAKAIADAGWGEFMRQCEYKAKHEGRIFAKIGTFYPSSKTCSACGHKLKELSLATRSWTCPHCGSHHARDLNASLNIKQEGIRMLKAAGLTVLRS

SEQ ID NO: 1801 - protein, 376 aa, unidentified
MIRAIRIRLYPTPDQKKYLAGLFGAVRFCYNKALYLKTHFYKVKGVNLHPIHDLKKLIAIAKKSKKYAWLAEYDCMALQESVRNLNKAYGRFFKKEAGYPRFKSRRGEQSSYHCTGVSAGDDFVKVPKMKKIKAVMHRKIEGKVKSITLSMDACGDYWASVLYEDGLTEAVPATCVRQTKTVGVDVGIETFGTCSDGEKIKSPKALKRAEKKLKKAQRAFSRKQKGSKNREKARKRLARLHRKVKRRRSDFLHKTSRRLVNDNQALIFETLKIQGMMKNHHLAKAIADAGWAEFMRQCEYKAKHEGRIFAKIGTFFPSSKTCSACGHKLKELSLATRRWTCPHCGAQHDRDLNASLNIKQEGIRMLKAAGLTVLRS

SEQ ID NO: 1802 - protein, 376 aa, unidentified
MIRAIRIRLYPTPDQKKYLAGLFGAVRFCFNKALYLKTHFYKVKGVNLHPIHDLKKLIAIAKNTKKYAWLAEYDCMALQESVRNLNKAYSRFFKKEAGYPRFKSRRGEQSSYHCTGVSAGDDFVKVPKMKKIKAVMHRKIEGKVKSITLSMDACGDYWASVLYEDGLPEAVPATCVRQTKTVGVDVGIETFGTCSDGEKIKSPKALKSAEKKLKKAQRAFSRKQKGSKNREKARKRLARLHRKVKRRRSDFLHKTSRRLVNDNQALIFETLKIQGMMKNHHLAKAIADAGWAEFMRQCEYKAKHEGRIFAKIGTFYPSSKTCSACGHKLKELSLATRSWTCPHCGAHHDRDLNASLNIKQEGIRMLKAAGLTVLRS

SEQ ID NO: 1803 - protein, 422 aa, unidentified
MFPITAGVVRSYDLRMQLRFAFRLYPEPGQRSALARAFGCARVVFNDAVRAREDARRAGRPFPRAGELSRALITEAKRTSERSWLGEVSAVVLQQSLRDAETAYRNFFASLKGTRKGPKAGAPRYKSRKDARQSIRFTANARWNITDGGRLNLPKIGAVKVKWSRTLPATPSSVTVIKDAAGRYFASFVIDTDPAADAARMPGTDRTIGIDLGLTHFAVLSDGTKIDSPRFLRRAEKKLKKAQRELSRKQKGSKNREKARVKVARAHAKVADARREFHHQLSTRLISENQGIAVEDLSVAGLARIRLARSVHDAGWAQFVSMLEYKAKRYARTLVQVGRFEPTSQVCSACGRRDGPKPLHVRERTCAACGTVHDRDHNAAMNVRSAAGLAVTACGVQVRPEPVLAQHDEAGSLGSPRDAGAA

SEQ ID NO: 1804 - protein, 402 aa, unidentified
MKRLQAFKFQLRPGDQQECEMRRFAGACRFVFNRALALQNENHEAGNKYIPYGKMASWLVEWKNATETQWLKDSPSQPLQQSLKDLERAYKNFFRKRAAFPRFKKRGQNDAFRYPQGVKLDQENSRIFLPKLGWMRYRNSRQVTGVVKNVTVSQSCGKWYISIQTESEVSTPVHPSASMVGLDAGVAKLATLSDGTVFEPVNSFQKSQKTLARLQRQLSRKVKFSNNWQKQKRKIQRLHSRIANIRRDYLHKVTTTVSKNHAMIVIEDLKVSNMSKSAAGTVSQPGRNVRAKSGLNRSILDQGWYEMRRQLEYKQLWRGGQVLAVPPAYTSQRCACCGHTAKENRLSQSQFRCQVCGYTANADVNGARNILAAGHAVLACGEMVQSGRSLKQEPTEMIQATA

SEQ ID NO: 1805 - protein, 383 aa, unidentified
MRRFAGACRFVFNRALARQNENHEAGNKYIPYGKMASWLVEWKNATETQWLKDSPSQPLQQSLKDLERAYKNFFRKRAAFPRFKKRGQNDAFRYPQGVKLDQENSRIFLPKLGWMRYRNSRQVTGVVKNVTVSQSCGKWYISIQTESEVSTPVHPSASMIGLDAGVAKLATLSDGTVFGPVNSFQKNQKTLARLQRQLSRRVKFSNNWQKQKRKIQRLHSRIANIRRDYLHKVTTAVSKNHAMIVIEDLKVSNMSKSAAGTVSQPGRNVRAKSGLNRSILDQGWYEMRRQLEYKQLWRGGQVLAVPPAYTSQRCACCGHTAKENRLTQSKFVCRACGYTENADVNGARNILAAGHAVLACGGTVQSDRPLKQEPDAEQSAVTH

SEQ ID NO: 1806 - protein, 353 aa, unidentified
MKTLKLRIKDKYSKVLEQLASEVNFVWNYVNDLSFRHLKKKGEFLSAYDIAKYTKGTSKECNLHSQTIQAVTEELVIRRKQFKKSKLKWRVSNRKSAKKSLGWIPFKKVAVKYTDGYIQYGKHQFKLWDSYGIGAYKVKSGSFVEDSRGHWYVCLTVEDHAKSVQSKGTTAIGIDLGLKDLATCSDGYVVTNPKHYRKYEQKLGVAQRAKDKKRVRALHTKIKNCRKDHLHKESSKLVKRHAMIVVGNLSAAKLVKTKMAKSVLDSGFSAFKTMLRYKCESAKVLFEEVSERFTTQICSSCGEITASSPKGRIDLRIRVWECECGAVNDRDCNAAKNILALGHKRLAVGIPVL

SEQ ID NO: 1807 - protein, 352 aa, unidentified
MKTLKLRIKDKHCKVLDQLASEVNFVWNYVNDLSFKHLKRTGDFFSAFDMTQYTKGTSKLCGLHSQTVQGITEEYVDKRRQHKKAKLKWRVSNKKSARRSLGWIPFKKVAIKYADGYVQYGKQKFKLWDSYGISKYSVRTGSFVEDSRGRWYVCLVVDSPKQDKPTATKAIGIDLGLKDVATCSDGTVISNPKFYRNYEQKLGIAQRARNKKRVRALHAKIANCRKDHLHKASTLLVKENALIVVGDLSASKLVKTKMAKSVLDTGFSALKTMLKYKCENAGVLFEEVSEKFTTQICSCCGEITSSSPKGRTDLRIRVWECECGSINHRDLNSAKNILALGHERLAVGIRLL

SEQ ID NO: 1808 - protein, 355 aa, unidentified
MKTLKLRIKDKHCKVLDQLASEVNFVWNYVNDLCFKHLQRKQQFFSAYDIAKYTKGASKECNLHSQTIQAVTEELVTRRKQFKKLKLRWRVSNKKSARRSLGWIPFKKVAIKYADGYVQYGKHQFKLWDSYGLSKYSIQTGSFVEDSRGRWYVCLVVDSPKQDKPTATKAVGIDLGLKDIATCSDGTIISNPKFYHQYEQKLGIAQRARNKKRVRALHAKIANCRKDHLHKASTQLVKDNALIVVGDLSASKLVKTKMAKSVLDTGFSALTTMLKYKCENAGVMFEEVNERFTTQTCSSCGAITASSPKGRADLRIRVWECECGSVNQRDLNSAKNILALGHKRLAVGITLLSGG

SEQ ID NO: 1809 - protein, 383 aa, unidentified
MQLRYKFRLYPAPGQRAALGRAFGCARTVFNDGLRARQEAHAAGLPHLPDGELSKRVITEAKKTPERAWLGEVSAVVLQQALADLNTAYRNFFASLSGKRKGPSIAAPRFRSRKDNRQAIRFTRNARFSITAGGKLRLPKIGDVTVKWSRRLPSEPSSVTVVKDAAGRYFASFVVEAGIEPLPETAAEVGIDLGLTHLAVLSDGRKIDNPRFLRRAERRLRKAQQALSRKAKGSGNRAKARARVAKAHVKVADARRDFTHKLSTQIIRENQAVVVEDLAVKGLARTRLAKSVHDAGWSALVNMLEYKAARHGRALVKIDRWFPSSKLCSACGALAESMPLTVRAWACPCGAAHDRDVNAALNILAAGRVERLNACGGTARPAA

SEQ ID NO: 1810 - protein, 418 aa, unidentified
MNQPGTVLLVQLRYNFRLYPDTAQRKALARSFGCARVVFNDGLRLRQTARENGGKYVSDGELSRRLITEAKATPERAWLGEVSSVVLQQALADLNVAYRNFFASITGKRKGRKVAPPRYRSRKENRQAIRFTRNSRFKVLDNGRLRLPKIGDLAVRWSRTLPSDPSSVAVIKDAAGRYFASFVVKSTDEALPPVESEVGIDLGLTHFAVLSGGTKVAAPKFLRRAARKLKRLQQALSRKQRGSQNRRKAVVKVARAHARVADTRRDWQHQLSTTLIRENQAVYVEDLCVVGLGRTRLAKSVHDAGWAGFTAMLEYKAARYGRTFGRVDRFFPSTRKCSDCGRINDKMALDVRAWDCPCGSHHDRDVNAARNIKAAGQADFNDRGAQVRPAAMLAPRGEAVTHPDAAYSTRSVEGISVL

SEQ ID NO: 1811 - protein, 413 aa, unidentified
MVLVQLRYNFRLYPDTAQREALARSFGCARVVFNDGLRLRQQAREAGEEYVSDGELSRRLITEAKSTPERVWLGEVSSAMLQQALADLNAAYRNFFASISGKRKGRKLALPRFRSRKDNRQAIRFTKNSRFKVLDNGRLRLPKIGDLAVRWSRALPSDPSSVAVIKDAAGRYFASFVVQAAEEEVLPPVGSEVGIDLGLTHFAVLSDGTKVTAPKFLRRAARKLKRLQQDLSRKINGSNRRKKAVVQVARAHARVADTRRDWQHKLSTTLIRENQAVYVEDLCVVGLGRTRLAKSVHDAGWAGFTGMLEYKAARYGRTFGRVDRFFPSTRMCSDCGRINDKMALNVRAWDCPCGSDHDRDVNAARNIKAAGQADFNDRGAQVRPGLVPAPRGEAVTHPDAACSTRSVEGISVH

SEQ ID NO: 1812 - protein, 402 aa, unidentified
MKRLQAFKFQLRPGGQQECEMRRFAGACRFVFNRALALQNENHEAGNKYIPYGKMASWLVEWKNATETQWLKDAPSQPLQQSLKDLERAYKNFFQKRAAFPRFKKRGQNDAFRYPQGVKLDQENSRIFLPKLGWMRYRNSRQVTGVVKNVTVSQSCGKWYISIQTESEVSTPVHPSASMVGLDAGVAKLATLSDGTVFEPVNSFQKNQKTLARLQRQLSRKVKFSNNWQKQKRKIQRLHSRIANIRRDYLHKVTTTVSKNHAMIVIEDLKVSNMSKSAAGTVSQPGRNVRAKSGLNRSILDQGWYEMRRQLEYKQLWRGGQVLAVSPAYTSQRCTCCGHTAKENRLSQSKFRCQVCGYTANADVNGARNILAAGHAVLACGGMVQSGRPLKQEPTEMIQATA

SEQ ID NO: 1813 - protein, 402 aa, unidentified
MKRLQAFKFQLRPSGQQECEMRRFAGACRFVFNRALALQNENHEAGNKYIPYGKMASWLVEWKNATETQWLKDAPSQPLQQSLKDLERAYKNFFQKRAAFPRFKKRGQNDAFRYPQGVKLDQENSRIFLPKLGWMRYRNSRQVTGVVKNVTVSQSCGKWYISIQTESEVSTPVHPSASMVGLDAGVAKLATLSDGTVFEPVNSFQKNQKTLARLQRQLSRKVKFSNNWQKQKRKIQRLHSRIANIRRDYLHKVTTTVSKNHAMIVIEDLKVSNMSKSAAGTVSQPGRNVRAKSGLNRSILDQGWYEMRRQLEYKQLWRGGQVLAVSPAYTSQRCTCCGHTAKENRLSQSKFRCQVCGYTANADVNGARNILAAGHAVLACGGMVQSGRPLKQEPTEMIQATA

SEQ ID NO: 1814 - protein, 366 aa, unidentified
MRRTYRYRIYPTKSQVTLLDQTLEICRWVYNDTLALRKNAWEQEQRSISLYETNKILTQWKRDRPELKQVYAQTLQNVQVRVDLALKAFFRRVKVGEKPGYPRFKGKGRYDSFTYPQAEKGGFKFVGDRLNLSKIGDVKIVLHRPIKGTIKTLTIQRSATGKWYACFSVEYDPDPQPQKETVVGVDVGLESFATFSNGEKIENPRFFRTDEKALAKAQRKLSKVEKGTPERKKARKIVAHVHEQIANKRLNFAHQTSRQLVDRFGTIVFEDLNITNMQKNHCLAKSIADVAWNQFVTITTSKAEDAGSHVILVNPRNTSQMCSRCGKIVAKKLSDRIHTCPHCGLVMDRDQNAAVNILRLGLQSLG

SEQ ID NO: 1815 - protein, 370 aa, unidentified
MAKQNKAYKFRIYPTDEQALIMRKTFGCVRFVYNKMLAERIETYESLKDDKEALKKVKHPTPAKYKKEFEWLKEVDSLALANAQLNLDKAYKAFFKGNAKFPKFKSKRHKQSYTTNVVNGNIQLLDGHIKLPKLKMVKIKQHRKIPSEYKIKSCTLSMTASGKYYISILTEYEKKIDCKEIEKIVGLDFAMDGLFVDSEGEKANYPKFYRQMLEKLTKEQRKLSRKKKGSSNWDKQRIRVAKIQEKVANQRKNFLHHKSKELVTTYDAVIIEDLDMKGMSQALRFGKSVADNGWGMFTSFLQYKLKEQGKQLVKIDKWFPSTQSCSNCGNIQPMPMNIRTYACSCGLNLDRDYNSALNIKKEGIRLLASA

SEQ ID NO: 1816 - protein, 429 aa, unidentified
MLEAVKVALDPTPRQERLLESHAGAARFAYNRGLAHVKDMLERGDTPEWSYYALRKWWNQAKDTLAVDETTGEPWWPKNSKEAYNSGLESLGDALKNFSKSRKGQRKGRRMGFPRFKSKDSGIRRFAYTTGSFGLIDHDPYALKLPRIGRVHCMEDVFKRVDGAKVRRMSVSRSAGRWQASLTVERADNPALKPPKGGSVGIDLGVKELATLSDGTVIRNPHALKSNLTRLRKAQRSLSRKRKGSNRRRKARANVARLHARVANLRRDLLDKTISMLAHTYADVSIEDLNVAGMVKNHGLAQSIQDAAFAEFRRQLTYKTARAGTRLHVIDRWYPSSKTCSNCGTVKTKLSLSERVYHCDKCGLSIDRDLNAAINIQVAGSAPETLNARGGSGRQTRLECGTMRHPAKREPSGGESRVRLGAGLGNEAM

SEQ ID NO: 1817 - protein, 379 aa, unidentified
MLKATKVRIYPTKEQIEFLNAQFGAVRFAFNRGLAIQSHFYKVKGVSLKPLKDIKPLLSKAKKSRKYQWLKQYDSIALQQGVIQLDKAFQNFFNPKLKSRYPRFKSKYGKQSSYHCTNVSVGDDWIKIPKCQPIPAKIHRDIQGQVKSITLSKTTNGKYYASILIEEGVALPAPVQTIKTAVGLDLGLTDFFTASNGHVEVNPRHLRSAERNLKRKQRQLSRKKKGSANRAKARRVLANAHEKLRNIRNDFQHKLSRTLVDENQAVIVETLKSSNMMKNKHLAKAIGDAAWNSFISKLEYKAKAKGHYLHKLSQWFAGSKTCSCCGHKMDEMPLNIREWLCPSCSTRHHRDVNAAINHLKQGMIELKAAGLSFSLAESV

SEQ ID NO: 1818 - protein, 352 aa, unidentified
MNHTKTLQVRVRDKHAPLLRQMARSVNLVWNYLNELSHRSICERGVFLSAFDLHPYTKGAGKELGLHSQTLQYVAAEYVTRRKQSRKARLNWRKSGGVRRSLGWVPFNTGAASWKNGQVYHNGHYFKVWDSYGLAQYRLRSGSFSEDARGRWYFNVVVELETQLSTGQGAVGIDLGLKDVATCSDGQRLENGRFYHDLEPKLVSAQRAGKKARVRAIHAKIANRRKDALHKFSRSLVERCNTIIVGDVSPQKLVRTKMAKSVLDAGWGQLKTMLAYKCAHAGIVFKVVNEAYTTQTCSCCGALPDSRPRGIAGLGIREWICECGVTHDRDENAARNILALGHERPVEGIPGA

SEQ ID NO: 1819 - protein, 352 aa, unidentified
MKHTKTLQVRVRDKHAPLLRQMARSVNFVWNYLNELSHRSIRERGVFLSAFDLHPYSKGAGKELGLHSQTLQCVAAEYVTRRKQYRKARLNWRKSGGARRSLGWVPFNTAAASWKNGQIYHNGYYFKVWDSYGLGQYRFRSGSFSEDARGRWYFNVVVELDTQLSAGQGAVGIDLGLKDVATCSDGQRLENGRFYRDLEPRLAKAQRAGKKARVRAIHAKIANRRKDALHKFSRSLVERCNMIIVGDVSPQKLVRTTMAKSVLDAGWGQLKTMLAYKCAHAGIVFRVVNEAYTTQTCSCCGALPDSRPRGIAGLGIREWICECGVTHDRDVNAARNILALGHERPGEGIPGA

SEQ ID NO: 1820 - protein, 352 aa, unidentified
MKHTKTLQVRVRDKHTQLLRQMARQVNFVWNYLNELSHRSIRERGVFLSAYDLDRYTQGASKELGLHSQTLQEVSREYATRRRQFKKARLSWRKSIGVRRSLGWIPFKSGAASWKNGQVFHNGRCFKVWDSYGLGQYRLRSGSFSEDARGRWYFNVVVELETQLSTGQGVVGIDLGLKDVATCSDGQRLENGRFYRDLEPKLASAQRAGKKARVRAIHAKIANRRKDALHKFSRSLVERCNTIIVGDVSSQKLVKTKMAKSVLDAGWGQLKTMLAYKCAHAGIVFRVVNEAYTTQTCSCCGALPASRPRGIAGLGIREWICECGVTHDRDVNAARNILALGHERPGEGIPGV

SEQ ID NO: 1821 - protein, 386 aa, unidentified
MLKATKVRIYPTPKQADFLNRQFGSVRFVWNKVLAIKTHYYRVREQNLSPKKDLKPLLATAKKSRKYSWLKETDSIALQQSIINLDKAFQNFFNPKLQARFPRFKSKHGKQSSYHCTSVSVGNDWIKVPECQPIKARVHREIAGKVKSITLTRTASDKYYASILAEDGQSESKPVAALQASKVVGIDAGLTDIAITSNGLKTSNPRFLKNAQRNLKRKQKVLSRCKKGSKGRAKARLLVAKAHERVAFARNDFQHKLSRQLVDENQAVVVETLKVKNHCLARSIADAGWHSFVIKLDYKAKQAGKHLVKIDQWFASSKTCSCCDRKQEEMPLNVRSWTCDCGAVHDRDINAAINIKRQGILKLKAEGLSVSADEGQRKSGTLPVAA

SEQ ID NO: 1822 - protein, 390 aa, unidentified
MLKATKVRIYPTPEQTVFLNRQFGAVRMVWNKALAIKTHYYKVREQNLSPRKDLKPLLVTAKKSRKYSWLKEADSIALQQSVINLDKAFQNFFNPKLEARFPRFKSKHGKQSSYHCMSVAVGENWVKVPKCKPIKARIHREITGTVKSITLTKTPTGKFYASVLAEDDMSEARQITELQSSRIVGVDVGLTDIAITSTGVKTGNPRFIKNAQRNLKRKQKALSRCKKGSKGRVKARLLVAKAHERVAFARNDFQHKLSRQLIDENQAVIVETLKVKNMLKNHCLARSIADAGWHSLVIKLDYKAKQAGKHLVKIDQWFASSKTCSCCDRKQEEMPLNIRSWTCECGYVADRDINAAINVKKQGILKLKAEGLSVSADGGKRKSSTVLVAA

SEQ ID NO: 1823 - protein, 433 aa, unidentified
MLEAVKVALDPTPVQERLILSHAGAARFAYNAGLAHVKETIETGGKLEWTLYALRRWWNANKGTLAVDADGTPWWRENSKEAYNSGLEALSDALSNWSKSRKGERKGRRVGFPRFKAKDRETPRFAYTTGSFGLVRADPKALRLPRIGRVHCMENVAGRVDGARALRMTVSCRAGRWHAALTVERADPTARRTPREGAVGIDLGVKSLATLSDGTTIANPHTLKANERRLKRARRSLSRRQPGSHRRAHARERVVRLHARVANQRRDMLDKLTTWLADTYSDISIEDLNVAGMVKNHRLAQSIQDAAFAEFRRQLTYKTARTGAGLHIIGRWYPSSKTCSNCGTVKTKLSLSECVYHCEECGLSIDRDLNAAVNIQVAGSAPETVNAHGGDGRRNDASRRATQIPVKCEPSSHASGVRLGADDRKTVLQTKTN

SEQ ID NO: 1824 - protein, 382 aa, unidentified
MRLFAGACRFVFNRALALQNENYEAGNKYIPYTKMASWLVEWKKDTETEWLKDSPSQPLQQSLKDLERAYKNFFQKRAAFPRFKKRGQNDAFRYPQGVKLDQENSRIFLPKLGWMRYRNSRQVTGIVKNVTVSQSCGKWYISIQTESEVSTPVHPSASMVGLDAGVARLATLSDGTVFEPVNSFQKNQKKLARLQRQLSRKVRFSNNWQKQKRKIQQLHSRIANIRRDYLHKVTTIISKNHAMIVIEDLKVKHMSKSAAGTISQPGRNVRAKSGLNRSILDQGWYEMRRQLEYKQLWHGGQVLAVPPAYTSQRCACCGHTAKENRLSQSKFRCQVCGYTANADVNGARNILAAGHAVLACGGMVQSGRPLKQEPTEMIQATA

SEQ ID NO: 1825 - protein, 374 aa, unidentified
MNKAYRYRLYPSAEQAILINKTFGCVRFIYNQMLANRKTIYEQYKDDQEVLKQQRYSLPADYKKDFEWLKEVDSLALANAQLNLNTAYKNFFRDKSVGFPNFKRKHRDRKSYTTNNQKGSIRLIDSKTIRLPKLKDVRIKLHRQLPPNSIIKSATLSQTPTGKYYIAILVEFEAKIESITPTVETTLGLDYSSKSLVVDSEARSADYPRFYRKVEAKLQKAQRKLSKRLKGGKNRNKQRQKVAKLHEKVANQRKDFLHKVSRQITNAYTAVAIEDLNMRTIAQCLKLAKSTNDNGFGMLKTFLAYKLAEQGKQLVTIDKWYPSSKLCRYCKNINMELTLADRTWSCKHCGSKIDRDINAAINIRNEGCRILGIA

SEQ ID NO: 1826 - protein, 374 aa, unidentified
MNKAFRYRLYPSAEQAILINKTFGCVRFIYNQMLANRKTIYEQYKDDKETLKQQRYSLPAAYKNQFEWLKEVDSLALANAQINLNTAYKNFFRDKSVGFPKFKRKHRDRKSYTTNNQKGSIRLIDSKTIRLPKLKDVRIKLHRQLPPNSILKSATISQTPTGNYYIAILVEFEAKLEPITPTVDSTLGLDYSSKSLVVDSEARSADYLRFYRNAEVKLKKEQRKLSKRLKGGKNKNKQRLKVAKLHEKVANQRKDFLHKLSRQIANAYTAVAIEDLNMRAVAQCLNLAKSTNDNGFGMLKTFLAYKLAEQGKQLVMTDKWYPSSKLCRYCKTVYPELTLADRTWSCKHCGAEIDRDINAAINIKNEGCRILGIA

SEQ ID NO: 1827 - protein, 284 aa, unidentified
MRQRTWYNFRLYPTPGQRQALARAFGCARVVFNDGLRARTDAREQGVPYIRDGELSKRVITEAKKTPERSWLGEVSAVVLQQALADLNTAYRNFFNSMAGKRKGPKVAPPRFRSKRDNRQAIRFTKNARFSVTAGGKLRLPKIGDVPVRWSRDLPAEPSSVTVIRDAAGRYFASFVVETAGEPLAKVTPKIGIDLGLTHFAVLSDGRKVDNPRFLRRAERRLRKAQQELSRKEKGSANRHKARAKVAKAHAGVADARRDWAHKLSTALIRDNQAVYVEDLAASG

SEQ ID NO: 1828 - protein, 406 aa, unidentified
MQLRYSFRLYPNHAQRGALARAFGCARVVFNDAVRAREDARAVGGPFPKAGELSTRLITQAKQTEARSWLGEVSAVVLQQSLRDAETAYKNFFASLKGERKGPKLGAPRFKSRKDARQSIRFTANARWSVTDSGRLSLPKIGPVKVKWSRILPTTPTSVTVIKDAAGRYFASFVIDTDPAADAARTPDSDQSVGIDLGLTHFAILDDGTKIDSPRFLRRAEKKLKKAQRELSRKQKGSKNREKARLKVARAHAQVADARREFHHQLSTKLIRENQAIGVEDLAVNALARTPLAKSVHDAGWSQFVAMLVYKADRYGRTLIKIGRFVPTSQTCSHCDHVEGPKPLHIREWTCPACGALLDRDINSARNVKKAAGLAESACGAPIRPESVLAQRNEAGSHGFPPKASA

SEQ ID NO: 1829 - protein, 407 aa, unidentified
MQLRYSFRLYPDTSQQTALAKAFGCARVVFNDAVRAREDARTAKQPFLTAGQLSRKLITEAKQTKERSWLGEVSAVVLQQSLRDVETAYRNFFASLKGTRRGAKVGPPRLKSRKDARQSIRFTANARWSITGSGRLNLPKVGAVKVKWSRTLPTTPSSVTVIKDAAGRYFASFVIDTDPAADAARMPQTDRTVGIDLGLTHFAVLSDGTKIDSPRFLRRAEKKLKKAQKELSRKLKGSKNRAKARLKVARAHAKVADARREFHHQLSTKLISENQGIAVEDLSVKGLARTRLAKSVHDAGWASFIGMLEYKAERFGRTLVKIDRFEPTSQTCSACGAVDGPKPLNVREWTCGACGTVHDRDTNAAINVKTAAGLAATACGAPVRPGAIPAQREETGSHGFPTGNRAA

SEQ ID NO: 1830 - protein, 353 aa, unidentified
MKQTKTLKVRVKDKHAAELNRMARSVNFVWNYVNELSSRSIRERRVFLSAYDIQKYTNGVAKELGLHSHTVQEVGREYATRRKQFRKSRLAWRKSRGVRRSLGWVPFKSGAAKWKSGQVFHNGSYFKVWDSFGLSKYAFRSGSFSEDARGRWYFNVVVEVDVQPSVGQGAVGIDLGLKDVATCSDGKRLKSGRFYHDLEDKLTTAQRARNKRRVKAIHAKIKNRRKDALHKFSRRLVDQHGEIVVGDVSPTKLAKTRMAKSVLDAGWGQLKTMLEYKCDHASIVFREVREAYTTRTCSSCGSLSGPQGVNGLRVRDWMCVECGALHDRDVNAARNILSLGAGRCPQEVGIPVL

SEQ ID NO: 1831 - protein, 407 aa, unidentified
MQLRYSFRVYPNTVQQAALARAFGCARVVFNDAVRAREDARRAGQPFPTAGQLSRKLITEAKQTPERAWLGEVSAVVLQQSLRDAETAYRNFFASLKGTREGPKLGAPRFKSRKDARQSIRFTANARWHLTDSGRLNLPKIGAVKVKWSRTLPNTPTSVTVIKDAAGRFFASFVIDTDPDADQARMPETDRTIGIDLGLTHFAVLSDGTKIDSPRFLRRAEKKLKKAQRELSRKQKGSRNRAKARLKVARAHTKVTDARREFHHQLSTRLISENQGIAVENLSVAGLARTRLAKSVHDAGWSSFIGMLEYKAARYGRTLVKTGRFEPTSQTCSTCGAVDGPKPLNVREWTCTACGTVHDRDLNAAINIKTAAGLAVSACGAPVRPEPVLAQREETGSHGFPTGNRAA

SEQ ID NO: 1832 - protein, 407 aa, unidentified
MQLRFAFRLYPEPGQRSALARAFGCARVVFNDAVRAREDARRAGRPFPRAGELSRALITEAKRTSERSWLGEVSAVVLQQSLRDAETAYRNFFASLKGTRKGPKAGAPRYKSRKDARQSIRFTANARWNITDGGRLNLPKIGAVKVKWSRTLPATPSSVTVIKDAAGRYFASFVIDTDPAADAARMPGTDRTIGIDLGLTHFAVLSDGTKIDSPRFLRRAEKKLKKAQRELSRKQKGSKNREKARVKVARAHAKVADARREFHHQLSTRLISENQGIAVEDLSVAGLARIRLARSVHDAGWAQFVSMLEYKAKRYARTLVQVGRFEPTSQVCSACGRRDGPKPLHVRERTCAACGTVHDRDHNAAMNVRSAAGLAVTACGVQVRPEPVLAQHDEAGSLGSPRDAGAA

SEQ ID NO: 1833 - protein, 352 aa, unidentified
MKHTKTLQVRVRDKHAPLLRQMARSVNFVWNYLNELSHRSIRERGVFLSAFDLHPYTKGAGKELGLHSQTLQCVAAEYVTRRKQFRKRRLNWRKSGGARRSLGWVPFNTGAASWKNGQVYHNGHYFKVWDSYGLAQYRLRSGSFSEDARGRWYFNVVVELETQLSTGQGAVGIDLGLKDVATCSDGQRLENGRFYRDLEPKLASAQRAGKKARVRAIHAKIANRRKDALHKFSRSLVERCNTIIVGDVSPQKLVRTRMAKSVLDAGWGQLKTMLAYKCAHAGIVFRVVNEAYTTQTCSCCGALPASRPRGIAGLGIREWICECGVTHDRDVNAARNILALGHGRPVEGIPGA

SEQ ID NO: 1834 - protein, 354 aa, unidentified
KTFGCVRFIYNQMLANRKTIYEQYKDDQEVLKQQRYSLPADYKKDFEWLKEVDSLALANAQLNLNTAYKNFFRDKSVGFPNFKRKHRDRKSYTTNNQKGSIRLIDSKTIRLPKLKDVRIKLHRQLPPNSIIKSATLSQTPTGKYYIAILVEFEAKIESITPTVETTLGLDYSSKSLVVDSEARSADYPRFYRKVEAKLQKAQRKLSKRLKGGKNRNKQRQKVAKLHEKVANQRKDFLHKVSRQITNAYTAVAIEDLNMRTIAQCLKLAKSTNDNGFGMLKTFLAYKLAEQGKQLVTIDKWYPSSKLCRYCKNINMELTLADRTWSCKHCGSKIDRDINAAINIRNEGCRILGIA

SEQ ID NO: 1835 - protein, 382 aa, unidentified
MRRFAGACRFVFNRALALQNENHEAGKKYIPYTKMASWLVEWKKDTETEWLKDSPSQPLQQSLKDLERAYKNFFQNRAAFPRFKKRGQNDAFRYPQGVKLDQENSRIFLPKLGWMRYRNSRQVTGVVKNVTVSQSCGKWYISIQTEREVSTPVHPSVSMVGLDAGVAKLATLSDGTVFEPVNSFQKNQKKLARLQRQLSRKVRFSNNWQKQKRKIQQLHSRIANIRRDYLHKVTTIISKNHAMIVIEDLKVKHMSKSAAGTISQPGRNVRAKSGLNRSILDQGWYEMRRQLEYKQLWHGGQVLAVPPAYTSQRCACCGHTAKENRLSQSKFRCQVCGYTANADVNGARNILAAGHAVLACGGMVQSDRPLKQEPSEMIQATA

SEQ ID NO: 1836 - protein, 373 aa, unidentified
MLKVFHYRLYPTKAQKKELNKTLELCKWTYNETLAIRKNAWESEQKRISYYDSKKMIPIWKKDKPELKEVHSQVLQEVVKRVDLAFQAFFRRVKSGEKPGYPRFKGYGRYDSITYTQSGFSLDFNMLSLSKIGDIKIKLHRPVEGEIKRLNVRKMPTGKWFASFLVETEFPLILQKTRLSIGVDVGISSFLTLSDGQHVPNPRFFVNEEKNLAKAQRKLSKAEKGTALRNKALKVVQHVHERITNKRNDFAQKVSLNLVKTYDLIIFEDLNIKGMIQNHCLAKHIADVAWNQLITLTTYKAEWAGKRVELVNPYNTSQMCSGCGQIVQKDLSERTHSCPFCGLIIDRDHNAAINILRLGLQSLRIPDRCPSFQ

SEQ ID NO: 1837 - protein, 368 aa, unidentified
MRRAFKYRVYPTKAQAAKLGAWLNLCRELHNAAIQERRDHWNNAGISVGFNDQSKRLPSIKQNRPEFAEVYSQVLQQALHRVDSAFQYFFRRVKNGGTPGYPRFKSADRYNSLVWPQDIGFRLVGMKRIRLSGIGEVKIKLHRPVGGTPKTLTVKREAGRWYAVFSCDAVPPRAYPDAVSEVGIDMGIESFATLSTGEKIENARWYRKAEKRMAEAQRALSRKKRGSKRRAKAKRRLARLRAKEKNQRTDFQHKLAHRIVSENAVVVVEDLKPKEMIEKSSTGLSKSIQDAAWSRFLSILEAKAEEAARRFVKVSPRGTSSTCSRCGAFRKKTLSERLHACPCGLVLDRDINASINILRLGRSLQVAS

SEQ ID NO: 1838 - protein, 434 aa, unidentified
MYEAVKVALDPTPCQSRRLESHAGAARFAYNVTLSHIKDSYMAGEKQGWSFYSLRNWWNSAKDALTLNEESGEVWWPENSKEAYNSGLESLANALKNFSKSRKGQRKGRRMGFPRFKSKDKAVPRFAYTTGSFGIIDHDPYALKLPKIGRVHCFENVAKRVGDAKIVRMTISQRAGRWHASICVEKPDAEPKSPLKGGTVGIDLGVKELATLSDGTVAHNPHALRRNLRKLRYEQRNLSRKTKGSNRRAKARLRVAKTYKRVSDLRSDSMHKLTTAIAKSWSDVCIEDLNVAGMLRNHHLAQAVADASFAEFRRQLTYKTARTGARLHVIDRWCPSSKTCSNCGTVKAKLSLSERVYHCDKCGLDMDRDLNAAINIQVAGSAPETLNARGGSGRRADASRRATRHPMKREPSGGESRVRLGAGLGNEAMQMTSL

SEQ ID NO: 1839 - protein, 352 aa, unidentified
MKHTKTLQVRVRDKHTQLLRQMARQVNFVWNYLNELSHRSIRERGVFLSAYDLDRYTQGASKELGLHSQTLQEVSREYATRRRQFKKARLSWRKSIGVRRSLGWIPFKSGAASWKNGQVFHNGRCFKVWDSYGLGQYRLRSGSFSEDARGRWYFNVVVELETQLSTGQGVVGIDLGLKDVATCSDGQRLENGRFYRDLEPKLASAQRAGKKARVRAIHAKIANRRKDALHKFSRSLVERCNXIIVGDVSPQKLVXTXMAKSVLDAGWGQLKTMLAYKCAHAGIVFRVVNEAYTTQTCSCCGALPXSRPRGIAGLGIREWICECGVTHDRDVNAARNILALGHGRPVEGIPGA

SEQ ID NO: 1840 - protein, 374 aa, unidentified
MNKAFKYRIYPSPEQEILINKTFGCVRFVYNKMLANRKAVYEQFKDDKEALKQQKYLLPAEFKKEFEWLKEVDSLALANAQLNLQTAYKNFFRDKSIGFPKFKNKHRDKKSYTTNNQGGTIRLIDSKIIRLPKLKDVRIKLHRQLPKEAVIKSATISKTPTGNYYISVLVEFEAAIKPVTPTRETVLGLDYSSKTLFVDSQANNADYPKFYRQAEAKLKKAQRKLSKRQKGSKNRDKQRRKVAKLHEKVAHQRKDFLHKLSRQIADDYSAIAIEDLNMLGMAQCLNLSKSTNDNGFGMLKTFLTYKLTEQGKQLVVIDKWFPSSKMCRFCNNENKELTLSDRTWTCSHCGAELDRDINAAINIKNEGCRLLGIA

SEQ ID NO: 1841 - protein, 370 aa, unidentified
MAKQNKAYKFRLYPTKEQSLIIRKTFGCVRFVYNKMLAERKETYETLKDDKESLKSVKHPTPAKYKKEYEWLKEVDSLALANAQLNLDKAYKAFFKGNAKFPKFKSKRHKQSYTTNVVNGNIELLDGHIKLPKLKKVKIKQHREIPSEYIIKSCTLSMTASGKYYISILTEYENEIETKETKEIVGLDFAMDGLFVDSEGEKANYPKFYRQMLDKLAKEQRKLSRKKKGSSNWNKQRIKVAKIQEKVANQRKNFLHHKSKELVTFYDAVVIEDLDMKGMSQALKFGKSVADNGWGMFTSFLQYKLNEQGKQLIKIDKWFPSTKTCSNCGNTQPMPMNIRTYACSCGLNLDRDYNSALNIKKEGIRLLASA

SEQ ID NO: 1842 - protein, 382 aa, unidentified
MLKAYKFRIYPTKSQRTKMERTLDLCRWTYNETLEIRKTAWEDEGKSLSKYETNNLLPEWKENKPELKEVFSQVLQNVHERVDLALKAFFRRVKAGEKPGYPRFKGIGRYDSFTYPQKGFKVDSGKLYLSKIGEIKIKLHRPIEGKIKRLTVRRSATGKWYACFSVDLEDLPKPPWKDGSLVGVDVGLESFATLSNGVKIANPRFFREEEHELARVQRKLSKAPKGTPERKKALKVVERVHERIANKRYEFAHRISNQLVNRYGLIAFEDLNIKGMMHNHNLAKSIGDVAWNMLVTLTSYKAASAGSMVVLVDPRNTSKMCSRCGILVQKDLSERVHNCTQCGLSMDRDWNAAINILRLGLQSVGIQSVQARPLSRAGVVTG

SEQ ID NO: 1843 - protein, 434 aa, unidentified
MLEAVKVALDPTPRQERLLESHAGAARFVYNGGLAHVKDMLERGDKPEWSYYGLRRWWNQAKDTLAVDETTGETWWPENSKEAYNSGLESLADALKNFSKSRRGQRKGRRMGFPRFKSKDKAVPRFAYTTGSFGLIDCDPHALRLPKIGRVHCMENVSKRVNGAKVLRMSVSKRGGRWQASLTVERADLPIPSPPKGGSVGIDLGVKELATLSDGTVIHNPHALKSNLRRLKKAQRNLSRKRKGSNRRRKARAQVARLYARVANLRSDALNKTTTMLAHTYADISIEDLNVAGMAGNHRLAQSIQDAAFAEFRRLLTYKTARTGARLHVIDRWYPSSKTCSNCGTVKAKLPLSERVYHCEECGLVIDRDVNAAINIQVAGSAPETLNARGGSVRQAHPKGGTMRHPAKREPSGGESRVRLGAGLGNEAMQMTSL

SEQ ID NO: 1844 - protein, 593 aa, unidentified
MPVTEVLRAYRFTLDPSDSERAALSRYSGACRWAYNYALAKKTQAHQAWADRRTAYVEAGLTEAEAKERIKADGAELTDRIRVWDHHRKSLTPTIVGKPPPAAMRSPAGQEALVRRLAAARADATGTSRERELLAEGRATVNALKAQAFSAGFRTPTATDTSSLWRMERDLPKERGGSPWWSEVNVYCFTSGFDRAQVAWKNWQDSLTGRRAGRRHAYPRFKKKGHAESFSLFHDVMRPIIRLEGYRRLVMPGLGSIRIHDSGKRLARLVGRGQAVIQSVTVSRGGHRWYASVLVKVQQDVPVLWEHVHDDGTRTPYLSRIQAEKASENGGCVEQIGRPTARQRAGGLVGVDLGSHHLAALSSPLDPADPATAVVHHPRLLAVSLAKLSKAQRAMSRCQQGSGRWRKATARVSRAHQQVTVRRASFLHGLSKKLATGFTHVAIEDLDITALTTSAEGTRDKPRKNATAKTRPNQRLLDAGLGSLRKKLAYKTAWYGSQLVVLDQGEPVTASCAKCKERNPSSDPSCSTFHCPSCGAVVHRHVNSTANIVDAAHRKLKTVASDRGETQNARRAPGSPGARKAPGQGASKREDTG

SEQ ID NO: 1845 - protein, 593 aa, unidentified
MPRTEVLRAYRFALDASDAQRAALSRYAGACRWAYNYALAKKTRAHQAWAERRTAYLEAGLSEAEAKERIKADGAELTDRIKVWDHHRKSLALTVAGKPPLPAMQSPAGQGVLIRRLAAVRADAAGSGSERELLAAARATVNALKVEAFSAGFRTPTSTDTSALWRIERDRPRKEGGSPWWSEVNVYCFTSGFDRAQVAWRYWQDSLAGRRAGQRTGYPRFKKKGHAESFALFHDVKRPIIRLDGYRRLVMPGLGSIRIHDSGKRLARLVDRGQAVIQSVTVTRGGHRWYASVLAKVQQDVPVLWEHVDDDGTRTPYLSRTQAETAAENGGRVEQIGRPTARQRAGDLVGVDLGSPYLAALSSPLHPADPATALVPHPRLLADSLPKLAKAQRAMSRCQQGSERWRKATAQVSRLHQQITVRRASFLHGLSKTLATGFTHVAIEDLRLTALLTSAKGNPDKPGKAAKRKSHSNRHLLETGQGSLRKKLEYKTAWHGSQLVVLDHREPVAGTCSKCKERNPSSDSSHSKFHCLSCGAVVHRHENNTANIVHTALRQLMTVASDRGETQNARRATVSPLARKGPGREALKREDTG

SEQ ID NO: 1846 - protein, 407 aa, unidentified
MQLRYSFRLYPDTGQLRALAKAFGCARVVFNDAVRAREDARKAKQPFPTAGQLSRRLITEAKRTPERSWLGEVSAVVLQQSLRDAETAYRNFFASLKGTRKGARIGPPRCKSRKDARQSIRFTANARWSITRSGRLNLPKIGAVKVQWSRTLPSTPTSVTVIKDAAGRFFASFVIDTDPAADQARMPETDRTIGIDLGLTHFAVLSDGTKIDSPRFLRRAEKKLKKAQQELSRKQKGSRNRAKARLKVARAHAKVTDARREFHHQLSTKLISENQGIAVEELSVAGLARTRLAKSVHDAGWASFISMLEYKAQRYGRTLVTIGRFTPTSRTCSTCGVVDGPKPLNVRKWTCAACGVVHDRDVNAAINVKTAAGLAVTACGAQVRPGRVPAQCDEAGSHGFPSKDCVA

SEQ ID NO: 1847 - protein, 407 aa, unidentified
MQLRYVFRVYPDAGQRTALARAFGCARVVFNDAVRAREDARRAGRPFPKAGELSTRLITEAKQTIERSWLGEVSAVVLQQSLRDAESAYRNFFASLKGDRKGPRMGAPHFKSRKDKRQSIRFTANARWSITDKGRLNLPKIGAVKVKWSRTLPTTPSSVTVVKDAAGRYFASFVIDTDPAADATRMPETDRTIGIDLGLTHFAVLSDGTKIGSPRFLRRAEKKLKKTQRELSRKQKGSKNREKARLTVARAHAKVTDARREFHHQLSTRLIYENQGIAVEDLSVAGLARTRLAKSVHDAGWSSFVNMLEYKAVRYGRILVKVGRFTPTSQVCSTCGVKDGPKPLSVREWTCTACHTVHDRDHNAALNVQQAAGLAVSACGAPVRPEPVLAQREETGSHGFSTGNRAA

SEQ ID NO: 1848 - protein, 407 aa, unidentified
MQLRYAFRLYPEPGQRTALARAFGCARVVYNDAVRAREDARRAGEAFPAAGVLSRKLITQAKQTPERSWLGEVSAVVLQQSLRDAETAYRNFFASLKGQRQGAKSGAPRFKSSKDTRQSIRFTANARWSITGSGRLNLPKVGAVKVKWSRTLPAQPSSVTVIKDAAGRYFASFVIDTDPAADAARMPATDHTVGIDLGLTHFAVLSDGTKIDSPRFLRRAEKKLKKAQRELSRKQKGSRNRERARLKVARAHAGVVDARREFHHRLSTQLISENQGIGVEDLAVRALARTGLAKSVHDAGWTQFVAMLEYKAVRYGRTLVKIGRFEPTSQVCSGCGANDGPKPLHIREWTCAACGAVHDRDHNAAKNVKTAAGLAVTACGAQVRPGLVLAQRDEAGSHGFPSEPRAA

SEQ ID NO: 1849 - protein, 407 aa, unidentified
MQLRYSFRLYPDTGQQTALAKAFGCARVVFNDAVRAREDARKAGQRFPTAGELSRRLITEAKRTGERAWLGEVSAVVLQQSLRDAEAAYRNFFTSLKGARKGPKLGAPRFKSRKDARQSVRFTANARWSITGSGRLNLPKIGAVKVKWSRTLPATPTSVTVVMDAAGRYVASFVIDTDSVADQARMPETDRTIGIDLGLTHFAVLSDGTKIDSPRFLRRAEKKLKKAQQELSRKQKGSNNRAKARLKVARAHAEVTDARREFHHQLSTKLISENQGIAVEDLSVKGLARTKLAKSVHDPGWASFISMLEYKAERYGRTLVKIGRFTPTSQTCSTCGTVDGPKPLHVREWTCTACGTVHDRDINAAINVKTAAGLAASACGAPVRPGTIPAQREETGSHGLPTEPRAA

SEQ ID NO: 1850 - protein, 356 aa, unidentified
MTELTIKTLKVRVRDKHGKALRRQAAAVNFVWNFINELSSRSIRERGIFLSAYDIQRYTNGAGKELGLHSHTVQRIGAEYVTRRQQFRKQRLAWRKTAGVRRSLGWIPVNTGQAKWKNGQVFFHGQHYKVWDSHGLSQHRFRSATFSEDARGRWYFNVVVEVPVEQSAGTGAVGIDLGCKDAAICSNGEKLTGRWYRAMEDKLAVAQRARKKQRVKAIHAKVANRRKDAMHQFSRRLVNENAAIFVGNINTQAITKTRMAKSSLDAGWGILKTMLEYKCAGAGVVFGLVDERYTTVTCSACNSRTGPSGLEGLRIREWTCRVCGVIHGSRDVNAARNILALGHERLAGGITVSSGR

SEQ ID NO: 1851 - protein, 370 aa, unidentified
MEYSYKFRLYPTATQQEQMARNFGCCRYVFNHFLAQRHEQYRENGKAPTRFQQDKSLTALKQELPWLKEVDSTSLQAALQDLDTAYQNFFRRMKQGEKPGYPRFKSKHNHRQSYKSKCVGTNIKVLDHAVQLPKLGKVKCRISREVKGRILSATISRNPSGKYFVALCCTDVEIKPLPSTGAAVGLDMGIKSFAVTSDGVEHPNHKHLAKSEKKLARLQRQLSRKTKGSNRREKARLQLARLHEHVANQRQDMLHKLSTDLMRQYDLICIEDLAPKNMVKNHRLAKSISDASWGEFRRQLEYKSKWYGKQVVTIDRFFPSSQLCSVCGAQWPGTKDLSVREWFCPVCGTVHGRDINAAKNILNEGLRLLA

SEQ ID NO: 1852 - protein, 370 aa, unidentified
MAKQNKAYKFRIYPTDEQALIMRKTFGCVRFVYNKMLAERIETYESLKDDKEALKKVKHPTPAKYKKEFEWLREVDSLALANAQLNLDKAYKAFFKGNAKFPKFKSKRHKQSYTTNVVNGNIQLLDGHIKLPKLKMVKIKQHRKIPSEYKIKSCTLSMTSAGKYYISILTEYELEIKNKEIENVVGLDFAMDGLFVDSEGEKANYPKFYRQMLNKLAKEQRKLSRKKKGSSNWHKQRVRVAKIQEKVANQRKNFLHNKSKELVTTYDAVIIEDLDMKGMSQALRFGKSVADNGWGMFTSFLQYKLKEQGKQFVKIDKWFPSTQTCSNCGNTQPMPMNIRTYACSCGLNLDRDYNSALNIKKEGIRLLASA

SEQ ID NO: 1853 - protein, 407 aa, unidentified
MQLRYAFRLYPDAAQQASLARAFGCARVVFNDAVRAREDARTAGRPFPTAGQLSRKLITEAKQSKERSWLGEVSAVVLQQSLRDVEAAYRNFFASLTGTRKGPKLGAPRFKSRKDHRQSIRFTANARWSITGSGRLNLPKIGAVKVKWSRTLPTTPSSVTVIKDAVGRFFASFVIDTDPAVDAERMPETENTIGIDLGLTHFAVLSDGTKIDSPRFLRRAEKKLKKAQRELSRKQKGSKNRAKARQKVARAHAEVADARREFHHQLSTKLIAENQGIAVEDLSVAGLARTRLAKSVHDAGWSQFIDMLTYKAARYGRTLIKISRFEPTSQTCSTCGHRDGPKPLNVWEWTCMACGTVHDRDTNAAINVKTAAGLAVSACGAPVGPEPVLAQREETGSHGFKTGNCAA

SEQ ID NO: 1854 - protein, 406 aa, unidentified
MQLRYSFRVYPNTVQQAALARAFGCARVVFNDAVRAREDARKGGQPFPTAGQLSTRLITQAKRTPERAWLGEVSAVVLQQSLRDAETAYRNFFASLKGTRKGPKLGPPRFKSRKSRQSIRFTANARWSITVSGRLNLPKIGAVRMKWSRTLPATPTSVTVIKDAAGRFFASFVIDTDPAADQARMPETDRTIGIDLGLTHFAVLSDGTKIDSPRFLRRAEKKLKKTQRELSRKQKGSKNCAKARLKVARAHAEVADARREFHHQLSTRLISENQGIAVEDLSVVGLARTRLAKSVHDAGWAQFIGMLAYKAQRYGRTLVMIGRFEPTSQTCAACGVTDGPKPLNVREWTCTACGSVHDRDINAARNIKTAAGLAVTACGAPVRPGAIPAQREETGSPGFPTGSRAA

SEQ ID NO: 1855 - protein, 381 aa, unidentified
MLKAYKFRIYPTKSQRTKMEQTLDLCRWTYNQTLAYRKNAWEKEGKSISKYETHNLLPTWKEIKPELGGVFSQTLQNAQERVDLALKAFFRRVKAGENPGYPRFRGRGWYDSFTYPQKGFKLNAGKLYLSKIGNIKIKLHRPIEGKIKRLTVRRAATGKWFACFTVEMEDQPKPPWKDGSLVGVDVGLESFATFSNGEKIANPRFFREEEKELTRVQRKLSKAPKGTLERRSASKVVERVHERIANKRYEFAHQVSRDLVNRFGLIAFEDLSIQNMLKNHCLAKSISDVAWNMLVTLTSYKAASAGSVVILVDPRNTSKMCSRCGILVEKTLSDRVHNCPHCGLSVDRDWNAAINILRLGLQSVGIKTVEACPFKGAGVVT

SEQ ID NO: 1856 - protein, 407 aa, unidentified
MQLRYSFRLYPDAGQQGALARAFGCARVVFNDAVRAREDARRAGRPFPTAGELSTRLITEAKKTASRSWLGEVSAVVLQQSLRDAEAAYKNFFASLKGTRKGPTLGAPRVKSRKDARQSIRFTANARWNITDSGRLNLPKIGAVKVKWSRTLPATPTSVTVIKDAAGRFFASFVIDTDPVEDAARMPESDQSIGIDLGLTHFAVLSTGEKIDSPRFLRRAEKKLKKAQRELSRKQKGSKNREKARLKVARAHAQVTDARKEFHHQLSTKLISENQGIAVETLSVAGLARTRLAKSVHDAGWTAFVNMLEYKAQRYGRTLIKIGRFEPTSQTCSTCGFKDGPKPLNIREWTCTACGTVHDRDRNAALNVKQAAGLAVSACGAPVRPEPVLAQREETGSHGFPTGNRAA

SEQ ID NO: 1857 - protein, 407 aa, unidentified
MQLRYAFRLYPDTAQQAALARAFGCARVVFNDAVRAREHARQAGEAFPTAGQLSTCLITQAKRTAERGWLGEVSAVVLQQALRDAEAAYRNFFASLKGSQKGPRLGQPRFKSRKDARQSIRFTANARWSITGAGRLNLPKIGAVRVKWSRTLPATPSSVTVIKDAAGRYFASFVIDTDPAADQARMPETDRTIGIDLGLTHFAVLSDGTKIDSPRFLRRAEKKLKKAQKELTRKQKGSKNRAKARLKVARAHAKVADARREFHHQLSTQLISENQGIAVEDLSVAGLARTKLAKSVHDAGWAQFLSMLEYKAQRYGRTLVKIGRFEPTSQTCSTCGVKDGPKPLNIREWTCTACGTVHDRDHNAALNVKTAAGLAVSACRAPVRPGAIPAQREETGSHGFPTGHRAA

SEQ ID NO: 1858 - protein, 352 aa, unidentified
MKHTKTLQVRVRDKHTQLLRQMARQVNFVWNYLNELSHRSIRERGVFLSAYDLDRYTQGASKELGLHSQTLQEVSREYATRRRQFKKARLSWRKSIGVRRSLGWIPFKSGAASWKNGQVFHNGRCFKVWDSYGLGQYRLRSGSFSEDARGRWYFNVVVELETQLSTGQGVVGIDLGLKDVATCSDGQRLENGRFYRDLEPKLASAQRAGKKARVRAIHAKIANRRKDALHKFSRSLVERCNTIIVGDVSSQKLVKTKMAKSVLDAGWGQLKTMLAYKCAHAGIVFRVVNEAYTTQTCSCCGALPDSRPRGIAGLGIREWICECGVTHDRDVNAARNILALGHERPGEGIPGV

SEQ ID NO: 1859 - protein, 399 aa, unidentified
MRLRYNFRLYPTAGQRAALARAFGCARVVFNDGLRIRQDAHAAGLPYISDGELSKRVITEAKKTPERSWLGEVSAVVLQQALADLNAAYRNFFASVTGTRKGPKVAPPRFRSKKDNRQAIRFTRNARFAITDGGKLRLPKIGDVRVRWSRNLPAEPSSVTVVRDAAGRYFASFVVEVAPEPLPEADAEVGIDLGLAAFAVLSDGRKVDSPRFLRRAERKLRKAQRALSRKQQGSKNREKARLRLARAHARVADARRDFHHQTSTRIIRENQAVYAEDLAVNGLARTRLAKSVHDAGWAAFLAMLEYKAARHGRHFARIGRFRPTSQVCSACGGKDGPKPLHVRAWTCSHCGTSHDRDLNAAKNILAAGRAERRNACGAGVRPGPALAAGGEAGTHRGAA

SEQ ID NO: 1860 - protein, 403 aa, unidentified
MVIIVRLRYNFRLYPTAGQRAALARAFGCARVVFNDGLRIRQDAHAAGLPYISDGELSKRVITEAKKTPERSWLGEVSAVVLQQALADLNAAYRNFFASVTGTRKGPKVAPPRFRSKKDNRQAIRFTRNARFAITDGGKLRLPKIGDVRVRWSRNLPAEPSSVTVVRDAAGRYFASFVVEVAPEPLPEADAEVGIDLGLAAFAVLSDGRKVDSPRFLRRAERKLRKAQRALSRKQQGSKNREKARLRLARAHARVADARRDFHHQTSTRIIRENQAVYAEDLAVNGLARTRLAKSVHDAGWAAFLAMLEYKAARHGRHFARIGRFRPTSQVCSACGGKDGPKPLHVRAWTCSHCGTSHDRDLNAAKNILAAGRAERRNACGAGVRPGPALAAGGEAGTHRGAA

SEQ ID NO: 1861 - protein, 407 aa, unidentified
MQLRYSFRVYPDARQRTALTRAFGCARVVFNDAVRAREDARRAGRPFPTAGELSTRLITEAKQTTSRSWLGEVSAVVLQQSLRDADTAYRNFFTSLKGTRKGPKLGAPRLKSRKDARQSIRFTANARWKITDSGRLNLPKIGAVKVKWSRTLPATPTSVTVVMDAAGRYFASFVIDTDPATDAARMPDTDRTIGIDLGLTHFAVLSDGTKIDSPRFLRRAEKKLKKAQQDLSRKQKGSRNRDKARLKVAHAHAKVADARREFHHQLSTRLLSENQGIAVEDLSVVGLARTRLAKSVHDAGWSSFTSMLKYKAQRYGRTLITIGRFTPTSQTCSTCGVVDGPKPLNVREWTCGACGALHDRDVNATINVKTAAGLAASACGAPVRPELVLAQREETGSHGFPTEPCAA

SEQ ID NO: 1862 - protein, 363 aa, unidentified
MPKAYRYRLYPTKSQVSQMEQTLELCRWVYNETLAMRKSAWEQEQRSISYYESKRQIPLWKKEHPELSGVYSQVLQDVSMRVDLAFKAFFRRVKAGENPGYPRFKGRGRYDSFTYPQYGFKLDGDRLHLSKIGDVKVVLHRPVEGTIKTLTIRRSSTGKWYACFSVEYDPSPLPQKETTVGIDVGLESFATLSNGEKIENPRFFRTDEKALAKAQRKLSKAEKGTPERKKARKIVAHIHERIANRRLNFAHQTSRKVVDRFGTIVFEDLKITTMQKNHHLAKSIADVAWNLFISITEGKAEEAGSHVIRVNPRNTSQMCSRCGMIVAKTLSDRIHSCPHCGLVMDRDQNAAINIMRLGLQSQG

SEQ ID NO: 1863 - protein, 390 aa, unidentified
MLKATKVRIYPTPEQTDFLNRQFGAVRMVWNKALAIKTHYYKVREQNLSPRKDLKPLLVTAKKSRKYSWLKEADSIALQQSVINLDKAFQNFFNPKLEARFPRFKSKHGKQSSYHCMSVAVGENWVKVPKCKPIKARIHREITGTVKSITLTKTPTGKFYASVLAEDDMSEARQITELQSSRIVGVDVGLTDIAITSTGVKTGNPRFIKNAQRNLKRKQKALSRCKKGSKGRVKARLLVAKAHERVAFARNDFQHKLSRQLIDENQAVIVETLKVKNMLKNHCLARSIADAGWHSLVIKLDYKAKQAGKHLVKIDQWFASSKTCSCCDRKQEEMPLNIRSWTCECGYVADRDINAAINVKKQGILKLKAEGLSVSADGGKRKSSTVLVAA

SEQ ID NO: 1864 - protein, 353 aa, unidentified
MKQTKTLKVRVKDKHATQLNRMARSVNFVWNYLNELSSRSIRERGVFLSAYDMDRYTKGASKDLNLHSQTLQEVSREYATRRQQFKKQRLAWRKSRGTRRSLGWVPFKTGAAKWKNGQVFYNGSYFKVWDSYGLSQHRFRSGSFNEDTRGRWYFNVVVEVEVQPSTGQGAVGIDLGLKDVATCSDGEKLENGQFYRDLEARLATAQRARNKRRVKAIHAKIKNRRKDVLHKFSRRLVDQHGEIYVGDVSPLKLAKTRMAKSVLDAGWGQLKTMLEYKCDHAGIVFQEVREAYTSRTCSSCGSLSGPQGVSGLRVRDWECVECGALHDRDVNAARNILSLAAGHRRPEVEISAL

SEQ ID NO: 1865 - protein, 369 aa, unidentified
MVNKSYKFRLYPTKEQEQLLAKTFGCVRFVYNKMLEERIQIYEKFKDDKEALKKQTFPTPAKYKKEFPWLKEVDSLALANAQLNLQKAFQNFFSGRAGFPKFKNRKAKQSYTTNVVNGNIQLSDGYIKLPKLKWVKFKQHREIPAHHIIKACTITKTKTGKYYVSILTEYEHQPVPKEIQTVVGLDFSMNTLYVDSEGKRANYPRFYRQALEKLAKEQRILSRRKKGSNRWHKQRLKVAKLHEKIANQRKDFLHKKSYELAKLYDCVVIEDLNMKGMSQVLNFGKSVHDNGWGMFTTFLQYKLEEQGKKLIKIDKWFPSSKTCSCCGQVKESLSLSERTFRCECGFESDRDVNAAINIKHEGMKRLAIA

SEQ ID NO: 1866 - protein, 369 aa, unidentified
MVNKSYKFRLYPTKEQEQLLAKTFGCVRFVYNKMLEERIQIYEKFKDDKEALKKQTFPTPAKYKKEFPWLKEVDSLALANAQLNLQKAFQNFFSGRAGFPKFKNRKAKQSYTTNVVNGNIQLSDGYIKLPKLKWVKFKQHREIPAHHIIKACTITKTKTGKYYVSILTEYEHQPVPKEIQTVVGLDFSMNTLYVDSEGKRANYPRFYRQALEKLAKEQRILSRRKKGSNRWHKQRLKVAKLHEKIANQRKDFLHKKSYELAKQYDCVVIEDLNMKGMSQVLNFGKSVHDNGWGMFTTFLQYKLEEQGKKLIKIDKWFPSSKTCSCCGQVKESLSLSERTFRCECGFESDRDVNAAINIKHEGMKRLAIT

SEQ ID NO: 1867 - protein, 369 aa, unidentified
MVNKSYKFRLYPTKEQEQLLAKTFGCVRFVYNKMLEERIQIYEKFKDDKEALKKQTFPTPAKYKKEFPWLKEVDSLALANAQLNLQKAFQNFFSGRAGFPKFKNRKAKQSYTTNVVNGNIQLSDGYIKLPKLKWVKFKQHREIPAHHIIKACTITKTKTGKYYVSILTEYEHQPVPKEIQTVVGLDFSMNTLYVDSEGKRANYPRFYRQALEKLAKEQRILSRRKKGSNRWHKQRLKVAKLHEKIANQRKDFLHKKSYELAKQYDCVVIENLNMKGMSQVLNFGKSVHDNGWGMFTTFLQYKLEEQGKKLIKIDKWFPSSKTCSCCGQVKESLSLSERTFRCECGFESDRDVNAAINIKHEGMKRLAIA

SEQ ID NO: 1868 - protein, 404 aa, unidentified
MKRLQAFKFQLRPGGQQERQMRLFAGACRFVFNRALALQNENYEAGNKYIPYTKMASWLVEWKKDTETEWLKDSPSQPLQQSLKDLERAYKNFFQKRAAFPRFKKRGQNDAFRYPQGVKLDQENSRIFLPKLGWVRYRNSRQVTGIVKNVTVSQSCGKWYISIQTESEVSTPVHPSASMVGLDAGVARLATLSDGTVFEPVNSFQKNQKKLARLQRQLSRKVRFSNNWQKQKRKIQQLHSRIANIRRDYLHKVTTIISKNHAMIVIEDLKVKHMSKSAAGTISQPGRNVRAKSGLNRSILDQGWYEMRRQLEYKQLWHGGQVLAVPPAYTSQRCACCGHTAKENRLSQSKFRCQVCGYTANADVNGARNILAAGHAVLACGGMVQSGRPLKQEPTEMIQATALT

SEQ ID NO: 1869 - protein, 376 aa, unidentified
MLQATKVRLYPTNEQKEFLSGQFGAVRFCFNRSVALKKRFYEKKGISLSIIKELKPLLSIAKKSRKYAWLAQYDSISLQEAVRHADKAFKNFFAKRAKYPKFKSKNGKQSSYHCTSVSVGGNWIKVPKCNPIKAVIHRLILGVVRSITVTKDRVGDYYASVLCETGEKEPEPIKVLKESAIKGIDAGIKVFLTDSDNQEIENPKGLTRHLKALRKLSKAVSRKQKGSHRRKKAVAKLSKFHRKVSRKREDFQHKVSKRMVDESQAVIPESLRIKNMLRNKRISRLIADAAWGNFYIKLAYKCRKAGKLFVPIDTFYPSSKTCPRCLHKFEGLTLARRRWICPHCGQLNQRDYAAALNIKRQGIVQLKAAGHTVLRQ

SEQ ID NO: 1870 - protein, 433 aa, unidentified
MLEAVKVALDPTPVQERLMLSHAGAARFAYNAGLAHVKETIETGGKLEWTLYALRRWWNANKGTLAVDADGTPWWRENSKEAYNSGLEALSDALSNWSKSRKGERKGRRVGFPRFKAKDRETPRFAYTTGSFGLVRADPKALRLPRIGRVHCMENVAGRVDGARALRMTVSCRAGRWHAALTVERADPTARRTPREGAVGIDLGVKSLATLSDGTTIANPHTLKANERRLKRVQRSLSRRQPGSHRRAHARERVVRLHARVANQRRDMLDKLTTWLADTYSDISIEDLNVAGMVKNHRLAQSIQDATFAEFRRQLTYKTARTGAGLHIIGRWYPSSKTCSNCGTMKTKLSLSERVYHCEECGLSIDRDLNAAVNIQVAGSAPETLNARGGSVRQAHPKGGTMRHPAKREPSSHASGVRLGADDRKTVLQTKTN

SEQ ID NO: 1871 - protein, 409 aa, unidentified
MQLRYNYRVYPTPSQQASLARAFGCARVVFNDGLRARQEAREQGLPYLSDAELSKRVTAAKGTPERAWLGEVSSVVLQQALADLNVAYRNFFASITGKRKGRKVAPPRFRSRKDNRQAIRFTVNARFKVLDNGRLRLPKIGDVEVRWSRGLPSEPSSVTVIRDAAGRYFASFVVQTADEPLSPVESEVGIDLGLTHFAVLSDGTKVAAPKFLRCAARKLKRLQQDLSRKTKGSNNRKKAVVKVARAHAQVADTRRDWQHKLSTAIIRDNQAVYVEDLCVVGLGRTRLAKSVHDAGWASFTAMLEYKAARYGRTFARVDRFFPSTRMCSDCGRINDKMALDVRAWDCPCGSTHDRDVNAAINVLAAGRAESLNACGAQVRPASVPAPREEAGICPDAACSTRSVEGTSVL

SEQ ID NO: 1872 - protein, 411 aa, unidentified
MQLRYRYRVYPTPEQQVSLAQAFGCARVVFNDGLRVRQQARENGEPYVSDGELSKRVITQAKCNPERAWLTQVSSVVLQQALADLNVAYRNFFASITGKRKGRAVAPPRFRSRKDNRQAIRFTRNSCFAVLDNGRLRLPKIGHVRVRWSRRLPSAPSSVTIIKDAAGRYFASFVVATTKDESLPPAKSEVGIDLGLTHFAVLSDGTKVVAPKFLRRAARKLKRLQQDLSRKQRGSANRRKAVVRVARAHARVSDTRGDWQHKLSTAIIRDNQAVYVEDLCVTGLGRTRLAKSVHDAGWASFTAMLEYKAARYGRTFARVDRFFPSTRMCSRCGRMNDKLSLSVRSWTCPCGAIHDRDLNAAMNVLAAGRADNKNDRGARVRPPAMVAPRGEAVIHPDAACSRCSVEGISAD

SEQ ID NO: 1873 - protein, 452 aa, unidentified
MQLRYNVRVYPTPGQQIELARAFGCARVVFNDGLRLRQQAREAGEKYISDGELSRRLITEAKLTPERAWLGEVSAVVLQQALADLNTAYRNFFNSLSGKRKGRTVAPPRFRFRKDNRQAIRFTKNSRFKVLDNGRLRLPKIGDLAVRWSRTLPSDPSSVAIIRDAAGRYFASFVVQVADEALPPVESEIGIDLGLTHFAVMSDGTKVAAPKFLRRTARKLKRLQQDLSRKQRGSQNRSKAVVKVARAHARVADTRRDWQHKLSTQIIRENQAVYVENLCVVGLGRTRLAKSVHDAGWASFTAMLEYKAARYGRIFGRVNRFFPSTRMCSDCGRINEKTALNVRTWDCPCGSHHDRDVNAAINVLAAGQAESRNDRGAQIRPGLVPAPRNEAVTHPDAACSTRSVEGISVLQGGEDVNSATSRTTTTRPPGPRSTGWSGGPRCALPATCSTWR

SEQ ID NO: 1874 - protein, 441 aa, unidentified
MSTRANVCEIDHYQNGKFVIVQLRYQFRVYPTPGQQIELARAFGCARVVFNDGLRLRQQAREQGIAYVSDGELSRRVITEAKATPQRAWLGEVSAVVLQQALADLNTAYRNFFDSLSGKRKGRKVAPPRFRSRKDNRQAIRFTRNARFKVLDNGRLRLPKIGDLHVRWSRTLPSDPSSVAIIKDAAGRYCASFVVTTAEDEALPPVASEVGIDLGLTHFAVLCDGTKVAAPKFLRRAARKLKRLQQALSRKQRGSQNRRKAVIKVARAHARVADTRRDWQHKLSTAIIRDNQAVYVEDLAVAGLGRTRLARSVHDAGWAGFTSMLEYKAARYGRTFARVDRFFPSTRMCSDCGRINEKMTLDVRAWDCPCGSHHDRDVNAAKNIRAAGQADLNDRGAHVRPGPVPAARREAVTHPNAACPTRSVEGISVLQGGEDVKTTGC

SEQ ID NO: 1875 - protein, 409 aa, unidentified
MQLRYNYRAYPTPGQQIELARAFGCARVVFNDGLRLRRQAREAGEKYVSDGELSRRLITEAKATPERAWLGEVSAVVLQQALADLNTAYRNFFASVTGKRKGRKVALPRFRSRKDNRQAIRFTKNARFKVLDNSRLRLPKIGDLAVRWSRTLPSDPSSVTIIKDAAGRYFASFVVQTKDEPLPETDSEVGIDLGLTHFAVLSDGTKVTAPKFLRRAARKLKRLQQDLSRKQKGSANRKKAVVKVARAHARVVDTRRDWQHKLSTTIIRENQAVYVEDLCVTGLSRTRLAKSVHDAGWASFTAMLECKAARYGRTFARVDRFFPSTRMCSDCGRINNKMALNVRSWDCPCGSHHDRDVNAAINVRAAGQADLNARGAHVRPASVPAAHREAGTHPDAARSTRSVEGISVL

SEQ ID NO: 1876 - protein, 418 aa, unidentified
MQLRYNYRVYPTPVQRASLARAFGCARVVFNDGLRARQQAREAGEPYLADGDLSKRVITQAKRTPERAWLGEVSAVVLQQALADLNNAYRNFFASTSGKRKGRKVAPPRFRSRKDNRQAIRFTANARFKVLDNGRLRLPKIGDLAVRWSRQLPAAPTSVTVVRDAAGRYFASFVVQTTDEPLPPVDAEVGIDLGLTHFAVLSNGKKITAPKFLRRAARKLRRLQQDLSRKQRGSANRTKAVVKVARAHARVADSRRDWQHKLSTRIIRDNQAVYVEDLCVTGLARTRLAKSVHDAGWASFTAMLEYKAARYGRSFRRIGRFAPTSQTCSACGRLDGPKPLSVRSWTCPCGVVHDRDVNAAINILAAGRAESLNACGAQVRPAPVPAPRREAGIRPHTACSTRSVEGISALSGGENVKA

SEQ ID NO: 1877 - protein, 409 aa, unidentified
MQLRYNYRVYPTPAQQAALARAFGCARVVFNDGLRARQQAREAGESFLSDGELSRRVITRAKRTPERAWLGEVSAVVLQQALADLNSGYRNFFASISGKRKGRTVAPPRFRSRKDNRQAIRFTANARFKVLDNGRLRLPKVGDVAVRWSRQLPAAPTSVTVVRDAGGRYFASFVVQTTDEPLPPAASEVGIDLGLTHFAVLSNGRKITAPRFLRRAARKLRRLQQDLSRKQRGSANRSKAVVKVARAHARVADARRDWQHKLSTRIIRDNQAVYVEDLCVTGLGRTRLAKSVHDAGWTQFTHMLEYKAARYGRTFRRIGRFAPTSQTCSTCGRLDGPKPLSVRSWTCPCGTVHDRDVNAAINILTQGRWESLNACGAQVRPAPVPAPRREAGIPHAACSTRSVEGISAL

SEQ ID NO: 1878 - protein, 398 aa, unidentified
MQLRYNVRLYPTPGQRQALARAFGCARVVFNDGLCARQEAREQGVPYIADGDLSKRVITQAKKRPERAWLGEVSAVVLQQALVDLNAAYRNFFTSISGKRKGPKVAPPRFRSKRDNRQAIRFTKNARFSITAGGKLRLPKIGDVPVRWSRDLPAEPSSVTVVKDSAGRYFASFVVETSDVPLPESAAEVGIDLGLSHFAVTSDGRKVGNPRFLRRAERRLRKAQRSLSRKAKGSANRAKARTKVAKAHARVADTRRDWAHKLSTALIRDNQAVYVENLAVSGLGRTRLAKSVHDAGWSQFVGMLEYKAARYGRCFAKIDRWFPSSKLCSDCGTVAESMPLNVRSWECPCGVVHDRDVNAAKNILAAGRADRLNACGAQVRPGPVPAQRDEAGSLRGAA

SEQ ID NO: 1879 - protein, 363 aa, unidentified
MPKGYRYRLYPTRSQVSRLEQTLEVCRWVYNETLVLRKNAWEQEQRSISYYESKRQIPLWKKEHPELSTVYSQVLQDVSMRVDLAFKAFFRRVKARENSGYPRFKGKGRYDSFTYPQYGFKLDGDRLHLSKIGDVRIVLHRPVEGTIKTLAIRRSSTGKWYACFSVEYYPSPLPQKEITVGIDVGLESFATLSNGEKIENPRFFRTDEKALAKAQRKLSKVETGTPERKKARKIVAHIHERIANRRLNFAHQTSRQLVDWFGTIVFEDLNVKNMEKNHHLAKSIADVAWTMFISITESKAEEAGSRVILVNPRNTSQQCSRCGMIVAKTLSDRVHSCPHCGLVMDRDQNAAINILRLGLQSQG

SEQ ID NO: 1880 - protein, 407 aa, unidentified
MQLRYSFRLRPDAYQQKALAKAFGCSRVVFNDAVRAREDARRAGQPFPTAGQLSRKLITEAKRTPERSWLAEVSSVVLQQSLRDAESAYKNFFTSLKGERRGAKMGAPRFKSRKDARQSVRFTANARWSITGSGRLNLPKIGAVKVKWSRTLPATPTSVTVIKDAAGRFFASFVIDTDPAADAARMPESDRTIGIDLGLTHFAVLSDGTKIDSPRFLRRAEKKLKKAHKELSRRQKGSKNRAKARLKVARAHARVADARREFHHQLSTKLISENQGIAVEDLTVAGLARTRLAKSVHDAGWSSFIGMLAYKAERYGRTLVKIGRFEPTTQTCSTCGVKDGPKPLNVREWTCGACGTVHDRDHNAAINVKTAAGLAVSACGAPVRPGAIPAQREETGSHGFPTEPRAA

SEQ ID NO: 1881 - protein, 383 aa, unidentified
MQLRYNFRLSPTPGQRAALARAFGCARTVFNDGLRARQQAHAAGLPHLSDGELSQRVITQAKKTPERAWLGEVSAVVLQQALADLNTAYRNFFASLSGKRKGPSIAPPRFRSRKDNRQAIRFTRNARFSITAGGKLRLPKIGDVTVTWSRRLPSEPSSVTVVKDAAGRYFASFVVDVAAEPLPQTAAEVGIDLGLTHFAVLSDGRKIENPRFLRRTERRLRKAQQALSRTVKGSNNSKKATYTLARAHARVADARRDFAHKLSTRIIRENQAVVVEDLCVKGLARTRLATSVHDAGWSAFVNMLEYKAARYGRTLVKIDRWFPSSKLCSACGALAGSMPLNVRSWACPCEASHDRDVNAAQNILAAGRAERLNACGGTVRPAA

SEQ ID NO: 1882 - protein, 403 aa, unidentified
MAIQLRYNFRVYPTPGQQEALARAFGCARVVYNDGLRLRQQTREHGTPYITDGELSRRLITEAKKTPERAWLSEVSSVVLQQALADLNTAYRNFFASITGERKGRTVAPPRFRSRKDNRQSIRFTKNSRFRVLDNGRLRLPKVGDVVVRWSRSLPSDPSSVTVVKDAAGRYFASFVVQTTDEPLPASASEVGIDLGLTHFAVLSDGMKVAAPKFLRRAARTLKRLQQDLSRKQKGSNNRKKAVVKVAKAHARVADTRRDWLHKLSTTIVRDNQAVYVEDLAVAGLARTRLAKSVHDAGWSTFVGMLEYKAARYGRTFGRVDRWFPSTRMCSDCGRVADKLALHVRSWTCPCGSVHDRDVNAARNIRAAGRADLNDRGAQVRPASVPAPRDEAVTHRELAPSGV

SEQ ID NO: 1883 - protein, 412 aa, unidentified
MCVQLRYNYRVYPTPGQQIELARAFGCARVVFNDGLRLRQQAREAGEKYISDGELSRRLITEAKATPERAWLGEVSTVVLQQALADLNTAYRNFFNSITGKRKGRKVAPPRFRSRKDNRQAIRFTKNSRFKVLDNDRLRLPKIGDLAVRWSRTLPSDPSSVAIIRDAAGRYFASFVVQTGEDEALPPVDSEVGIDLGLTHFAVLSDGTKVAAPTFLRRAARKLKRLQHDLSRKQKGSANRKKAVVKVARAHGRVADMRRDWQHKLSTAIIRENQAVYVEDLCVVGLGRTRLAKSVHDAGWASFTAMMEYKAARYGRTFGRVDRFFPSTRMCSDCGRINEKMALNVRAWDCPCGAAHDRDVNAAKNVKAAGQADFNARGAHVRPGLVPAARNEAGTHPDAACSTRSVEGISVP

SEQ ID NO: 1884 - protein, 363 aa, unidentified
MNKAFKFRIYPNSEQEVLIGKTFGCVRFIYNKMLGDKIEYYKRTNQKLKNTPAQYKAEFEWLREVDSLALANAQMNLQTAYNNFFRKPKTGFPKFKSKRNNNKSYTTNFVNGNIKLENGCIVLPKLKAVKIKQHRAIPKEYKLKAVTVSQTATGKYFASILYEYEVTIETVQPKTFLGLDFSMKALFLSSDGISAEYPRYYRQSLEQLKREQKKLSLCQKGSKNRNKQSIKVAKIHEKVKNQRKDFLHKQSKQIADAVDAVCIEDLDMKVMSQALNFGKSVMDNGFGMFVSMLNYKLMEQGKHLVKIDKWFPSSKKCSVCGIVKQTLSLSERTYHCEDCGMTMDRDYNASINIKTEGIRLLLG

SEQ ID NO: 1885 - protein, 363 aa, unidentified
MNKAFKFRIYPNSEQEVLIGKTFGCVRFIYNKMLGDKIEYYKXTNQKLKNTPAQYKAEFEWLREVDSLALANAQMNLQTAYNNFFRKPKTGFPKFKSKRNNNKSYTTNFVNGNIKLENGCIVLPKLKAVKIKQHRAIPKEYKLKAVTVSQTATGKYFASILYEYEVTIETVQPKTFLGLDFSMKALFLSSDGISAEYPRYYRQSLEQLKREQKKLSLCQKGSKNRNKQRIKVAKIHEKVXNQRKDFLHKQSKQIADAVDAVCIEDLDMKVMSQALNFGKSVMDNGFGMFVSMLNYKLMEQGKHLVKIDKWFPSSKKCSACGIVKKTLLLSERTYHCEDCGMTMDRDYNASINIKTEGIRLLLG

SEQ ID NO: 1886 - protein, 363 aa, unidentified
MNKAFKFRIYPNSEQEVLIGKTFGCVRFIYNKMLGDKIEYYKRTNQKLKNTPAQYKAEFEWLREVDSLALANAQMNLQTAYNNFFRKPKTGFPKFKSKRNNNKSYTTNFVNGNIKLENGCIVLPKLKAVKIKQHRAIPKEYKLKAVTVSQTATGKYFASILYEYEVTIETVQPKTFLGLDFSMKALFLSSDGISAEYPRYYRQLLEQLKREQKKLSLCQKGSKNRNKQRIKVAKIHEKVTNQRKDFLHKQSKQIADAVDAVCIEDLDMKVMSQALNFGKSVMDNGFGMFVSMLNYKLMEQGKHLVKIDKWFPSSKKCSVCGIVKKTLLLSERTYHCEDCGMTMDRDYNASINIKTEGIRLLLG

SEQ ID NO: 1887 - protein, 363 aa, unidentified
MNKAFKFRIYPNSEQEVLIGKTFGCVRFIYNKMLGDKIEYYKRTNQKLKNTPAQYKAEFEWLREVDSLALANAQMNLQTAYNNFFRKPKTGFPKFKSKRNNNKSYTTNFVNGNIKLENGCIVLPKLKAVKIKQHRAIPKEYKLKAVTVSQTATGKYFASILYEYEVTIETVQPKTFLGLDFSMKALFLSSDGISAEYPRYYRQLLEQLKREQKKLSLCQKGSKNRNKQRIKVAKIHEKVXNQRKDFLHKQSKQIADAVDAVCIEDLDMKVMSQALNFGKSVMDNGFGMFVSMLNYKLMEQGKHLVKIDKWFPSSKKCSVCGIVKKTLSLSERTYHCEDCGMTMDRDYNASINIKTEGIRLLLG

SEQ ID NO: 1888 - protein, 331 aa, unidentified
MLSDKIEHYEKMKQKLNNTPAQYKKEYEWLKEVDSLALXNVQINLQTAYNNFFRKPKVGFPKFKSKRNNKKSYTTNYVNGNIKLENGCIXLPKLKAVKIKQHRSIPKDYKLKSVTVSKTPTGKYFASVLFEYEQEIKAVQPKTLLGLDFSMKELFVSSDGISAEYPRYYRKSLDKLKREQRKLSLCQKGSKNRNKQRIKVAKIHEKVTNQRKDFLHKQSKQITNAVDAVCIEDLNMKGMSQALNFGKSVMDNGFGMFVSMLDYKLMEQGKQLIKIDKWFPSSKMCSECGKVKNTLLLSERTYHCEDCGMTMDRDYNASINIKNEGMRILLA

SEQ ID NO: 1889 - protein, 363 aa, unidentified
MNKAFKFRIYPNSEQEVLIGKTFGCVGFIYNKMLDDKIEYYKRTNQKLKNTPAQYKAEFEWLREVDSLALANAQMNLQTAYNNFFRKPKTGFPKFKSKRNNNKSYTTNFVNGNIKLENGCIVLPKLKAVKIKQHRAIPKEYKLKAVTVSQTATGKYFASILYEYEVTIETVQPKTFLGLDFSMKALFASSDGISAEYPRYYRQSLEQLKREQKKLSLCQKGSKNRNKQRIKVAKIHEKVKNQRKDFLHKQSKQIADAVDAVCIEDLDMKVMSQALNFGKSVMDNGFGMFVSMLNYKLMEQGKHLVKIDKWFPSSKKCSVCGIVKKTLLLSERTYHCEDCGMTMDRDYNASINIKTEGIRLLLG

SEQ ID NO: 1890 - protein, 363 aa, unidentified
MNKAFKFRIYPNSEQEVLIGKTFGCVRFIYNKMLGDKIEYYKRTNQKLKNTPAQYKAEFEWLREVDSLALANAQMNLQTAYNNFFRKPKTGFPKFKSKRNNNKSYTTNFVNGNIKLENGCIVLPKLKAVKIKQHRAIPKEYKLKAVTVSQTATGKYFASILYEYEVTIETVQPKTFLGLDFSMKALFLSSDGISAEYPRYYRQLLEQLKREQKKLSLCQKGSKNRNKQRIKVAKIHEKVTNQRKDFLHKQSKQIADAVDAVCIEELDMKVMSQALNFGKSVMDNGFGMFVSMLNYKLMEQGKHLVKIDKWFPSSKKCSVCGIVKKTLLLSERTYHCEDCGMTMDRDYNASINIKTEGIRLLLG

SEQ ID NO: 1891 - protein, 589 aa, unidentified
MLRAYRFTLDPSDAERAALSRYAGACRWAYNYAVAKKTQAHQAWADRRAAYLEAGLSEAEAKERIKADGAELTDRIKVWDHHRKSLTLILAGKPPLPAMQPPAGQEALVRQLAAARADAAGTSRERELLTEGRATVNALKAKAFSAGFRTPNATDTSALWRMERDLPKEEGGSPWWREVNVYCFTSGFDRAQVAWKYWQDSLAGRRAGQRHGYPRFKKKGHAESFALFHDVKRPIIRLEGYRRLVMPGLGSIRIHDSGKRLARLVERGQAVIQSVTVTRGGHRWYASVLAKVQQDAPVLWEHVHDDGIRTPYLSRAQAEKAAENGGRVEQIGRPTARQRAGGLVGVDLGSRNLAALSSPLDPADPADPALVQYPRLLADSLAKLSKAQRAMSRCQQGSGRWRKATARVSRVHQQITVRRASFLHGLSKKLATGFTHVAIEDLDLTALTTSAKGTRDKPGKNVKAKARLNRHLLDAGLGSLRKKLAYKTAWYGSQLVVLDQGEPVIATCAKCKERNPSSDPSCSQFHCPSCGAAVHRHENSAANIVDAARRQLKTVASDRGETQNARRAPASPRVRKAPGQGALKREDTG

SEQ ID NO: 1892 - protein, 363 aa, unidentified
MNKAFKFRIYPNSEQEVLIAKTFGCVRFIYNKMLSDKIEHYEKMKQKLNNTPAQYKKEYEWLKEVDSLALXNVQINLQTAYNNFFRKPKVGFPKFKSKRNNKKSYTTNYVNGNIKLENGCIXLPKLKAVKIKQHRSIPKDYKLKSVTVSKTPTGKYFASVLFEYEQEIKAVQPKTLLGLDFSMKELFVSSDGISAEYPRYYRKSLDKLKREQRKLSLCQKGSKNRNKQRIKVAKIHEKVTNQRKDFLHKQSKQITNAVDAVCIEDLNMKGMSQALNFGKSVMDNGFGMFVSMLDYKLMEQGKQLIKIDKWFPSSKMCSECGKVKNTLLLSERTYHCEDCGMTMDRDYNASINIKNEGMRILLA

SEQ ID NO: 1893 - protein, 383 aa, unidentified
MQLRYNVRLYPTAGQRQELAKAFGCARTVYNDGLRARQEAREQGLPYVPDAELSKRVITKAKQTPERAWLGEVSAVVLQQALADLNTAYRNFFASITGKRQGLKVAPPRLRSRKDRRQAIRFTRNARFRVTAGGKLRLPKIGDVPVRWSRSLPAEPSSVTVVKDAAGRYFASFVVEVGDEPLPRIASEMGIDLGLTYFAVLSDGRKIDNPRFLRRAERRLRKAQQNLSRKAKGSANRKKAAVKVARAHARVADARRDFAHKLSTKIIRDNQAVMVEDLSVKGLARTRLAKSVHDAGWSAFVSMLEYKAARRGRTFVKVDRWFPSSKLCSACGALAESMPLDVRSWVCPCGAAHDRDVNAAINILAAGRAERLNACGGTVRPAA

SEQ ID NO: 1894 - protein, 383 aa, unidentified
MQLRYNVRLYPTPGQRTALARAFGCARTVFNDGLRARQEAREQELPYLSDGDLSKRVITEAKKAPQRAWLGEVSAVVLQQALADLNAAYRNFFASLTGKRKGPKIAPPRFQSKRDRRQAIRFTKNARFQVTAGGKLRLPKIGDVPVRWSRSLPAEPSSVTVVKDAAGRYFASFVVEVCDEPLPATAAEVGIDLGLTHFAVLSDGRKIGNPRFLRRAERRLRKAQQALSRKAKGSDNRRKAMVRVARAHAGVADARRDFAHKLSTSIIRDNQAVYVEDLAVKGLARTKLAKSVHDAGWGQFTAMLAYKAARHGRTFVRIDRWFPSSKLCSECGALAGSMPLNVRTWECACGAVHDRDVNAAKNILAAGRVERLNACGGTVRPAA

SEQ ID NO: 1895 - protein, 352 aa, unidentified
MKHTKTLQVRVRDKHTQLLRQMARQVNFVWNYLNELSHRSIRERGVFLSAYDLDRYTQGASKELGLHSQTLQEVSREYATRRRQFKKARLSWRKSIGVRRSLGWIPFKSGAASWKNGQVFHNGRCFKVWDSYGLGQYRLRSGSFSEDARGRWYFNVVVELETQLSTGQGAVGIDLGLKDVATCSDGQRLENGRFYRDLEPKLASAQRAGKKARVRAIHAKIANRRKDALHKFSRSLVERCNTIIVGDVSPQKLVRTRMAKSVLDAGWGQLKTMLAYKCAHAGIVFRVVNEAYTTQTCSCCGALPASRPRGIAGLGIREWICECGVTHDRDVNAARNILALGHERPGEGIPGV

SEQ ID NO: 1896 - protein, 383 aa, unidentified
MQLRYNFRLYPTPGQRQALAKAFGCARTVFNDGLRTRQEARAQGLPYISDGELSKRVITEAKKTPQRSWLGEVSAVILQQALADLNQAYRNFFSSATGKRKGPQVAPPRYRSKRDNRQAIRFTRNARFQVTAGGKLRLPKIGDIPVRWSRDLPSAPSSVTVIKDAAGRYFASFVVEVGDEPLPQTASEVGIDLGLTHFAVLSDGRKIDNPRFLRRAERRLKKAQQALSRKEKGSNNRKKAVVQVARAHARVADARRDFAHQLSTRIIGENQAVVVEDLSVKGLARTKLAKSVHDAGWAQFTAMLAYKAARHGRTLTRIDRWFPSSKLCSTCGTLAESMPLNVRSWTCPCGAVHDRDVNAATNILAAGRAERLNACGGTVRPAA

SEQ ID NO: 1897 - protein, 383 aa, unidentified
MRLRYNFRIHPTAGQRQALARAFGCARVVFNDGLRMRQEARVQGLPYVSDAELSKRVITQAKKTPDRAWLGEVSAVVLQQALADLNAAYRNFFASVTGKRKGPQVAPPKFRSRKDRRQAIRFTKNARFQVTAGGKLRLPKIGDIPVRWSRDLPSDPSSVTVIKDAAGRYFASFVVEVGDEPLPETASEVGIDLGLTHFAVLSDGRKIDNPRFLRRAERRLKKAQQALSRKEKGSNNRKKAVVRVARAHVRVADARRDFAHKLSTRIICENQAVVVEDLSVKGLARTKLAKSVHDAGWGRFTAMLAYKAARHGRALVRIDRWFPSSKLCSTCGAVAESMPLNVRTWECACGAVHDRDVNAAINILAAGRAERLNACGGTVRPAA

SEQ ID NO: 1898 - protein, 363 aa, unidentified
MNKAFKFRIYPTKEQEELLSKTFGCVRFVYNKMLSDRISHYNETGESLNNTPAQYKKEFEWLKEVDSLALANAQLNLNKAYKNFFRDKSIGFPKFKSRKNNHRSYTTNCVNGNIKLDDGYLTLPKLKAVKIKQHRMVPDDYKLKSVTISKTPTGKYFASILYEYEKHIELAKPEKFVGMDYSMKELFITSDGISAEYPRYYRLSLEKLKKEQRKLSKCEKGSNNRNKQRLKVAKFHEKVANQRKDFLHKTSKQITNAFDGVCIEDLSMKGMSQALNFGKSVSDNSFGTFVSMLDYKLKEQGKQLVKIDKWFPSSKMCSACGQIKDALSLSDRTYHCEHCGLSLDRDYNASINIRNEGMRILSA

SEQ ID NO: 1899 - protein, 353 aa, unidentified
MKYTKTLKVRVRDKHCPLLNQMARSVNFVWNYINELSHRSIKERGGFLSAYDIQKYTQGAHKELGLHSHTVQKVGAEYAARRKQFKKNRLNWRKSGGVRRSLGWIPINTGMAKWKNGQVYHNGHYFKVWDSYGLGQYSFRTGSFNEDARGRWYFNVVVEVEAEIPAGQDKIGIDLGLKTTATCSDGTKLEACHFYRDLEPKLATAQRAGKKKQVKNIHAKIANRRKDALHKFSRQLVNRAGEIYVGNVKASSLTQTTMAKSVQDVGWALLKTMLEYKCDHAGIVFKEVNESYTTQTCSHCGALPDERPQGIPGLGIREWTCRACGVTHDRDINAAKNMLALGHERPAEGIPVL

SEQ ID NO: 1900 - protein, 389 aa, unidentified
MLRATKVRIYPTLVQAEFLNRQFGAVRFCYNKALHIISSQYKRHGLKLRAKKDLKPLLAVAKKSRKYHWLGEFDSIALQQACINLDKAFQNFFDPKLASRYPTFKRKHGKQSSYHCTSVKAGDNWIKVPKLEPIKARLHRELVGTLKSITLSRTATGKYYASLLVEDGTAAPGPIQSVDTVLGIDMGLTHLVIDSEGNKTANPRFLDRSQANVRRKQKALSRCNKGSRGRTKARLKLARAHERLANARANFQHNLSRQLIDENQAVIVETLKVKNMLKNRKLAKHIADASWYSLVQKLEYKARMQGKHVVKIDQWFASSRTCSGCNHRVDTLPLSVRYWTCPACSIGHDRDVNAAINIRQQGIIKLRAEGLSVPANGGLRKSGHAPVAA

SEQ ID NO: 1901 - protein, 407 aa, unidentified
MQLRYSFRLYPRPGQRTALARAFGCARVVFNDAVRAREDARRQGLPFPKAADLSRTLITRAKQTAERSWLGEVSAVVLQQSLRDAESACRNFFASLKGERKGPKLGAPRMKSRKDARQSIRFTANARWSLTPSGRLNLPKIGEVRVKWSRTLPAVPSSVTVIKDAAGRYFASFVIDTDPAADAARMPQADQSIGIDLGLTHFAVLSDGTKIDSPRFLRRAEKKFKKAQRELSRKQKGSKNRAKARLKVARAHAKVADARREFHHQLSTRLIRENQAVAVEDLVVKGLARTRLAKSVHDAGWSQFVGMLEYKAARYGRTFVKIGRFEPTSQVCSICGHHDGPKPLHVREWTCTACGTVHDRDHNAAKNVKSAAGLAVTACGAPVRPEPVLAQREETGSQGIPHGNRAA

SEQ ID NO: 1902 - protein, 407 aa, unidentified
MQLRYSFRLYPQPGQRTALARAFGCARVVFNDAVRAREDARRQGLPFPKAADLSRTLITQARQTAERAWLGEVSAVVLQQSLRDAESAYRNFFASLKGERKGPKLGAPRMKSRKDARQSIRFTTNARWSLTPSGQLNLPKIGEVRVKWSRTLPAVPSSVTVIKDAAGRYFASFVIDTDPAADAARMPQADQSIGIDLGLTHFAVLSDGTKIDSPRFLRRAEKKLKKAQRELSRKQKGSKNRAKARLKVAHAHAKVADARREFHHQLSTRLIRENQAVAVEDLAVKGLARTRLAKSVHDAGWSQFVGMLEYKAARYGRTFVKVGRFEPTSQVCSTCGHHDGPKPLHVREWTCTACGTVHDRDHNAAKNVKSAAGLAVTACGAPVRPEPVLAQREETGSQGIPHGNRAA

SEQ ID NO: 1903 - protein, 407 aa, unidentified
MQLRYSFRVYPDATQQGALVRAFGCARVVFNDAVRAREDARRAGQPFPTAGDLSRKLVTEAKRTAGRSWLGEVSAVVLQQSLRDAETAYRNFFASLKGVRKGPQLGAPRFKSRRDARQSIRFTANARWSITAGGRLSLPKIGAVKVKWSRPLPTAPSSVTVVKDAAGRFFASFVIDTEPAADADRMPDTDRTIGIDLGLTHFAVLSDGTKIDSPRFLRRAEKKLKKAQRELSRKQKGSKNRAKARLKVARAHAKVADARREFHHQLSTQLICENQGIAVEDLAVKALARTRLAKSVHDAGWSSFVHMLEYKAQRYGRTLVKIGRFEPTSQTCSACGAVDGPKPLNVREWTCTACGAVHDRDHNAAINVKTAAGLAVSACGAPVRPESVLAQREETGSHGFPTEPRAA

SEQ ID NO: 1904 - protein, 407 aa, unidentified
MQLRYSFRVYPDATQQGALVRAFGCARVVFNDAVRAREDARRAGQPFPTAGQLSRKLVTEAKRTAGRSWLGEVSAVVLQQSLRDAETAYRNFFASLKGARKGPRLGAPRFKSRRDARQSIRFTANARWSITDSGRLNLPKIGAVKVKWSRALPAAPSSVTVVKDAAGRFFASFVIDTDPAADVTRMPDTDRTIGIDLGLTHFAVLSDGTKIDSPRFLRRAEKKLKEAHKELSRKQKGSKNRAKARLKVARAHAKVADARREFHHQLSTQLICENQGIAVEDLAVKALARTRLAKSVHDAGWSSFVHMLEYKAQRYGRTLVKIGRFEPTSQTCSACGAVDGPKPLNVREWTCTACGTVHDRDHNAAINVKTAAGLAVSACGAPVRPESVLAQREETGSHGFPTEPRAA

SEQ ID NO: 1905 - protein, 353 aa, unidentified
MPTVVKTLKLRVKDKHAPLLLQMAQQVNFVWNFVNDLSSRSIRERGKWLSAYDIHPYTKGAAKELGLHSHTLQCVAQEYVTRRRQCKRTRLNWRKSTGSQRSLGWIPINTGAASWKSGQVYHNGHYFGVWDSYGLGQYRFKTASFNEDARGRWYFNVAVEIETKPTEATASVGIDLGLKDCATTSTGQKLHGRWYRELEPQLAIAQRARKKQRVRAIHAKIANRRKDEIHKFTTELVKNNAAIFVGDVASAKLVKTRMAKSTLDAGWSSLKTALEYKCHQAGVVFEEVNEAYSTQTCSACGALPQSRPKGIAGLGIREWTCSECGAAHERDVNAARNILAAGHCRLAGGITAL

SEQ ID NO: 1906 - protein, 353 aa, unidentified
MPTVVKTLKVRVKDKHAPLLLQMARQVNFVWNFINALSSRSIRERGQWLSAYDIHPYTKGAAKELGLHSQTLQCVAQEYVTRRRQFKRTRLNWRKSIGSQRSLGWIPINTGAASWKNGQVYHNGHYFGVWDSYGLGQYKFKTASFNEDARGRWYFNVAVEIETKPTEATASVGIDLGLKDCATTSTGQKLHGRWYRELEPQLAVAQRARKKQRVRAIHAKIANRRKDEIHKFTTNLVKNNAAIFVGDVASVKLVKTRMAKSTLDAGWSSLKTALEYKCHQAGVVFEEVNEAYSTQTCSACGSLPPQRPKGIAGLGIREWTCSECGAVHERDVNAARNILAAGHCRLAGGISCL

SEQ ID NO: 1907 - protein, 353 aa, unidentified
MPTVVKTLKLRVKDKHAPLLLQMARQVNFVWNFINALSSRSIRERGKWLSAYDIQKYTDGASKELGLHSQTVQRVSVEYVTRRRQFKRTRLNWRKSTGSKRSLGWIPINTGAASWKNGQVYHNGHYFGVWDSYGLSQYKFKTASFNEDARGRWYFNVAVQVEVQAGEGTASVGIDLGLKDCATTSTGQKLHGRWYRELEPQLVIAQRARKKKRVRAIHAKIANRRKDEIHKFTTNLVKNNAAIFVGDVASAKLVKTRIAKSTLDAGWSSLKTALEYKCHQAGVVFEEVNEAYSTQTCSACGALAQSRPKGIAGLGIREWTCSECGAVHERDVNAARNILAAGHCRLAGGIPCL

SEQ ID NO: 1908 - protein, 402 aa, unidentified
MKQQVSFKFRLRPDGQQEREMRRFAGACRFVFNRALALQNENHEAGKKYIPYTKMASWLVEWKKDTETEWLKDSPSQPLQQSLKDLERAYKNFFQNRAAFPRFKKRGQNDAFRYPQGVKLDQENSRIFLPKLGWMRYRNSRQVTGVVKNVTVSQSCGKWYISIQTEREVSTPVHPSVSMVGLDAGVAKLATLSDGTVFEPVNSFQKNQKKLARLQRQLSRKVRFSNNWQKQKRKIQQLHSRIANIRRDYLHKVTTIISKNHAMIVIEDLKVKHMSKSAAGTISQPGRNVRAKSGLNRSILDQGWYEMRRQLEYKQLWHGGQVLAVPPAYTSQRCACCGHTAKENRLSQSKFRCQVCGYTANADVNGARNILAAGHAVLACGGMVQSDRPLKQEPSEMIQATA

SEQ ID NO: 1909 - protein, 388 aa, unidentified
MITTYHYRIKDSGKANRVLSQMSRSVNMVWNFCKQTQQEALKNKSVKLIDDKKSGDKISIPYFLTKFEMNNLVSGSSKELELHSQTVQFVSEEYITRRKQFKTLLRWRGKKSLGWVPFKSSAIKINNGKISYNKNEFSFWNSRELPEDAKIKTGSFCQDKIGHWYLNVSFESEQIGIKRDDDKKIGIDIGIKTLATCSNGEKIERPNLRKNALAKMRYLKRCQKFAQRKQSKSKKYHSLPKAKQERKLHVKVANIRQDYLHKESTKLVKKCSLIVVGDVPCKFMNRNKKLSGISLDSGIGMFKNMLKYKAVRAASIYKEISERDSTRTCSKCSEILPRIGLGVRTWTCEKCNTIHDRDVNASINILNAYKNMFPIGHDRPTRTKKNSS

SEQ ID NO: 1910 - protein, 387 aa, unidentified
MLITIYHYRIKDSGKANRVLSKMSRSVNMVWNFCKQTQQEALKNKSVKLIEDKKSGEKASIPYFLTKFEMNNLVSGSSKELELHSQTVQFVSEEYITRRKQFKTLLRWRGKKSLGWVPFKSSAIKIHNGKISYNKNEFSFWNSRELPEDAKIKTGSFCQDKSGHWYLNVAFESQQIGIKREDHKKIGIDIGIKTLATCSNGEKIERPNLRKNALAKMRYLKRCQKFAQRKQSKSKKYHSLPKAKQERKLHVKVANIRQDYLHKESTKIVKKCSLIVVGDVPCKFMNRNKKLSGISLDSGIGMFKNMLKYKAVRAASIYKEISERDSTRTCSKCSEILPRIGLGVRTWTCEKCNTIHDRDVNASINILNAYKNMFPIGHDRPTRTKKN

SEQ ID NO: 1911 - protein, 348 aa, unidentified
MLTYSYRVKDGNVANKLNQLARATNFVWNYCNETSFNAIKQRGKFLSKYDFRPLTKGASKELPINSQTIQAISDEYVTRRKQFKKIKLKWRGRKSLGWIPFNGQTIKIVNDVVIYDGIKIRFWKHRELLGNIKTGSFCQDSRGRWYVNFQCEVIDKRPHGERKIGIDLGLKDKAICSDGIKYDRENLTKKYEVRLAKYQRAHKKKQVKNLHAKIKNKRKDFSHKVSNEICSTSEIVIVGDISASKLAKTRMAKSVLDAGWSQLTTMLHYKAIRHGMVVKKVSEKWSTQTCSYCGVIPESAPKGISALGVRNWKCSECEAIHDRDINAARNIFNFGAGRCAPTGSLSLQ

SEQ ID NO: 1912 - protein, 390 aa, unidentified
MLKATKVRLYPTPEQAAFLNAQFGAVRFAYNKALHIISTQYKRHGTKLRAKKDLKPLLAVAKKSRKYHWLKDFDSMALQQACINLDRAFQNFFNPQLKARYPKFKRKHGKQSSYHCTGIKVGENWIKVPKLTPMKARTHREITGTLKSITLTRTTTGKYYASVLVEDGVEAPAPLQTVDTVLGVDMGLTHLAIDSTGRKVANPRFLKRARTNLRRKQKALSRCQKGSKRRAKARIKLAKAHERLANARADFQHKLSRQFIDDNQAVVVETLNVKNLLKNRKLAKHIADASWYSLIQKLAYKAEAQGKHLVKIDQWFASTKTCAGCGHKVEQMPLTVRTWDCPGCATQGIDRDINAALNIKHQGIIQLKAEGLSVSAHGGLRKTGTSSAAA

SEQ ID NO: 1913 - protein, 410 aa, unidentified
MQLRYNYRVYPTPAQQVLLARAFGCARVVFNDGLRARQQAREAGEAYLSDGDLSKRVITQAKQTPEREWLGEVSAVVLQQALADLNVAYRNFFTSISGKRQGRTVAPPRFRSRKDNRQAIRFTANARFKVLDNGRLRLPKIGDLAVRWSRHLPAAPTSVTVIRDAAGRYFASFVVVATDDPLPPVDTEVGIDLGLTHFAVLSNGKKVAAPKFLRRAARKLRRLQQDLSRKQRGSNNRKKAVVKVARAHARVADSRRDWQHQLSTRIIRDNQAVYVEDLCVVGLGRTRLAKSVHDAGWAQFVQMVKYKAARRGRTFAKINRFLPTSQTCSTCGRIDGPKSLSVRSWTCPCGAVHDRDVNAARNILAVGRAESLNACGAQVRPAPVPAPRREAGIRPDAVRYTRSVEGISAL

SEQ ID NO: 1914 - protein, 363 aa, unidentified
MLKTYRYRLYPTKSQVTLFERTLEICRWVYNDTLALRKNAWEREQRSVSLYETNKILTGWKREQPELKQVHSQVLQNVQMRIDLAFKAFFRRLKSGEQPGYPRFKGKGRYDSFTYPQSGFHLNESRLNLSKIGDVRVVLHRPIEGTNKALTIRRSATGKWYACFSVEYDPDLAPRKETTMGVDVGLTSFATLSNGEKIENPRFFRTDEKALAKAQRRLSKAEKGTPERKTARKIVARVHERIANRRLNFAHQTSRQLVNRFGTIVFEDLNITNMQKNHCLAKSIADVAWNQFVTITTSKAEDAGSHVILVNPRNTSQMCSRCGMIVKKTLSDRVHACPYCGLVMDRDQNAAVNILRLGLQSLG

SEQ ID NO: 1915 - protein, 402 aa, unidentified
MKRLQAFKFQLRPGDQQECEMRRFAGACRFVFNRALALQNENHEAGNKYIPYGKMASWLVEWKNATETQWLKDSPSQPLQQSLKDLERAYKNFFRKRAAFPRFKKRGQNDAFRYPQGVKLDQENSRIFLPKLGWMRYRNSRQVTGVVKNVTVSQSCGKWYISIQTESEVSTPVHPSASMIGLDAGVAKLATLSDGTVFGPVNSFQKNQKTLARLQRQLSRKVKFSNNWQKQKRKIQRLHSRIANIRRDYLHKVTTTVSKNHAMIVIEDLKVSNMSKSAAGTVSQPGRNVRAKSGLNRSILDQGWYEMRRQLEYKQLWSGGQVLAVPPAYTSQRCACCGHTAKENRLSQSQFRCQVCGYTANADVNGARNILAAGHAVLACGEMVQSGRSLKQEPTEMIQATA

SEQ ID NO: 1916 - protein, 355 aa, unidentified
MKTLKLRIKDKHCKVLDQLASEVNFVWNYVNDLCFKHLQRKQQFFSAYDIAKYTKGASKECNLHSQTIQAVTEELVTRRKQFKKSKLRWRVSNKKSARRSLGWIPFKKVAIKYADGYVQYGKHQFKLWDSYGLSKYSIKTGSFVEDSRGRWYVCLVVDSPKQDKPTATKAVGIDLGLKDIATCSDGTVISNPKFYRKYEQKLGIAQRARNKKRVRALHAKIANCRKDHLHKASTQLVKDNALIVVGDLSANKLVKTKMAKSVLDTGFSALKTMLKYKCENAGVMFEEVNERFTTQTCSSCGAITASSPRGRADLRIRVWECECGSVNQRDLNSAKNILALGHKRLAVGITLLSGG

SEQ ID NO: 1917 - protein, 502 aa, unidentified
MQLRYQFRVYPTPGQRIELARAFGCARVVFNDGLRLRQQAHEAGEKYISDGELSRRLITEAKATPERAWLGEVSSVVLQQALADLNTAYRNFFASVSGKRKGRAVAPPRFRSRKDNRQAIRFTKNSRFRVLDNGRLRLPKIGDLDVRWSRSLPSDPSSVAIIRDAAGRYYASFVVQTAEDETLPPVESEVGIDLGLTHFAVLSDGTKVAAPKFLRRAAGKLKRLQQALSRKQKGSANRKKAVVKVARAHARVADTRRDWQHKLSTAIVRENQAIYVEDLCVAGLGRTRLAKSVHDAGWASFTGMLEYKAARYGRTFGRVDRFFPSTRMCSDCGRVNEKMVLNVRAWDCPCGSHHDRDVNAARNVRAAGQADLNDRGARVRPPAMVAPRGEAVTHPDAACSTRSVEGISVLQGGEDVNSRTGSAGTCCTTRCGSRSGCGWAGRTGRRATGPPSRSRVSTPAGSCSGWRHRVRHLRLGVRRLAHESLVVICREPSGVTTTATQT

SEQ ID NO: 1918 - protein, 359 aa, unidentified
MLQSMKQTKTLKVRVKDKHVDQLNRMARNVNFVWNYLNELSSRAIRERGLFLSAYDMHPYTKGAGTDLGLHSQTLQEVAREYTTRRKQFKKSRLAWRKSGGVRRSLGWIPVNTGAAKWKNGQVFHNGTYFKVWDSYGLGQYTFRSGSFNEDARGRWYFNVVVEVNIPPNQAQGEVGIDLGLKDTATCSDGQKLEAGRFYRDLEAKLAAAQRAGNKRRVKAIHARIKNRRKDANHKFSRQLISQYGTIVVGNVSASKLTKTRMAKSVLDAGWYQLKAMLEYKCDHAGTVFKEVNEAYTTQTCSNCGALPKERPKGIAGLGIRDWICSECGASHDRDVNAARNILSLGAGRCPQAVGIPRL

SEQ ID NO: 1919 - protein, 434 aa, unidentified
MLEAVKVALDPTPRQERLLESHAGAARFAYNAGLAHVKDMLERQEKPEWSYYALRRWWNANKDALAVSMETGKPWWPENSKESYNSGLESLADALKNFSKSRKGRRKGRRMGFPRFKSKDRAVPGFAYTTGSFGLIDCDPYALRLPRIGRVHCLEDVSRRVDGAKVLRMSVSRHVGRWMASLTVERKDGPMPTPLKGGSVGIDLGVKQLATLSDGTIIRNPRALDSNLRRLRREQKNLSRKRKGSNRRREARTRVARLHARVADLRRDLLDKTTTMLARTYADISIEDLNVAGMVRNHRLARSVEDAAFAEFRRQLEYKTTRTGARLHVIDRWYPSSKTCSNCGTVKAKLSLSERVYHCEECGLVIDRDLNAAINIQVAGSAPETLNARGGSGRRADASRRATRHPVKREPSGGVSRVRLGAGLGNEAMQMTSL

SEQ ID NO: 1920 - protein, 433 aa, unidentified
MLEAVKVALDPTPVQERLMLSHAGAARFAYNAGLAHVKETIETGGKLEWTLYALRRWWNANKGTLAVDVDGTPWWRENSKEAYNSGLEALSDALSNWSKSRKGERKGRRVGFPRFKANDRETPRFAYTTGSFGLVRADPKALRLPRIGRVHCMENVAGRVDGARALRMTVSCRAGRWHAALTVERADPTARRTPREGAVGIDLGVKSLATLSDGTTIANPHTLKANERRLKRAQRSLSRRQPGSHRRAHARERVVRLHARVANQRRDMLDKLTTWLADTYSDISIEDLNVAGMVKNHRLAQSIQDAAFAEFRRQLTYKTARTGAGLHIIGRWYPSSKTCSNCGTVKTKLSLSERVYHCEECGLSIDRDLNAAVNIQVAGSAPETLNAHGGDGRRNDASRRATQTPVKCEPSSHASGVRLGADDRKTVLQTKTN

SEQ ID NO: 1921 - protein, 402 aa, unidentified
MKRLQAFKFQLRPDGQQEREMRRFTGSCRFVFNRALALQNENYEAGNKFIPYTNMASWLVEWKNSPEMQWLKDAPSQPLQQSLKDLERAYKNFFQKRAAFPRFKKRGQNDAFRYPQGVKLDQKNSRIFLPKLGWLRYRNSRQVTGIVKNVTVSQSCGKWYISIQTESEVSTPVHPSASMVGLDAGVAKLATLSDGTVFEPVNSFQKKQKKLARLQRQLSRKVKFSNNWQKQKRKIQRLHSRIANIRRDYLHKVTTTISKKHAMIVIEDLKVSNMSRSAAGTVSQPGRNVRAKSGLNRSILDQGWYEMRRQLEYKQLWRGGQVFAVPPAYTSQRCACCGYAAKENRLSQSKFRCQACGYIANADVNGAHNILAAGHAVLACGGRVQSDRPLKQEPTEMIQATA

SEQ ID NO: 1922 - protein, 391 aa, unidentified
MLKATKVRIYPTTEQAEFLNRQFGAVRFCYNTGLRIMSHRYKRHGQSLSAKHDIKKLLPVAKKSRKYGWLKEADSMALQQSCINLDQAFQRFFDPKQKAGYPRFKSKRGKQSSYHCVGVKVGDNWIKVPKLGPIKARMHRQVEGRLKSITLTRTVTGKHYASLLFDTEQAAPAPLKDVDAAKVVGLDMGLSHLAIDSTGRKVANPRFLKQAQKNLKRKQQALSRTKKGSARRAKARLLVAKAHERVANARNDFQHKLSRQLVDDNQAMIVETLKVRNMMKNARLAKHIGDASWHALVTKLDYKAREQGKHLVKIDPWFASSKTCHICHHKVGAMPLSVRSWECPSCHTHHDRDINAALSIKHQGIIQLKAEGLSVSAHGGLRKSGTSSAAA

SEQ ID NO: 1923 - protein, 606 aa, unidentified
MAQAEAPRRLRAYKFALDPTEAQLREFEQHAGSARWAYNHANAILSRYSDTLRNRWNAWIAQHHGLSREQLYALPDRERTAIQAAARAAVKAENAQLAAELRIIDDHRKRVTHKGKPSVEPGEQPAEDAPERAYQLWRERVELARLHAEDPQAYRAERKRILDEIRPLVNATKRKLIEQGAYRPTAMDISTLWREIRDLPPDEGGSPWWPEVSIYAFTSGFAHAETAWKNYLESLAGRRAGRPVGKPRFKKKRRSRRSFTLYGSVKLVTYRRIQVPSIGSVRLHGSAKRLHRALERRGGIIKSITISQGGHRWYASVLVDELDITPGRETQRGPSRRQRDRGAVGVDLGVHHLVALSDPNEKTLDNPRHLRKARKRLLKAQRAMSRRRGPDKRTGQEPSRRWVKARNRVARLHHELAVRRAGHLHEITKRLATSYELVAIEDLNVAGMTRSARGTIDQPGRGVRAKAGLNRSILDTSPAEFRRQLQYKASWYGATVAVIDRWAPTSRTCSSCGAVKAKLSLAERTFFCEHCGMELDRDINAARNILAFAQSAYPGEGKALNACGGSVSPGSQSVVQAGADEAGRPARKPRRSSRGSDPPATPTTRA

SEQ ID NO: 1924 - protein, 355 aa, unidentified
MKTLKLRIKDKHCKVLDQLASEVNFVWNYVNDLSFKHLKRTGDFFSAFDMAKYTKGTSKLCGLHSQTVDAIREEYAGKREQFRKAKLKWRVSNKKSARRSLGWIPFKKVAIKYADGYVQYGKHQFKLWDSYGISKYSVRTGSFVEDSRGRWYVCLVVDSTKAEKPTATKAIGIDLGLKDIATCSDGTVISNPKFYRKYEKKLGIAQRARNKKRVRALHAKIANCRKDHLHKASTLLVKENALIVVGDLSAKKLVKTKMAKSVLDTGFSALKTMLKYKCENAGVLFEEVSERFTTQICSCCGEITSSSPQGRTDLRIRVWECECGSINHRDLNSAKNILALGHKRLAVGITLLSGG

SEQ ID NO: 1925 - protein, 355 aa, unidentified
MKTLKLRIKDRHYKALDQLASEVNFVWNYVNDLSFKHLKRKGEFLSSYDIDKYTKGASKECGLHSQTIQAISAELVTRRKQFKKAKLKWRVSNKKSARRSLGWIPFKKVAIKYADGFVQYGKHQFKIWDSYGLSQYSIKTGSFVEDARGRWYVCLVVDSPKTEKSTGTKAIGIDLGLKDIATCSDGTVISNPKFYRQYEQKLGIAQRAKNKKCVRALHAKIANSRKDHLHKASTELVRENALIVVGDLSAKKLVKTKMAKSVLDASFSALKTMLKYKCENAGVMFEEVNERFTTQICSCCGEITASSPKGRADLRIRVWECECGSVNQRDLNSAKNILALGHKRLEVGITLLSGG

SEQ ID NO: 1926 - protein, 372 aa, unidentified
MEKAYKFRLYPTAKQEELIRKTTGCSRFVYNQTLAARKTAYSAGSPISGHDCVKLLPGLKDTYPWLREVDSTALQTSVLHMDQAYKNFFAGRKGRRKVGFPKFKAKHHSKASYTSKVVGQNIQASDRAVKLPKLGWVKAKVSTPVQGRILNATVSMSHSGKFFVSLCCTGVEISQYPSTGAAVGLDVGIKDLVITSDGQKFDNPKYLQKAEKKLATLQRRLSRKPKGSRNREKARLRLAKQHERIANCRQDYLHKLTTQLVRDYDIICVESLNVGDMLKNHKLAKAIADASWGELARQLKYKAAWQHKMLVEVGTFFSSSQLCSRCGYQNPEVKDLAVREWTCPQCGTHHDRDQNAAQNLLMEGLRLLQASA

SEQ ID NO: 1927 - protein, 380 aa, unidentified
MTQYNTIKVRLYPNQEQKELFQKTFGCCRYIWNQMLADHERFYLETDAHFIPTPAKYKKGAPFLKEVDHQALTQEYNKLSQAFRNFFRNPKAFGYPNFKRKKEDRDTFSACNQISGNSATIYITKDAVRMTKAGLVKAKFPCRPRSGWKLTRITVERSKTGKYFGYLLFSCVVHKPKPIQPIKERTIGLKYSLSHFYVADNGFTADPPLWLRRSQEKLSQMQQRLCRMKPGSNNYQEMVQKYRLLHEHIANQRRDFLHKESCRIANEWDAVCVRDDSLTDISQELTGGDVFNSGFGRFREMLGYKLERRGKQLLLVDRYLPTTRICSVCGHETQKLAPKTKRWICPVCGTEHEKDKNAAVNIKNQGFHQSSLNLGSSFAS

SEQ ID NO: 1928 - protein, 351 aa, unidentified
MHTKTLKVRVKDKHQIVLTQQARSVNFVWNYINELSSRSIKERGRFLSAFDIHPYTKGANKELGLHSQTLQCIAKEYVTRRVQFKKVRLNWRKSGGAKRSLGWIPINTGAAKWKNGQVFFNGHYYSVWDSYGLSKYQFKTASFNEDAQGRWYFNVVVEIETQASSGTASVGIDLGCKEAATDSNGHKVVGRQYRQLEQQLGIAQRANKKHRVKAIHAKIKNRRKDDLHKYSRQLVDGNAAIFVGNVNSLSLAKTKMAKSVLDAGWGMLKTMLEYKCAHAGVVFEEINESYTTQTCSCCGEIPASSPKGRAGLRIREWSCSSCGATHDRDVNAAKNILAVGHDRLAVGIHPL

SEQ ID NO: 1929 - protein, 356 aa, unidentified
MDQASSNQKQLRTLRLRVKDKHAAELSRQARAVNYVWNYINELSERSIRELGCFLSVFDLHSYTTGASKELGLHSHTVQKVAGSYVQARIQFRKRKLAWRRSGGVRRSLGWVPFNTGHARWRNGQVHFNGTAYGVWDSYGLAGYTLRSGSFSEDSRGRWYFNVAVEVPIRKSTGKIAMGIDLGCKDAATTSEADVLHGRWYRADEKALATAQRARKKRQTKKIHARIKNRRSNGIHQFSTRIVEKSAAVFVGNVSSKAMVKTTMAKSALDAGWSSLKRALEYKCASAGVIYQEVNEAYSTRTCSECGALSGPKGLKELGIRQWSCVECGSSHDRDINAARNIAALGIQSLAEGAYE

SEQ ID NO: 1930 - protein, 340 aa, unidentified
MNQASSNQKQLRTLRLRVKDKHAAELSRQARAVNYVWNYINELSERSIRELGRFLSVFDLHSYTTGASKELGLHSHTVQKVAGSYVQARIQFRKRKLAWRRSGGVRRSLGWVPFNTGHARWRNGQVHFNGTAYGVWDSYGLAGYTLRSGSFSEDSRGRWYFNVAVEVPIRKSTGKIAMGIDLGCKDAATTSEADVLHGRWYRADEKALATAQRARKKRQTKKIHARIRNRRSDGIHQFSTRIVEKSAAVFVGNVSSKAMVKTTMAKSALDAGWSSLKRALEYKCASAGVIYQEVNEAYSTRACSVCGALSGPKGLKDLVISGPRRGNGAVSSVEARTIAI

SEQ ID NO: 1931 - protein, 298 aa, unidentified
MNQSVSNPTHLRTLRLRVKDKHAAELARQARAVNYVWNYINELSERSIRERGVFLSAFDLHRYTTGASKALGLHSHTVQKTSASYVQARIQFRKRKLAWRKSGGVRRSLGWVPFNTGHARWRNGQVHFNGTAYGVWDSYGLAGFTLRSGSFSEDSRGRWYFNVAVETETKLSAGKSVIGIDLGCKEAATASNAEKLRGRWYRDDEKALATAQRAGKKRQVKKIHARIKNRRKEDTHQFTTGLVEKSGAIFVGNVSSKAMVKTNMAKSALDAGWYSLKKTLEYKCASAGVLYQEVNEAP

SEQ ID NO: 1932 - protein, 407 aa, unidentified
MQLRYSFRLYPAPGRRAALARAFGCARVVFNDAVRAREDARAAGRPFPTAGELSRTLITQAKRTAERSWLGEVSAVVLQQSLRDAETAYRNFFASLKGERQGPKLSAPRFKSSKDHRQAIRFTANARWSITPSGRLNLPKIGEVRVKWSRTLPGVPSSVTVIKDAAGRYFASFVIDTDPAADAARMPSSDQTVGVDLGLTHFAVLSDGTKIDSPRFLRRAEKKFKKAQRELSRKQKGSKNRGKARLKVARAHTQVADARREFHHQLSTRLIRENQAVAVEDLAVKALARTRLAKSVHDAGWSQFVGMLEYKAKRYGRTFVKVGRFEPTSQVCSACGHPGGPKPLHVREWTCPACDAVHDRDHNAAKNVKQAAGLAVTACGAQVRPEPVLAQRDEAGSHGSPLCARAA

SEQ ID NO: 1933 - protein, 433 aa, unidentified
MLEAVKVALDPTPAQERGLMSHAGAARFAFNAGLAHVRETIEAKGKPEWSLYALRRWWNANKDALAVDVDGMPWWRENSKESYNSGLEALSDALSNWSKSRRGLRKGRRVGFPRFRSKDRTPPRFAYTTGSFGLVGDDPKALKLPRIGRVHCMENVAKRVGGARVLRMTVSRHAGRWYASLTVERPDVRPIRPPRGEAVGIDLGVRTLATLSDGTVIPNPHALRAGERRLKRAQKSLSRKTKGSHRRHDARERVARLHARVADRRRDLLHRLTTMLASTYSDISIEDLNVAGMVKNHRLAKAVMDVSFAELRRQLEYKTVRTGARLHVIDRWYPSSKRCSNCGRVKAKLSLGERIYHCEACGLTIDRDLNAAVNIQVAGSAPETLNAHGGTGRRNDASRRATQDPVKCEPSNGDSRVRLGADARKGVLQARTN

SEQ ID NO: 1934 - protein, 433 aa, unidentified
MLEAVRVALDPTPAQERGLMSHAGAARFAFNAGLAHVRDVLESKGKPEWSLYALRRWWNANKDALAVDADGMPWWRENSKEAYNSGLEALADALSNWSKSRKGRRKGRKVGFPKFKTKDKAAPRFAYTTGSFGLVGDDPKALRLPRIGRVHCMENVTKRVGGARVLRMTVSRHAGRWYASLTVERPDVRPIRPPRGEAVGIDLGVRTLATLSDGTVIPNPHALRAGERRLKHTQKSLSRKTKGSHRRRDARERVARLHARVANQRRDLLHRLTTMLASTYSDISIEDLNVAGMVKNHRLAKAVMDVSFAELRRQLEYKTVRTGARLHVIDRWYPSSKRCSNCGSVKAKLSLSERTYRCEDCGLTIDRDLNAAVNIQVAGSAPETLNAHGGTGRRNDASRRATQDPVKCEPSNGDSRIRLGADARKSVLQARTN

SEQ ID NO: 1935 - protein, 423 aa, unidentified
MIVQLRYQFRVYPTPGQQIELARAFGCARVVFNDGLRLRQQAREQGIAYVSDGELSRRVITEAKATPQRAWLGEVSAVVLQQALADLNTAYRNFFDSLSGKRKGRKVAPPRFRSRKDNRQAIRFTRNARFKVLDNGRLRLPKIGDLHVRWSRTLPSDPSSVAIIKDAAGRYCASFVVTTAEDEALPPVASEVGIDLGLTHFAVLCDGTKVAAPKFLRRAARKLKRLQQALSRKQRGSQNRRKAVIKVARAHARVADTRRDWQHKLSTAIIRDNQAVYVEDLAVAGLGRTRLARSVHDAGWAGFTSMLEYKAARYGRTFARVDRFFPSTRMCSDCGRINEKMTLDVRAWDCPCGSHHDRDVNAAKNIRAAGQADLNDRGAHVRPGPVPAARREAVTHPNAACPTRSVEGISVLQGGEDVKTTGC

SEQ ID NO: 1936 - protein, 353 aa, unidentified
MKYTKTLKVRVRDKHRPLLNQMARSVNFVWNYINELSHRSIKERGVFLSAYDIQKYTQGAHKELGLHSHTVQKVGAEYATRRKQFKKNRLNWRKSGGVRRSLGWIPINTGMAKWKNGQVYHNGHYFKVWDSYGLGQYSFRTGSFNEDARGRWYFNVVVEVEAKIPAGQDKIGIDLGLKTTATCSDGTKLEAGHFYRDLEPKLAMAQRAGKKKQVKNIHAKIANRRKDALHKFSRQLVNRCGEIYVGNVKSSALAKTTMAKSVQDAGWAMLKTMLKYKCDHAGIVFKEVNESYTTQTCSHCGALPNERPKGIAGLGIREWTCSACGVTHDRDVNAAKNMLALGHERPEEGIPVL

SEQ ID NO: 1937 - protein, 404 aa, unidentified
MKRLQAFKFQLRPGGQQERQMRLFAGACRFVFNRALALQNENYEAGNKYIPYTKMASWLVEWKKDTETEWLKDSPSQPLQQSLKDLERAYKNFFQKRAAFPRFKKRGQNDAFRYPQGVKLDQENSRIFLPKLGWVRYRNSRQVTGIVKNVTVSQSCGKWYISIQTESEVSTPVHPSASMVGLDAGVARLATLSDGTVFEPVNSFQKNQKKLARLQRQLSRKVRFSNNWQKQKRKIQQLHSRIANIRRDYLHKVTTIISKNHAMIVIEDLKVKHMSKSAAGTISQPGRNVRAKSGLNRSILDQGWYEMRRQLEYKQLWHGGQVLAVPPAYTSQRCACCGHIAKENRLSQSKFRCQVCGYTANADVNGARNILAAGHAVLACGGMVQSGRPLKQEPTEMIQATALT

SEQ ID NO: 1938 - protein, 423 aa, unidentified
MLEAVKVALDPTPAQERLMLSHAGAARFAFNAALAHVKDQLERGEAPDWNLYALRRWWNANKARLAPWWAENSKEAYNTGLSGLADALCNFTRSRKGQRKGRRVGFPTFRSRDRTTPRFAYTTGSFGLILDDPKALRLPRIGRVHTFENVMKRVGDGRVLRMTVSRRAGRWYASLTVERADPPASIPPEGAPIGVDLGVKELATISDGTVVHNPRPLERNLGRLAKAQRSLSRKKRGSNRYAKARVTVARTYARVANLRADAMHKLTTKLADGHSDVCIEDLNVQGMTRNHKLARAIEDAAFAEFRRMLTYKCARSGARLHVVDRFYPSSKTCSACGMVKAKLSLKERTYACEACGLTIDRDLNAAKNILDAVSATGSLNARGADVRPAGPRTGGRTAMKREPSVRASGVRLGAGVGNDAMHD

SEQ ID NO: 1939 - protein, 409 aa, unidentified
MVMQLRYSFRLYPDTGQQRALARAFGCARVVFNDAVRAREEARAAKQPFPKAAELSKRLITEAKQTVERSWLGEVSAVVLQQSLRDVETAYRNFFASLKGGRKGPKMGAPHFKSRKDKRQSIRFTANARWSITDSGRLNLPKIGAVKVKWSRTLPTTPSSVTVIKDAAGRYFASFVIDTDPAADQARMPETDRTIGIDLGLTHFAVLSDGTKIDSPRFLRRAEKKLKKAQRELSRKQKGSKNREEARLKVTRAHAKVTDARREFHHQLSTRLISENQGIAVEDLSVAGLARTRLAKSVHDAGWSSFVSMLEYKAARYGRTLVTIGRFEPTSQTCSTCGVKDGPKPLSVREWTCTACGSVHDRDHNAAINVKTAAGLAVSACGAPVRPGAIPAQREETGSHGFPTQARAA

SEQ ID NO: 1940 - protein, 407 aa, unidentified
MQLRYSFRLYPDTGQQRALARAFGCARVVFNDAVRAREEARAAKQPFPKAAELSKRLITEAKQTVERSWLGEVSAVVLQQSLRDVETAYRNFFASLKGGRKGPKMGAPHFKSRKDKRQSIRFTANARWSITDSGRLNLPKIGAVKVKWSRTLPTTPSSVTVIKDAAGRYFASFVIDTDPAADQARMPETDRTIGIDLGLTHFAVLSDGTKIDSPRFLRRAEKKLKKAQRELSRKQKGSKNREEARLKVTRAHAKVTDARREFHHQLSTRLISENQGIAVEDLSVAGLARTRLAKSVHDAGWSSFVSMLEYKAARYGRTLVTIGRFEPTSQTCSTCGVKDGPKPLSVREWTCTACGSVHDRDHNAAINVKTAAGLAVSACGAPVRPGAIPAQREETGSHGFPTQARAA

SEQ ID NO: 1941 - protein, 380 aa, unidentified
MLRATKVRIYPTQEQAEFLIAQFGAVRFAYNKALHLKSHMYRKHSVTLDPKKDIKPLLAVAKKSRKYHWLKQYDSIALQQSVINLHQAFDNFFNPKLKAKYPQFKRRHGKQSSYHCVGVKVLDGAIKLPKMKPVEANIHREIVGTVKSITVSMSKTGKFYASILADDGVDAPSPIHTVSKVTGIDLGLSHFAIESNGRKTANPRFVKRAEKNLRRKQRQLSRKAKGSANRAKARLRVAKCHEKVANARADFQHKLSRTLVDENQAVIVETLKSANMMKNRKLAKHIADASWHSFVVKLEYKLKEQGKYLVKLDQWYASSKTCHCCGHKMDDMPLSVRQWNCPSCGTTGIDRDLNAALNIRDKGILELKAAGRSSQLMEAA

SEQ ID NO: 1942 - protein, 406 aa, unidentified
MQLRYAFRLYPDGAQQAALARAFGCARVVFNDAVRAREDARKARQPFPTAGQLSTCLITEAKRTPERAWLGEVSAVVLQQSLRDAEKAYRNFFASIKGTRKGPRMGPPRFKSRKDARQSIRFTANARWNITGGRLNLPKIGAVKVKWSRTLPTTPSSVTVVKDAAGRYFASFVIDTDPAADQARMLETDRTIGIDLGLTHFAVLSDGTKIDSPRFLRRAEKKLKKAQRELSRKQKGSRNRAKARLKVARAHAKVADARREFHHQLSTKLISENQGIGVEDLPVAGLARTKLAKSVHDAGWSAFLSMLEYKAARYGRTLVRIRRFEPTSQTCSTCGVKDGPKPLNVREWTCSTCGTVHDRDHNAAINVKTAAGLAVSACGAPVRPGAIPAQREETGSHGFPTEPRAA

SEQ ID NO: 1943 - protein, 402 aa, unidentified
MKRLQAFKFQLRPGDQQECEMRRFAGACRFVFNRALALQNENHEAGNKYIPYGKMASWLVEWKNATETQWLKDSPSQPLQQSLKDLERAYKNFFRKRAAFPRFKKRGQNDAFRYPQGVKLDQENSRIFLPKLGWMRYRNSRQVTGVVKNVTVSQSCGKWYISIQTESEVSTPVHPSASMIGLDAGVAKLATLSDGTVFGPVNSFQKNQKTLARLQRQLSRKVKFSNNWQKQKRKIQRLHSRIANIRRDYLHKVTTTVSKNHAMIVIEDLKVSNMSKSAAGTVSQPGRNVRAKSGLNRSILDQGWYEMRRQLEYKQLWRGGQVLAVPPAYTSQRCACCGHTAKENRLSQSKFRCQVCGYTANADVNGARNILAAGHAVLACGEMVQSGRSLKQEPTEMIQATA

SEQ ID NO: 1944 - protein, 404 aa, unidentified
MKRLQAFKFQLRPGGQQERQMRLFAGACRFVFNRALALQNENYEAGNKYIPYTKMASWLVEWKKDTETEWLKDSPSQPLQQSLKDLERAYKNFFQKRAAFPRFKKRGQNDAFRYPQGVKLDQENSRIFLPKLGWVRYRNSRQVTGIVKNVTVSQSCGKWYISIQTESEVSTPVHPSASMVGLDAGVARLATLSDGTVFEPVNSFQKNQKKLARLQRQLSRKVRFSNNWQKQKRKIQQLHSRIANIRRDYLHKVTTIISKNHAMIVIEDLKVKHMSKSAAGTISQPGRNVRAKSGLNRSILDQGWYEMRRQLEYKQLWRGGQVLAVPPAYTSQRCACCGHIAKENRLSQSKFRCQVCGYTANADVNGARNILAAGHAVLACGGMVQSGRPLKQEPTEMIQATALT

SEQ ID NO: 1945 - protein, 407 aa, unidentified
MQLRYAFRIYPNAGQRTALARAFGCARVVFNDAVRAREEARQAGQPFPKAGELSTRLIAEAKRTAERSWLGEVSAVVLQQSLRDAETAYKNFFASLKGTRKGPRIGPPQFKSRRDARQSIRFTANARWNVTDSGRLNLPKIGAVKVKWSRALPATPSSVTVIKDASGRYFASFVIDTDPAADATRMPETDRTIGIDLGLTHFAVLSDGTKINSPRFLRRAEKKLKKAQRELSRKQKGSKNRAKARLKVARAHAKVTDARREFHHQLSTKLIAENQGIAVENLSVAGLARTKLAKSVHDAGWSSFISMLKYKAERYGRTLVKIGRFEPTSQTCSTCGVKDGPKPLNVREWTCTACGTVHDRDINAAINVKTAAGLAVSACGAPVRPGAIPAQREETGSHGFPTEPRAA

SEQ ID NO: 1946 - protein, 352 aa, unidentified
MKTLKLRIKDKHCKVLDQLASEVNFVWNYVNDLSSKHLKRTGDFFSAFDMTQYTKGTSKLCGLHSQTVQGITEEYVDKRRQHKKAKLKWRVSNKKSARRSLGWIPFKKVAIKYADGYVQYGKQKFKLWDSYGISKYSVRTGSFVEDSRGRWYVCLVVDSPKQDKPTATKAIGIDLGLKDVATCSDGTVISNPKFYRNYEQKLGIAQRARNKKRVRALHAKIANCRKDHLHKASTLLVKENALIVVGDLSASKLVKTKMAKSVLDTGFSALKTMLKYKCENAGVLFEEVSEKFTTQICSCCGEITSSSPKGRTDLRIRVWECECGSINHRDLNSAKNILALGHERLAVGIRLL

SEQ ID NO: 1947 - protein, 407 aa, unidentified
MQLRYAFRLYPEPGQRIALGRAFGCARVVFNDAVRARKDAHAAGLPYPKAAELSQTLITQAKRTVERSWLGGVSSVVLQQSLRDVEAAYRAFFASVKGERNGARVGASRFKSRKDARQSIRFTANARWSITPGGRLNLPKIGEVRVKWSRTLPVVPSSVTVIKDSAGRYFASFVIDTDPAADAGRMPATEQAIGIDLGLTHFAVLSDGTKIDSPRFLRRAEKKLKKAGRELSRKQKGSKNRDKARLKVARAHAQVADARKEFHHQFSTRLIRENQAIAVEDLSVKGLARTKLAKSVHDAGWSQFVTMLACKAARYGRTFIKIGRFEPTSQVCSTCGHHDGPKPLHVREWTCPACGTRHDRDVNAAKNVKQAAGLAASACGAKVRPEPVLAQREETGSHGIPAGSHAA

SEQ ID NO: 1948 - protein, 397 aa, unidentified
MSPCSTINQRQDHGVQLRYNFRLYPTPGQCAALAKAFGCARVVYNDGLRLRQEARAAGLPYISDAELSKRIITQAKKTPERAWLSEVSAVVLQQAPADLNTAYRNFFVSASGKRKGPKVAPPRFRPKRDNRQAIRFTRNARFQITAGGRLRLPKVGDVTVKWSRRLPSEPSSVTVVKDAAGRYFASFGIEAGEEPLPETAAEVGIDLGLTHFAVLSDGRKIDDPRFLRRAERRLRKAQQALSRKAKGSANRRKAVVKAAGAHARVADARRDFAHKLSTQIIRENQAVMVENLAVKGLARTKPARSVHDAGWSAFVNMLEYKAARYGRTLVKIDRWFPGSKLCSACGAAAESVPLNVRSWACPCGAVHDRDVNAAKNILAAGRAERLNACGGTVRPAA

SEQ ID NO: 1949 - protein, 363 aa, unidentified
MLKSYRYRLSPTTSQVTLLERTLEICRWVYNDTLALRKNAWEQDQRSVSLYETNKILTEWKRERPELKQVHSQVLQNAQMRIDLAFKAFFRRLKSGEKPGYPRFKGKGRYDSFAYPQSGFVLNEDRLHLAKIGDLRVFLHRPVEGTIKTLTIRRSATGKWYACFSVEYEPNPAPQKETTVGVDVGLESFATFSNGEKIENPRFFRTDEKALAKAQRRLSKAEKGTPERKKARQIVAHVHERIANRRLNFAHQTSRQLVNRFGTIVFEDLNISNMQKNHCLAKSIADVAWNQFVTITTSKAEDAGSQVILVNPRNTSQMCSRCGMIVVKNLSDRVHSCPHCGLELDRDQNAAINILRLGLQSLG

SEQ ID NO: 1950 - protein, 366 aa, unidentified
MRRAYHYRIYPTKSQVTLLDRTLEICLWVYNDTLALRKNAWEQEQRSVSLYETNKILTQWKRERPELKEVYAQTLQNVQVRVDLALKAFFRRVKSGEKPGYPRFKGKGRYDSFTYPQAEKGGVKFVGERLNLSKIGDVKIVLHRPIEGTIKTLTIRRSATGKWYACFSVEYDPSPAPQKETTVGIDVGLESFASLSNGEKIENPRFFRTEEKALAKAQRRLSKAEKGTPERRKVRKIVAHVHERIANRRLNFAHQTSRQLVDRFGTIVFEDLNIRNMQKNHCLAKSIADVAWNQFVTITQSKAEDAGSHVILVNPRNTSQMCSRCGKIVAKTLSNRVHTCPHCGLEMDRDQNAAINILRLGLQSLG

SEQ ID NO: 1951 - protein, 407 aa, unidentified
MQLRYAFRLYPDTGQRHALAKAFGCARVVFNDAVRAREDARRAGQPFPKAGELSTRLIAEAKRTVERSWLGEVSSVVLQQSLRDAEAAYRNFFASLKGTRKGPRLGAPRFKSRKDARQSVRFTANARWSITGAGRLNLPKIGAVKVKWSRTLPTTPTSVTVIKDSAGRYFASFVVDTDPAADAARMPDTDQTVGIDLGLTSFAVLSDGTKIDSPRFLRRAEKKLKKAQRELSRKQKGSKNRAKARGKVARVHAKVADARREFHHQLSTRLISENQGIAVEDLSVKELARTRLAKSVHDAGWAQFVNMLAYKAARYGRTLVKVGRFEPTSQVCSVCGVKDGPKPLTVREWTCTACGTRHDRDHNAALNIRQAAGLAASACGAPVRPGAIPAQREETGSHGLPTGNRAA

SEQ ID NO: 1952 - protein, 398 aa, unidentified
MYEAVKVALDPTPRQERLLEGHAGAARFAYNTMLSHIQSQLARGEKADWTMYAQRRWWNEWKNEIAPWWAEYSKEAYNSAFESLAAALRSFLDSKTGRRKGGRMGWPRFKSKRRSMLRFAYTTGSFGLIDNDPKALKLPRIGRVHCMENIARRVGAAKVVRMSVGRRAGRWYASLTVEREDKPVPCPPKGGSVGVDLGVKTLAALSDGTVFDNPRLLKRAHRKLGKAQKTLSRRNEGSNRWKEAELHLQRVHTHIASQRRDGLNKLTTMLTKTYSHISIEDLNVSGMVRNHSLAQAISDCGFRELRRQLEYKTARTGAKLHVVNRWYPSSKTCSNCGTVKAKLSLNERTYVCDACGLGIDRDLNAAININVAGSAPETLNARGGDARHGRHAPAAQTP

SEQ ID NO: 1953 - protein, 432 aa, unidentified
MLEAVKVALDPTPIQERLLSSHAGAARFAYNAGLAHVKTAIEAGEGPEWSLYALRRWWNANKDKLAVDADGRPWWRENSKEAYGSGLESLADALSNWSKSRKGERRGRRVGFPRFKAKDSATPRFAYTTGSFGLVKDDPKALRLPRIGRVHCMEDIMRRVDGARVLRMTVSCRAGRWYASLTVERADPTAKRTPQGGAVGVDLGVKTLATLSDGTVIDNPHTLRTAERRLKRAQRALSRKTKGSKRRLKARNKVARIHARITNQRRDLLDKLTTWLAGTYSDISIEDLNVTGMVRNHRLAKAVEDASFAELRRQLEYKTARTGTRLHVIDRWYPSSKTCSDCGSVKAKLSLAERTYHCEKCGLTLDRDLNAAINIMVAGSAPETLNAHGGDARPAVHQDGRQTPAKCEPSSRATGVRLGADGRKTVLQTRTN

SEQ ID NO: 1954 - protein, 390 aa, unidentified
MLRATKVRIYPTAEQADFLNRQFDAVRFAWNKALAIKTHYYKVRNQNLSPRKHLKPLLATAKKSRKYSWLKNADSIALQQAIINLDTAFQNFFNPKLEARFPRFKSKRGKQSSYHCMSVAVGENWIKVPKCLPIKARVHREITGKVKSITLSKTTTGKYYASILVDDGLAQPNPLTDLNASQVLGIDMGIADLAITSTGHKTGNPRFLKNAQRNLKRKQKALSRCKRGSRGRAKARLLVAKAHEHVANARNDFQHKLSRQLIDENQAVIVETLKVKNMLKNKRLARSIADAGWHSLLTKLEYKAKQEGKHLVKIDQWFASSKTCSCCGLKQETMPLTIRTWVCPCGAAHDRDVNAAKNIQNQGILKLKAEGLSVSADGGKRKSGVLSVAA

SEQ ID NO: 1955 - protein, 380 aa, unidentified
MLRATKVRVYPTEDQAEFLIAQFGAVRFAYNKALHLKSHMYRKHGATLNPKKDIKPLLAVAKKSRKYQWLKQYDSIALQQSVINLHTAFDNFFNPKLRAKYPNFKRRHGKQSSYHCVGVKVLDGAIKLPKMKPVKANIHRGIIGKVKSITLSLSKTGKFYASILVDDGLEAPTLIHSIDKVTGIDLGLSHFAIQSNGKKEANPRFVKRAEKNLRRKQKQLSRKVKGSANRAKARLRVAKCHEKTANARADFQHKLSRTLVDKNHAVIVETLKSANMMKNRKLAKHIADASWHSFVVKLEYKLKEKGKHLVKLDQWYASSKRCHCCGHKMEEMPLSVRKWDCPSCGTTDIDRDLNAALNIRDKGLLELKAAGQSFLLMEAA

SEQ ID NO: 1956 - protein, 380 aa, unidentified
MLRATKVRIYPTQEQDEFLIAQFGAVRFAYNKALHLKSHMYRKHGVTLNPKKDIKPLLAVAKKSRKYHWLKQYDSIALQQSVINLHTAFDNFFNPKLRAKYPNFKRRHGKQSSYHCVGVKVLDGAIKLPKMKPVKANIHREIIGKVKSITLSLSKTGKFYASILVDDGIEAPTLIHSIDKVTGIDLGLSHFAIQSNGKKEANPRFVKRAENNLRRKQKQLSRKVKGSANRAKARLLVAKCHEKTANARADFQHKLSRILVDKNHAVIVETLKSANMMKNRKLAKHIADASWHSFVVKLEYKLKEQGKHLVKLDQWYASSKTCHCCGHKMEEMPLSVRKWDCPSCGTTDIDRDLNAALNIRDKGILELKAAGQSFLLMEAA

SEQ ID NO: 1957 - protein, 380 aa, unidentified
MLRATKIRIYPTQEQAEFLIAQFGAVRFAYNKALHLKSHMYRKHGVTLNPKKDIKPLLAVAKKSRKYHWLKQYDSIALQQSVINLHQAFDNFFNPRLKAKYPQFKRRHGKQSSYHCVGVKVLDGAIKLPKMKPIEANVHREIAGVVKSITVSLSKTGKFYASILADDGVEASTPLHTVRTVTGVDLGLSHFVIESNGRKTANPRFVRRAEKNLRRKQRQLSRKAKGSANRAKDRILVAKCHEKVANARADFQHKLSRTLVDENQAEIVETLKSANMMKNRKLAKHIADASWNSFVAKLEYKLKEQGKHLVKLDQWYASSKTCHCCGHKMEEMPLSVRKWDCPSCGTTDIDRDLNAALNIHDKGILELKAAGRSSLLMEAM

SEQ ID NO: 1958 - protein, 407 aa, unidentified
MQLRYAFRLYPEPGQRLALARAFGCARVVFNDAVRAREDARGAGEPFPTAGELSKKLITAAKQTASRAWLGEVSSVVLQQSLRDAEAAYKNFFASLKGERKGAKTGAPRFKSRKDSRQSIRFTANARWSITGSGRLNLPKIGAVKVKWSRTLPARPSSVTVVKDAAGRYFASFVVDTDPGADAARMPGTDQTVGIDLGLTHFAVLSDGTKIDSPRFLRRAEKKLKKAQRELSRKQKGSKNRAKARLKVARAHAKVADARREFHHQLSTQLIRDNQAIGVEDLAVQGLARTRLARSVHDAGWSAFVNMLEYKAARYGRTLVKIGRFEPTSQTCSACGIKDGPKPLNVREWTCTACGTVHDRDHNAAKNVKTAAGRAVTACGAPVRPGLVPAQREETGSHGFPPEPCAA

SEQ ID NO: 1959 - protein, 407 aa, unidentified
MQLRYAFRLYPEPGQRLALARAFGCARVVFNDAVRAREDARGAGEPFPTAGVLSQKLITQAKQTPERSWLGEVSAVVLQQSLRDAEVAYKNFFASLRGERKGAKTGAPRFKSRKDSRQSIRFTANARWSITGSGRLNLPKIGAVKVKWSRTLPARPSSVTVVKDAAGRYFASFVVDTDPGADAARMPGTDQTVGIDLGLTHFAVLSDGTKIGSPRFLRRAEKKLKKAQRELSRKQKGSKNRAKARLKVARAHAKVADARREFHHQLSTQLIRDNQAIGVEDLAVQGLARTRLARSVHDAGWSAFVNMLEYKAARYGRTLVKIGRFEPTSQTCSACGIKDGPKPLNVREWTCTACGTVHDRDHNAAKNVKTAAGRAVTACGAPVRPGLVPAQREETGSHGFPPEPCAA

SEQ ID NO: 1960 - protein, 407 aa, unidentified
MQLRYAFRLYPEPGQRLALARAFGCARVVFNDAVRAREDARGAGEPFPTAGVLSQKLITQAKQTPERSWLGEVSAVVLQQSLRDAEVAYKNFFASLRGERKGAKTGAPRFKSRKDSRQSIRFTANARWSITGSGRLNLPKIGAVKVKWSRTLPARPSSVTVVKDAAGRYFASFVVDTDPGADAARMPGTDQTVGIDLGLTHFAVLSDGTKIDSPRFLRRAEKKLKKAQRELSRKQKGSKNRAKARLKVARAHAKVADARREFHHQLSTQLIRDNQAIGVEDLAVQGLARTRLARSVHDAGWSAFVNMLEYKAARYGRTLVKIGRFEPTSQTCSACGIKDGPKPLNVREWTCTACGTVHDRDHNAAKNVKTAAGRAVTACGAPVRPGLVPAQREETGSHGFPPEPCAA

SEQ ID NO: 1961 - protein, 407 aa, unidentified
MQLRYAFRLYPEPGQRLALARAFGCARVVYNDAVRAREDARGAGEPFPTAGVLSQKLITQAKQTPERSWLGEVSAVVLQQSLRDAEAAYKNFFASLKGERKGAKTGAPRFKSRKDSRQSIRFTANARWSITGSGRLNLPKIGAVKVKWSRTLPARPSSVTVVKDAAGRYFASFVVDTDPGADAARMPGTDQTVGIDLGLTHFAVLSDGTKIGSPRFLRRAEKKLKKAQRELSRKQKGSKNRAKARLKVARAHAKVADARRDFHHQLSTQLIRDNQAIGVEDLAVQGLARTRLARSVHDAGWSAFVNMLEYKAARYGRTLVKIGRFEPTSQTCSACGIKDGPKPLNVREWTCTACGTVHDRDHNAAKNVKTAAGRAVTACGAPVRPGLVPAQREETGSHGFPPEPCAA

SEQ ID NO: 1962 - protein, 407 aa, unidentified
MQLRYAFRLYPEPGQRLALARAFGCARVVYNDAVRAREDARRAGEPFPTAGELSKKLITAAKQTASRAWLGEVSSVVLQQSLRDVEAAYKNFFASLKGERKGAKTGAPRFKSRKDSRQSIRFTANARWSITGSGRLNLPKIGAVKVKWSRTLPARPSSVTVVKDAAGRYFASFVVDTDPGADAARMPGTDQTVGIDLGLTHFAVLSDGTKIDSPRFLRRAEKKLKKAQRELSRKQKGSKNRAKARLKVARAHAKVADARREFHHQLSTQLIRDNQAIGVEDLAVQGLARTRLARSVHDAGWSAFVNMLEYKAARYGRTLVKIGRFEPTSQTCSACGTKDGPKPLNVREWTCTACGTVHDRDHNAAKNVKTAAGRAVTACGAPVRPGLVPAQREETGSHGFPPEPCAA

SEQ ID NO: 1963 - protein, 407 aa, unidentified
MQLRYAFRLYPEPGQRLALARAFGCARVVYNDAVRAREDARGAGEPFPTAGVLSQKLITQAKQTPERSWLGEVSAVVLQQSLRDAETAYKNFFASLKGERKGAKTGAPRFKSRKDSRQSIRFTANARWSITGSGRLNLPKIGAVKVKWSRTLPARPSSVTVVKDAAGRYFASFVVDTDPGADAARMPGTDQTVGIDLGLTHFAVLSDGTKIDSPRFLRRAEKKLKKAQRELSRKQKGSKNREKARLKVARAHAKVADARREFHHQLSTQLIRDNQAIGVEDLAVQGLARTRLARSVHDAGWSAFVNMLEYKAARYGRTLVKIGRFEPTSQTCSACGIKDGPKPLNVREWTCTACGTVHDRDHNAAKNVKTAAGRAVTACGAPVRPGLVPAQREETGSHGFPPEPCAA

SEQ ID NO: 1964 - protein, 407 aa, unidentified
MQLRYAFRLYPEPGQRLALARAFGCARVVFNDAVRAREDARGAGEPFPTAGVLSQKLITQAKQTPERSWLGEVSAVVLQQSLRDAEAAYKNFFASLKGERKGAKTGAPRFKSRKDSRQSIRFTANARWSITGSGRLNLPKIGAVKVKWSRTLPARPSSVTVVKDAAGRYFASFVVDTDPGADAARMPGTDQTVGIDLGLTHFAVLSDGTKIDSPRFLRRAEKKLKKAQRELSRKQKGSKNRAKARLKVARAHAKVADARRDFHHRLSTQLIRDNQAIGVEDLAVQGLARTRLARSVHDAGWSAFVNMLEYKAARYGRTLVKIGRFEPTSQTCSACGIKDGPKPLNVREWTCTACGTVHDRDHNAAKNVKTAAGRAVTACGAPVRPGLVPAQREETGSHGFPPEPCAA

SEQ ID NO: 1965 - protein, 407 aa, unidentified
MQLRYSFRLYPDPGQRTALAKAFGCARVVFNDAVRAREDARKAGQPFPKAGELSTRLITEAKRTTGRSWLGEVSAVVLQQSLRDAETAYRNFFASLKGTRKGPRTGPPRFKSRKDARQSIRFTANARWNITDNGRLNLPKIGAVKVKWSRTLPATPTSVTVIKDAAGRYFASFVIDTDPAADATRMPETQHTIGIDLGLTHFAVLSDGTKIDSPRFLRRTEKKLKKAQRELSRKQKGSKNRAKARLKVARAHARATDARREFHHQLSTKLICENQGIGVEDLSVAGLARTKLAKSVHDAGWASFISMLEYKAERYGRTLVKIGRFEPTSQTCSTCGVKDGPKPLDVREWTCTACGTVHDRDHNAALNVKTAAGLAVSACGAPVRPGAIPAQREETGSHGLPTEPRAA

SEQ ID NO: 1966 - protein, 407 aa, unidentified
MQLRYAFRLYPEPGQRLALARAFGCARVVYNDAVRAREDARGAGEPFPTAGELSKKLITAAKQTASRAWLGEVSSVVLQQSLRDVETAYKNFFASLKGERKGAKTGAPRFKSRKDSRQSIRFTANARWSITGSGRLNLPKIGAVKVKWSRTLPARPSSVTVVKDAAGRYFASFVVDTDPGADAARMPGTDQTVGIDLGLTHFAVLSDGTKIDSPRFLRRAEKKLKKAQRELSRKQKGSKNRAKARLKVARAHAKVADARREFHHQLSTQLIRDNQAIGVEDLAVQGLARTRLARSVHDAGWSAFVNMLEYKAARYGRTLVKIGRFEPTSQTCSACGIKDGPKPLNVREWTCTACGTVHDRDHNAAKNVKTAAGRAVTACGAPVRPGLVPAQREETGSHGFPPEPCAA

SEQ ID NO: 1967 - protein, 388 aa, unidentified
MEKAYKFRLYPTAKQEELIRKTIGCSRFVYNQTLAARKGAYASGNSIHMTFKESHSGYDCVKLLPGLKDTYPWLREVDSTALQASVLNMDHAYKNFFSGRKGRRKVGFPKFKAKHHSKASYTSKVVGHNIQASDRAVKLPKLGWVKAKVSTTVQGRILNATVSMSRSGKFFVSLCCTEVDIPQLLSTGAAVGLDVGIKDLVITSDGQKFDNPKYLRKAEKKLATLQRRLSRKPKGSCNREKARLRLSRQHEYIANCRQDYLHKLTTQLVRDYDIICVESLNVGGMLKNHKLAKAIADASWGELARQLKYKAAWQHKMLVEVGTFFPSSQLCSCCGYQNKEVKDLSVREWTCPQCGAHHDRDQNAAQNLLIEGLRLLPHDFQRKSQASA

SEQ ID NO: 1968 - protein, 524 aa, unidentified
MTSQEVLRAYRFALDPSDSQAALLTRYAGAARWAFNHALAAKQAEHQRWRAEVQALVESGETEAEARKRIKLVVPSKPAIQKAWVTGRGDSRSAVDGSCPWWWEVNNHCFQSGFIDADAAWRNWLSSLRGQRGGHRVGYPRYKKKGRSRDSFRLHHDAKRPSIRLVGYRRINLPKFGEVRIHNSGKPLARMVGRGQAVIQSVTVSRAGSRWYASVLCRVQQEIPQRLTARQRAGGVVGVDLGSTHLAVLSGRLRQADHDSNVVEHPRHLQRCMTRLTKAQRALSKTVKGSVRRGRAARKVARIHHVVAERRATHLHALTRQLAENFSHIAVEGFDVQGLMKRPPVPGEGRRASSITARFNRYLLDAAPGEVRRQLAYKALWYGSTMVVLTPGEPVNQVCSRCGSQNSRVSVSDSRFSCRDCGFSIGRRHNAAQNIRHAAQRMIGNVTSGSGETEKARGVAVRPSAGSAKGAQRRSEKTSGHRGLMPPRESDLAAPCVPHQGDMQGDQSTGSTPERDGFCDPGCG

SEQ ID NO: 1969 - protein, 407 aa, unidentified
MQLRYSFRLYPGPGQRIALARAFGCARVVYNDAVRAREDARRAGEPFPTAGALSQKLITRAKRTPERSWLGEVSAVLLQQSLRDMEAAYRNFFASRNGTRNGPKVGAPRFKSRKDHRQSIRFTANARWSITPTGRLNLPKIGEVRVRWSRALPAVPSSVTVIKDAAGRYFASFVVGTDPAADAARMPASDQAVGIDLGLTHFAVLSDGTKIDSPRFLRRAEKKLKKAQRELSRKQKGSRNREKARRKVARAHARVADARREFHHQLSTKLIRENQAVAVEDLAVGGLARTRLARSVHDAGWSQFVNMLEYKAARYGRTLVKVGRFEPTSQVCSTCGTNSGPKPLGVREWTCSGCGTVHDRDHNAAKNVKRAAGLAVTACRAPVGPEPVLAQREETGSHGSPPDARAA

SEQ ID NO: 1970 - protein, 410 aa, unidentified
MQLRYNYRVYPSPAQQAALGRAFGCARVVFNDGLRARQQARQAGEAYLSDGDLSKRVITEAKRTPERVWLGEVSAVVLQQALADLNAAYRNFFASVSGKRKGRRVAPPRFRSRKDNRQAIRFTANARFKVLDNGRLRLPKVGDVAVRWSRRLPAAPTSVTVVRDAAGRYFASFVVQTADEPLPPVDGEVGIDLGLAHFAVLSNGKKITAPRFLRRAARKLKRLQQDLSRKQRGSANRSKAVVKVARAHARVADSRRDWQHKLSTRIIRDNQAVYVEDLCVTGLGRTRLAKSVHDAGWTQFVHMLEYKAARYGRSFRRIGRFAPTSQTCSTCGRLDGPKPLSVRSWTCPCGAVHDRDVNAAINILAAGRAESLNACGAQVRPAPLPAPRREAGIHPHTACSARSVEGISVL

SEQ ID NO: 1971 - protein, 411 aa, unidentified
MQLRYNYRVYPTPGQQGALARAFGCARVVFNDGLRARQRAREAGLPYVSDGDLSKQVITQAKQTPERAWLGEVSAVVLQQALADLNVAYRNFFASLSGKRKGRPVAPPRLRSRKDNRQAIRFTRNARFAVLDNGRLRLPKIGDVSVRWSRTLPAEPSSVTIIKDAGGRYFASFVVQTSDEPLPPAEAEVGIDLGLTHFAVLSNGKKITAPKFLRRAAGKLRRLQRDLSRKQRGSANRAKAVVKVAKAHARVADTRRDWHHKLSTRIIRDNQAVYVEDLCVAGLGRTRLAKSVHDAGWAAFTHMLEYKAARYGRTFGRVDRFFPSTRMCSDCGRINEKLPLNVRSWTCPCGSTHDRDVNAAINILAAGRAERLNACGAQVRPAPVPAPRREAGIHPDATRRPTRSVEGISVL

SEQ ID NO: 1972 - protein, 412 aa, unidentified
MQLRYNYRVYPTPGQQEALARAFGCARVVFNDGLRIRQQARDEGLPYVSDGDLSKRVITGAKKTPERQWLGEVSAVVLQQALADLNTAYRNFFSSLTGERKGPKVAPPRLRSRKDNRQAIRFTRNSRFAVLDNGRLRLPKIGDVPVTWSRRLPSEPSSVTIIKDAAGRYFASFVVTSTEDETLPATNAEVGIDLGLTHFAVLSNGKKIAAPKFLRRAARKLRRLQQDLSRKQRGSSNRKKAVVKVAKVHARVADTRRDWQHRLSTRIIRDNQAVYVEDLCVTGLARTRLAKSVHDAGWASFVEMLEYKAARYGRTFGRIGRFAPTSQACSRCGRLDGPKPLSVRSWTCPCGAVHDRDVNAAINVLTQGRWDNSNACGAQVRPAPLPAPRREAGIHPGVAGSPARSAEGISAL

SEQ ID NO: 1973 - protein, 395 aa, unidentified
MQLRYNFRVYPTPGQQIELARAFGCARVVFNDGLRLRQQAREQGERYICDAELSRRLITEAKLTPQRAWLGEVSAVVLQQALADLNTAYRNFFNSLSGKRRGRTVAPPRFRSRKDNRQAIRFTKNSRFKVLDNGRLRLPKVGDLPVRWSRNLPADPSSVAIIRDASGRYFASFVVQTTDEALPPVDSEVGIDLGLTHFAVLSDGTKVTAPTFLRRAARKLKRLQQDLSRKQRGSSNRKKAVKKVARAHARVADTRRDWQHKLSTAIIRDNQAVYVEDLCVAGLGRTRLAKSVYDAGWASFTAMLEYKAARAGRRFAKVNRFAPTSQTCSACGRIDGPKPLNVRSWTCPCGATHDRDVNAAINVLAQGRWDNSNACGAQVRPASVPAPRRETGIRP

SEQ ID NO: 1974 - protein, 413 aa, unidentified
MLFVQLRYQFRVYPTPGQQMELARTFGCARVVFNDGLRARQEAREAGLPYVSDGELSKRVITEAKKTAARAWLGEVSAVVLQQALADLNTAYRNFFASVTGKRKGRKVAPPRFRSRKDNRQSIRFTRNSRFKVLDNGRLRLPKVGDLAVRWSRTLPSDPSSVAIIRDAAGRYFASFVVTVDAHETLPPVDAEVGIDLGLTHFAVLSDGTKVAAPKFLRRAARKLKRLQQDLSRKQKDSNRRKTAVVKVARAHARVADTRRDWQHKLSTQIIRENQAVYVEDLCVVGLGRTRLAKSVHDAGWASFTGMLEYKAARYGRTFGRVDRFFPSTRMCSACGRINEKMPLNVRSWDCPCGAAHDRDVNAARNVRAAGLADLNARGAHVRPALVPAARREAGTHPDAACSTRSVEGISVL

SEQ ID NO: 1975 - protein, 384 aa, unidentified
MRLFAGACRFVFNRALALQNENYEAGNKYIPYTKMASWLVEWKKDTETEWLKDSPSQPLQQSLKDLERAYKNFFQKRAAFPRFKKRGQNDAFRYPQGVKLDQENSRIFLPKLGWVRYRNSRQVTGIVKNVTVSQSCGKWYISIQTESEVSTPVHPSASMVGLDAGVARLATLSDGTVFEPVNSFQKNQKKLARLQRQLSRKVRFSNNWQKQKRKIQQLHSRIANIRRDYLHKVTTIISKNHAMIVIEDLKVKHMSKSAAGTISQPGRNVRAKSGLNRSILDQGWYEMRRQLEYKQLWRGGQVLAVPPAYTSQRCACCGHIAKENRLSQSKFRCQVCGYTANADVNGARNILAAGHAVLACGGMVQSGRPLKQEPTEMIQATALT

SEQ ID NO: 1976 - protein, 389 aa, unidentified
MLRATKVRIYPTLEQAEFLNRQFGAVRFCYNKALHIISTQYKRHGLKLRAKKDLKPLLAVAKKSRKYHWLGEFDSIALQQACINLDKAFQNFFDPKLASRYPTFKRKHGKQSSYHCTSVKAGDNWIKVPKLEPIKARIHRELAGTLKSITLSRTATGKYYASLLVEDGTAALVPIQSVDTVLGIDMGLTHLVIDSSGNKTANPRFLNRSQANVRRKQKALSRCQRGSRGRAKARLKLARAHERLANARANFQHNLSRQLIDENQAVIVETLKVKNMLKNRKLAKHISDASWYSLIQKLEYKARMQGKHVVKIDQWFASSRTCSGCNHRVDTLPLSVRYWTCPVCSIGHDRDVNAAINIRQQGIIKLRAEGLSVPANGGLRKSGHAPVAA

SEQ ID NO: 1977 - protein, 390 aa, unidentified
MQLRYQFRLYPTPGQQQLLARAFGCARVVFNDALRARQQAHAAGLPYVSDGDLSKQVITQAKKTGERAWLGEVSAVVLQQALADLNTAYRNFFASVSGKRNGRKVSPPRYRSRKDRRQAIRFTRNARFTVTAGGRLRLPKIGDVRVRWSRDLPSAPSSVTVIKDATGRYFASFVVETAGEPLPEVAAEVGIDLGLARFAVLSDGRKITSPRFLRRAERRLRKAQQALSRKQRGSANRRKAVAKVARLHARVADARRDHHHKLSTRLIRDNQAVYVEDLAVNGLARTRLAKSLHDAGWSTFVAMLEYKAKRHGRTFAKVDRWFPSSKLCSACGAVAESMPLSVREWACPCGTVHDRDINAANNILAAGRAERQNACGGTVSPGRLAEGRTR

SEQ ID NO: 1978 - protein, 390 aa, unidentified
MQLRYQFRLYPTPGQQQLLARAFGCARVVFNDALRVRQQAHAAGLPYVSDGDLSKQVITQAKKTGERAWLGEVSAVVLQQALADLSTAYRNFFASVSGKRNGRKVSPPRYRSRKDRRQAIRFTRNARFTVTKSGRLRLPKIGDVRVRWSRDLPSVPSSVTVIKDAAGRYFASFVVETAGEPLPEVAAEVGIDLGLTHFAVLSDGRKISSPRFLRRAERRLRKAQQALSRKQKGSANRRKAVAKVARLHARVVDARRDHHHKLSTRLIRDNQAVYVEDLAVNGLARTRLAKSLHDAGWSTFVGMLEYKAKRHGRTFAKVDRWFPSSKLCSACGAVAESMPLSVREWACPCGTVHDRDINAANNILAAGRAERQNACGGTVSPGRLAEGRTP

SEQ ID NO: 1979 - protein, 410 aa, unidentified
MQLRYQFRVYPTPGQQMELARTFGCARVVFNDGLRARQEAREAGLPYVSDGELSKRVITEAKKTAARAWLGEVSAVVLQQALADLNTAYRNFFASVTGKRKGRKVAPPRFRSRKDNRQSIRFTRNSRFKVLDNGRLRLPKVGDLAVRWSRTLPSDPSSVAIIRDAAGRYFASFVVTVDAHETLPPVDAEVGIDLGLTHFAVLSDGTKVAAPKFLRRAARKLKRLQQDLSRKQKDSNRRKTAVVKVARAHARVADTRRDWQHKLSTQIIRENQAVYVEDLCVVGLGRTRLAKSVHDAGWASFTGMLEYKAARYGRTFGRVDRFFPSTRMCSACGRINEKMPLNVRSWDCPCGAAHDRDVNAARNVRAAGLADLNARGAHVRPALVPAARREAGTHPDAACSTRSVEGISVL

SEQ ID NO: 1980 - protein, 376 aa, unidentified
MLKALRVRLYPTPEQAHFLRGQFGAVRFVWNKGLFLKRHFYRVKGTNLDPVHDLKKLLPVAKRHPKYAWLKDYDSMALQESLRHLGSAFSRFFKKQAGFPHFKSRRGEQSSYHCTGVSVGEDFIKVPKMAPIKAVIHRPVEGKVKSITLKLDTCGDFFASILYDDGKSNAVKPKAVRASEVVGCDVGLKSFVTDSNGRKIKAPKAYRRARKRLAKAQRALSRKQKGSANREKARRRLAKQHRRVARIRKDFLNKVSRKLVNESQALVVETLKIKNMLKNHHLAGAIADASWGEFVRMTEYKAEREGRYVVHVNTYFPSSKTCSQCGYKRDELDLSVRSWTCPKCGAHLDRDVNAAVNLKAEGIRMLRANGLVVLRA

SEQ ID NO: 1981 - protein, 376 aa, unidentified
MLKALRVRLYPTPEQAHFLRGQFGAVRFVWNKGLYLKRHFYRVKGTNLDPVHDLKKLLAVAKRHPKYAWLKDYDSMALQESLRNLGSAFSRFFKKQAGFPHFKSRRGEQSSYHCTCVSVGEDFIKVPKMDPIKAVIHRQVEGKVKSITLKLDTCGDFFASILYDDGKSNAVKPKAVRVSEVVGFDVGLKSFGTDSNGRKIEAPKAYRRARKRLAKAQRSLSRKQKGSANREKARRRLAKQHRRVARIRKDFLNKVSRKLVNESQALVVETLKIKNMLKNHHLAGAIADASWGEFVRMTEYKAEREGRYVVHVDTYFPSSKTCSQCGYKRDELDLSVRSWTCPKCGAHLDRDVNAAVNLKAEGIRMLRANGLVVLRA

SEQ ID NO: 1982 - protein, 404 aa, unidentified
MKRLQAFKFQLRPGGQQERQMRLFAGACRFVFNRALALQNENYEAGNKYIPYTKMASWLVEWKKDTETEWLKDSPSQPLQQSLKDLERAYKNFFQKRAAFPRFKKRGQNDAFRYPQGVKLDQENSRIFLPKLGWVRYRNSRQVTGIVKNVTVSQSCGKWYISIQTESEVSTPVHPSASMVGLDAGVARLATLSDGTVFEPVNSFQKNQKKLARLQRQLSRKVRFSNNWQKQKRKIQQLHSRIANIRRDYLHKVTTIISKNHAMIVIEDLKVKHMSKSAAGTISQPGRNVRAKSGLNRSILDQGWYEMRRQLEYKQLWHGGQVLAVPPAYTSQRCACCGHIAKENRLSQSKFRCQVCGYTANADVNGARNILAAGHAVLACGGMVQSGRPLKQEPTEMIQATAXT

SEQ ID NO: 1983 - protein, 352 aa, unidentified
MKCTKTLKLRVKDKHNLILDQQSKAVNFVWNYINELSSRAIKERGRFLSAFDIHPYTKGANKELGLHSQTLQCIAKEYVTRRVQFKKARLNWRKSGGAKRSLGWIPINTGAAKWKNGQVFFNGHYYSVWDSYCLSQYQFRTASFNEDAQGRWYFNVVVEVDIQPSSGTASVGIDLGCKEAATASNGHKVVGRQYRKLEQKLGIAQRANNKHRVKAIHAKIRNRRKDDLHKFSRQLVNNNAAIFVGNVNSLAMTKTKLAKSALDAGWGMLKTMLEYKCDHAGVVFEEVNESYTSQTCSCCGDIPASSPKGRAGLRIREWSCSDCGATHDRDINAAKNILAVGHGRLAVGIHLL

SEQ ID NO: 1984 - protein, 410 aa, unidentified
MQLRYNYRVYPTPGQQIELARAFGCARVVFNDGLRLRQQAREAGEKYISDGELSRRLITEAKATPERAWLGEVSTVVLQQALADLNTAYRNFFNSITGKRKGRKVAPPRFRSRKDNRQAIRFTKNSRFKVLDNDRLRLPKIGDLAVRWSRTLPSDPSSVAIIRDAAGRYFASFVVQTGEDEALPPVDSEVGIDLGLTHFAVLSDGTKVAAPTFLRRAARKLKRLQHDLSRKQKGSANRKKAVVKVARAHGRVADMRRDWQHKLSTAIIRENQAVYVEDLCVVGLGRTRLAKSVHDAGWASFTAMMEYKAARYGRTFGRVDRFFPSTRMCSDCGRINEKMALNVRAWDCPCGAAHDRDVNAAKNVKAAGQADFNARGAHVRPGLVPAARNEAGTHPDAACSTRSVEGISVP

SEQ ID NO: 1985 - protein, 402 aa, unidentified
MKRLQAFKFQLRPGGQQECEMRRFAGACRFVFNRALALQNENHEAGNKYIPYGKMASWLVEWKNATETQWLKDAPSQPLQQSLKDLERAYKNFFQKRAAFPRFKKRGQNDAFRYPQGVKLDQENSRIFLPKLGWMRYRNSRQVTGVVKNVTVSQSCGKWYISIQTESEVSTPVHPSASMVGLDAGVAKLATLSDGTVFEPVNSFQKNQKTLARLQRQLSRKVKFSNNWQKQKRKIQRLHSRIANIRRDYLHKVTTTVSKNHAMIVIEDLKVSNMSKSAAGTVSQPGRNVRAKSGLNRSILDQGWYEMRRQLEYKQLWRGGQVLAVSPAYTSQRCTCCGHTAKENRLSQSKFRCQVCGYTANADVNGARNILAAGHAVLACGGVVQSGRPLKQEPTEMIQATA

SEQ ID NO: 1986 - protein, 376 aa, unidentified
MQEVRKVEYSYKFRLHPNAEQKIQIQKTFGCCRFVFNHFLAERMERYKSTRKAPTRFQQDKSLTALKQELLWLKEVDSTALQASLQDLDTAYQNFFRWVKQGQKPSYPRFKSKHDYRRSYKSKCVGTNIKALDKAVQLPKLGLVKCRISKEVKGRILSATVSQNPSGKYFVALCCTDVEIEPMPSTGAVAGIDMGLKAFAITSDGVEYPNHKHLTKNQKKLARLQRQLSRKSKGSHRREKARVKVARLHEHIANQRSDMLHKLSTELVSNYDLIAIEDLAPSNMVKNHKLARSISDASWSEFRRQLEYKSAWYGKQMVTVDRFFPSSQLCSTCGAQWPGTKDLSVREWICPSCGAIHDRDINAAKNILQEGLHLLA

SEQ ID NO: 1987 - protein, 365 aa, unidentified
MANKAYKFRIYPNTEQRVLFAKTFGCVRFVYNRMLADKIKYYEKTRKKLNNTPAQYKKEFEWLKEVDSLSLANAQMNLQTAYNNFFRSPKIGFPKFKSKKSNRKSYTTNCINGNILMENGYLKLPKIGFVKLKQHRQIPSDYKLKSVTVSQTPSGKYYASVLFEYESQVQEKEPHNFLGLDFSMHELYKDSNGNEPSYPRYYRQAEKKLKDEQRKLSLMQKGSKNRGKQRVRVARLHEKVANQRKDFLHKQSRQIANAYDCVCIENLDMKAMSQALHFGKSVSDNGWGMFTTFLQYKLEEQGKMLVKIDKFFASSQICSCCGYKNPETKNLAVRVWDCPECGTHHDRDVNAAINIRNEGMQIVFA

SEQ ID NO: 1988 - protein, 434 aa, unidentified
MLEAVKVALDPTPRQERLLESHAGAARFAYNAGLAHVKDMLERQEKPEWPYYALRRWWNANKDALAVSMETGKPWWPENSKESYNSGLESLADALKNFSKSRKGQRKGRRMGFPRFKSKDKAVPGFAYTTGSFGLIDCDPYALRLPKIGRVHCMKNVSKRVDGAKVLRMSVSRHAGRWMASLTVERKDGPMPTPLKGGSVGIDLGVKQLATLSDGTIIRNPRALDSNLRRLRREQKNLSRKRKGSNRRREARTRVARLHARVADLRRDLLDKTTTMLARTYADISIEDLNVAGMVRNHRLARSVEDAAFAEFRRQLEYKTARTGARLHVIDRWYPSSKTCSNCGTVKAKLSLSERVYHCEECGLVIDRDLNAAINIQVAGSAPETLNARGGSGRRADASRRATRHPVKREPSGGVSRVRLGAGLGNEAMQMTSL

SEQ ID NO: 1989 - protein, 374 aa, unidentified
MNKAYKYRLYPDPEQKNLINKTFGCVRFVYNKMLANRKEIYEQFKDDKEALKAQKYLLPADFKKEFEWLKEVDSLALANAQLNLQTAYKNFFRDKIIGFPKFKSKHHSRKSYTTNNQGGTIRLVDNKTIRLPKLKDVRIKLHRQMPLQAAIKSATISKTPTGKYYIAILVEYETKIKPVTPKPETVLGLDYSSKSLFVDSQANNADYPKFYRKAEEKLRKAQRKLSKRKKEGKNREKQRRKVAKLHEKVANQRKDFLHKLSRQIANVYTAIAIEELNMRGMAQSLNLAKSTNDNGFGMLKTFLTYKLAEQGKQLVVIDKWFPSSKKCSFCGNENKELTLADRAWTCSHCGAELDRDINAAINIKNEGCRILNIA

SEQ ID NO: 1990 - protein, 407 aa, unidentified
MQLRYSFRLYPDAGQQGALARAFGCARVVFNDAVRAREDARRAGRPFPTAGELSTRLITEAKKTASRSWLGEVSAVVLQQSLRDAEAAYKNFFASLKGTRKGPTLGAPRVKSRKDARQSIRFTANARWNITDSGRLNLPKIGAVKVKWSRTLPATPTSVTVIKDAAGRFFASFVIDTDPVEDAARMPESDQSIGIDLGLTHFAVLSTGEKIDSPRFLRRAEKKLKKAQRELSRKQKGSKNREKARLKVARAHAQVTDARKEFHHQLSTKLISENQGIAVETLSVAGLARTRLAKSVHDAGWTAFVNMLEYKAQRYGRTLIKIGRFEPTSQTCSTCGFKDGPKPLNIREWACTACGTVHDRDRNAALNVKQAAGLAVSACGAPVRPEPVLAQREETGSHGFPTGNRAA

SEQ ID NO: 1991 - protein, 365 aa, unidentified
MRKTFKYRLNPTKFQRTKLNQTIELCRKVYNDTLALRKDTWEKEHKSISLYDTNKILTGWKQERPELNNVFSQVLQNVQERVDLAFKAFFRRVKAGQKNGYPRFKGFGRYDSFTFKQSGFKLSDRLFISKIGDIKINLHRPVEGKIKTVTIQRDRLGNWYACFSCEVETKPLLVSSEMVGIDLGLTTFATLSNGETIERERWLKRDEQDLKRIQRKVSKLAKGSPERKKAIKALNHVHTRIKNCRDNFAHQESRKLVNRYGLIVFEKLDIDGMQTKGNRTINKGIADVAWSQFVSKTHAKAEEAGRGFILVDPKNTTQQCSGCGLIVPKDLSVRIHHCPDCGLKIGRDLNAALNILARGLSSLRL

SEQ ID NO: 1992 - protein, 410 aa, unidentified
MQLRYQFRVYPTHGQQIELARAFGCARVVFNDGLRLRQEAREQGLPYVSDAELSKRIITQAKGTPERAWLGEVSSVVLQQALADLNTAYRNFFASITGKRKGRKVAPPRFRSRKDNRQAIRFTKNSRFRVLDNGRLRLPKIGDLQVRWFGSLPSDPSSVAIIRDAAGRYFASFVVQTTEDESLPPVAFEVGIDLGLTHFAVMSDGTKVAAPKFLRRAARKLKRLQQDLSRKQRGSQNRKKAVVKVARAHARVADTRRDWQHKLSTTLIRENQAIYVEDLCVVGLGRTRLAKSVHDAGWTSFTGMLEYKAARYGRAFGRVDRFFPSTRMCSVCGRINEKMALNVRAWDCPCGAAHDRDVNAAINVRAAGQADLNARGAHVRPGLIPAARNEAGTHPDAACSTRSVAGISVL

SEQ ID NO: 1993 - protein, 410 aa, unidentified
MQLRYNFRVYPTPGQQIGLARAFGCARVVFNDGLRLRQQAREAGEKYVSDAELSKRLITQAKLTPQRAWLSEVSAVVLQQALADLNTAYRNFFASMSGKRKGRKVAAPRFRSRKDNRQAIRFTKNSRFTVLDNGRLRLPKIGDLDVRWSRSLPSDPSSVAIIKDAAGRYFASFVVQTAEDETLPPVESEVGIDLGLTHFAVLSDGTKVAAPKFLRRAARKLKRLQQALSRKQKGSNRRKKAVVKVARAHARVADTRRDWQHKLSTTIVRENQAIYVEDLCVTGLGRTRLAKSVHDAGWASFTGMLEYKAARYGRTFARVDRFLPSTRTCSDCGRIGEKMALNVRAWDCPCGSHHDRDVNAAKNIRAAGQADLNDRGAQVRPPAMAAPRSEAVTHPDAARTTRSVEGISVL

SEQ ID NO: 1994 - protein, 410 aa, unidentified
MQLRYQFRVYPTPGQQIELAKAFGCARVVFNDGLRLRQEAREQGLPYVSDAELSKRIITQAKGTPERAWLGEVSSVVLQQALADLNTAYRNFFASITGKRKGRKVAPPRFRSRKDNRQAIRFTKNSRFRVLDNGRLRLPKIGDLQVRWSRTLPSDPSSVAIIRDAAGRYFASFVVQTTEDESLPPVAFEVGIDLGLTHFAVMSDGTKVAAPKFLRRAARKLKRLQQDLSRKQRGSQNRKKAVVKVARAHARVADTRRDWQHKLSTTLIRENQAIYVEDLCVVGLGRTRLAKSVHDAGWTSFTGMLEYKAARYGRAFGRVDPLFPSTRMCSVCGRINEKMALNVRAWDCPCGAAHDRDVNAAINVRAAGQADLNARGAHVRPGLIPAARNEAGTHPDAACSTRSVAGISVL

SEQ ID NO: 1995 - protein, 375 aa, unidentified
MNKAYRFRIYPTPTQETMIRKTFGCVRFLYNQMLAERKAPSEWDRTDAERPKRQKFRTPAAFKTEFPWLREVDSLALCNAELNLKSAFRHFFRDKRTGYPKFKSRKNPVQSYTTNNQKGTIRLEAGGKHVRIPKLGEIRIKLHRHIPESHTIKSATISRSSSGKYHISILTYYETEEKPIFPHPDKVLGLDYSSKALYIDHRNTSADYPKYLRNMEIRLKNEQRVLSRRKTGGSNWRKQKLRIARLHEKVANQRKDFLHKVSKQLAETWEAIVVEDLNMKAMSQSLSLGKATMDNGNGLFRTFLGYKLADRGKRLVRIDKWFPSSKRCGACSKINKLLTLKERVWVCEGCGRIHLRDANAAGNIRAEGLRMLGLA

SEQ ID NO: 1996 - protein, 375 aa, unidentified
MNKAYRFRIYPTSEQETMIRKTFGCVRFLYNQMLAERKTPSEWDQTDAERPKRQKFRTPAAFKTEFPWLREVDSLALCNAELNLKSAFRHFFRDKRTGYPKFKSRKNPVQSYTTNNQKGTIRLEAGGKHVRIPKLGEIRIKLHRHIPESHTIKSATISRSSSGKYHISILTHYETEEKPIFPHSDKVLGLDYSSKSLYIDHTNTSADYPKYLRKMEIRLRKEQRVLSRRKTGGSNWHKQKLRIARLHEKVANQRKDFLHKVSKQLAETWEAIVVEDLNMKAMSQSLSLGKATMDNGNGLFRTFLGYKLADRGKRLVRIDKWFPSSKRCGACNKINKLLTLKERVWVCEGCGRIHLRDANAAGNIRAEGLRMLGLT

SEQ ID NO: 1997 - protein, 660 aa, unidentified
MPMIKITECVTWGTTCDGLWDARPHLEVRRSWSPPVQGGRTNRLDAPPASVTLNIHGRVEHPRDADALSVAPLRVRHMFERTTTKAAFLSPLDLRPTQATDLERFAGTTRWAFNWANALLEAHHQAYEGRRQQAARHLFGLGPEQLDELRVLANGTRDENGKKAKGDPVKRREYESIQKATKKAVSEENKALGAEMKLWDEHRSLVVHKGRPLLTPGDEPALDAPPLAHRLYARRVELAGIQKTDPDYYAEQRKKEREAITPNVVAMKRDLMAKGAYFPSEYDLQYIWRTVRDLPKEEGGSPWWPECPTILFYDGINRARTAWKNWMDSASGARKGPPVGMPRFKSKYKAKDTFTITNPNRSVIKFETYRRIAITGIGSMRLHRGAKLLARRIAAGQAEITSATISRSGTAWYVSVLCTVHTTARTAPSKAQRSRGAVGVDWGVRALATTSKPIALTPGKPASRTVPAEKYGAAMSQKIARAQRQLARMPKGSSRRRKAARHVADLQHLVAQRRASSVHQLSKALAQSFEIVAIEGLNVRGMTKSAKGTVENPGKNIRQKAGLNRAILDATPGELKRQLEYKTKKYGSRLVELDTWYPSSKTCSRCGWVHPKLKLSMRTFRCQQCGLVEDRDFNAAVNIERQGITHIVKENEGTDDREEG

SEQ ID NO: 1998 - protein, 370 aa, unidentified
MEYSYKFRLYPTRAQEHQIQRTFGCCRFVWNHYLAQRKAVYELDGHTMNYYACARDMTSLKKALPWLKEIDATALQSSIRDLDTGFQNFFRRVKKGEKPGYPKFKSKKNRRNSYKSKCVGANIKIVEKCIQLPKLGLVKCRISKEVKGRILSATVSQNPSGKYFVAICCTDVEMEPLPSTGAVVGLDMGLKSFAITSDGVEHPKHRYLRKSQKKLARLQRQLSRKTKGSDRWEKARVKVARLHEKIFNQRNDTMHKLSTKLVRNYDLIAIEDLAPKNMLRNHNLARSISDASWGEFRRQLEYKAKWYGKVVVTVDRFYPSSQICSACGAQWSGTKDLSIREWTCPVCGTVHDRDRNAAVNILKEGLRLLA

SEQ ID NO: 1999 - protein, 447 aa, unidentified
MAVQLRYNYRITPDAAQRTALAQAFGCARVVFNDGLRLRQQAREAGEKYISDGDLSKLVITAAKASEDRAWLGEVSAVVLQQALADLNTAYRNLFNSLSGKRRGRKVAPPRYRSRKDNRQAIRFTENSRFKVCDNGRLRLPRIGDVPVRWSRGLPSDPTSVTVIKDTAGRYFASFVVRIGEDETLPPVDSEIGIDLGLTHFAVMSDGTKVTAPKFLRRAARKLKRLQQALSRKQRGSNRRKKAVIEVARAHARVADTRRDWQHKLSTAIIRENQAVYVEDLCVVGLGRTRLAKSVHDAGWAAFTGMLEYKAKRYGRAFARVDRWLPSTRMCCDCGRINEKIALNVREWDCPCGSHHDRDINAAINIKAAGQADFNDRRAHVRPGLVPAVRSEAVTHPDAACSTRSVEGISVLQLQGGEDVKTETHIYRDGSLCGVIRRSAVCSAKRV

SEQ ID NO: 2000 - protein, 441 aa, unidentified
MAVQLRYNYRITPDAAQRTALAQAFGCARVVFNDGLRLRQQAREAGEKYISDGDLSKLVITAAKASEDRAWLGEVSAVVLQQALADLNTAYRNLFNSLSGKRRGRKVAPPRYRSRKDNRQAIRFTENSRFKVCDNGRLRLPRIGDVPVRWSRGLPSDPTSVTVIKDTAGRYFASFVVRIGEDETLPPVDSEIGIDLGLTHFAVMSDGTKVTAPKFLRRAARKLKRLQQALSRKQRGSNRRKKAVIEVARAHARVADTRRDWQHKLSTAIIRENQAVYVEDLCVVGLGRTRLAKSVHDAGWAAFTGMLEYKAERYGRAFARVDRWLPSTRMCCDCGRINEKIALNVREWDCPCGSHHDRDINAAINIKAAGQADFNDRRAHVRPGLVPAVRSEAVTHPDAACSTRSVEGISVLQFRAERMSTAVAYRAWLGCQPVAPEVTRK

SEQ ID NO: 2001 - protein, 435 aa, unidentified
MAVQLRYNYRITPDAAQRTALAQAFGCARVVFNDGLRLRQQAREAGEKYISDGDLSKLVITAAKASEDRAWLGEVSAVVLQQALADLNTAYRNLFNSLSGKRRGRKVAPPRYRSRKDNRQAIRFTENSRFKVCDNGRLRLPRIGDVPVRWSRGLPSDPTSVTVIKDTAGRYFASFVVRIGEDETLPPVDSEIGIDLGLTHFAVMSDGTKVTAPKFLRRAARKLKRLQQALSRKQRGSNRRKKAVIEVARAHARVADTRRDWQHKLSTAIIRENQAVYVEDLCVVGLGRTRLAKSVHDAGWAAFTGMLEYKAKRYGRAFARVDRWLPSTRMCCDCGRINEKIALNVREWDCPCGSHHDRDINAAINIKAAGQADFNDRRAHVRPGLVPAARSEAVTHPDAACSTRSVEGISVLQLQGGEDVKTSRSGPAPTPPATS

SEQ ID NO: 2002 - protein, 424 aa, unidentified
MAVQLRYNYRITPDAAQRTALAQAFGCARVVFNDGLRLRQQAREAGEKYISDGDLSKLVITAAKASEDRAWLGEVSAVVLQQALADLNTAYRNFFNSLSGKRRGRKVAPPRYRSRKDNRQAIRFTENSRFKVCDNGRLRLPRIGDVPVRWSRGLPSDPTSVTVIKDTAGRYFASFVVRIGEDETLPPVDSEIGIDLGLTHFAVMSDGTKVTAPKFLRRAARKLKRLQQALSRKQRGSNRRKKAVIEVARAHARVADTRRDWQHKLSTAIIRENQAVYVEDLCVVGLGRTRLAKSVHDAGWAAFTGMLEYKAKRYGRAFARVDRWLPSTRMCCDCGRINEKIALNVREWDCPCGSHHDRDINAAINIKAAGQADFNDRRAHVRPGLVPAVRSEAVTHPDAACSTRSVEGISVLQFRAERMSTERP

SEQ ID NO: 2003 - protein, 449 aa, unidentified
MAVQLRYNYRITPDAAQRTALAQAFGCARVVFNDGLRLRQQAREAGEKYISDGDLSKLVITAAKASEDRAWLGEVSAVVLQQALADLNTAYRNLFNSLSGKRRGRKVAPPRYRSRKDNRQAIRFTENSRFKVCDNGRLRLPRIGDVPVRWSRGLPSDPTSVTVIKDTAGRYFASFVVRIGEDETLPPVDSEIGIDLGLTHFAVMSDGTKVTAPKFLRRAARKLKRLQQALSRKQRGSNRRKKAVIEVARAHARVADTRRDWQHKLSTAIIRENQAVYVEDLCVVGLGRTRLAKSVHDAGWAAFTGMLEYKGKRYGRAFARVDRWLPSTRMCCDCGRINEKIALNVREWDCPCGSHHDRDINAAINIKAAGQADFNDRRAHVRPGLVPAARSEAVTHPDAACSTRSVEGISVLQLQGGEDVKAVPVRRQGPRSPRGGAGPRTASPARPGE

SEQ ID NO: 2004 - protein, 447 aa, unidentified
MAVQLRYNYRITPDAAQRTALAQAFGCARVVFNDGLRLRQQAREAGEKYISDGDLSKLVITAAKASEDRAWLGEVSAVVLQQALADLNTAYRNLFNSLSGKRRGRKVAPPRYRSRKDNRQAIRFTENSRFKVCDNGRLRLPRIGDVPVRWSRGLPSDPTSVTVIKDTAGRYFASFVVRIGEDETLPPVDSEIGIDLGLTHFAVMSDGTKVTAPKFLRRAARKLKRLQQALSRKQRGSNRRKKAVIEVARAHARVADTRRDWQHKLSTAIIRENQAVYVEDLCVVGLGRTRLAKSVHDAGWAAFTGMLEYKGKRYGRAFARVDRWLPSTRMCCDCGRINEKIALNVREWDCPCGSHHDRDINAAINIKAAGQADFNDRRAHVRPGLVPAVRSEAVTHPDAACSTRSVEGISVLQFRAERMSMSGTLPPCPSATFALLTSADGTCAGWA

SEQ ID NO: 2005 - protein, 352 aa, unidentified
MKTLKLRIKDKHCKVLDQLASEVNFVWNYVNDLSFKHLKRTGDFFSAFDMTQYTKGTSKLCGLHSQTVQGITEEYVDKRRQHKKAKLKWRVSNKKSARRSLGWIPFKKVAIKYADGYVQYGKQKFKLWDSYGISKYSVRTGSFVEDSRGRWYVCLVVDSPKQDKPTATKAIGIDLGLKDVATCSDGTVISNPKFYRNYEQKLGIAQRARNKKRVRALHAKIANCRKDHLHKASTLLVKENALIVVGDLSASKLVKTKMAKSVLDTGFSALKTMLKYKCENAGVLFEEVSEKFTTQICSGCGEITSSSPKGRTDLRIRVWECECGSINHRDLNSAKNILALGHERLAVGIRLL

SEQ ID NO: 2006 - protein, 370 aa, unidentified
MNHTKTLQVRVRDKHAPLLRQMARSVNFVWNYLNELSHRSIRERGVFLSAFDLHPYTKGAGKELGLHSQTLQYVAAEYVTRRKQYRKARLNWRKSGGVRRSLGWVPFNTAAASWKNGQIYHNGYYFKVWDSYGLGQYRFRSGSFSEDARGRWYFNVVVELDTQLSAGQGAVGIDLGLKDVATCSDGQRLENGRFYRDLEPRLAKAQRADKKARVRAIHAKIVNRRKDALHKFSRSLVERCNMIIVGDVSPQKLVRTTMAKSVLDAGWGQLKTMLAYKCAHAGIVFRVVNEAYTTQTCSCCGALPASRPRGIAGLGIREWICECGVTHDRDVNAARNILALGHERPVEGIFRRLGRGGCQPEPCFTAISWD

SEQ ID NO: 2007 - protein, 342 aa, unidentified
MIRSYRYRLKDSSSALQLNRLARACNVVWNFCNESQEHALRWHQRWPTYQDLCTLTTGSGKELGLHSQTVQAVCDQYATRRQQFKKRKLRWRGKRSPGWIPFKASGVKVVEDTVRYAGHVFRFWNSRELSSPIKCGSFSQDSRQRWYVNFVVEVPEAEATTGTRHIGIDLGLKTLATCSDGRKIEAPRWYRHQQRRIAEHQRKKRSRQARNLHAKIANRRLDFLHKASDRLTKECELIVVGDVGSARLAKTKMAKSVNDAGWATFKTLLSYKAIARKVVYREVSERLSTQTCSGCGAIGGPKGREGLGVREWVCSECGVVHDRDVNAALNILRMGHHTLALK

SEQ ID NO: 2008 - protein, 371 aa, unidentified
MLSKMSRSVNMVWNFCKQTQKEALKNKSVKLIDDKKSGKKISIPYFFSSSEMDGLVAGSSKELCLHSQTVQAISQEYITRRIQFKTLLRWRGKRTLGWIPFKASAIKIQNRKIFYNKNEFSFCNSRDLPEDAKIKTGSFCQDKSGHWYLNVTFESEKIGIKREDDKEIGIDIGIKTLATCSNGEKIERPNLRKNALAKLRYLKRCQSFAQRKQSKCKKYRELPKAKQERKLHVKVANIRQDYLHKESTKLAKKCSLIVVGDVPCKLMNRNKKLSGISLDSGIEMFKSMLKYKAVRAASTYKEISERDSSRTCSKCSEKLPRIELGVRHWSCEKCGAVHDRDVNAAINILQSYRAGHPIGHDRQTRAKKNSS

SEQ ID NO: 2009 - protein, 384 aa, unidentified
MRLFAGACRFVFNRALALQNENYEAGNKYIPYTKMASWLVEWKKDTETEWLKDSPSQPLQQSLKDLERAYKNFFQKRAAFPRFKKRGQNDAFRYPQGVKLDQENSRIFLPKLGWVRYRNSRQVTGIVKNVTVSQSCGKWYISIQTESEVSTPVHPSASMVGLDAGVARLATLSDGTVFEPVNSFQKNQKKLARLQRQLSRKVRFSNNWQKQKRKIQQLHSRIANIRRDYLHKVTTIISKNHAMIVIEDLKVKHMSKSAAGTISQPGRNVRAKSGLNRSILDQGWYEMRRQLEYKQLWHGGQVLAVPPAYTSQRCACCGHIAKENRLSQSKFRCQVCGYTANADVNGARNILAAGHAVLACGGMVQSGRPLKQEPTEMIQATALT

SEQ ID NO: 2010 - protein, 407 aa, unidentified
MQLRYAYRLYPDTVQQAALARAFGCARVVFNDAVRAREDARGAGQPFPTAGELSRKLITEAKRTAERSWLGEVSAVVLQQSLRDAEAAYKNFFASLNGSRKGPKLRAPRFKSRKDARQSIRFTANARWTITDSHRLHLPKIGAVKVKWSRPLPAAPTSVTVIKDAAGRYFASFVIDTDTAADAARMPQTDRTVGIDLGLTHFAVLSDGTKIDSPRFLRRAEKKLKKAQRELSRKQKGSKNRARARLKVARAHAKVSDARREFHHQLSTQLIAENQGIAVEDLSVTGLARTRLAKSVHDAGWSSFISMLAYKAERYGRTLVKIGRFEPTSQTCHACGTVDGPKPLNVREWTCPACGTVHDRDHNAAINIETAAGLAVSACGAPVRPGAIPAQREETGSHGFPTGNRAA

SEQ ID NO: 2011 - protein, 376 aa, unidentified
MKTFKYRLKPSRSQRTQLNRTLELCRWVFNETLATRKNTWEQEKKNLSLYDTNKLLTLWKREHPEWVSVHSQVLQNVQERVDLAFKAFFRRAKAGEKPGYPRFRGSGTYNSFTFKQSGFELRDHDLLISRIGAVRIVLHRPIEGNVKTLTVQKDAVGNWYACFACEVEPEPMPLCELAVGIDVGLESFATLTNGMKIENPRFFRQDEKELAKVQRRLSKAEKGTSQRARRRKAVQHVHQRIANRRRDFAHKKSREWVNAFGFIAFEDLRIKNMLRNHRLAKSISDAAWRQLIQYTTYKAENAGRVVVMVDPRNTSRMCSRCGTLVVKSLSVRVHQCPNPGCGLVMDRDENAANNILRLGLESLGIALEAPAFRRGE

SEQ ID NO: 2012 - protein, 434 aa, unidentified
MLEAVKVALDPTPRQERLLESHAGAARFAYNAGLAHVKDMLERQEKPEWSYYALRRWWNANKDALAVSMETGKPWWPENSKESYNSGLESLADALKNFSKSRKGQRKGRRMGFPRFKSKDKAVPGFAYTTGSFGLIDCDPYALRLPKIGRVHCMENVSKRVDGAKVLRMSVSRHAGRWMASLTVERKDGPMPTPLKGGSVGIDLGVKQLATLSDGTIIRNPRALDSNLRRLRQEQKNLSRKRKGSNRRREARTRVARLHARVADLRRDLLDKTTTMLARTYADISIEDLNVAGMVRNHRLARSVEDAAFAEFRRQLEYKTARTGARLHVIDRWYPSSKTCSNCGTVKAKLSLSERVYHCEECGLVIDRDLNAAINIQVAGSAPETLNARGGSGRRADASRRATRHPVKREPSGGVSRVRLGAGLGNEAMQMTSL

SEQ ID NO: 2013 - protein, 396 aa, unidentified
MLEAVKVALDPTPRQERLLESHAGAARFAYNAGLAHVKDMLERQEKPEWSYYALRRWWNANKDALAVSMETGKPWWPENSKESYNSGLESLADALKNFSKSRKGQRKGRRMGFPRFKSKDKAVPGFAYTTGSFGLIDCDPYALRLPKIGRVHCMENVSKRVDGAKVLRMSVSRHAGRWMASLTVERKDGPMPTPLKGGSVGIDLGVKQLATLSDGTIIRNPRALDSNLRRLRREQKNLSRKRKGSNRRREARTRVARLHARVADLRRDLLDKTTTMLARTYADISIEDLNVAGMVRNHRLARSVEDAAFAEFRRQLEYKTARHRREAPRHRPLVSKQQDMLELRDGESQTVPVRTCLPLRGVRACHRPRSERGHQHPSRRECPGDVKRAWRKRKTG

SEQ ID NO: 2014 - protein, 346 aa, unidentified
MLSDHERFYLETDVHFIPTPAKYKKSAPFLSKVDNQALIQEHNKLSQAFRNFFRNPGAFGYPRFKRKKDDRDTFTACNQFFGRSATIYITQNAVRMTKVGLVRAVFPRRPRSGWRLTRITVERTRTDKYYGYLLYACPVRPPQPVTPTEETTVGLNYSVSRFYVADDGTAADPPRWLRQSQDKLCQIQRQLCRMQKGSKNYQEMVQKYRLLHEHIANQRRDFLHKESRRIANEWDAVCVRSDSLTALAAKTGGGCILDTGFGMFREMLRYKLERQGKSLLLVDRFRPTTKVCSVCGYVNEDLPAEALRWRCPVCGTEHRRERNAAANVKAIGLGRYRTETAAGGIG

SEQ ID NO: 2015 - protein, 383 aa, unidentified
MQLRYNFRLYPAPGQQQALARAFGCARVVFNDALRARRDAHAAGLPCPSDGELSKLVITEAKKTTGRAWLGEVSAVVLQQALADLNTAYRNWFASLSGKRKGRKVAAPRFRSRKDRRQAVRFTRNARFTVTAGGRLRLPKIGDVRVRWSRPLPSEPSSVTVIKDAAGRYFASFVVETTSEPLPEVAAEVGIDLGLTHFAVTSDGRKITSPRFLRRAERRLRKAQRVLSRKRKGSANRRKAAARVAGLHARVADARRDHHHKLSTRLIRDNQAVYVEDLCVSGLARTRLARSVHDAGWSQFVAMLEYKAQRYGRTFAKVDRWFPSSKLCSACGTVAEAMPLNIREWRCPCGAVHDRDVNAAINILAAGRADRRNACGGTVRPSA

SEQ ID NO: 2016 - protein, 383 aa, unidentified
MRLRYNFRLYPAPGQQQALARAFGCARVVFNDALRVREDAHAAGLPYLPDAELSKLVITQAKKTGGRAWLGEVSAVVLQQALADLNTAYRNWFASVSGKRKGRRVAPPRFRSRKDRRQAIRFTRNARFTITPGGKLRLPKIGDVRVRWSRPLPSEPSSVTVIKDAAGRYFASFVVETTSEPLPQAAAEVGIDLGLTHFAVTSDGRKITSPRFLRRAERRLRKAQQALSRKAKGSANRRKAAAKVARLHARVADARRDHHHKLSTRLIRDNQAVYVEDLCVSGLGRTRLAKSVHDAGWSQFVAMLEYKAERYGRTFAKVDRWFPSSKLCSACGTVAESMPLNIRAWACPCGTVHDRDVNAAKNILAAGRADRQNACGGTVSPSA

SEQ ID NO: 2017 - protein, 383 aa, unidentified
MRLRYRFRLYPTPSQQRSLARAFGCARVVFNDALRAREEAHAAGLPYLSDGDLSKLVITEAKKTGERAWLGEVSSVVLQQALADLNTAYRNFFASVSGKRKGRRVAPPRFRSRKDRRQAVRFTRNARFTVTAGGKLRLPKIGDVRVRWSRDLPSAPSSVTVIRDAAGRYFASFVVETMDGPLPEAAAEVGIDLGLTHFAVTSDGRKITSPRFLRRAERRLRKALQALSRKQKGSNNRRKAVARVARMHARVADARRDHHHKLSTQLIRENQAVYVEDLAVNGLARTRLAKSVHDAGWSQFVAMLEYKAARYGRTFAKVDRWFPSSKLCGACGTVTEAMPLTVREWACPCGTVHDRDVNAASNILAAGRADSLNACGGTVSPPA

SEQ ID NO: 2018 - protein, 383 aa, unidentified
MQLRYQFRLYPTPSQQQSLAQAFGCARVVFNDALRARQEAHAAGLPYLSDGDLSKLVITEAKKTGERAWLGEVSAVVLQQALADLNTAYRNFFASVSGKRKGRRVAPPRFRSRKDRRQAVRFTRNARFTVTAGGKLRLPKIGDVRVRWSRDLPSAPSSVTVIRDTAGRYFASFVVETMDEPLPEVAAEVGIDLGLTHFAVTSDGRKITSPKFLHRAERRLRKAQQALSRKQKGSKNRRKAVAKVARMHARVTDARRDHHHKLSTQLIRDNQAVYMEDLAVSGLARTRLAKSVHDAGWSQFVSMLEYKAARYGRNFAKVDRWFPSSKLCSACGTVADSMPLNVREWACPCGTVHDRDVNAAINILAAGRADSLNACGGTVRPSA

SEQ ID NO: 2019 - protein, 373 aa, unidentified
MNKAFKYRIYPSVEQEVLINKTFGCVRFVYNRMLANRKDIYKQFKDDKEALKRQKYRLPADFKKEFEWLKEVDSLALANAQLHLQTAYNNFFRDPSVGFPKFKSKHQDKKSYTTNNQGGTIRLIDPTTIRLPKLKDVRIKLHRSLPKEAAIKSATISKTPTGKYYVSVLVEYEANIKSVEPTPETVLGLDYSSPSLFVDSQAKPADYPKFYRKAEAKLKKAQRKLSKRKKGSKNREKQRLKVAKLHEKVANQRKDFLHQLSRQIANAWTAVAIEDLNMRGMAQGLKLAKSTNDNGFGMLKTFLSYKLAEQGKSLVVIDKWFPSSKLCRFCQTAQSELALSARVWNCSCGAVLDRDTNAAINIKNEGCRMLGIA

SEQ ID NO: 2020 - protein, 360 aa, unidentified
MSKQNKAYKFRLYPTKEQEVMIRKTFGCVRFVYNKMLAERMETYERLKEDKEELKKVKHPTPAKYKNEYEWLKEVDSLALANAQLNISRAYKAFFSGIARFPKFKSKRHKQSYTTNVVNGNIQLLDGHIKLPKLKKVKIKQHRKIPENCKIKSCTLSMTSSGKYYISILTEYEKEIERKKIEKVVGLDFAMNGLFVDSEGEKANYPRFYRQTLAKLAKEQRKLSRKKKGSSNGHKQRIRVATIHEKVANQRKNFLHHKSKELASTYDAVVIEDLDMKGMSQALRFGKSIADNGWGMFTSFLQYKLNEQGKHLIKIDKWYPSTKTCSSCGDTQPMPLGIKTYVCSCGLHLARDYNAALNIK

SEQ ID NO: 2021 - protein, 368 aa, unidentified
MRKTFRYRLFPTKAQQTSMQKSLDACRWVYNKTLEVRRDAWQQRQESLSRYDTIRMLPGWKAEHSLLSDAYSQCLQEACTRVDLAFQHFFRRVKAGEKPGYPRFKGDRYKSFTYPQSGFNLSDNGSLRLSKIGKVRIKIHRPIKGEVKALTIRRDVLGNWYACFSCVVEPQFLSPCHRVIGVDVGLSHFATLSSGEHIPNPRFFRQDEKALAKAQGCLSKCEKGTPEYRKCKRVVQHIHHRVAGRRHNFAHQLSRRLVNEYQIIAMEDLNIQDMQNGNWRSINKSIADAAWRQFIDFTAYKAENAGRLSPRIDPGGTTQDCSGCGGIVPKDLSVRIHNCPHCGLILDRDHNAAINILARGMASIRLDR

SEQ ID NO: 2022 - protein, 369 aa, unidentified
MHKRTYKYRLYPTKAQQSALQKSLDACRWVYNQALAVRKDAWEQEQKAVSRYDTIKMLPIWKQEHGILKNAYSQCLQETCTRVDLAFKAFFRRAKKGQKPGYPRFRGKERYDSFTYPQSGYVLLDKKRLRLSTIGELKIKLHRPMGGKIKNLTIRRDGVGNWYACFSCRVDKKRLPQIDTVVGVDVGLTSFATYSNGEKIDNPRFFRREENELAKEQRRLSKADKGTPERAKRRKVVAHIHRRIANKRRDFAHKLSRQLVNNFGVIAFEKLDIQDMTDGNWRSMNKSISDVAWKQFVQFVAYKAEDAGRNFVQVDSHNTTKMCSCCGRLVEKDLSVRIHKCPFCGLVLDRDENAAINILRLGIQSLALA

SEQ ID NO: 2023 - protein, 375 aa, unidentified
MNKAYRFRIYPSTEQLAMIRKTFGCVRFLYNQMLAERQTKVERYKDDKEQLKQQRYRTPAGFKNEFDWLREVDSLALCNAELNLKTAFRNFFRDKRLGYPKFKSRKNPVQSYTTNNQNGTVRIAEDGKHVRVPKLGCIRIKLHRQIPDGHAIKSATISRNPSGKYHISILTEYKANLELFIPRLESVLGLDYSSPSLYIDHMGTSADYPKYFRQMEARLKREQRILSRRKKGGSNWQKQKLRVARLHEKISNQRKDFLHKESRRLVEAWDAVAVEDLNMKAMSRTFSLGKATMDNGNGMFRAFLSYKLTERGKPLVRIDKWFPSSKRCRACGTINTGLMLKDRVWVCDGCGTTHQRDENAAGNIRDEGIRILGIA

SEQ ID NO: 2024 - protein, 407 aa, unidentified
MQLRYAFRVYPDAGQRIALARAFGCARVVFNDAVRAREDARRAGLPFPTVAELSRKLITEAKRTVERSWLGEVSAVVLQQSLRDAETAYRNFFASLKGTRKGPGVGPPRFKSRKDARQSVRFTANARWSITDSGRLNLPKIGAVKVKWSRTLPTTPSSVTVIKDTAGRYFASFVVDTDPAADRARMPDADRTIGIDLGLTHFAVLSDGTKIDSPRFLRRAEKKLKKAQRELSRKQKGSKNRDKARLKVARAHAKVADARREFHHQLSTQLISENQGIAVEDLSVAGLARTRLAKSVHDAGWSSFVGMLKYKAERYGRTLVVIGRFEPTSQTCHACGTVDGPKPLNVREWTCTACGTVHDRDHNAAINVKQAAGLAASACGAPVRPGAVPAQREETGSHGFPTDARAA

SEQ ID NO: 2025 - protein, 373 aa, unidentified
MLRAYKYRIYPDETQKVQLAKTFGCARFVYNYYLDKKIKGYENGEKSISKIDCNNHLNRELKKELIWLKEVDKFALTNAIYNLDEAYQNFFRRVKTGKDKAGFPKFKSRHSNRFSYKSNSTNNNIEVDYAKNKIKLPKLKWCDAKVHREFDGEIKSATISQNPSERYFVSILVDEKIKELPKTNKEIGFDLGLSQFLIENNGNKIPNPKHLSKNERKLAKLQRQLAKKQKSSKNRNKMRIKVARLHEKITDTRKDFLHKLSSQIINENQVIVSEDINISGIIKNQRLAKAISDASWSEFTRQLEYKAAWYGRTYIKIDRFYPSSQICSNCGFKNIELKNLKIRDWTCESCGSHHDRDINASQNILKEGKRMLA

SEQ ID NO: 2026 - protein, 402 aa, unidentified
MKRLQAFKFQLRPGGQQERQMRLFAGACRFVFNRALALQNENYEAGNKYIPYTKMASWLVEWKKDTETEWLKDSPSQPLQQSLKDLERAYKNFFQKRAAFPRFKKRGQNDAFRYPQGVKLDQENSRIFLPKLGWVRYRNSRQVTGIVKNVTVSQSCGKWYISIQTESEVSTPVHPSASMVGLDAGVVKLATLSDGTVFEPVNSFQKNQKKLARLQRQLSRKVRFSNNWQKQKRKIQQLHSRIANIRRDYLHKVTTIISKNHAMIVIEDLKVKHMSKSAAGTISQPGRNVRTKSGLNRSILDQGWYEMRRQLEYKQLWHGGQVLAVPPAYTSQRCACCGHTAKENRLSQSKFRCQVCGYTANADVNGARNILAAGHAVLACGGMVQSGRPLKQEPTEMIQATA

SEQ ID NO: 2027 - protein, 389 aa, unidentified
MRLRYNFRIYPTVGQQQSLARAFGCARVVFNDALRARKEAHAAGQPYLSDGELSKVVITQAKKTVERAWLGEVSSVVLQQALADLNTAYRNFFASLSGERKGRAVAAPRYRSRKDRRQAIRFTRNARFTITAGGKLRLPKVGDVRVRWSRELPSQPSSVTVLKDAAERYFASFVVETADEPLPETASEVGIDLGLTHFAVTSAGRKIANPRFLRRAERRLRKAQQALSRKQKGSKNRKKAVVKVARLHTRVRDSRRKHHHKLSTQLIRDNQAVYLEDLCVYGLARTRLAKSVHDASWSQFAAMLEYKAERHGRTLVKVDRWFPSSKLCGACGRVAESMPLHVREWACSCGAVHDRDVNAAINILAAGRAERLNACGESIRPPAQGGGAR

SEQ ID NO: 2028 - protein, 374 aa, unidentified
MNKAFKYRIYPNAEQEILMNKTFGCVRFVYNQMLANRKEIYEQFKDDKEALRKQKYRLPADFKKEFEWLKEVDSLALANAQLHLQTAYKNFFRDKSAGFPKFKSKHHDGKSYTTNNQGGTIRLIDSKTIRLPKLKDVRIKLHRQLPKEAVIKSATISKTPVGNYYISILVEYEAHIEPVLPTSETVLGLDYSSQSLFVDSEANDADYPKFYHQAEEKLKKAQRKLSQRQKGSKNREKQRRKVAKMHEKVANQRKDFLHKLSRQIANAYEAVAIEDLNMRGMAQSLNLAKSTNDNGFGMLKTFLAYKLAEQGKQLVVIDKWFPSSKRCRFCQHENKALTLADRTWVCNHCGAELDRDVNAAINIKNESCRMLGIA

SEQ ID NO: 2029 - protein, 369 aa, unidentified
MQVVKTYSYRIKDSSCRNHLCRTAGSVNFVWNYLNATSCRAIRERRQWLSEFDLNNLTSGASKELPLLHSQTIQAISKEYVKARGQSNQAKLRWRSAKKKTLGWIPFKASGVKLEEDTIKYRGRVYRFWKSRDFPEGGRVVTGSFNQDAEGRWYVNLQFQMKIEEPEPKGERRLGIDLGLKTQATCSDGEKLKRPNLTKEWEEKLAVAQRAGKKKRVRKIHAKIRDIRQDWNHKESTKLIESCSLIRVGNVSSSGLMKTRMAKSVADAGWFQFKTMLKYKAITHGVDFEETNEAFSTVTCSQCLERTGPSGIRNVGIREWICSSCRASHDRDVNAAKNILIFGLVGRPDAGRFPLSSGNAGTGGSKKNS

SEQ ID NO: 2030 - protein, 384 aa, unidentified
MLRAAKFRIYPTAAQEAFLWAQWGAVRKCWNMALFLKKHYYRTRGVSLDLIHEIKPLIARAKKSKKYAWLREYDSMALQESVRNLNKGYRAFFDGRAGFPHYKSRRGPQSSYHCTNVSVGPNYVRVPKMEPIKARIHREVVGKVKSITLEADAAGDYYAAVLWEDGLAEKEPLKEIYEDQVIGIDVGIKDLLTESNGRKEPNPRHLKHARKVLRRRCRQFSRTQKGSRRREKARRRLARAHKRVANARTDNLHKVSSRLVNESQALAAESLRIINMLKNHHLAESIADAAWGELLRMIAYKMKREGKYFILIDTFYPSSKTCSCCGFKLEKLDLATREWTCPHCGAHHDRDGNAAANIRAEGIRILRAEGLPVLRREMSSPNAR

SEQ ID NO: 2031 - protein, 384 aa, unidentified
MLRAAKFRIYPTAAQEAFLWAQWGAVRKCWNMALFLKKHYYRTRGVSLDLIHEIKPLIARAKKSKKYAWLREYDSMALQESVRNLNKGYRAFFDGRAGFPHYKSRRGPQSSYHCTNVSVGPNYVRVPKMEPIKARIHREVVGKVKSITLEADAAGDYYAAVLWEDGLAEKEPLKEIYEDQVIGIDVGIKDLLTESNGRKEPNPRHLKHARKVLRRRCRQFSRTQKGSRRREKARRRLARAHKRVANARTDNLHKVSSRLVNESQALAAESLRIINMLKNHHLAESIADAAWGELLRMIAYKMKREGKYFIQIDTFYPSSKTCSCCGFKLEKLDLATREWTCPHCGAHHDRDGNAAANIRAEGIRILRAEGLPVLRREMSSPNAR

SEQ ID NO: 2032 - protein, 384 aa, unidentified
MLRAAKFRIYPTAAQEAFLWAQWGAVRKCWNMALFLKKHYYRTRGVSLDLIHEIKPLIARAKKSRKYARLREYDSMALQETVRNLNKGYRAFFEGRAGFPHYKSRRGPQSSYHCTNVSVGPNYVRVPKMEPIKARIHREVVGKVKSITLEADAAGDYYAAVLWEDGLAEKEPLKEIYEDQVTGIDVGITDLLTESNGRKESNPRHLKRARKALRRRCRQFSRTKKGSRRREKARRRLARAHKRVANARSDNLHKVSSRLVNESQALAAESLRIINMLKNHHLSESIADAAWGELLRMIAYKMKREGKYFMQIDTFYPSSKTCSCCGFKLEKLDLATREWTCPHCGAHHDRNANAAANIRAEGIRILRAEGLPVLRREMSSPNAR

SEQ ID NO: 2033 - protein, 402 aa, unidentified
MKRLQAFKFQLRPSGQQECEMRRFAGACRFVFNRALALQNENHEAGNKYIPYGKMASWLVEWKNATETQWLKDAPSQPLQQSLKDLERAYKNFFQKRAAFPRFKKRGQNDAFRYPQGVKLDQENSRIFLPKLGWMRYRNSRQVTGVVKNVTVSQSCGKWYISIQTESEVSTPVHPSASMVGLDAGVAKLATLSDGTVFEPVNSFQKNQKTLARLQRQLSRKVKFSNNWQKQKCKIQRLHSRIANIRRDYLHKVTTTVSKNHAMIVIEDLKVSNMSKSAAGTVSQPGRNVRAKSGLNRSILDQGWYEMRRQLEYKQLWRGGQVLAVSPAYTSQRCTCCGHTAKENRLSQSKFRCQVCGYTANADVNGARNILAAGHAVLACGGMVQSGRPLKQEPTEMIQATA

SEQ ID NO: 2034 - protein, 383 aa, unidentified
MQLRYSFRLYPTSGQQEAVARAFGCARVVFNDALRARREAHAAGLPYPSDGDLSKQVITEAKKTSERVWLGEVSSVVLQQALADLNTAYRNFFASVSGKRRGRKVAPSRFRSRKDSRQAVRFTRNARWSITAGGRLRLPKVGDVRVRWSRDLPCDPSSVTVIKDAAGRYFASFVVETTQEPLPEVAAEVGIDLGLTHLAVLSDGRKVTSPKFLRRAERRLGKAQQALSRKQKGSANRRKAVARVARMHARVSDARRDHHHRLSTQLIRDNQAVYVEDLAVNALARTRLAKSVHDAGWSRFVGMLEYKAARYGRTLGKVDRWFPSSKLCSACGTAAEAMPLNVRTWTCPCGAVHDRDVNAANNILAAGRADRLNACGGTARPAA

SEQ ID NO: 2035 - protein, 433 aa, unidentified
MLEAVKVALDPTPVQERLMLSHAGAARFAYNAGLAHVKETIETGGKLEWTLYALRRWWNANKGTLAVDADGTPWWRENSKEAYNSGLEALSDALSNWSKSRKGERKGRRVGFPRFKAKDRETPRFAYTTGSFGLVRADPKALRLPRIGRVHCMENVAGRVDGARALRMTVSCRAGRWHAALTVERADPTARRTPREGAVGIDLGVKSLATLSDGTTIANPHTLKANERRLKRAQRSLSRRQPGSHRRAHARERVVRLHARVANQRRDMLDKLTTWLADTYSDISIEDLNVAGMVKNHRLAQSIQDATFAEFRRQLTYKTARTGAGLHIIGRWYPSSKTCSNCGTVKTKLSLSERVYHCEECGLSIDRDLNAAVNIQVAGSAPETLNAHGGDGRRNDASRRATQTPVKCEPSSHASGVRLGADDRKTVLQTKTN

SEQ ID NO: 2036 - protein, 398 aa, unidentified
MQLRYDFRLYPTPGQRHALARAFGCARVVFNDGLRARQDAREQGMPYISDGELSKRVITEAKKTPGRSWLGEVSAVVLQQALADLNVAYRNFFASLTGKRKGAKVAPPRFRSRKDNRQAIRFTKNARFCITAGGKLRLPKIGDVPVRWSRDLPAEPSSVTVVKDAAGRYFASFVVETSDVPLPESAAEVGIDLGLSHFAITSDGRKVENPRFLRRAERRLRKAQQELSRKDRGSANRRKARVKVAKAHARVADARRDWAHKLSTQIIRDNQAVYVENLAVSGLGRTRLAKSLHDAGWSQFIGMLVYKAARYGRHFAKIDRWFPSSKLCSGCGAVAEAMPLAVRSWTCPCGTVHDRDINAAKNILAAGRADRLNACGARVRSGPAPAQREEAGSLRGAA

SEQ ID NO: 2037 - protein, 433 aa, unidentified
MLEAVKVALDPTPVQERLILSHAGAARFAYNAGLAHVKETIETGGKLEWTLYALRRWWNANKGTLAVDADGTPWWRENSKEAYNSGLEALSDALSNWSKSRKGERKGRRVGFPRFKAKDRETPRFAYTTGSFGLVRADPKALRLPRIGRVHCMENVAGRVDGARALRMTVSCRAGRWHAALTVERADPTARRTPREGSVGIDLGVKSLATLSDGTTIANPHTLKANERRLQRAQRSLSRRQPGSHRRAHARERVVRLHARVANQRRDMLDKLTTWLADTYSDISIEDLNVAGMVKNHRLAQSIKDAAFAEFRRQLTYKTARTGAGLHIIGRWYPSSKTCSNCGTVKTKLSLSERVYHCEECGLSIDRDLNAAVNIQVAGSAPETLNAHGGDGRRNDASRRATQTPVKCEPSSHASGVRLGADDRKTVLQTKTN

SEQ ID NO: 2038 - protein, 433 aa, unidentified
MLEAVKVALDPTPVQERLMLSHAGAARFAYNAGLAHVKETIETGGKLEWTLYALRRWWNANKGTLAVDADGTPWWRENSKEAYNSGLEALSDALSNWSKSRKGERKGRRVGFPRFKAKDRETPRFAYTTGSFGLVRADPKALRLPRIGRVHCMENVAGRVDGARALRMTVSCRAGRWHAALTVERADPTARRTPREGAVGIDLGVKSLATLSDGTTIANPHTLKANERRLKRAQRSLSRRQPGSHRRAHARERVVRLHARVANQRRDMLDKLTTWLADTYSDISIEDLNVAGMVKNHRLAQSIQDAAFAEFRRQLTYKTARTGAGLHIIGRWYPSSKTCSNCGTVKTKLSLSERVYHCEECGLSIDRDLNAAVNIQVAGSAPETLNAHGGDGRRNDASRRATQTPVKCEPSSHASGVRLGADDRKTVLQTKTN

SEQ ID NO: 2039 - protein, 353 aa, unidentified
MKQTKTLKVRVRDKHAPLLQQMARSVNFVWNYLNELSARSIRERGRFLSAFDLHPYTKGANKELGLHSQTLQEIAREYVTRRKQFKKLRLNWRKSGGVRRSLGWIPINTGAARWKNGQVYHNSYYFKVWDSYGLSQYQFRSGSFNEDARGRWYFNVVVEVDTAVPTGQDKIGIDLGLKDTATCSDGTKLEAGRFYRDLEPKLAIAQRARNKKRVQAIHAKIANRRKDALHKFTRQLVNRAGAIYVGNVKSSSLTQTKMAKSVLDAGWGLLKTMLEYKCAGAGIVFKAVNEAYTTQTCSNCGALPDSRPKGIAGLGIREWTCSACGVRHDRDINAAKNILAVGHGRPAVGIPVL

SEQ ID NO: 2040 - protein, 353 aa, unidentified
MKQTKTLKVRVRDKHVPLLQQMARSVNCVWNYLNELSTRSIRERGRFLSAFDLHPYTKGANKELGLHSQTLQEIAREYVTRRKQFKKSRLNWRKSGGVRRSLGWIPINTGAARWKNGQLYHNGHYFNVWDSYGLSQYAFRSGSFNEDARGRWYFNVVVEVDAEISAGQDKIGIDLGLKDIATCSDGVKLEAGRFYRDLEPKLAIAQRARNKKRVKAIHAKIANRRKDALHQFTRKLVKRAGAIYVGNVKPSSLTQTKLAKSVLDAGWGMLKTMLEYKCAGAGIVFKAVNEAYTTQTCSNCGALPDSRPKGIAGLGIREWTCSACGVRHDRDINAAKNMLAVGHGRPAVGIPVL

SEQ ID NO: 2041 - protein, 353 aa, unidentified
MKQTKTLKVRVRDKHAALLQQMARSVNCVWNYLNELSTRSIRERGRFLSAFDLHPYTKGANKELGLHSQTLQEIAREYVTRRKQFKKSRLNWRKSGGVRRSLGWIPINTGAASWKNGQVYHNGHYFKVWDSYGLSQYQFRSSSFNEDARGRWYFNVVVEVEAIVPAGQDKIGIDLGLKDTATCSDGTKLEAGRFYRELEPKLAIAQRAKNKKRVKAIHAKIANRRKDALHKFTRQLVNRAGAIYVGNVKSSSLTQTKMAKSVLDAGWGLLKTMLEYKCAGAGIVFKAVNEAYTTQTCSNCGALPDSRPKGIAGLGIREWTCSACGVRHDRDINAAQNMLAVGHGRPAVGIPVL

SEQ ID NO: 2042 - protein, 417 aa, unidentified
MSSVQLRYNFRVYPTPGQQIELAKAFGCARVVFNDGLRARQEAREQGLPYVSDGDLSKQVITQAKLTPEREWLGEVSAVVLQQALADLNVAYRNFFASVTGKRKGRRVAPPKFRSRKDNRQAIRFTANARFKVLDNGRLRLPKIGDLDVRWSRGLPSDPSSVTIVKDAAGRHFASFVVTTTDEALPELDSEVGIDLGLTHFAVLSDGTKVTAPKFLRRAARKLKRLQQDLTRKQRGSNNRKKAVVKVARAHARVADTRRDWQHKLSTRIIRENQAVYVEDLCVVGLGRTRLAKSVHDAGWSSFVGMLEYKAARWGRTLGKIDRFAPTSQTCSVCGRIDGPKPLSVRSWACLCGAVHDRDVNAAINVLAQGRWDNSNACGTRVRPALVPAPRPTSRREAGIRPDAACSTRSVEGISAL

SEQ ID NO: 2043 - protein, 383 aa, unidentified
MQLRYNFRLHPSAGQRQALARAFGCARTVFNDGLRARREAHAGGLPYISDADLSKQVITQAKKTPERAWLGEVSAVVLQQALADLNTAYRNFFASLSGERKGPKAAPPRYRSRKDNRQAVRFTKNARFTVTAGGKLRLPKIGDVPVRWSRDLPAEPSSVTVIKDAAGRYFASFVVETGADPLPQAPDEVGIDLGLTHFAVLSDGRKIDNPRFLRRAGRRLKKAQQALSRKAKGSANRKKAAARVARAHVRVADARRDFAHKLSTRIIRDNQAVYVEDLCVKGLARTRLAKSVHDAGWSQFVTMLEYKAGRYGRGFAKVGRFFPSSKSCSACGAVAGTMPLNIRSWICPCGAVHDRDVNAAINILAAGRAERLNACGGTVRPAA

SEQ ID NO: 2044 - protein, 411 aa, unidentified
MRLRYNFRVYPTPGQQIELAKAFGCARVVFNDGLRLRQQAHEAGEKYVSDAELSKRVITQAKLSPQRAWLGEVSAVVLQQAVADLNSAYRNFFASVSGKRMGRKVAAPRFRSRKDNRQAIRFTKNSRFKVLDNGRLRLPKIGDLDVRWSRSLPSDPSSVTIIRDAAERYFASFVVQTAEDETLPPVESEVGIDLGLTHFAVLSDGTKVTAPKFLRRTARKLKRLQQALSRKQKGSNRRKKAVVKVARAHARVADTRRDWQHKLSTTIVRENQAIYVEDLCVTGLGRTRLAKSVHDAGWAGFTAMLEYKAARYGRTFARVDRFFPSTRMCSACGRVGEKMALNVRSWDCPCGAAHDRDVNAALNVLAAGQADNSNDRRAQVRPGLVPAPRSEAVSHPDAACSTRSVEGTSVL

SEQ ID NO: 2045 - protein, 410 aa, unidentified
MQLRYQFRVYPTPGQQIDLARAFGCARVVFNDGLRLRQQAHEAGEKYISDGELSRRLITQAKLTPQRAWLSEVSAVVLQQALADLNTAYRNFFASITGKRKGRKVAPPRFRSRKDNRQAIRFTKNSRFRVLDNGRLRLPKIGDLQVRWSRTLPSDPSSVAIIRDAAGRYFASFVVQTTEDESLPPVAFEVGIDLGLTHFAVMSDGTKVAAPKFLRRAARKLKRLQQDLSRKQRGSQNRKKAVVKVARAHARVADTRRDWQHKLSTTLIRENQAIYVEDLCVVGLGRTRLAKSVHDAGWTSFTGMLEYKAARYGRAFGRVDRFFPSTRMCSACGRINEKMALNVRAWDCPCGAAHDRDVNAAINVRAAGQADLNARGAHVRPGLIPAARNEAGTHPDAACPTRSVAGISVL

SEQ ID NO: 2046 - protein, 410 aa, unidentified
MQLRYNFRLYPDTAQREALARSFGCARVVFNDGLRLRQQAREAGEEYVSDGELSRRLITEAKSTPERVWLGEVSSAMLQQALADLNAAYRNFFASISGKRKGRKLALPRFRSRKDNRQAIRFTKNSRFKVLDNGRLRLPKIGDLAVRWSRALPSDPSSVAVIKDAAGRYFASFVVQAAEEEVLPPVGSEVGIDLGLTHFAVLSDGTKVTAPKFLRRAARKLKRLQQDLSRKINGSNRRKKAVVQVARAHARVADTRRDWQHKLSTTLIRENQAVYVEDLCVVGLGRTRLAKSVHDAGWAGFTGMLEYKAARYGRTFGRVDRFFPSTRMCSDCGRINDKMALNVRAWDCPCGSDHDRDVNAARNIKAAGQADFNDRGAQVRPGLVPAPRGEAVTHPDAACSTRSVEGISVH

SEQ ID NO: 2047 - protein, 409 aa, unidentified
MQLRYNFRLYPDTAQRKALARSFGCARVVFNDGLRLRQTARENGGKYVSDGELSRRLITEAKATPERAWLGEVSSVVLQQALADLNVAYRNFFASITGKRKGRKVAPPRYRSRKENRQAIRFTRNSRFKVLDNGRLRLPKIGDLAVRWSRTLPSDPSSVAVIKDAAGRYFASFVVKSTDEALPPVESEVGIDLGLTHFAVLSGGTKVAAPKFLRRAARKLKRLQQALSRKQRGSQNRRKAVVKVARAHARVADTRRDWQHQLSTTLIRENQAVYVEDLCVVGLGRTRLAKSVHDAGWAGFTAMLEYKAARYGRTFGRVDRFFPSTRKCSDCGRINDKMALDVRAWDCPCGSHHDRDVNAARNIKAAGQADFNDRGAQVRPAAMLAPRGEAVTHPDAAYSTRSVEGISVL

SEQ ID NO: 2048 - protein, 404 aa, unidentified
MQLRYNYRVHPTPGQQVKLAKAFGCARVVFNDGLRARQNARQAGLPYISDGELSKQVITEAKKTGERAWLGEVSAVVLQQSLADLNTAYRNFLASLTGRRKGPKVAAPRFRSRKDGRQAVRFTRNARFSITAGGRLRLPKIGDVRVRWSRELPAEPSSVTVIKDASGRYFASFVVDVAAESLPATPGEVGIDLGLTHFAVLSDGRKITNPRFLRRAERRLRKAQQTLSRKQKGSANRKKAVVKVARAHVRVADARRDFAHKLSTSIIRDNQAVYVENLSVKGLARTKLAKSIHDAGWSAFTRMLEYKAARYGRTFVRIDRWFPSSKLCSACGAVAESMPLSARSWICACGADHDRDVNAAINILAAGRADRLNACGDPVRRPLAVARVDETGSRRDAASTRGTD

SEQ ID NO: 2049 - protein, 409 aa, unidentified
MQLRYNYRLYPTPGQQIELARAFGCARVVFNDGLRLRQEAREQGLPYVSDAELSKRIITQAKATPERAWLGEVSSVVLQQALADLNTAYRNFFASLSGKRKGRKVAPPRYRSRKDNRQAIRFTRNSRFKVLGNGRLRLPKIGDLAVRWSRALPSAPSSVAVIKDAAGRYFASFVVQVADEPLPTVESEVGIDLGLVHFAVLSDGTKVAAPKFLRRAARKLKRLQQALARKQRGSQNRRKAVVRVARAHARVADTRRDWQHKLSTQIIRENQAVYVEDLCVTGLGRTRLAKSVHDAGWAGFTGMLEYKAARYGRTFGRADRFLPSTRMCSACGRITEKMALNVRTWDCPCGSHHDRDVNAARNIRAAGQADLNARGAHVRPGLVPAARNEAGTHPDAARSTRSVEGISVL

SEQ ID NO: 2050 - protein, 410 aa, unidentified
MQLRYNFRLYPTPGQQQSLARAFGCARVVFNDALRARQEAHAAGLPYPLDGELSKRVITEAKKTGERAWLGEVSAVVLQQALADLNTAYRNFFASVSGTRKGRGVAPPRFRSRKDRRQAIRFTRNARWRITPGGKLRLPKIGDVRVRWSRNLPSEPSSVTVIKDAAGRYFASFVVEVPDEPLPQAAADVGIDLGLTHFAVLSDGRKVSSPRFLRRAERRLRKARQALSRKQKGSANRKKAAARVARLHARVADARRDHHHKLSTQLIRDNQAVYVEDLAVNGLARTRLAKSVHDAGWSRFVAMLEYKAARHGRSFARVDRWFPSSKLCSTCGTLAESMPLNVRSWTCPCGAVHDRDVNAAINILAAGQADRLNDRRAQVGPGHVPAPRSEAVTHPDAARSTRSVEGISVL

SEQ ID NO: 2051 - protein, 357 aa, unidentified
MLEAVKVALDPTPRQERLLESHAGAARFAYNNGLAHVKDMLERGDTPEWSYYALRRWWNQAKNTLAMDETTGEPWWPRNSKEAYNSGLESLADALKNFSKSRKGQRKGRRMGFPRFKSKDSGIRRFAYTTGSFGLIDHDPYALKLPRIGRVHCMEDASKRVDGAKVLRMSVSKRGGRWQASLTVERADLPIPSPPKGGSVGIDLGVKELATLSDGTVMHNPHALKSNLRRLKKAQRNLSRKRKGSNRRRKARAQVARLYARVANLRSDALNKTTAMLAHTYADISIEDLNVAGMAGNHGLAQSIQDAAFAEFRRQLTYKTARTGARLHVIDRWYPSSKTCSNCGTVKAKLPLSERVY

SEQ ID NO: 2052 - protein, 434 aa, unidentified
MLEAVKVALDPTPRQERLLESHAGAARFAYNNGLAHVKDMLERGDTPEWSYYALRRWWNQAKNTLAMDETTGEPWWPRNSKEAYNSGLESLADALKNFSKSRKGQRKGRRMGFPRFKSKDSGIRRFAYTTGSFGLIDHDPYALKLPRIGRVHCMEDASKRVDGAKVLRMSVSKRGGRWQASLTVERADLPIPSPPKGGSVGIDLGVKELATLSDGTVMHNPHALKSNLRRLKKAQRNLSRKRKGSNRRRKARAQVARLYARVANLRSDALNKTTAMLAHTYADISIEDLNVAGMAGNHGLAQSIQDAAFAEFRRQLTYKTARTGARLHVIDRWYPSSKTCSNCGTVKAKLPLSERVYHCEECGLVIDRDVNAAINIQVAGSAPETLNARGGSVRQTRLECGTMRHPAKREPSGGDSRVRLGAGLGNEAMQMTSL

SEQ ID NO: 2053 - protein, 389 aa, unidentified
MLEAVKVALDPTPRQERLLESHAGAARFAYNNGLAHVKDMLERGDTPEWSYYALRRWWNQAKNTLAMDETTGEPWWPRNSKEAYNSGLESLADALKNFSKSRKGQRKGRRMGFPRFKSKDSGIRRFAYTTGSFGLIDHDPYALKLPRIGRVHCMEDASKRVDGAKVLRMSVSKRGGRWQASLTVERADLPIPSPPKGGSVGIDLGVKELATLSDGTVMHNPHALKSNLRRLKKAQRNLSRKRKGSNRRRKARAQVARLYARVANLRSDALNKTTAMLAHTYADISIEDLNVAGMAGNHGLAQSIQDAAFAEFRRQLTYKTARTGARLHVIDRWYPSSKTCSNCGTVKAKLPLSERVYHCEECGLVIDRDVNAAINIQVAGSAPETLNAR

SEQ ID NO: 2054 - protein, 353 aa, unidentified
MLEAVKVALDPTPRQERLLESHAGAARFAYNNGLAHVKDMLERGDTPEWSYYALRRWWNQAKNTLAMDETTGEPWWPRNSKEAYNSGLESLADALKNFSKSRKGQRKGRRMGFPRFKSKDSGIRRFAYTTGSFGLIDHDPYALKLPRIGRVHCMEDASKRVDGAKVLRMSVSKRGGRWQASLTVERADLPIPSPPKGGSVGIDLGVKELATLSDGTVMHNPHALKSNLRRLKKAQRNLSRKRKGSNRRRKARAQVARLYARVANLRSDALNKTTAMLAHTYADISIEDLNVAGMAGNHGLAQSIQDAAFAEFRRQLTYKTARTGARLHVIDRWYPSSKTCSNCGTVKAKLPLS

SEQ ID NO: 2055 - protein, 428 aa, unidentified
MLEAVKVALDPTPRQERLLESHAGAARFAYNNGLAHVKDMLERGDTPEWSYYALRRWWNQAKNTLAMDETTGEPWWPRNSKEAYNSGLESLADALKNFSKSRKGQRKGRRMGFPRFKSKDSGIRRFAYTTGSFGLIDHDPYALKLPRIGRVHCMEDASKRVDGAKVLRMSVSKRGGRWQASLTVERADLPIPSPPKGGSVGIDLGVKELATLSDGTVMHNPHALKSNLRRLKKAQRNLSRKRKGSNRRRKARAQVARLYARVANLRSDALNKTTAMLAHTYADISIEDLNVAGMAGNHGLAQSIQDAAFAEFRRQLTYKTARTGARLHVIDRWYPSSKTCSNCGTVKAKLPLSERVYHCEECGLVIDRDVNAAINIQVAGNARGGSVRQTRLECGTMRHPAKREPSGGDSRVRLGAGLGNEAMQMTSL

SEQ ID NO: 2056 - protein, 264 aa, unidentified
MLRAAKFRIYPTAAQETFLWAQWGAVRKCWNMALFLKKHYYRTRGVSLNLIHEIKPLIVRAKKSKKYAWLREYDSMALQESVRNLNKSYRAFFEGRAGFPHYKSRRGPQSSYHCTNVSVGPNYVRVPKMEPIKARIHREIVGKVKSITLEADSAGDYYAAVLWEDGLAEKEPLKEIYEDQVIGIDVGIKDLLTVSNGRKEPNPRHLKRARKALRRRSRQFSRTKKGSRRREKARRRLARAHKRVANARNDNLHKVSSRLVNESQ

SEQ ID NO: 2057 - protein, 272 aa, unidentified
MLRAAKFRIYPTAAQEAFLWAQWGAVRKCWNMALFLKKHYYRTRCVSLDLIHEIKPLIARAKKSKKYAWLREYDSMALQESVRNLNKGYRAFFEGRAGFPHYKSRRGPQLSYHCTNVSVGPNYVRVPKMEPIKARIHREVVGKVKSITLEADAAGDYYAAVLWEDGLAEKEPLKEIYEDQVIGIDVGIKDLLTESNGRKEPNPRHLKHARKVLRRRLARAHKLVANARTDNLHKVSSRLVNESQALAAESLRIINMLKNHHLAESIADAAWG

SEQ ID NO: 2058 - protein, 353 aa, unidentified
MKQTKTLQVRVRDKHAPLLRQMARSVNFVWNYLNELSQRSIRERGVFLSAYDMHPYTKGAGKDLGLHSHTLQCVAAEYVTRRRQFKKVRLNWRKSGGARRSLGWIPVNTGAASWKNGQVYHNGHYFKVWDSYGLGRYRFRSGSFSEDARGRWYFNVAVEIEAELSPGQGAVGIDLGLKDVATCSDGMKLENGRFYRDLEAKLAIAQRAGKKVRTRAIHAKIANRRKDALHKFSRQLVNRYGEIHVGDVSSTKLVKTRMAKSVLDAGWGQLKTMLEYKCAHAGIVFKVVDERYTTQTCSSCGALPDSRPKGIAGLGMREWTCSECGVAHDRDVNAARNILAAGHGRPAVGIPAL

SEQ ID NO: 2059 - protein, 410 aa, unidentified
MQLRYNYRVYPTPGQQIELARAFGCARVVFNDGLRLRQQAREAGEKYISDGELSRRLITEAKATPERAWPGEVSTVVLQQALADLNTAYRNFFNSITGKRKGRKVAPPRFRSRKDNRQAIRFTKNSRFKVLDNDRLRLPKIGDLAVRWSRTLPSDPSSVAIIRDAAGRYFASFVVQTGEDEALPPVDSEVGIDLGLTHFAVLSDGTKVAAPTFLRRAARKLKRLQHDLSRKQKGSANRKKAVVKVARAHARVADMRRDWQHKLSTAIIRENQAVYVEDLCVVGLGRTRLAKSVHDAGWASFTAMMEYKAARYGRTFGRVDRFFPSTRMCSDCGRINEKMALNVRAWDCPCGAAHDRDVNAAKNVKAAGQADFNARGAHVRPGLVPAARNEAGTHPDAACSTRSVEGISVP

SEQ ID NO: 2060 - protein, 398 aa, unidentified
MQLRYDFRLYPTPGQRHALARAFGCARVVFNDGLRARQDAREQGVPYISDGALSKRVITEAKKTPGRSWLGEVSAVVLQQALADLNVAYRNFFASLTGKRKGAKVAPPRFRSRKDNRQAIRFTKNARFCITAGGKLRLPKIGDVPVRWSRDLPAEPSSVTVVKDAAGRYFASFVVETSDVPLPESAAEVGIDLGLSHFAITSDGRKVENPRFLRRAERRLRKAQQELSRKDRGSANRRKARVKVAKAHARVADARRDWAHKLSTQIIRDNQAVYVENLAVSGLGRTRLAKSVHDAGWSQFIGMLVYKAARYGRHFAKIDRWFPSSKLCSGCGAVAEAMPLAVRSWTCPCGTVHDRDINAAKNILAAGRADRLNACGARVRSGPAPAQREEAGSLRGAA

SEQ ID NO: 2061 - protein, 433 aa, unidentified
MLEAVKVALDPTPVQERLILSHAGAARFAYNAGLAHVKETIETGGKLEWTLYALRRWWNANKGTLAVDADGTPWWRENSKEAYNSGLEALSDALSNWSKSRKGERKGRRVGFPRFKAKDRETPRFAYTTGSFGLVRADPKALRLPRIGRVHCMENVAGRVDGARALRMTVSCRAGRWHAALTVERADPTARRTPREGSVGIDLGVKSLATLSDGTTIANPHTLKANERRLQRAQRSLSRRQPGSHRRAHARERVVRLHARVANQRRDMLDKLTTWLADTYSDISIEDLNVAGMVKNHRLAQSIKDAAFAEFRRQLTYKTARTGAGLHIIGRWYPSSKTCSNCGTVKAKLSLSERVYHCEECGLSIDRDLNAAVNIQVAGSAPETLNAHGGDGRRNDASRRATQTPVKCEPSSHASGVRLGADDRKTVLQTKTN

SEQ ID NO: 2062 - protein, 410 aa, unidentified
MQLRYQFRVYPTPGQQIELARAFGCARVVFNDGLRARQEAREQGLPYVSDAELSKRVITQAKATPERAWLGEVSAVVLQQALADLNTAYRNFFASITGKRKGRKMAPPRFRSRKDNRQAIRFTKNSRFKVLDNGRLRLPKIGDVTVRWSRSLPSDPSSVTIIRDAAGRHFASFVVQTGDELLPELDSEVGIDLGLTHFAVLSDGTKVAAPKFLRRAARKLKRLQQDLSRKQRGSSNRKKAVVKVARAHVRVADTRRDWQHKLSTAIIRENQAVYVEDLCVAGLARTRLAKSVHDAGWASFTAMLEYKAARHGRTFGRVNRFFPSTRMCSQCGRINDKMALNVRAWDCPCGAAHDRDANAAINVLAAGQAESRNDRGAQVRPGLLPAPRGEAVTHPDAARSTRSMEGISAL

SEQ ID NO: 2063 - protein, 434 aa, unidentified
MLEAVKVALDPTPRQERLLESHAGAARFAYNAGLAHVKDMLERGDKPEWSYYALRRWWNQAKNTLAVDETTGETWWPENSKEAYNSGLESLADALKNFSKSRKGQRKGRRMGFPRFKSKDKAVPGFAYTTGSFGLIDRDPHALRLPKIGRVHCMENVSKRVDGAKVLRMSVSKRGGRWQASLTVERADLPIPSPPKGGSVGIDLGVKELATLSDGTVIHNPHALKSNLGRLKKAQRNLSRKQKGSNRRRKARAQVARLCARVANLRSDALNKTTAMLAHTYADISIEDLNVAGMVGNHRLAQSVQDASFYEFRRQLTYKAARTGARLHVIDRWYPSSKTCSNCGMVKTKLSLSERVYHCEECGLAIDRDVNAAINIQVAGSAPETLNARGGSGRRANASRRATRHPAKREPSGGESRVRLGAGLGNEAMQMTSL

SEQ ID NO: 2064 - protein, 388 aa, unidentified
MEKAYKFRLYPTAKQEELIRKTIGCSRFVYNQTLAARKGAYASGNSIHMTFKESHSGYDCVKLLPGLKDTYPWLREVDSTALQASVLNMDHAYKNFFSGRKGRRKVGFPKFKAKHHSKASYTSKVVGHNIQASDRAVKLPKLGWVKAKVSTTVQGRILNATVSMSRSGKFFVSLCCTEVDIPQLLSTGAAVGLDVGIKDLVITSDGQKYDNPKYLQKAEKKLATLQRRLSRKPKGSCNREKARLRLSRQHEYIANCRQDYLHKLTTQLVRDYDIICVESINVGGMLKNHKLAKAIADASWGELARQLKYKAAWQHKMLVEVGTFFPSSQLCSCCGYQNKEVKDLSVREWTCPQCGAHHDRDQNAAQNLLIEGLRLLPHDFQRKSQASA

SEQ ID NO: 2065 - protein, 433 aa, unidentified
MLEAVKVALDPTPVQERLILSHAGAARFAYNAGLAHVKETIETGGKLEWTLYALRRWWNANKGTLAVDADGTPWWRENSKEAYNSGLEALSDALSNWSKSRKGERKGRRVGFPRFKAKDRETPRFAYTTGSFGLVRADPKALRLPRIGRVHCMENVAGRVDGARALRMTVSCRAGRWHAALTVERADPTARRTPREGAVGIDLGVNSLATLSDGTTIANPHTLKANERRLKRAQRSLSRRQPGSHRRAHARERVVRLHARVANQRRDMLDKLTTWLADTYSDISIEDLNVAGMVKNHRLAQSIQDAAFAEFRRQLTYKTARTGAGLHIIGRWYPSSKTCSNCGTVKTKLSLSERVYHCEECGLSIDRDLNAAVNIQVAGSAPETLNAHGGDGRRNDASRRATQTPVKCEPSSHASGVRLGADDRKTVLQTKTN

SEQ ID NO: 2066 - protein, 410 aa, unidentified
MQLRYNYRVYPDAAQREALARSFGCARVVFNDALRVRQEARAEGLPYVSDGDLSKQVITQAKTTPQRAWLGEVSAVVLQQALADLNTAYRNFFASVTGKRKGRKVAPPRFRSRKDNRQAIRFTANARFKVLDNGRLRLPKIGDLDVRWSRELPADPSSVTLVKDAAGRYFASFVVTTTDEPLPEVDSEIGVDLGLTHFAVLSDGTKVAAPKFLRRAARKLKRLQQDLSRKQRGSQNRKKAVVKVARAHARVTDTRRDWQHKLSTAIIRDNQAVYVEDLCVVGLGRTRLATSVHDAGWASFTAMLEYKAARYGRTFARVDRFFPSTRMCSDCGRINEKIALNVRSWDCPCGAAHDRDVNAAINVLAAGRAESLNDRGAHVRPALVPAVRREAVIHPGAACSARSAEGIPVL

SEQ ID NO: 2067 - protein, 398 aa, unidentified
MQLRYQYRLYPTPGQQIALARAFGCARTVFNDGLRLRQEAHKAGLPYVADGDLSERIITQAKKTPQRAWLGEVSAVVLQQALADLNTAYRNFFASLTGKRKGPKIEQPRFKSRKDRRQSIRFTRNARFAVTAGGGLRLPKIGDVPVRWSRDLPSDPSSVTVVKDAAGRYFASFVVETSDEPLPESASEVGIDLGLTHFAVLSDGRKIGNPRFLRRAERRLKKAQRALSRKTKGSNNRRKAVVKVARAHARVADARRDFTHKLSTQIVHENQTVVVEDLSVKGLARTRLAKSVHDAGWSLFAAMLAYKAARHGRTLVKAGRWFPSSKLCSACGAVAESMPLSVRSWTCPCGAAHDRDVNAAINILAAGRAERPNACGAQVRPGSTSAQRSEAGSLRGAA

SEQ ID NO: 2068 - protein, 410 aa, unidentified
MQLRYNFRVYPTPGQQIELAKAFGCARVVFNDGLRLRQQAREAGEKYICDGDLSRRLVTEAKLTPERAWLGEVSAVVLQQALADLNTAYRNFFASITGQRKGRKVAPPRFRSRKDNRQAIRFTKNSRFKVLDNGRLRLPKIGDLAVRWSRTLPSDPSSVAIIKDAAGRYFASFVVQTADEALPPTESEVGIDLGLTHFAVLSDGTKVAAPKFLRRAARKLKRLQQALSRKKKGSANRKKAVVKVARAHARVADTRRDWQHKLSTSIVRDNQAIYVEDLCVTGLGRTRLAKSVHDAGWASFTAMLEYKAARYGRTFGRVDRFFPSTRLCSDCGRINDKMALNVRSWDCPCGSHHDRDVNAAINVLAAGPADNSNDRGAQVRPGLVPAPRGEAVTHPDATRSTRSVEGISVL

SEQ ID NO: 2069 - protein, 353 aa, unidentified
MKQTKTLKVRVKDKHATQLNRMARSVNFVWNYLNELSSRSIRERGVFLSAYDMDRYTKGASKDLNLHSQTLQEVSREYATRRQQFKKQRLAWRKSRGTRRSLGWVPFKTGAAKWKNGQVFYNGSYFKVWDSYGLSQHRFRSGSFNEDTRGRWYFNVVVEVEVQPSTGQGAVGIDLGLKDVATCSDGEKLENGQFYRDLEARLATAQRARNKRRVKAIHAKITNRRKDVLHKFSRRLVNQHGEIYVGDVSPLKLAKTRMAKSVLDAGWGQLKTMLEYKCDHAGIVFQEVREAYTSRTCSSCGSLSGPQGVSGLRVRDWECVECGALHDRDVNAARNILSLAAGHRRPEVEISAL

SEQ ID NO: 2070 - protein, 407 aa, unidentified
MQLRYAFRLYPDTVQQAALAKAFGCARVVFNDAVRAREDARKAGQPVPTAGELSRKLITEAKRTAGRSWLGEVSAVVLQQSLRDAEAAYRNFFASLKGARKGPRLGAPRLKSRKDARQSIRFTANARWSITDRGRLNLPKIGAVKVKWSRTLPATPSSVTVVKDAAGRFFASFVIDTDPDADAMRMPATDRTVGIDLGLTHFAVLSDGTKIDSPRFLRRAEKKLNKAQRELSRKQKGSKNRARARLKVARAHAKVADARREFHHQLSTRLISENQGIAVEDLSVAGLGRTRLAKSVHDAGWSSFIGMLTYKAERYGRTLVKIGRFEPTSRTCHACGVVDGPKPLNVREWTCSACGRVHDRDHNAAINVKTAAGLAVSACGAPVRPGAIPAQREETGSHGFPTGNRAA

SEQ ID NO: 2071 - protein, 355 aa, unidentified
MKTLKLRIKDKHCKVLDQLASEVNFVWNYVNDLCFKHLQRKQQFFSAYDIAKYTKGASKECNLHSQTIQAVTEELVTRRKQFTKSKLRWRVSNKKSARRSLGWIPFKKVAIKYADGYVQYGKHQFKLWDSYGLSKYSIKTGSFVEDSRGRWYVCLVVDSPKQNKPTATKAVGIDLGLKDIATCSDGTVISNPKFYRKYEQKLGIAQRARNKKRVRALHAKIANCRKDHLHKASTQLVKDNALIVVGDLSANKLVKTKMAKSILDTGFSTLKTMLKYKCENAGVMFEEVNERFTTQTCSSCGAITASSPKGRADLRIRVWECECGSVNQRDLNSAKNILALGHKRLAVGITLLSGG

SEQ ID NO: 2072 - protein, 370 aa, unidentified
MEYSYKFRIYPNTTQTQLIQRTFGCCRFVWNHYLALRKEAYERDGKTMNYNACSGDMTQLKKVLPWLKEVDATALQSSLRDLDTAYQNFFRRVKQGQKPGYPRFKSKHDHRRRYKSKCIGTNIRVLDKTVQLPKLGLVKCRVSKAVKGRILSATVSQNPSGKYFVALCCTDVEIEPLPSTGAAVGLDMGLKAFAITSDGTEYPNHKYLTKNQKKLAKLQRQLSRKSKGSNRREKARIKVARLHERVANQRADMLHKLSTEFVRQYDVIALEDLAPSNMVKNHSLARSISDASWGEFRRQLEYKAAWYGKQVVTADRFFPSSQLCSACGAQWAGTKDLSVRKWTCPVCGVAHDRDINAAKNILKKGLRLLA

SEQ ID NO: 2073 - protein, 374 aa, unidentified
MEYSYKFRLYPNSEQCAMIARTFGCARFVYNHFLNLRKETYKASDETINYVKSSAMLTQLKKELIWLKEVDSIPLQESLRDLDFAYQGFFRRVKKGEKPGFPRFKSKRDRRKSYKTKQHVANGKPTIYVDGKHIRLPKLGLVKCRISKEVKGRILSATVSQNPSGKYFVALCCTDVEIAPLPSTGAVVGLDMGLKSFAITSDGVDYENHRHLCKSQKKLARLQRQLSRKTKGSNRREKARVKVARLHEKVTNQRNDTLHKLSTALVRDYDLISIEDLAPKNMVKNHKLARSISDASWGEFRRQLEYKAAWYGKAVVRVDKFYPSSQLCSACGAQWPGTKDLSVRDWVCPVCGAIHDRDINAAKNILNEGLRLLA

SEQ ID NO: 2074 - protein, 355 aa, unidentified
MKTLKLRIKDKHCKVLDQLASEVNFVWNYVNDLCCKHLKRKQQFFSAYDIAKYTKGASKECNLHSQTIQAVTEELVTRRKQFKKSKLRWRVSNKKSARRSLGWIPFKKVAIKYADGYIQYDKHQFKLWDSYGLSKYSIKTGSFVEDSRGRWYVCLVVDSPKQDKPTATKAVGIDLGLKDIATCSDGTVISNPKFYRKYEQKLGIAQRARNKKRVRALHAKIANCRKDHLHKASTQLVKDNALIVVGDLSANKLVKTKMAKSVLDTGFSALKTMLKYKCENAGVMFEEVNERFTTQTCSSCGAITASSPKDRADLRIRVWECECGSVNQRDLNSAKNILALGHKRLAVGISLLSGG

SEQ ID NO: 2075 - protein, 355 aa, unidentified
MKTLKLRIKDKHCKVLDQLASEVNFVWNYVNDLCFKHLQRKQQFFSAYDIAKYTKGASKECNLHSQTIQAVTEELVTRRKQFKKSKLRWRVSNKKSARRSLGWIPFKKVAIKYADGYVQYDKHQFKLWDSYGLSKYSIKTGSFVEDSRGRWYVCLVVDSPKQDKPTATKAVGIDLGLKDIATCSDGTVISNPKFYRKYEQKLGIAQRARNKKRVRALHAKIANCRKDHLHKASTQLVKDNALIVVGDLSANKLVKTKMAKSVLDTGFSALKTMLKYKCENAGGMFEEVNERFTTQTCSSCGAITASSPKDRADLRIRVWECECGSVNQRDLNSAKNILALGHKRLAVGISLLSGG

SEQ ID NO: 2076 - protein, 353 aa, unidentified
MKQTKTLKVRVKDKHATRLNRMARSVNFVWNYLNELSSRSIRERGVFLSAYDMDRYTKGASKDLNLHSQTLQEVSREYATRRQQFKKQRLAWRKSRGTRRSLGWVPFKTGAAKWKNGQVFYNGSYFKVWDSYGLSQHRFRSGSFNEDTRGRWYFNVVVEVEVQPSTGQGAVGIDLGLKDVATCSDGEKLENGQFYRDLEARLATAQRARNKRRVKAIHAKIKNRRKDVLHKFSRRLVDQHGEIYVGDVSPLKLAKTRMAKSVLDAGWGQLKTMLEYKCDHAGIVFQEVREAYTSRTCSSCGSLSGPQGVSGLRVRDWECVECGALHDRDVNAARNILSLAAGHRRPEVEISAL

SEQ ID NO: 2077 - protein, 404 aa, unidentified
MKRLQAFKFQLRPGGQQERQMRLFAGACRFVFNRALALQNENYEAGNKYIPYTKMASWLVEWKKDTETEWLKDSPSQPLQQSLKDLERAYKNFFQKRAAFPRFKKRGQNDAFRYPQGVKLDQENSRIFLPKLGWVRYRNSRQVTGIVKNVTVSQSCGKWYISIQTESEVSTPVHPSASMVGLDAGVARLATLSDGTVFEPVNSFQKNQKKLARLQRQLSRKVRFSNNWQKQKRKIQQLHSRIANIRRDYLHKVTTIISKNHAMIVIEDLKVKHMSKSAAGTISQPGRNVRAKSGLNRSILDQGWYEMRRQLEYKQLWHGGQVLAVPTAYTSQRCACCGHTAKENRLSQSKFRCQVCGYTANADVNGARNILAAGHAVLACGGMVQSGRPLKQEPTEMIQATALT

SEQ ID NO: 2078 - protein, 594 aa, unidentified
MPGTEVLRAYRFTLDPSDAERAALSRYAGACRWAYNYAVAKKTQAHQAWADRRAAYLEAGLSEAEAKERIKADGAELTDRIKVWDHHRKSLTLILAGKPPLPAMQPPAGQEALVRQLAAARADAAGTSRERELLTEGRATVNALKAKAFSAGFRTPNATDTSALWRMERDLPKEEGGSPWWREVNVYCFTSGFDRAQVAWKYWQDSLAGRRAGQRHGYPRFKKKGHAESFALFHDVKRPIIRLEGYRRLVMPGLGSIRIHDSGKRLARLVERGQAVIQSVTVTRGGHRWYASVLAKVQQDAPVLWEHVHDDGIRTPYLSRAQAEKAAENGGRVEQIGRPTARQRAGGLVGVDLGSRNLAALSSPLDPADPADPALVQYPRLLADSLAKLSKAQRAMSRCQQGSGRWRKATARVSRVHQQITVRRASFLHGLSKKLATGFTHVAIEDLDLTALTTSAKGTRDKPGKNVKAKARLNRHLLDAGLGSLRKKLAYKTAWYGSQLVVLDQGEPVIATCAKCKERNPSSDPSCSQFHCPSCGAAVHRHENSAANIVDAARRQLKTVASDRGETQNARRAPASPRVRKAPGQGALKREDTG

SEQ ID NO: 2079 - protein, 402 aa, unidentified
MKRLQAFKFQLRPGGQQERQMRLFAGACRFVFNRALALQNENYEAGNKYIPYTKMASWLVEWKKDTETEWLKDSPSQPLQQSLKDLERAYKNFFQKRAAFPRFKKRGQNDAFRYPQGVKLDQENSRIFLPKLGWVRYRNSRQVTGIVKNVTVSQSCGKWYISIQTESEVSTPVHPSASMVGLDAGVARLATLSDGTVFEPVNSFQKNQKKLARLQRQLSRKVRFSNNWQKQKRKIQQLHSRIANIRRDYLHKVTTIISKNHAMIVIEDLKVKHMSKSAAGTISQPGRNVRAKSGLNRSILDQGWYEMRRQLEYKQLWHGGQVLAVPPAYTSQRCACCGHTAKENRLSQSKFRCQVCGYTANADVNGARNILAAGHAVLACGGMVQSGRPLKQEPTEMIQATA

SEQ ID NO: 2080 - protein, 434 aa, unidentified
MLEAVKVTLDPTPRQERLLESHAGAARFAYNAGLAHVKAMLERQEKLEWSYYALRRWWNANKDALAVSMETGKPWWPENSKESYNSGLESLADALKNFSKSRKGQRKGRRMGFPRFKSKDRAVPGFAYTTGSFGLIDCDPYALRLPKIGRVHCMENVSKRVDGAKVLRMSVSKRGGRWQASLTVERADLPVPSPPKGGSVGIDLGVKELATLSDGTIIHNPHALKSNLGRLKKAQRNLSRKRKGSNRRREARTRVARLHARVADLRRDLLDKTTTMLARAYADISIEDLNVAGMVRNHRLARSVEDAAFAEFRRQLEYKTARTGARLHVIDRWHPSSKTCSNCGTVKAKLSLSERVYHCEECGLVIDRDLNAAINIQVAGSAPETLNARGGSGKRTDASRRATRHPVKREPSDGVSRVSLGAGLGNEAMQMTSL

SEQ ID NO: 2081 - protein, 434 aa, unidentified
MLEAVKVALDPTPRQERLLESHAGAARFAYNAGLAHVKAMLGRQEKPEWSYYALRRWWNANKDALAVSMETGKPWWPENSKESYNSGLESLADALRNFSKSRKGQRKGRRMGFPRFKSKDRAVPGFAYTTGSFGLIDCDPYALRLPKIGRVHCMENVSKRVNGAKVLRMSVSKRGGRWQASLTVERADLPVPSPPKGGSVGIDLGVKELATLSDGTIIHNPHALKSNLGRLKKAQRNLSRKRKGSNRRRKARTRVARLHARVADLRRDLLDKTTTMLARAYADIGIEDLNVAGMVRNHRLARSVEDAAFAEFRRQLEYKTARTGARLHVIDRWYPSSKTCSNCGTVKAKLSLSERVYHCEECGLVIDRDLNAAINIQVAGSAPETLNARGGSGRRTDASRRATRHPVKREPSDGISRVRLGAGLGNEAMQMTSL

SEQ ID NO: 2082 - protein, 433 aa, unidentified
MLEAVKVALDPTPVQERLMLSHAGAARFAYNAGLAHGKETIETGGKLEWTLYALRRWWNANKGTLAVDVDGTPWWRENSKEAYNSGLEALSDALSNWSKSRKGERKGRRVGFPRFKAKDRETPRFAYTTGSFGLVRADPKALRLPRIGRVHCMENVAGRVDGARALRMTVSCRAGRWHAALTVERADPTARRTPREGAVGIDLGVNSLATLSDGTTIANPHTLKANERRLKRAQRSLSRRQPGSHRRAHARERVVRLHARVANQRRDMLDKLTTWLADTYSDISIEDLNVAGMVKNHRLAQSIQDAAFAEFQRQLTYKTARTGAGLHIIGRWYPSSKTCSNCGTVKTKLSLSERVYHCEECGLSIDRDLNAAVNIQVAGSAPETLNAHGGDGRRNDASRRATQTPVKCEPSSHASGVRLGADDRKTVLQTKTN

SEQ ID NO: 2083 - protein, 434 aa, unidentified
MLEAVKVALDPTPRQERLLESHAGAARFAYNAGLAHVKDMLERGDKPEWSYYGLRRWWNQAKNTLAVDETTGETWWSENSKETYNSGLESLADALKNFSKSRKGQRKGRRMGFPRFKSKDKAVPRFAYTTGSFGLVDCDPHALRLPKIGRVHCMENVSKRINGAKVLRMSVSKRGGRWQASLTVERADLPIPSSPKGGSVGIDLGVKELATLSDGTVIHNPHALKSNLRRLRKAQRNLSRKRKGSNRRRKARAQVARLYTRVANLRSDALNKTTTMLAHAYADISIEDLNVAGMVGNHRLAQSIQDAAFAEFRRQLTYKTARTGARLHVIDRWYPSSKTCSNCGTVKTKLSLSERVYHCDECGLVIDRDVNAAINIQVAGSAPETLNARGGSVRQARPKGETMRHPAKREPSGGESRVRLGAGLGNEAMQMTSL

SEQ ID NO: 2084 - protein, 352 aa, unidentified
MNHTKTLQVRVRDKHAPLLRQMARSVNLVWNYLNELSHRSIRERGVFLSAFDLHPYTKGAGKELGLHSQTLQYVAAEYVTRRKQSRKARLNWRKSGGVRRSLGWVPFNTGAASWKNGQVYHNGHYFKVWDSYGLAQYRLRSGSFCEDARGRWYFNVVVELETQLSTGQGAVGIDLGLKDVATCSDGQRLENGRFYRDLEPKLASAQRAGKKARVRAIHAKIANRRKDALHKFSRSLVERCNTIIVGDVSPQKLVRTRMAKSVLDAGWGQLKTMLAYKCALAGIVFRVVNEAYTTQTCSCCGALPASRPRGIAGLGIREWICECGVTHDRDVNAARNILALGHERPVEGIPSA

SEQ ID NO: 2085 - protein, 352 aa, unidentified
MKHIKTLQVRVRDKHAPLLRQMARQVNFVWNYLNELSHRSIRERGVFLSAFDLHPYTKGAGKELGLHSQTLQCVAAEYVTRRKQFRKARLNWRKSGGVRRSLGWVPFNTAAASWKNGQVYHNGHYFKVWDSYGLAQYRLRSGSFSEDARGRWYFNVVVELETQLSTGQGAVGIDLGLKDVATCSDGQRLENGRFYRDLEPKLASAQRAGKKARVRAIHAKIANRRKDALHKFSRSLVERCNMIIVGDVSPQKLVRTRMAKSVLDAGWGQLKTMLAYKCAHAGIVFRVVNEAYTTQTCSCCGALPASRPRGIAGLGIREWICECGVTHDRDVNAARNILALGHGRPVEGIPGA

SEQ ID NO: 2086 - protein, 355 aa, unidentified
MKTLKLRIKDRHYKALDQLASEVNFVWNYVNDLSFKHLKRKGEFLSSYDIDKYTKGASKECGLHSQIIQAISAELVTRRKQFKKAKLKWRVSNKKLARRSLGWIPFKKVAIKYADGFVQYGKHQFKIWDSYGLSQYSIKTGSFVEDARGRWYVCLVVDSPKTEKSTGTKAIGIDLGLKDIATCSDGTVISNPKFYRQYEQKLGIAQRAKNKKCVRALHAKIANSRKDHLHKASTELVRENALIVVGDLSAKKLVKTKMAKSVLDASFSALKTMLKYKCENAGVMFEEVNERFTTQICSCCGEITASSPKGRADLRIRVWECECGSVNQRDLNSAKNILALGHKRLEVGITLLSGG

SEQ ID NO: 2087 - protein, 355 aa, unidentified
MKTLKLRIKDRHYKALDQLASEVNFVWNYVNDLSFKHLKRKGEFLSSYDIDKYTKGASKECGLHSQTIQAISAELVTRRKQFKKAKLKWRASNKKSARRSLGWIPFKKVAIKYADGFVQYGKHQFKIWDSYGLSQYSIKTGSFVEDARGRWYVCLVVDSPKTEKSTGTKAIGIDLGLKDIATCSDGTVISNPKFYRQYEQKLGIAQRAKNKKCVRALHAKIANSRKDHLHKASTELVRENALIVVGDLSAKKLVKTKMAKSVLDASFSALKTMLKYKCENAGVMFEEVNERFTTQICSCCGEITAGSPKGRADLRIRVWECECGSVNQRDLNSAKNILALGHKRLEVGITLLSGG

SEQ ID NO: 2088 - protein, 352 aa, unidentified
MKTLKLRIKDKHSKMLDQLASEVNFVWNYVNDLSFKHLKRKGEFLSAYDIAKYTKGTSKECHLHSQTIQAVTEELVTRRKQFKKSKLRWRVSNKKSAKRSLGWIPFKKVAVKHADGYVQYGKHQFKLWDSYGLSNYSIKTGSFVEDARGRWYVCLVVDSPKTEKSTGTKAIGIDLGLKDIATCSDGTVISNPKFYRQYEQKLGIAQRAKNKKRVRALHAKIANSRKDHLHKASTELVRENALIVVGDLNANKLVKTKMAKSVLDTGFSALKTMLKYKCENAGVLFEEVNERFTTQICSSCGEITASSPKGRTDLRIRVWECECGSVNQRDLNSAKNILALGHKRLAVGITLL

SEQ ID NO: 2089 - protein, 407 aa, unidentified
MQLRYAFRLYPDATQQAALARAFGCARVVFNDAVRAREDARKAGQPFPTAGQLSTRLITEAKRTAERSWLGEVSAVVLQQSLRDAESAYRNFFASLKGARKGPKTGPPRFKSRKDARQSVRFTANARWSITGSGRLSLPKIGAVKVKWSRTLPAVPTSVTVIRDAAGRYFASFVIDTDPDADKARMPETDRIIGIDLGLTHFAVLSDGTKIDSPRFLRRAEKKLKKTQKELSRKQKGSKNRAKARLKVARAHAKVADARREFHHQLSTKLISENQGIAVEDLSVAGLARTRLAKSVHDAGWSSFISMLEYKAERYGRTLVKIGRFTPTSQTCHACGAVDGPKPLNIREWTCAACGTVHDRDINAAINVKTAAGLAVSACGAPVRPGAIPTQREETGSHGFPTGNRAA

SEQ ID NO: 2090 - protein, 385 aa, unidentified
MAKKRKSEPLLHQAYKFRIYPTKEQATLIHKSIGCSRFVFNHFLAKWEDTYQETGKGLTYNTCSKFLTALKIELEWLKEVDSTSLQRALKNVDDAFKRFFKKQNDRPRFKSRKNPVQSYTSQCNHPKKGKPTIEVLENKIKLPKLGWVRFAKSREVEGKILSATIRRSPSGKYFVSVLCEMNHCPYVPATNETVGIDLGLKDFTILSDGRKENTPTYFRKYEKQLAKAQRIMSRRTKGGSNWHKARIKVARIHEKITHARHDFLHKLSTKLIHENQVISMEDLQVKNMVKNHNLAKSITDASWSEFVSMLEYKAKWHGRTLVKVGKTFPSSQLCSGCGYRNKEVKKLNLREWICPECNQHHDRDMNAAKNILHEGLRLISVGLTV

SEQ ID NO: 2091 - protein, 402 aa, unidentified
MKRLQAFKFQLRPGDQQECEMRCFAGACRFVFNRALALQNENHEAGNKYIPYGKMASWLVEWKNATETQWLKDSPSQPLQQSLKDLERAYKNFFRKRAAFPRFKKRGQNDAFRYPQGVKLDQENSRIFLPKLGWMRYRNSRQVTGVVKNVTVSQSCGKWYISIQTESEVSTPVHPSASMIGLDAGVAKLATLSDGTVFGPVNSFQKNQKTLARLQRQLSRKVKFSNNWQKQKRKIQRLHSRIANIRRDYLHKVTTTVSKNHAMIVIEDLKVSNMSKSAAGTVSQPGRNVRAKSGLNRSILDQGWYEMRRQLEYKQLWSGGQVLAVPPAYTSQRCACCGHTAKENRLSQSQFRCQVCGYTANADVNGARNILAAGHAVLACGEMVQSGRSLKQEPTEMIQATA

SEQ ID NO: 2092 - protein, 411 aa, unidentified
MQLRYNFRVYPTPGQQIELARAFGCARVVFNDGLRLRQQAWEAGEKHISDGELSRRLITEAKLTPERAWLGEVSAVVLQQALADLNTAYRNFFASVTGKRKGRTLAPPRFRSRKDNRQAIRFTKNSRFKVLDNGRLRLPKIGDLAVRWSRSLPSEPSSVAIVKDAAGRYFASFVVQTPQDETLPPVDSEVGIDLGLTHFAVMSDGTKIAAPRFLRRAARKLKRLQQALARTQKGSANRTKAVVKVARAHARVADTRRDWQHKLSTAIIRDNQAVYVEDLCVTGLGRTRLAKSVHDAGWASFTAMLEYKAARYGRTFARVDRFFPSTRMCSACRRINDKMALTVRAWDCLCGSHHDRDVNAAKNVLAAGQADNSNDRGAQVRPGLVPAPRGEAVTHPGAACSTRSAEGISVL

SEQ ID NO: 2093 - protein, 366 aa, unidentified
MLRAYRYRIYPTKSQVTLLEQTLEICRWVYNDTLALRKDAWEQEQRSIPLFETNKILTQWKRERPELKQVYAQTLQNVQVRVDLAFKAFFRRAKAGENPGYPRFKGKGRYDSFTYPQGQKGGFKLNGDHLHLSKIGDVKIVLHRPVEGTIKTLTVRRSSTGKWYACFSVEYDPTPAPQKETVVGIDVGLESFATLSNGEKIENPRFFRTDEKALAKAQRKLSKLEKGTPERKKARKIVAHVHERIANRRLNFAHQTSRQLVDRFGTIVFEDLNITHMQKNHHLAKSIADVAWNLFITITESKAEDAGSRVILVNPRNTSQICSRCGMIVAKTLSDRVHSCPHCGLVMDRDQNAAINIMRLGLQSQG

SEQ ID NO: 2094 - protein, 363 aa, unidentified
MLKAYRYRLYPTKSQALLLEQTLEMCRWVYNDTLALRKKALEQEQHSISLYETNKILTQWKKERPDLNQVHSQVLQNVQMRVDLAFKAYFRRVKAGENPGYPRFKGKGRYDSITYPQYGFKLDGDRLHLSKIGDVRIVLHRPVEGTIKTLTIRRSSTGKWYACFSVEYDPTPAPQKETTVGIDVGLESFATLSSGEKIENPRFFRTDEKALAKAQRKLSKAEKGTLERKKARKIVAHVHERIANRRLNFAHQISRQLVDRFGTIVFEDLNVKNMQKNHYLAKSIADVAWNMFITITESKAEDAGSRVILVNPRNTSQMCSRCGMIVAKTLSDRVHSCPHCGLVMDRDQNAAINIMRLGLQSQG

SEQ ID NO: 2095 - protein, 411 aa, unidentified
MQLRYRFRVYPTPGQQIALAKAFGCARVVFNDGLRLRQCAREAGEKYVSDGELSRRVITEAKLMPQRAWLGEVSAVVLQQALADLNTAYRNFFASVTGRRKGRMVAPPRFRSRKDNRQAIRFTRNARFKVLDNGRLRLPKIGDLDVRWSRTLPSDPSSVAIIRDAAGRYFASFVVTRAEDEALPELDSEVGIDLGLTHFAVLSDGTKVAAPKFLRRAARKLKRLQQALSRKQKGSANRKKAVMKVARAHARVADTRRDWQHKLSTAIIRDNQAVYVEDLCVAGLGRTRLAKSVHDAGWAGFTGMLEYKAARYGRTFARVDRFFPSTRMCSQCGRLTEKMTLNVRSWDCPCGATHDRDVNAAVNVLAAGQADNSNDRGARVRPGPVPAPRGEAVTHPDAARSTRSVEGTSVL

SEQ ID NO: 2096 - protein, 352 aa, unidentified
MKTLKLRIKDKHCKALDQLASEVNFVWNYVNDLSFKHLKRTGDFFSAFDMTQYTKGTSKLCGLHSQTVQGITEEYVDKRRQHKKAKLKWRVSNKKSARRSLGWIPFKKVAIKYADGYVQYGKQKFKLWDSYGISKYSVRTGSFVEDSRGRWYVCLVVDSPKQDKPTATKAIGIDLGLKDVATCSDGTVISNPKFYRNYEQKLGIAQRARNKKRVRALHAKIANCRKDHLHKASTLLVKENALIVVGDLSASKLVKTKMAKSVLDTGFSALKTMLKYKCENAGVLFEEVSEKFTTQICSCCGEITSSSPKGRTDLRIRVWECECGSINHRDLNSAKNILALGHERLAVGIRLL

SEQ ID NO: 2097 - protein, 355 aa, unidentified
MKTLKLRIKDKHCKVLDQLASEVNFVWNYVNDLSFKHLKRTGDFFSAFDMAKYTKGTSKLCGLHSQTVDAIREEYAGKREQFRKAKLKWRVSNKKSARRSLGWIPFKKVAIKYADGYVQYGKHQFKLWDSYGIGKYSVRTGSFVEDSRGRWYVCLVVDSTKADKPTATKAIGIDLGLKDIATCSDGTVISNPKFYRKYEKKLGIAQRARNKKRVRALHAKIANSRKDHLHKASTLLVKENALIVVGDLSAKKLVKTKMAKSVLDTGFSALKTILKYKCENAGVLFEEVSERFTTQICSCCGEITSSSPQGRTDLRIRVWECECGSINHRDLNSAKNILALGHKRLAVGITLLSGG

SEQ ID NO: 2098 - protein, 352 aa, unidentified
MKTLKLRIKDKHCKVLEQLASEVNFVWNYVNDLSSKHLKRTGDFFSAFDMTQYTKGTSKLCGLHSQTVQGITEEYVDKRRQHKKAKLKWRVSNKKSARRSLGWIPFKKVAIKYADGYVQYGKQKFKLWDSYGISKYSVRTGSFVEDSRGRWYVCLVVDSPKQDKPTATKAIGIDLGLKDVATCSDGTVISNPKFYRNYEQKLGIAQRARNKKRVRALHAKIANCRKDHLHKASTLLVKENALIVVGDLSASKLVKTKMAKSVLDTGFSALKTMLKYKCENAGVLFEEVSEKFTTQICSCCGEITSSSPKGRTDLRIRVWECECGSINHRDLNSAKNILALGHERLAVGIRLL

SEQ ID NO: 2099 - protein, 355 aa, unidentified
MKTLKLRIKDKHCKVLDQLASEVNFVWNYVNDLCFKHLQRKQQFFSAYDIAKYTKGASKECNLHSQTIQAVTEELVTRRKQFKKSKLRWRVSNKKSARRSLGWIPFKKVAIKYADGYVQYGKHQFKLWDSYGLSKYSIKTGSFVEDSRGRWYVCLVVDSPKQNKPTATKAVGIDLGLKDIATCSDGTIISNPKFYHQYEQKLGIAQRARNKKRVRALHAKIANCRKDHLHKASTQLVKDNALIVVGDLSASKLVKTKMAKSVLDTGFSALKTMLKYKCENAGVMFEEVNERFTTQTCSSCGAITASSPRGRADLRIRVWECECGSVNQRDLNSAKNILALGHKRLAVGITLLSGG

SEQ ID NO: 2100 - protein, 494 aa, unidentified
MAAQEVLRAYRFALDPTDAQLESLARYAGAARWAFNHALAVKQTAHHLWRTEVAALTKSGVAEPEARKRIKISVPSKPAIQKAWVAERGDSRHDADGSCPWWWEVNNYCFQSGFVDADTAWRNWLSSLRGDRAGRRVGYPRFKKKGRCRDSFRLHHDVKRPTIRLVGYRRLNLPKLGEVRIHDSGKRLAGLVAGGRAVIQSVTVSRGGSRWYASVLCKVQQEVPEKPTARQRVGGLVGVDLGSAYLAVLSDQLRRDDPDSMVVEHPRHLKKSLGRLVKAQRAVARTVNGSARRAKAARRVARIHHQVAERRATDVHALTKRLTCSFAHVVVENLDIKGMVARAERVEGTPGGSRRGGKIAATFNRHLMDASLGEVRRQLSYKAPWYGAVFVTLAPGEPVNQVCSRCGTQNSRVTPADSKFTCAECGLVIGRQHNAARNIVRAGRRRLADVPSGSGETENARGASVRPHTRKGAGRGALKREDTGRQPPGATPRE

SEQ ID NO: 2101 - protein, 407 aa, unidentified
MQLRYAFRLYPDAGQQTALARAFGCARVVFNDAVRAREDARKAGQPFPTVGELSTRLITEAKRTAERSWLGEVSAVVLQQSLRDAESAYRNFFASLKGTRKGPKTGPPRFKSRKDKRQSIRFTANARWNITSSGRLSLPKIGAVKVKWSRTLPTTPTSVTVIKDAAGRYFGSFVIDTDPAADATRMPATDQTIGIDLGLTHFAVLSDGTKIDSPRFLRRAEKKLKKAQQELSRTQKGSKNREKARLKVARAHAKVTDARREFHHQLSTKLICENQGIAVEDLSVAGLARTKLAKSVHDAGWSSFLSMLEYKAIRYGRTLVKIGRFEPTSQTCSTCGVKDGPKPLNVREWTCTACGTVHDRDTNAAINVKTAAGLAVSACGAPVRPGAVPAQREETGSHGFPTEPSAA

SEQ ID NO: 2102 - protein, 353 aa, unidentified
MKQTKTLKVRVKDRHAAHLSRMARSVNFAWNYLNELSARSIREKGLFLSAYDMDRYTKGAGKDLGLHSQTLQEVSREYATRRKQFRKTRLAWRKSRGVRRSLGWVPFKSGATKWRSGQVTFNGQHFKVWDSVGLSQYKFRSGSFNEDARGRWYFNVVVEVDVQPSAGQGAIGIDLGLKDVATCSDGVKLENGRFYRDLEDTLATAQRARNKRRVKAIHAKIKNRRKDALHKFSRRLVDQHGEIVVGDVSSTKLAKTRLAKSVLDAGWGQLKTMLEYKCDHAGIVFREVREAYTTRTCSSCGSLSGPRGVNGLRVRDWECGECGALHDRDVNAARNILSLGAGRCPPAVGITSL

SEQ ID NO: 2103 - protein, 603 aa, unidentified
MSVQVVERAFRFCLDVSRAEIRTLERHCGAARWAFNFAHAQFLAQHTVFVQRKQSAAEGLSGRGGEGMLSDLTKAQRREVYRQAVAMVGAENRVLCAELKVVDQHRSRVTHKGKAFLEPGDVPAVGASRLELELYARRVELAALQQANPAEYTVAKRGELTRVRPVLLEMKQELAARGAYRPTSFDIQSIWRARRDLPRDAGGSPWWPEVAIGAFICGFDRAARAWQSWMDSAADRRAGARVGLPRYKRKGQCLDSFTLMNPRRAVIHLEDSRHLRLTGIGTLRLHQPARRLRRLLRAGVADLTSVTVNRSGDRWYVNIQTKVHQIIPAKPTARQRAAGLVAVDLGSNPLAVLSAPLDVCGGGTEIAARKPLIVQEKRLAHLQRAFTRTVKGSKRRHKAARRLGRVHAQIARQRSGFLHTVSKQLATRCAHIAIEDLDLMRLTASARGTVQEPGRNVKVTARFNRHLLDAGLAELRRQLAYKTTWYGSSLIVLDRGEATATKCSRCGERNPSSKVGSKRFTCPHCGLDVNRRVNAARSIYKAACQAASASVACGERDTQNALRDERPPRVGDGAGPSSLKRPPSPEATGGRPSSRVDRVTPAE

SEQ ID NO: 2104 - protein, 383 aa, unidentified
MQLRYNVRLYPSPPQRQALARAFGCARTVYNDGLRARQQARAHGLPYVSDADLSKQVITAAKTTPERAWLGEVSAVVLQQALADLNTAFRNFFASVSGRRKGPKIAAPRFRSKRDSRQAIRFTKNACFSITAGGRLRLPKIGDVDVRWSRDLPSEPSSVTVVKDASGRYFASFVVQTSDEPLPETASEVGIDLGLAHFAVLSDGRKIDNPRFLRRAERRLKKAQQALSRKAKGSANRKKAVVKVARAHAKVADARRDFAHKLSTQIIRENQAVYVEDLCVKGLARTRLAKSVHDAGWGRFTAMLAYKAARYGRALVKIDRWFPSSKKCGACGVVAESMPLDVRTWTCACGAVHNRDVNAAINILAAGRAERLNAYGGSVRPAA

SEQ ID NO: 2105 - protein, 383 aa, unidentified
MQLRYNFRLYPTPGQRQALARAFGCARTVYNDGLRTRQEAHEQGLPYVSDADLSKRVITQAKTTSERAWLSEVSAVVLQQALADLNTAYRNFFASITGKRKGPQAAPPRFRSKRDDRQAIRFTKNARFAVTAGGRLRLPKIGDVPVKWSRDLPSEPSSVTVIKNAAGRYFASFVVETSEEPLPESASEVGIDLGLTHFAVLSDGRKIDNPRFLRRAERRLKKAQQALSRKAKGSSNRKKAAAKFAKAHARVADTRRDFAHKLSTQIIRENQAVYVEDLYVKGLARTKLAKSVHDAGWGRFTAMLAYKAAKYGRHLGKIDRWFPSSKRCAACGTLAGSMPLNVRSWACPCGAVHDRDVNAARNILAAGRAERLNACGGTVRPAV

SEQ ID NO: 2106 - protein, 383 aa, unidentified
MQLRYQFRLYPNPGQQQSLARAFGCARVVFNDALRAREEALAAGLPYPSDGDLSKQVITEAKKTSERAWLGEVSAVVLQQALADLNTAYRNFFASVSGKRKGRKVSPPRFRSRKDQRQAVRFTRNARWRITAGGKLCLPKIGDVRVRWSRDLPSAPSSVTVIRDAAGRYFASFVVEMPGEPLPEVAAEVGIDLGLTHFAVLSDGRKITSPKFLRRAERRLRKAQQALSRKQKGSQNRRKAVAKVARLHARVADARRDHHHKLSTRLVRDNQAVYVEDLAVSALARTRLAKSVRDAGWSQFVGMLEYKAGRSGRAFARVDRWFPSSKLCGACGTVAEAMPLNVREWACPCGAVHDRDINAARNILAAGRADRLNACGGTVRPSA

SEQ ID NO: 2107 - protein, 383 aa, unidentified
MQLRYQFRLYPTPGQQQSLARALGCARTVYNDALRARREAHAAGMPYLSDGDLSKLVITEAKKTTERAWLGEVSAVVLQQALADLNTAYRNLFASVSGKRKEGKVAPPRFRSRKDQRQAIRFTRNARFKVTACGKLRLPKIGDVRVRWSRPLPSEPSSVTVIKDAAGRYFASFVVETTDQPLPETTAEVGIDLGLTHFAVLSDGRKITSPRFLRRAERRLRKAQQALSRKQKGSANRKKAAARVARLHARVADARRDHHHKLSTRLVRDNQAVYVEDLAVNGLARTRLAKSVHDAGWSQFVGMLEYKAARYGRTFAQVDRWFPSSKLCGACGTVAQAMPPNVRKWACPCGAVHDRDLNAAKNIPAAGRADRLDACGGTVRPSA

SEQ ID NO: 2108 - protein, 413 aa, unidentified
MVVQLRYRFRVYPTPGQQIALAKAFGCARVVFNDGLRLRQCAREAGEKYVSDGELSRRVITEAKLMPQRAWLGEVSAVVLQQALADLNTAYRNFFASVTGRRKGRMVAPPRFRSRKDNRQAIRFTRNARFKVLDNGRLRLPKIGDLDVRWSRTLPSDPSSVAIIRDAAGRYFASFVVTRAEDEALPELDSEVGIDLGLTHFAVLSDGTKVAAPKFLRRAARKLKRLQQALSRKQKGSANRKKAVMKVARAHARVADTRRDWQHKLSTAIIRDNQAVYVEDLCVAGLGRTRLAKSVHDAGWAGFTGMLEYKAARYGRTFARVDRFFPSTRMCSQCGRLTEKMTLNVRSWDCPCGATHDRDVNAAVNVLAAGQADNSNDRGARVRPGPVPAPRGEAVTHPDAARSTRSVEGTSVL

SEQ ID NO: 2109 - protein, 410 aa, unidentified
MQLRYNFRVTPDASQRTALAQAFGCARVVFNDGLRLRQQAREAGGKYISDGDLSKLVITQAKATEDRAWLGEVSAVVLQQSLADLNIAYRNFFNSLSGKRQGRKVAPPRFRSRKDSRQAIRFTKNSRFKILDNGRLRLPKIGDLAVRWSRTLPSEPSSVTIVKDAAGRYFASFVVQTGEDEGLPPVDTEIGIDLGLTHFAVMSDGTKVTAPKFLRRAARKLKRLQQALCRKTKGSNRRKKAVIKVARAHARVADTRRDWQHKLSTAIIRDNQAVYVEDLCVTGLGRTRLAKSVHDAGWASFTTMLEYKAARYGRTFARVDRFFPSTRMCCDCGRINDKMTLNVREWDCPCGSHHDRDVNAAINIKAAGQADFNDRRAQVRPGLVPAPRNEAVTRQNAARATRSVAGIAVL

SEQ ID NO: 2110 - protein, 383 aa, unidentified
MQLRYNFRLYPAPPQRAALARAFGCARVVFNDGLRARREARAAGLPHLPDGELSKRVITEAKKTPERAWLGEVSAVVLQQALADLNTAYRNLFASLSGTRKGPGIAPPRFRSRKDNRQAIRFTRNARFSITAGGKLRLPKIGDVRVRWSRGLPSEPSSVTVIKDSAGRYFASFVVETADEPLPEAAAEVGIDLGLTHFAVLSDGRKITSPKFLHRVERRLRKAQQALSRKQKGSANRRKAVARVARLHTRVSDARRDYHHKLSTELIRDNQAVYVEDLAVNGLARTRLAKSVHDAGWSQFLAMLEYKAERHGRTFAKVDRWFPSSKLCSECGAVAESMPLNTREWACVCGAVHDRDANAAKNILAAGRAERLNACGGTVRPAA

SEQ ID NO: 2111 - protein, 410 aa, unidentified
MQLRYNFRVTPDAAQRTALAQAFGCARVVFDDGLRLRQQAREAGEKYISDGDLSKLVITQAKATEDRAWLGEVSAVVLQQALADLNIAYRNFFASVTGKRQGRKVAPPRFRSRKDSRQAIRFTKNSRFKILDNDRLRLPKIGDLAVRWSRTLPSEPSSVTIVKDAAGRYFASFVVQTGEDEALPPVDTEIGIDLGLTHFAVMSDGTKVTAPKFLRRAARKLKRLQQALSRKTKGSNRRKKAVIKVARAHARVADTRRDWQHKLSTAIIRDNQAVYVEDLCVAGLGRTRLATSVHDAGWASFTTMLEYKAARYGRTFARVDRFFPSTRMCCDCGRITEKLALNVRAWDCPCGSHHNRDVNAAINIKAAGQADFNDRRAQVRPGLVPAPRSEAVTRQNAARATRSVAGIAVL

SEQ ID NO: 2112 - protein, 518 aa, unidentified
MQAEVLRAFRFTLAPTSGQEEVLLRHAGAARWAFNHALGMKVAAHRQWRAAVEALAEQGVADADARKQVRVPVPTKPTIQKHLNAIKGDSRAGGLPEGVAGPARPCPWWHEVNTHAFQSAFIDADRAWGNWLDSLRGKRAGRRVGYPRFKKKGRSRDAFRLHHDVKKPAIRLTTYRRLRLPTVGEVRLHDSGKRLARLIDRGQAVVQSVTVSRGGSRWYASVLCKVTTELPDRPTRAQRERGRVGVDLGVKHLAVLSQPSISDTPASQFVSNPRHVRRAERRLTKAQRALSRTEKGSARRAKARRRVGRLHHEVAVRRDSALHALTKQLTTRFATVAIEDLNVAGMTRSARGTVATPGSRVRQKAGLNRAILDAAPGELRRQLTYKASWYGCQIAVLDRWWPSSKTCSACGWQNSRLTLADREFHCPDCGLRIDRDLNAARNIAAHAVISGTPPATQVAPGKEETQNARGASVRLPGPRAEKQEAMKREDARPNSQAPPRRSNPPTSSHPHQEQGKLF

SEQ ID NO: 2113 - protein, 375 aa, unidentified
MLKAYKYRIYPNEMQKKQLAKTFGCARFVYNYYLAEKIKLYKDKQESLSKIDCNNHLNRELKKELIWLKEVDKFALTNSIYNLDTAYQHFFRRVKQGKDKTGFPRFKSRHSNRLSYTTNFTNNNIKIDFSDNKIKLPKLKWIESKVHREFDGKIKSANIVQNTSGRYFVSILVDTETKDLPLPKVDKTIGLDLGISNFLIDSDGNTISNPKILYKHERKLAKLQRQLAKKQKTSNNRNKMRIKVARLHEKISDTRRDFLHKLSKQIINENQVIVSEDLNVRGMVRNHKLAKAISDVSWSEFTRQLEYKANWYCRTYVKIDRLFPSSQLCSHCGFKNTKTKSLSVREWTCDNCGNEHDRDINASRNILQEGLRMLA

SEQ ID NO: 2114 - protein, 375 aa, unidentified
MLKAYKYRIYPNEEQKVQLAKTFGCARFVYNYYLAEKIKLYKDKQESLSKIDCNNHLNRELKKELIWLKEVDKFALTNSIYNLDTAYQHFFRRVKQGKDKTGFPRFKSRHSNRLSYTTNFTNNNIKIDFSDNKIKLPKLKWIESKVHREFDGKIKSANIVQNSSGRYYVSILVDTEAKDLPLPKVDKTIGLDLGISNFLIDSDGNTISNPKNLYKHERKLAKLQRQLAKKQKTSNSRNKMRIKVARLHEKISDTRRDFLHKLSKQIINENQIIVSEDLNVRGMVRNHKLAKAISDVAWSEFTRQLEYKANWYCRTYVKIDRLFPSSQLCSHCGFKDTKTKSLSVREWTCDNCGNEHDRDINASRNILQEGLRMLA

SEQ ID NO: 2115 - protein, 375 aa, unidentified
MLKAYKYRIYPNKEQKEQLAKTFGCARFVYNYYLAEKIKLYEDKQESLSKIDCNNHLNRELKKELIWLKEVDKFALTNSIYNLDTAYQHFFRRVKQGKDKTGFPRFKSRHSNRLSYTTNFTNNNIKIDFSDNKIKLPKLKWIEAKVHREFDGKIKSANIVQNSSGRYYVSILVDTEAKDLPLPKVDKTIGLDLGISNFLIDSDGNTISNPKNLHKHERKLAKLQRQLAKKQKTSNNRNKMRIKVARLHEKISDTRRDFLHKLSKQIINENQVIVSEDLNVRGMVRNHKLAKAISDVSWSEFTRQLEYKANWYCRTYVKIDRLFPSSQLCSHCGFKNTKTKSLSVREWTCDNCGNEHNRDINASRNILQEGLRMLA

SEQ ID NO: 2116 - protein, 375 aa, unidentified
MLKAYKYRIYPNKEQKEQLAKTFGCARFVYNYYLAEKIKLYEDKQESLSKIDCNNHLNRELKKELIWLKEVDKFALTNSIYNLDTAYQHFFRRVKQGKDKTGFPRFKSRHSNRLSYTTNFTNNNIKIDFSDNKIKLPKLKWIEAKVHREFDGKIKSANIVQNSSGRYYVSILVDTEAKDLPLPKVDKTIGLDLGISNFLIDSDGNTISNPKNLHKHERKLAKLQRQLAKKQKTSNNRNKMRIKVARLHEKISDTRRDFLHKLSKQIINENQVIVSEDLNVRGMVRNHKLAKAISDVSWSEFTRQLEYKANWYCRTYVKIDRLFPSSQLCSHCGFKNTKTKSLSVREWTCDNCGNEHDRDINASRNILQEGLRVLA

SEQ ID NO: 2117 - protein, 407 aa, unidentified
MQLRYSFRLYPDAGQRIALAKAFGCARVVFNDCVRAREDARTAGRPFPKAGELSKKLITQAKQTAERAWLGEVSAVVLQQSLRDAETAYKNFFASLKGTRKGPKAGSPRFKSRKDARQSIRFTANARWKITDGGRLELPKVGAVKVKWSRALPAIPTSVTVVKDAAGRFFASFVVDTDPAADAGRMPESDRSIGIDLGLTHFAVLSTGEKIDSPRFLRRAEKKLKKAQKNLSRKQKGSRNREKARLRVARAHAKVTDARKEFHHQLSTRLISENQGIAVESLSVTGLARTKLAKSVHDAGWSQFVNMLEYKAARYGRTLIRIGRFEPTSQTCSTCGAVDGPKPLDVREWTCTACGTVHDRDHNAAINVRTAAGLAATACGAPVRPEPVLAQREETGSHGFPTEARAA

SEQ ID NO: 2118 - protein, 407 aa, unidentified
MQLRYSFRVYPDTGQQTALAKAFGCARVVFNDAVRAREDARRSAQPFPTAGHLSRKLITEAKRTAERSWLGEVSAVVLQQSLRDAEAAYKNFFASLKGARKGPKLGPPRFKSRKDARQSIRFTANARWSITDRGRLSLPKIGAVKVKWSRTLPATPTSVTVVKDAAGRYFASFVIDTDPDADAAQMPENDRTIGIDLGLTHFAVLSDGTKIDSPRFLRRAEKKVKKAQKELSRKQKGSKNRDKARLKAARAHAKVADARREFHHQLSTKLISENQGIAVEDLSVAGLARTRLAKSVHDAGWSSFISMLEYKAERYGRTLVRIGRFEPTSQTCSTCGVKDGPKPLNVREWTCTACGTVHDRDTNAAINVKTAAGLAVSACGAPVRPGEIPAQREEAGSHGFPTGNRAA

SEQ ID NO: 2119 - protein, 383 aa, unidentified
MQLRYNFRLYPTPGQCAALARAFGCARTVFNDGLRARQQAHAAGLPHLSDGELSQRVITEAKKTPERAWLGEVSAVVLQQALADLNTAYRNFFASLSGKRKGPSIAPPRFRSRKDNRQAIRFTRNARFSITAGGKLRLPKIGDVTVTWSRRLPSEPSSVTVVKDAAGRYFASFVVDVAAEPLPQTAAEVGIDLGLTHFAVLSDGRKIDNPRFLRRTERRLRKAQQALSRTAKGSNNSKKATVTLACAHARVADARRDFAHKLSTRIIRENQAVVVEDLCVKGLARTRLATSVHDAGWSAFVNMLEYKAARYGRTLVKIDRWFPSSKLCSACGALAGSMPLNVRSWACPCGASHDRDVNAAQNILAAGRAERLNACGGTVRPAA

SEQ ID NO: 2120 - protein, 598 aa, unidentified
MPLIEVVRAYKFTLTPTDAQREDLARHAGACRWAYNYAIARKQAAHRAWTEMRQAHQVAGLDDAQAEALIKQAGSGLTDSITVWDHHRKMLMCLKTGKPVPQTAADFTPPAGQEVLYGRLVAARTAADAGALRAALAEARGAVNALKAQAFAAGFRVPNAMDMAALWRTERDRPREEGGSPWWGEVNVYAFTTGFDRAERAWKNWLDSCSGKRSGRRVGYPRFKRKGRAADSFALYHDVKKPTLRPDGYRRLALSTLGSIRTCESSKWLVRLIDRGTARINSVTISRGAHRWYASVLVTLQQDVPVLWEHTATDGTRSSYLSADEAYAAAKVSGGGTVMQHGQPTRRQRTGGLVGADLGSRHLAVLTSRLDHTDPASTVVAHPRHLKAGMDRLVKAQKQLSRTTKGSRRRQRAADRVARLHHAIKLRRATSIHGLTKALVTRFDMVAIEDLSLVQLTRTPRGTVADPGKNVKVKALFDRHLLDASLGEVRRQLTYKSRWYGSRLIVIDQGTPVASTCAKCGERNPSSKPGQAKFHCISCGHAVDRHENSASNIMKAARRQIAAVASGKGETQNARRAPVSPSAPRGAGRGTLKREGTI

SEQ ID NO: 2121 - protein, 407 aa, unidentified
MQLRYAFRLYPDTGQRTALAKAFGCARVVFNDAVRAREDARKAQQPFPKIGELSTRLITQAKQTTSRSWLGEVSAVVLQQSLRDAETAYRNFFASLKGTRKGPKLGAPRFKSRKDTRQSIRFTANARWSLTESGRLNLPKIGAVKVKWSRTLPATPTSVTVVKDCAGRYFASFVIDTDPQADAERMPATDRTIGIDLGLTHFAVLSDGTKIDSPRFLCRAEKKLKKAQRELSRKQKGSRNRAKARLKVARAHAKVTDARHEFHHQLSTKLISENQGIAVEDLSVTGLARTRLAKSVHDAGWASFINMLRYKAERYGRTLIKIGRFEPTSQTCSTCGVKDGPKALDVREWTCAACGTVHDRDINAAINVKTAAGLAVSACGAPVRPGAIPAQREETGSHGFPTAPCAA

SEQ ID NO: 2122 - protein, 410 aa, unidentified
MAAMQLRYAFRLYPDSGQRIALAKAFGCARVVFNDAVRAREDARKAGEAFPTAGHLSKQLITQAKQTAERCWLGEVSTVVLQQSLRDMEAAYRNFFASLKGERQGAKTGAPRFKSRKDTRQSIRFTANARWSVTESGRLNLPKVGAVKVKWSRTLPQQPSSVTVIKDAAGRYFASFVIDTDPAADATRMPDTDHTIGIDLGLTHFAVLSDGTKIDSPRFLRRAEKKLKKAQRELSRKQKGSNNREKARLKVARAHAQVADARREFHHQLSTQLIRDNQAIGVEDLAVKGLARTRLAKSVHDAGWAHFVHLLEYKAARYGRTLVKIGRFTPTSQVCSECGAKDGPKPLHIRTWTCTACGAVHDRDHNAAKNVRTAAGLAVTACGAQVRPGLVLAQRDEAGSHGFPSEDCAV

SEQ ID NO: 2123 - protein, 407 aa, unidentified
MRLRYGFRLYPTPGQRVALARAFGCARVVFNDAVRAREDARAAGRPFPSAAELSRTLITQARQTAERAWLGEVSAVVLQQSLRDAEAAYRNFFASLKGQRKGPRLGAPKFKSRKDARQSIRFTANARWSITPTGRLNLPKIGEVRVTWSRTLPVVPSSVTVIKDAAGRYFASFVIDTDPAVDLQRMPDAEAGIGIDLGLTHFAVLSDGTKIDSPRFLRRAEKKLKKAQRELSRRQKGSKNREKARRKLARAHAQVTDARREFHHQLSTQLIRENQAVAVEDLAVNGLARTRLAKSVHDAGWSQFVHMLEYKAQRYGRTFVKVGRFEPTSQVCSTCGAKDGPKPLNVREWTCPACGIVHDRDHNAAKNVKQAAGLADSACGAPVRPEPVLAQRDEAGSHGSPPNARAA

SEQ ID NO: 2124 - protein, 407 aa, unidentified
MQLRYAFRLYPEPGQRLALARAFGCARVVYNDAVRAREDARRAGEPFPTAGVLSQKLITQAKQTPGRSWLGEVSAVVLQQSLRDVEAAYRNFFSSRKGTRNGPKLGAPRFKSRKDARQSIRFTANARWSLTPQGRLNLPKIGEVRVTWSRTLPAVPSSVTVIKDAAGRYFASFVIDSDPATDLERMPDNDASVGIDLGLTHFAVLSDGTKIDSPRFLRRAEKKLKKAQRELSRKQKGSKNRNKARLKVARAHAQVADARREFHHQLSTKLIRENQAVAVEDLAVKGLARTRLAKSIHDAGWSKFVNMLAYKAARYGRAFIKIGRFEPTSRVCSTCGANSGPKTLDVREWTCTACGSVHDRDHNAAINVKHAAGLAVSACGAPVGPEPVLAQRDEAGSHGSPPDARAA

SEQ ID NO: 2125 - protein, 407 aa, unidentified
MQLRYAFRLYPDSGQRIALAKAFGCARVVFNDAVRAREDARKAGEAFPTAGHLSKQLITQAKQTAERCWLGEVSTVVLQQSLRDMEAAYRNFFASLKGERQGAKTGAPRFKSRKDTRQSIRFTANARWSVTESGRLNLPKVGAVKVKWSRTLPQQPSSVTVIKDAAGRYFASFVIDTDPAADATRMPDTDHTIGIDLGLTHFAVLSDGTKIDSPRFLRRAEKKLKKAQRELSRKQKGSNNREKARLKVARAHAQVADARREFHHQLSTQLIRDNQAIGVEDLAVKGLARTRLAKSVHDAGWAHFVHLLEYKAARYGRTLVKIGRFTPTSQVCSECGAKDGPKPLHIRTWTCTACGAVHDRDHNAAKNVRTAAGLAVTACGAQVRPGLVLAQRDEAGSHGFPSEDCAV

SEQ ID NO: 2126 - protein, 411 aa, unidentified
MQLRFNYRVYPTPGQQIELARAFGCARVVFNDGLRPRRQARDAHEKYISDSELSQRLITEAKLTPERAWLGEVSAVVLQQALADLNTAYRNFFHSITGKRKGRKVAPPRLRSRKDNQQAIRFTKNSRFKVLDNGRLRLPKVGDLEVRWSRQLPSDPSSVAIIKDAAGRYFASFVVQTGEDETLPPVDSEVGIDLGLTHFAVLSDGTKVAAPKFLRRAARKLKRLQQDLSRKQKGSANRKKAVTKVARAHARVADTRRDWQHKPSTTIIRENQAVYVEDLCVVGLGRTRLAKSVHDAGWAGFTSMVEYKAARYGRTFGRVDRYFPSTRMCSACGRTNDKMALTVRSWDCPCGSHHDRDVNAAKNVLAAGQADNGNDRGAHVRPGLVRAARREAVTHPDAARSTRSVEGISVF

SEQ ID NO: 2127 - protein, 404 aa, unidentified
MQLRFNYRVYPTPGQQIELARAFGCARVVFNDGLRPRRQARDAHEKYISDSELSRRLITEAKLTPERAWLGEVSAVVLQQALADLNTAYRNFFHSITGKRKGRKVAPPRLRSRKDNQQAIRFTKNSRFKVLDNGRLRLPKVGDLEVRWSRQLPSDPSSVAIIKDAAGRYFASFVVQTGEDETLPPVDSEVGIDLGLTHFAVLSDGTKVAAPKFLRRAARKLKRLQQDLSRKQKGSANRKKAVTKVARAHARVADTRRDWQHKLSTTIIRENQAVYVEDLCVVGLGRTRLAKSVHDAGWAGKAARYGRTFGRVDRYFPSTRMCSACGRINDKMALTVRSWDCPCGSHHDRDVNAAKNVLAAGQADNGNDRGAHVRPGLVRAARREAVTHPDAARSTRNVEGISVL

SEQ ID NO: 2128 - protein, 404 aa, unidentified
MQLRFNYRVYPTPGQQIELARAFRCARVVFNDGLRPRRQARDAHEKYISDSELSQRLITEAKLTPERAWLGEVSAVVLQQALADLNTAYRNFFHSITGKRKGRKVAPPRLRSRKDNQQAIRFTKNSRFKVLDNGRLRLPKVGDLEVRWSRQLPSDPSSVAIIKDAAGRYFASFVVQTGEDETLPPVDSEVGIDLGLTHFAVLSDGTKVAAPKFLRRAARKLKRLQQDLSRKQKGSANRKKAVTKVARAHARVADTRRDWQHKPSTTIIRENQAVYVEDLCVVGLGRTRLAKSVHDAGWAGKAARYGRTFGRVDRYFPSTRMCSACGRINDKMALTVRSWDCPCGSHHDRDVNAAKNVLAAGQADNGNDRGAHVRPGLVRAARREAVTHPDAARSTRSVERISVL

SEQ ID NO: 2129 - protein, 407 aa, unidentified
MQLRYAFRLYPDTAQQAALARAFGCARVVFNDAVRAREDARKAGQPFPTAGQLSRKLITEAKRTVERSWLGEVSVVVLQQSLRDAEAAYRNFFRSLKGTREGPKMRAPRLKSRKNTRQSIRFTANARWSITGQGRLNLPKIGAVKVKWSRTLPAAPTSVTVIKDAAGRFFASFVIDTDPVADDARMPDTERTIGIDLGLTHFAVLSDGTKIDSPRFLRRAEKKLKKTQRELSRKQKGSKNRAKARLKVARAHATVADARREFHHQLSTRLISENQGISVEDLSVAGLARTKLAKSVHDAGWSSFVNMLEYKAARYGRTLVKIGRFEPTSQTCSTCGAVDGPKPLNVREWTCTACGTVHDRDTNAAINVKTAAGLAVSACGASVRPGAVPAQREETGSHGLPAGSRAA

SEQ ID NO: 2130 - protein, 407 aa, unidentified
MQLRYAFRVYPDAGQRIALAKAFGCARVVFNDCVRDREDARKAGRPLPRAGELSTRLITEAKRTVERSWLDEVSAVVLQQSLRDAEAAYKNFFASLKGTRKGPKLGAPRFKSRKDARQSIRFTANARWNITDKGRLNLPKIGAVKVKWSRTLPATPTSVTVIKDAAGRFFASFVIDTDPAEDAARMPESDQSIGIDLGLTHFAVLSDGTKIDSPRFLRRAEKKLKKAQRDLSRRQKGSKNREKARLKVARAHAKVTDARKEFHHQLSTRLISENQGIAVEDLSVTGLARTRLAKSVHDAGWTAFVTMLEYKAERYGRTLIKIGRYEPTSQVCSTCGIKDGPKPLHIREWTCTACGTVHDRDHNAALNVKQAAGLAVSACGAPVRPESVLAQREETGSHGFPTGNRAA

SEQ ID NO: 2131 - protein, 355 aa, unidentified
MKQTKTLKVRVKDKHVDQLNRMARNVNFVWNYLNELSSRAIRERGLFLSAYDMHPYTKGAGTDLGLHSQTLQEVAREYTTRRKQFKKSRLAWRKSGGVRRSLGWIPVNTGAAKWKNGQVFHNGTYFKVWDSYGLGQYTFRSGSFNEDARGRWYFNVVVEVNIPPNQAQGEVGIDLGLKDTATCSDGQKLEAGRFYRDLEAKLAAAQRAGNKRRVKAIHARIKNRRKDANHKFSRQLISQYGTIVVGNVSASKLTKTRMAKSVLDAGWYQLKTMLEYKCDHAGTVFKEVNEAYTTQTCSNCGALPRERPKGIAGLGIRDWICSECGASHDRDVNAARNILSLGAGRCPQAVGIPRL

SEQ ID NO: 2132 - protein, 380 aa, unidentified
MLRATKVRIYPTQEQADFLIAQFGAVRFAYNKALHLKSHMYRKHSVTLDPKKDIKPLLAVAKKSRKYHWLKQYDSIALQQSVINLHQAFDNFFNPKLKAKYPQFKRRHGKQSSYHCVGVKVLDGAIKLPKMKPVEANIHREIVGTVKSITVSMSKTGKFYASILADDGVDAPSPIHTVSKVTGIDLGLSHFAIESNGRKTANPRFVKRAEKNLRRKQRQLSRKAKGSANRAKARLRVAKCHEKVANARADFQHKLSRTLVDENQAVIVETLKSANMMKNRKLAKHIADASWHSFVVKLEYKLKEQGKYLVKLDQWYASSKTCHCCGHKMDDMPLSVRQWNCPSCGTTGIDRDLNAALNIRDKGILELKAAGRSSQLMEAA

SEQ ID NO: 2133 - protein, 374 aa, unidentified
MEYSYKFRIYPNAEQRALIQKTFGCSRFVYNHFLAQRISEYKATGKAPTRFQQDKMLTALKREILWLKEVDSIPLQAELQNLDSAYQGFFRRVKKGEKPGFPRFKSKRDRRKSYKTKQHITNGKPTIYVDDKHIRLPKLGLVKCRISKEVKGRILSATVSQNPSGKYFVALCCTDVEIAPLPSTGAVVGLDMGLKSFAITSDGVDYENHRHLCKSQKKLARLQRQLSRKTKGSKRWEKAKLQVARLHEHITNQRTDMLHKLSTALVRDYDLISIEDLAPKNMVKNHKLARSIADASWGEFRRQLEYKAAWYGKAVVRVDKFYPSSQLCSACGAQWPGTKDLSVREWTCPVCGTVHDRDVNAAKNILNEGLRLLA

SEQ ID NO: 2134 - protein, 434 aa, unidentified
MLEAVKVALDPTPRQERLLESHAGAARFAYNAGLAHVKAMLERQEKPEWSYYALRRWWNANKDALAVSMETGKPWWPENSKESYNSGLESLADALKNFSKSRKGQRKGRRMGFPRFKSKDRAVPGFAYTTGSFGLIDCDPYALRLPKIGRVHCMENVSKRVDGAKVLRMSVSKRGGRWQASLTVERADLPVPSPPKGGSVGIDLGVKELATLSDGTIIHNPHALKSNLGRLKKAQRNLSRKRKGSNRRREARTRVARLHARVADLRRDLLDKTTTMLARAYADISIEDLNVAGMVRNHRLARSVEDAAFAEFRRQLEYKTARTGARLHVIDRWHPSSKTCSNCGTVKAKLSLSERVYHCEECGLVIDRDLNAAINIQVAGSAPETLNARGGSGKRTDASRRATRHPVKREPSDGVSRVSLGAGLGNEAMQMTSL

SEQ ID NO: 2135 - protein, 370 aa, unidentified
MEYSYKFRIYPNEAQAQQIHKTFGCCRFVWNHYLAKRKAVYEQDGKTFNYYGCAGDLTQLKKPLDWLREVDATALQASLRDLDTAFQNFFRRVKQGEKPGYPRFKSKHDHRQSYKSKCVGTNIKVLDKAVQLPKLGLVKCRVSKKVKGRILSATVSRNPSGKYFVALCCTDVEIEQLPSTGVAVGLDMGLKSFAAASNGMEYPNHKYLAKSQKKLARLQRQLSRKTKGSNRREKARLQVARLHEHIANQRQDMLHKLSTQIIRQNDVICIEDLTPKNMAKNQRLAKSIADVSWGEFRRQLEYKAKWQHKALVVVDRFFPSSQLCSACGAQWTGTKDLAVREWVCPECGEHHDRDINAATNILNEGLRLLA

SEQ ID NO: 2136 - protein, 370 aa, unidentified
MEYSYKFRIYPNQTQKNQIQRTFGCCRFVFNYYFAKRKEVYEQSSKTLNYYDCARDMTQLKKSLDWLHEVDATALQSSLRDLDTAFQNFFRRVKQGEKPGYPRFKSKRDHRKSYKSKCVGTNIKVLDKAVQLPKLGKVQCRISKEVKGRILSATVSQNPSGKYFVALCCTDVEIEPLPSTGTIVGLDMGLKSFAITSDGVEYPNHKFLTKSTRKLARLQRQLSRKSKGSKRREKARVKVARLQEHVANQRNDTLHKLSTQLVRDYDLIAIEDLAPQNMVKNHKLARSISDASWGEFRRQLEYKAAWYGKQVVTVDRFYPSSQLCSACGAQWPGTKDLAVREWVCPVCGTVHNRDVNAAKNILNEGLRLLA

SEQ ID NO: 2137 - protein, 407 aa, unidentified
MQLRYAFRLYPDTGQQRALAKAFGCARVVFNDAVRAREDARKAQQPFPKIGELSTRLITQAKGTVERSWLGEVSAVVLQQSLRDAETAYRNFFASLKGTRKGPKTGPPRFKSRKDARQSIRFTANARWNITDSGRLNLPKIGAVKVKWSRTLPSTPTSVTVFKDAAGRFFASFVIDTDPAPDATRMPETDRTIGIDLGLTHFAVLSDGTKIDSPRFLRRAEKKLKKTQQELSRKQKGSKNRAKARLKVARAHTKVADARREFHHQLSTKLISENQGIAVEDLSVAGLARTKLAKSVHDAGWASFISMLEYKAERYGRTLVKIGRFEPTSQTCSTCGAVDGPKPLNIREWTCTACGTVHDRDTNAAINVKTAAGLAVSACGAPVRPGAIPAQREETGSHGFPTEPRAA

SEQ ID NO: 2138 - protein, 407 aa, unidentified
MQLRYAFRLYPDTGQQRALAKAFGCARVVFNDAVRAREDARKAQQPFPKIGELSTRLITQAKGTAERSWLGEVSAVVLQQSLRDAETAYRNFFASLKGTRKGPKTGPPRFKSRKDARQSIRFTANARWNITDSGRLNLPKIGAVKVKWSRTLPTTPTSVTVIKDAAGRFFASFVIDTDPAPDQARMPETDRTIGIDLGLTHFAVLSDGTKIDSPRFLRRAEKKLKKTQQELSRKQKGSKNRAKARLKVARAHTKVADARREFHHQLSTKLISENQGIAVEDLSVAGLARTKLAKSVHDAGWASFISMLEYKAERYGRTLVKIGRFEPTSQTCSTCGAVDGPKPLNVREWTCTACGTVHDRDVNAAINVKTAAGLAVSACGAPVRPGAIPAQREETGSHGFPTEPRAA

SEQ ID NO: 2139 - protein, 352 aa, unidentified
MKHTKTLQVRVRDKHAPLLRQMARSVNFVWNYLNELSHRSIRERGVFLSAFDLHPYSKGAGKELGLHSQTLQCVAAEYVTRRKQYRKARLNWRKSGGARRSLGWVPFNTAAASWKNGQIYHNGYYFKVWDSYGLGQYRLRSGSFSEDARGRWYFNVVVELETQLSTGQGVVGIDLGLKDVATCSDGQRLENGRFYRDLEPKLASAQRAGKKARVRAIHAKIANRRKDALHKFSRSLVERCNTIIVGDVSSQKLVKTKMAKSVLDAGWGQLKTMLAYKCAHAGIVFRVVNEAYTTQTCSCCGALPASRPRGIAGLGIREWICECGVTHDRDVNAARNILALGHERPGEGIPGV

SEQ ID NO: 2140 - protein, 364 aa, unidentified
MNKAYKFRIYPNTEQSIMIAKTFGCTRFIYNRMLSDRIEHYKTTKQSLKNTPAQYKAEFIWLKEVDSLALANAQLNLNAAYKSFFSHPDKGFPRFKSKKTNKLTYSTNNQKGSVRIEDGKIKLPKIGFVKIKQHRSMPENWKIKTVTISKNPANKYFVSVLFEYDNQVQEITPNKIVGLDFSMHELFVSSNGISPQYPRFYRQSLQKLAKEQRKLSLCKKGSNNRQKQRKRVALLHEKIANQRKDFQHKRSYWLADSYDAVCIEDLNMQSMAKSLKFGKSVADNGWGMFVSMLKYKLEERGKKLVKINKFYPSSQICHVCGYKNSDTKDLAIRQWECPECKSQHDRDINAAINIREEGRRILSA

SEQ ID NO: 2141 - protein, 364 aa, unidentified
MNKAYKFRIYPNTEQSSMIAKTFGCTRFIYNRMLSDRIEHYKTTKQSLKNTPAQYKAEFIWLKEVDSLALANTQLNLNKAYKSFFSHPDKGFPRFKSKKTNKLTYSTNNQKGSVRIEDGKIKLPKIGFVKIKQHRSIPENWKIKTVTISKNPANKYFVSVLFEYDNQVQEITPNKIVGLDFSMHELFVSSNGISPQYPRFYRQSLQKLAKEQRKLSLCKKGSNNRQKQRKRVALLHEKIANQRKDFQHKSSCQLADSYDAVCIEDLNMQSMSKSLNFGKSVADNGWGMFVSMLKYKLEERGKKLVKIDKFYPSSQICHICGYKNSDTKDLTIRQWECPECKSHHDRDINAAINIREEGRRILSA

SEQ ID NO: 2142 - protein, 434 aa, unidentified
MLEAVKVALDPTPRQERLLESHAGAARFAYNNGLAHVKDMLERGDTPEWSYYALRRWWNQAKNTLAVDETTGEPWWPENSKEAYNSGLESLADALRNFSKSRKGQRKGRRMGFPRFKSKDSGIRRFAYTTGSFGLIDHDPYTLKLPRIGRVHCMEDASKRVDGAKVLRMSVSKRGGRWQASLTVERADLPIPSPPKGGSVGIDLGVKELATLSDGTVIHNPHALKSNLRRLKKAQRNLSRKRKGSNRRRKARAQVARLYARVANLRSDALNKTTAMLAHTYADISIEDLNVAGMAGNHGLAQSIQDAAFAEFRRQLTYKTARTGARLHVIDRWYPSSKTCSNCGTVKAKLPLSERVYHCGKCGLSIDRDMNAAINIQVAGSAPETLNARGGSGRQTRLECGTMRHPAKREPSGGDSRVRLGAGLGNEAMQMTSL

SEQ ID NO: 2143 - protein, 413 aa, unidentified
MLLVQLRYQFRVYPTPGQQIELAKAFGCARVVFNDGLRLRQEAREQGLPYVSDAELSKRIITQAKGTPERAWLGEVSSVVLQQALADLNTAYRNFFASITGKRKGRKVAPPRFRSRKDNRQAIRFTKNSRFRVLDNGRLRLPKIGDLQVRWSRTLPSDPSSVAIIRDAAGRYFASFVVQTTEDESLPPVAFEVGIDLGLTHFAVMSDGTKVAAPKFLRRAARKLKRLQQDLSRKQRGSQNRKKAVVKVARAHARVADTRRDWQHKLSTTLIRENQAIYVEDLCVVGLGRTRLAKSVHDAGWTSFTGMLEYKAARYGRAFGRVDPLFPSTRMCSVCGRINEKMALNVRAWDCPCGAAHDRDVNAAINVRAAGQADLNARGAHVRPGLIPAARNEAGTHPDAACSTRSVAGISVL

SEQ ID NO: 2144 - protein, 402 aa, unidentified
MRRAIRVRIYPDAEQTAVLERQFGAVRLVWNKALAIRKHRYKVRGERLTAKHDLKPLLKVAKRSRKYAWLKQFDAMALQQACLNLDRAFQNFFEGRARYPRFKSKRGTQSSYHCTGKIAVGDTWITVPKVPGRIEAVVHRDPVGKLKSITLTREPTGKYYAALLFEDGAEAPQPADVVPESAVVGVDMGLAHLAIESDGRKTPNPHHLKRAQSNLRRKQKELSRKKRGSRNRAKARLTVARAHVRVANARNDFQHKLSKRLVDENQAVIVETLAVKNMVRNRRLARAISDAGWHGLISKIAYKAERSGKRLVKLDRWAPTSKTCSACGEVAEAMSLSVRDWACAGCGVHHDRDINAAVNIKHLGIQKLRAGGTHVPACGGLRKPTHAVAAADETGNKAARAA

SEQ ID NO: 2145 - protein, 355 aa, unidentified
MKTLKLRIKDKHCKVLDQLASEVNFVWNYVNDLSFKHLKRTGDFFSAFDMAKYTKGTSKLCGLHSQTVDAIREEYAGKREQFRKAKLKWRVSNKKSARRSLGWIPFKKVAIKYADGYVQYGKHQFKLWDSYGIRKYSVRTGSFVEDSRGRWYVCLVVDSTKAEKPTATKAIGIDLGLKDIATCSDGTVISNPKFYQKYEKKLGIAQRARNKKRVRALHAKIANCRKDHLHKASTLLVKENALIVVGDLSAKKLVKTKMAKSVLDTGFSALKTILKYKCENAGVLFEEVSERFTTQICSCCGEITSSSPQGRTDLRIRVWECECGSINHRDLNSAKNILALGHKRLAVGITLLLGG

SEQ ID NO: 2146 - protein, 407 aa, unidentified
MQLRYSFRLYPDTGQQRALAREFGCARVVFNDAVRAREDARKAEQPFPKAAELSKRLITEAKQTVERSWLGEVSAVVLQQSLRDVETAYRNFFASLKGDRKGPKVGAPRFKSRKDARQSIRFTANARWNITDSGRLNLPKIGKVKVKWSRTLPATPSSVTVIKDAAGRYFASFVIDTDPAADQARMPENDRTIGIDLGLTHFAVLSDGTKIDSPRFLRRAEKKLKKAQRELSRKQKGSKNREKTRLKVARAHAKVTDARHEFHHQLSTRLISENQGIAVEDLSVAGLARTKLAKSVHDAGWSSFISMLEYKAARYGRTLVKIGRFTPTSQICSTCGLKDGPKPLNIREWTCTACGTVHDRDTNAAINVKTAAGLAVSACGAPVRPGAIPAQREETGSHGFPTQARAA

SEQ ID NO: 2147 - protein, 342 aa, unidentified
MIKTFQYRIKDSGCTAELTALARSCNQVWNFCNETQEHALRWDQRWPTYQDLCKLTTGSSKELGLHSQTVQAVCEQYATRRQQFKKRKLRWRGKRSPGWVPFKASGIKVVDDTVRYAGQAFRFWNSRGLPGPIKCGSFSQDARKRWYVHFVCEVPDEQPTVGTKQVGIDSGLKMLATCSDGSRIEAPRWYRNQQKRLAEFQRKRKPRKVRNLHARIAHRRKDFLHQESTRLINDCELIVVGDVSSFKLTKTNMAKSVNDAGWAMFRHLLEYKAMARKVVYLEVSEHLSTQTCSCCGSIGGPKGRKGLGVREWVCGECHAVHDRDVNAALNILRMGHHTLALK

SEQ ID NO: 2148 - protein, 307 aa, unidentified
MRKAYRYRLYPTKSQVTLLEQTLEICQWVYNDTLALRKNAWEQDQHSISLYETNTILTQWKKERSELSTVCSQVLQNVQMRVDLAFKAFFQRAKAGEKEPGFPRFKGKGRYDSFTYKQSGFKLTEDRLHLSKIGDVKVVLHRPIEGTIKTLAIRRSSTGKWYACFSVEYDPSPLPQKETAVGIDVGLKSFATLSNGEKIENPRFFRTDEKTLAKAQRRLSKAEKGTPERKKARMIIAHVHERIANRRLNFAHQTSRKVVDRFGTIVFEDLNIIKMEKTIIWQKALQMLPGICSSRSQRAKRKRLAHA

SEQ ID NO: 2149 - protein, 410 aa, unidentified
MQLRYNYRVYPDTAQREALSRSFGCARVVFNDGLHLRQQAREAGEKYLSDGELSRRLITEAKATEERAWLGEVSSVVLQQALADLNTAYRNFFASLTGKRKGRKVAPPRFRSRKDNRQAIRFTKNSRFRVLDNGRLRLPKIGDLDVRWSRTLPADPSSVAIIKDAAGRYFASFVVQTAEDETLPEADSEVGIDLGLTHFAVMSDGTKVAAPKFLRRAARKLKRLQQDLSRKQRGSQNRKKAVVKVARAHARVADTRRDWQHKLSTRIIRENQAVYVEDLCVVGLGRTRLAKSVHDAGWASFTGMLEYKAARYGRTFARVDRFFPSTRMCSACGRINENMALDIRAWDCPCGAAHDRDVNAAINVKAAGQADFNDRGAQARPGLVPAPRGEAVTHPDVACSTRSVEGISVL

SEQ ID NO: 2150 - protein, 410 aa, unidentified
MQLRYNHRVYPTPGQQIELARAFGCARVVFNDGLRARQEAREQGLPYVSDVELSKRVITQAKLTPERAWLGEVSAVVLQQALADLSTAYRNFFASVSGKRKGREVAPPRFRSRKDNRQAIRFTKNARFKVLDNGKLRLPKIGDVAVRWSRSLPSDPSSVAIIKDAAGRYFASFVVRTMDEPLPPAESEVGIDLGLTHFAVLSDGTKVAAPKFLRRAARNLKRLQQALSRKQKGSANRGKAVVKVARAHARVADTRRDWQHKLSTRIIRENQAVYVEDLCVTGLGRTRLAKSVHDAGWASFTGMLEYKAARYGRTFVRVDRYLPSTRMCSQCGRIHQKMVLNVRAWDCPCGAAHDRDVNAAVNVLAAGRADNSNDRGARVRPPAMVAPRGEAVTHPDAACSTRSVEGIPVL

SEQ ID NO: 2151 - protein, 410 aa, unidentified
MQLRYHFRLYPDASQREALARSFGCARVVFNDGLRLRQQAREAGEKYVSDAGLSKLVITQAKGTPQRAWLGKVSSVVLQQALADLNVAYRNFFASITGKRKGRKAAPPRFRSRKDNRQAIRFTKNARFKVLDNGRLRLPKIGDLNVRWSRVLPSEASSVTVIRDAAGRYFASFVVTTAEDETLPPVESEVGIDLGLTHFAVLSDGTKVAAPKFLRRAARKLKRLQQALSRKQKGSANRKKAVVKVARAHARVADTRRDWQHKLSTSIIRDNQAVYVEDLCVVGLSRTRLAKSVHDAGWASFTGMLEYKAARYGRTFARVDRFFPSTRMCSECGRINDKMALDVRAWNCLCGSHHDRDVNAAKNIKAAGQADFNDRGAQVRPGLVPAPRGEAVTHPDAACSTRSVEGISVL

SEQ ID NO: 2152 - protein, 363 aa, unidentified
MNKAFKFRIYPNTEQQILIAKTFGCVRFIYNRMLADRIEHYKETGKSLSNTPSQYKRGFEWLKEVDSLALANAQLNLNKAYKNFFRDKAIGFPKFKSKKNNHRSYTTNCVNGNIKLERGYIKLPKLGAVKIKQHRAVPDNYRLKSVTISRTPTEKYYASILYEYEDYIEPVEPEIFLGLDYSMKELIVSSDGKSAEYPRYYRQSLLKLKREQVKLSKCEKGSNNRNKQRIKVAKLHEKVSNQRKDFLNKLSRQITNVVDVVCIEDLNMKGMSRALNFGKSVADNSFGLFVSMLDYKLREQGKQLVKIDKWFPSSKMCSRCGEVKEVLLLSEREYHCEVCDTTLDRDYNASINIRNEGLRMLFA

SEQ ID NO: 2153 - protein, 547 aa, unidentified
MAAGQERTIQYNTIKVRLYPDQRQEELFQKTFGCCRYIWNRMFADHEEFYYATDKHFIPTPAKYKNEAPFLKEVDNQALTQEFQRLSQAFRNFFRNPSAFGYPRFKRKKDDRDSFSACNHVMGNSATIYITRNAVRMTKAGLIRAKFPRRPRSGWRLTRVTVERTKTGKYYGYLLFACPARQPEPVEPAAEETIGLKYSVSHFYVTDDGLTADPPRWLRRSQDKAAAIQRKLSRLQSGSKNYQELVQRYRQLHEHIANQRRDFLHKESRRIANAWGAVCIRGDDLKAISEELGGSSVRDTGFGMFRELLRYKLERQGKQMLEVDRFTPTTKVCSACGCVNETLDPDARQWRCPMCGTIHDRDVNAALAAWPRPQGESLKALQFRFELTAAVLRGIPAEQASLLMSLCGTFLRLARDYLQRLYRRETLEQEPEALPGLHQGAWRLLCAQEAEQAGDWSGAVQALREALKAAPALKNVVELLLRRVEQRRAEQTASPELLALAEQVRGILSRFPPDDPAVKELKSSPVYQRVAPLIEGIEAPVFGGLPQ

SEQ ID NO: 2154 - protein, 350 aa, unidentified
EQEIFLAKTFGCVRFVYNKMLSDRIEYYKETGESLNNTPAQYKKEFEWLKEVDSLALANAQLNLNKAYKNFFRDKSVGFPKFKSRKSNHRSYTTNSVNGNIKLEDGNLTLPKLKAVKIKQHREVPKNYKLKSVTISKTPTGKYFASILYEYDKDIEPVKPESFLGLDYSMKELFITSDGVSAEYPRYYRLSLEKLKKEQRKLSKCEIGSNNRNKQRMKVAKLHEKVANQRTDFLHKASRQITNAVDAVCIEDLSMKGMSQALNFGKSVSDNSFGAFTSMLDYKLKEQGKQLIKIDKWFPSSKMCSGCGQIKDTLSLSERTYHCEHCGLIVDRDYNASINIRNEGMRILSA

SEQ ID NO: 2155 - protein, 295 aa, unidentified
MLKATKVRIYPTQEQADFLIAQFGAVRFAYNKALHLKSHMYRKHGVKLNPKKDIKPLLSVAKKSRKYHWLKQYDSIALQQSVINLHQAFDNFFNPKLKAKYPQFKRKHGKQSSYHCVGVKVMDGAIKLPKMKPIKANIHHEIIGTVKSITLSLSKTGKFYASILVDDGIDAPALINTVSKVTGIDLGLSHFAIESNGKKTANPRYLKRAEKNLKRKQRQLSRKKKGSANRAKARLLVAKCHEKVANARADFQHKLSRTLVDKNHAVIVETLKSANMMKNQPQPKLREHRKGVVAK

SEQ ID NO: 2156 - protein, 374 aa, unidentified
MKKAFKYRIYPSAEQEILINKTFGCVRFVYNRMLANRKETYEQFKDDKEALKQQKYLLPADFKKEFEWLKEVDSLALANAQLHLQTAYRNFFRDQSVGFPKFKSKHHDKKSYTTNNQGGTIRLMDSKTIRLPKLKDVRIKLHRQLPKGSVIKSATISKTPTGKYYVSVLVEYEAHIKPVAPTTETVFGLDYSSKSLFVDSQGNHADYPKFYRQAEAKLKRAQRKLSKRKKGSQNREKQRLKVAKLHEKVANQRKDFLHKLSRQIANAHTAVAIEDLNMRGMAQGLRLAKSTNDNGFGMLKTFLAYKLAEEGKQLIVIDQWFPSSKRCRFCQKENKKLTLADRTWTCSHCGAELDRDENAAINIKNEGCRILGIA

SEQ ID NO: 2157 - protein, 355 aa, unidentified
MKTLKLRIKDSHTKVLDQLASEVNFVWNYVNDLCFKHLQRKQQFFSAYDIAKYTKGASKECNLHSQTIQAVTEELVTRRKQFTKSKLRWRVSNKKSARRSLGWIPFKKVAIKYADGYVQYGKHQFKLWDSYGLSKYSIKTGSFVEDSRGRWYVCLVVDSPKQDKPTATKAVGIDLGLKDIATCSDGTVISNPKFYRKYEQKLGIAQRARNQKRVRALHAKIANCRKDHLHKASTQLVKDNALIVVGDLSANKLVKTKMAKSVLDTGFSTLKTMLKYKCENAGVMFEEVNERFTTQTCSSCGAITASSPKGRADLRIRVWECECGSVNQRDLNSAKNILALGHKRLAVGITLLSGG

SEQ ID NO: 2158 - protein, 410 aa, unidentified
MQLRYNFRVYPTPGQQIELARAFGCARVVFNDGLRLRQSARENGLPYVSDAELSRRVITEAKKTEVRAWLGEVSSVVLQQALADLNTAYRNFFASVSGMRKGRKVAPPRFRSRKDNRQAIRFTKNSRFRVLDDGRLRLPKIGDLSVRWSRTLPSDPSSVAIIRDAAGRYFASFVVQATDEALPPVECEVGIDLGLTHFAVLSDGTKVAAPRFLRRAARKLRKLQKSLSRKAKGSNNRKKAVVNLARAHARVADTRRDWQHKLSTIIVRDNQAIYVEDLCVAGLGRTRLAKSVHDAGWASFTGMLEYKAARYRRVFGRVDRFFPSTRMCSDCGRINDKMALNVRAWDCPCGSHHDRDINAAINVLAAGQADNGNDRGAQVRPASVPAPRCEAVTHPDAPRSARSVEGISAL

SEQ ID NO: 2159 - protein, 424 aa, unidentified
MWYNLYVQLRYNFRVYPTPGQQIELARAFGCARVVFNDGLRARQEAREQGLPYVSDAELSKRIITQAKATPERAWLGEVSSVVLQQALADLNTAYRNFFASVTGKRKGRKVSPPRFRSRKDNRQAIRFTRNSRFKVLDNGRLRLPKIGDLAVRWSRTLPSDPSSVAIIKDAAGRHFASFVVQVTDEALPPVESEVGIDLGLTHFAVLSDGTKVAAPKFLRRAARKLKRLQQALSRKQRGSNNRRKAVAKVARAHARVADTRRDWQHKLSTAIIRENQAVYVEDLCVTGLGRTRLAKSVHDAGWASFTAMLEYKAARYGRTFGRVDRFFPSTRMCSDCGRVNEKMVLNVRAWDCPCGSHHDRDVNAAKNVRAAGQADLNDRGAHVRPGLVPAARREAVTHPDAACSTRSVEGISVLQGREDVKGC

SEQ ID NO: 2160 - protein, 413 aa, unidentified
MIVQLRYNFRVYPTPGQQIELAKAFGCARVVFNDGLRLRQQAREQGGKYLSDGELSRRVITEAKQTEARAWLGQVSAVVLQQALADLNTAYRNFFSSVTGRRKGRKVGPPRFRSRKDNRQAIRFTKNSRFKVCDNGRLRLPKIGDLQVRWSRSLPCDPSSVAIIRDAAGRYFASFVVTTAEDETLPPVTSEVGIDLGLTHFAVLSDGTKTAAPKFLRRAARKLRRLQQALSRKQKGSANRGKAVVKVARAHARVADTRRDWQHKLSTAIIRDNQAVYVEDLCVAGLGRTRLAKSVHDAGWAAFTGMLEYKAARYGRTFARIDRFAPTSQTCSACGRLDGPKPLSVRSWTCPCGTVHDRDVNAAINVLARGRRDNSNACGAQVRPASVPAPRREAGIHPDAARSTRSVEGISVL

SEQ ID NO: 2161 - protein, 413 aa, unidentified
MVVQLRYNFRVYPTPGQQIELAKAFGCARVVFNDGLRLRQQAREQGGKYLSDGELSRRLITEAKQTEARAWLGEVSAVVLQQALADLNTAYRNFFSSVTGRRKGRKVGPPRFRSRKDNRQAIRFTKNSRFKVCDNGRLRLPKIGDLQVRWSRSLPCDPSSVAIIRDAAGRYFASFVVTTAADETLPPVTSEVGIDLGLTHFAVLSDGTKTAAPKFLRRAARKLRRLQQALSRKQKGSANRGKAVVKVARAHARVADTRRDWQHKLSTAIIRDNQAVYVEDLCVAGLGRTRLAKSVHDAGWAAFTGMLEYKAARYGRTFARIDRFAPTSQTCSACGRLDGPKPLSVRSWTCPCGTVHDRDVNAAINVLARGRRDNSNACGAQVRPASVPAPRREAGIHPDAARSTRSVEGISVL

SEQ ID NO: 2162 - protein, 366 aa, unidentified
MLRAYRYRLYPTKSQVTLLEQTLEICRWVYNDTLALRKNAWEEEQRSISLYETNKILTQWKKERPDLKQVYAQTLQNVQMRVDLAFKAYFRRVKAGEKPGYPRFKGKGRYDSFTYPQGPKGGFKFNGGRLHLSKIGDVRIVLHRSIVGTIKTLTIRRSSTGKWYACFSAECDPAPAPQKETVVGIDVGLESFATLSNGEKIENPRFFRTDQKALARAQRKLSKAEKGTPERKKARKIVAHIHERIANRRLNFAHQTSRKLVDRFGTIVFEDLNIIKMEQNHHLAKSIADVAWNQFITITESKAEDAGSRVVLVNPRNTSQQCSRCGMIVAKALSDRVHSCPHCGLVMDRDQNAAINIMRLGLQSQG

SEQ ID NO: 2163 - protein, 407 aa, unidentified
MQLRYSIRVYPNTVQQAALARAFGCARVVFNDAVRAREDARRAGQPFPTAGQLSRKLITEAKQTPERAWLGEVSAVVLQQSLRDAETAYRNFFASLKGTREGPKLGAPRFKSRKDARQSIRFTANARWHLTDSGRLNLPKIGAVKVKWSRTLPNTPTSVTVIKDAAGRFFASFVIDTDPDADQARMPETDRTIGIDLGLTHFAVLSDGTKIDSPRFLRRAEKKLKKAQRELSRKQKGSRNRAKARLKVARAHTKVTDARREFHHQLSTRLISENQGIAVENLSVAGLARTRLAKSVHDAGWSSFIGMLEYKAARYGRTLVKTGRFEPTSQTCSTCGAVDGPKPLNVREWTCTACGTVHDRDLNAAINIKTAAGLAVSACGAPVRPEPVLAQREETGSHGFPTGNRAA

SEQ ID NO: 2164 - protein, 406 aa, unidentified
MQLRYSFRVYPNTVQQAALARAFGCARVVFNDAVRAREDARKGGQPFPTAGQLSTRLITQAKRTPERAWLGEVSAVVLQQSLRDAETAYRNFFASLKGTRKGPKLGPPRFKSRKSRQSIRFTANARWSITASGRLSLPKIGAVRVKWSRTLPATPTSVTVIKDAAGRFFASFVIDTDPAADQARMPETDRTIGIDLGLTHFAVLSDGTKIDSPRFLRRAEKKVKKTQRELSRKQKGSKNCAKARLKVARAHTEVADVRREFHHQLSTRLISENQGIAVEDLSVVGLARTRLAKSVHDAGWAQFISMLAYKAERYGRTLVMIGRFEPTSQTCSACGVKDGPKPLNVREWTCTACGSVHDRDINAARNIKTAAGLAVTACGAPVRPGAIPAQREETGSHGFPTGSRAA

SEQ ID NO: 2165 - protein, 434 aa, unidentified
MLEAVKVALDPTPRQERLLESHAGAARFAYNAGLAHVKDMLERQEKPEWSYYALRRWWNANKDALAVSMETGKPWWPENSKESYNSGLESLADALKNFSKSRKGQRKGRRMGFPRFKSKDKAVPGFAYTTGSFGLIDCDPYALRLPRIGRVHCMENVSRRVNGAKVLRMSVSRHAGRWMASLTVERKDGPMPTPLKGGSVGIDLGVKQLATLSDGTIIRNPRALDSNLRRLRREQKNLSRKRKGSNRRREARTRVARLHARVADLRRDLLDKTTTMLARTYADISIEDLNVAGMVRNHRLARSVEDAAFAEFRRQLEYKTARTGARLHVIDRWYPSSKACSNCGTVKAKLSLSERVYHCEECGLVIDRDLNAAINIQVAGSAPETLNARGGSGRRADASRRATRHPVKREPSGGVSRVRLGAGLGNEAMQMTSL

SEQ ID NO: 2166 - protein, 375 aa, unidentified
MLRATKVRIYPTADQTEFLNAQFGAVRFAYNKALHIKKHFYSVKGMSLAVQKDLKPLLAKGKKSRKYSWLKQYDSIALQQAVINLDGAYKRFFDKKLKAGFPTFKRKHGKQSSYHCTSVKATDNTIKIPKLSAIKARIHRELVGTLKSITISRSASGKYFASLLVKSDEATPVKPKHITSVSGYDLGLTHYLIDDRGNKTANPRFLVNACSNLRRKQKALSRTKKGSRNRSKARLKLALAHERVSNARNDFQHKLSKRIIDDNQAVIVETLKSSNMLKNRKLSRHISDASWSAFVDKVAYKAEMYGVHLVKCNQWFASSKTCSCCGDKVKDMPLNIRHWSCPSCNTQHDRDINASKNIRHYGIIKLKADGLTVSA

SEQ ID NO: 2167 - protein, 411 aa, unidentified
MQLRYNFRVYPTPGQQIELAKAFGCARVVFNDGLRLRQQAREQGGKYLSDGELSRRVITEAKQTEARAWLGQVSAVVLQQALADLNTAYRNFFSSVTGRRKGRKVGPPRFRSRKDNRQAIRFTKNSRFKVCDNGRLRLPKIGDLQVRWSRSLPCDPSSVAIIRDAAGRYFASFVVTTAEDETLPPVTSEVGIDLGLTHFAVLSDGTKTAAPKFLRRAARKLRRLQQALSRKQKGSANRGKAVVKVARAHARVADTRRDWQHKLSTAIIRDNQAVYVEDLCVAGLGRTRLAKSVHDAGWAAFTGMLEYKAARYGRTFARIDRFAPTSQTCSACGRLDGPKPLSVRSWTCPCGTVHDRDVNAAINVLARGRRDNSNACGAQVRPASVPAPRREAGIHPDAARSTRSVEGISVL

SEQ ID NO: 2168 - protein, 434 aa, unidentified
MLEAVKVALDPTPRQERLLESHAGAARFAYNAGLAHVKDMLERQEKPEWSYYALRRWWNANKDALAVSMETGKPWWPENSKESYNSGLESLADALKNFSKSRKGQRKGRRMGFPRFKSKDKAVPGFAYTTGSFGLIDCDPYALRLPKIGRVHCMENVSKRVDGAKVLRMSVSRHAGRWMASLTVERKDGPMPTPLKGDSVGIDLGVKQLATLSDGTIIRNPRALDSNLRRLRREQKNLSRKRKGSNRRREARTRVARLHARVADLRRDLLDKTTTMLARTYADISIEDLNVAGMVRNHRLARSVEDAAFAEFRRQLEYKTARTGARLHVIDRWYPSSKTCSNCGTVKAKLSLSERVYHCEECGLVIDRDLNAAINIQVAGSAPETLNARGGSGRRADASRRATRHPVKREPSGGVSRVRLGAGLGNEAMQMTSL

SEQ ID NO: 2169 - protein, 374 aa, unidentified
MEYSYKFRLYPNSEQCAMIARTFGCARFVYNHFLNLRKETYKASGETINYVKSSAMLTQLKKELIWLKEVDSIPLQESLRDLDFAYQGFFRRVKKGEKPGFPRFKSKRDRRKSYKTKQHVTNGKPTIYVDGKHIRLPKLGLVKCRISKEVKGRILSATVSQNPSGKYFVALCCADVEIEPLPSTGAVVGLDMGLKSFAITSDGMEYPNHKFLSKSIRKLARLQRQLSRKTKGSNRWEKARVKVARLHEKIANQRNDTLHKLSTSLVRDYDLIAIEDLAPGNMVRNHKLARSISDASWGEFRRQLEYKAAWYGKAVVRVDKFYPSSQLCSACGAQWPGTKDLSVREWTCPECGAHHLRDVNAAQNILNEGMRLLA

SEQ ID NO: 2170 - protein, 370 aa, unidentified
MEYSYKFRLYPTAVQRAQISRNFGCFRYVFNHFLAQRQEQYKETGTSPTRFQQDKILTILKQELPWLKEADSTSLQATLQDLDMAYQNFFRRVKQGEKPGYPRFKSKRAHRQSYKSKCVGTNIKVLEGAVQLPKLGKVKCRISKPVEGRILSATVSQTPSGKYFVALCCTDIDMEPLPSTGAVVGIDMGLKAFAITSDGVSYQNHKYLAKSEKKLAKLQRQLSRKSKGSNRWEKARLQVARLHEHITNQRHDMLHKLSTDLVRNYDLIAIEDLASSNMVKTHKLAKAISDAGWGEFRRQLQYKAAWYGKEVVAIDRFYPSSQLCSACGAQWSGTKDLSVREWTCPQCGAQHDRDINAAKNILNEGLRLLA

SEQ ID NO: 2171 - protein, 370 aa, unidentified
MERSYKFRLYPTAKQEDLIQRTFGCVRFVWNFYLAKRKETYEKDGEGLNYYYCFGDLTQLKKSLEWLREVDATALQSSLRDLDTAYQNFFRRVKKGEKPGYPKFKSKRNHRQSYKSRYVGANIKVLSNAVQIPKLGLVKCRISKEVKGRILSATVSQSPSGKYFVSICCTDVEIKPMPPTGAVVGIDVGIKAFAVTSDGVSYPNHKYLAKSEKKLARLQRQLSRKTKGSNRWEKARLRVARLHEHIANQRQDAAHKLSTQLIRENDIICIEDLAPKNMVRNHRLAKSIYDAGWGEFRRQLRYKAAWYGKQVVAIDRFYPSSQLCSCCGAQWSGTKDLSVREWTCPQCGAQHDRDINAAKNILNEGLRLLA

SEQ ID NO: 2172 - protein, 374 aa, unidentified
MRFAMERAYKFRLYPTAEQENLMQRTFDCVRFVYNHFLAERAERYKETGKSPTRFQQDKSLTMLKQELPWLKEADATALQYSLQSLDTAYQNFFRRVKQGGKPGYPRFKSKRDHRKSYRSKAVGSNIKVLDNAVQLPKLGNVPCRVSKQIEGRILSATISQNPSGKYFVSLCCTDVEIEQLPSTGAVIGIDMGLKEFAITSDGIEYPNCKHLAKSQKKLAKLQRQLSRKSKGSKRREKARVKVARLHERVVNQRQDTLHKLSTELIRQNDVICIEDLAPSNMVKDHKLARSIADASWAKFRRQLEYKAEWYGKKIVAIDRFYPSSQLCSCCGYRNTDTKNLAVRDWICPQCGTSHNRDINAAKNILSEGLRLLA

SEQ ID NO: 2173 - protein, 372 aa, unidentified
MEYSYKFRLYPNREQENLIQRTFGCCRFVFNHYLAQRMESYKGTGKSPTRFAQDKDLTTLKQQDETSWLKEVDATALQSSIRDLDTAHQNFFRRVKQGKNPGYPHFKSKHHHRQSYKSKCVGTNIKVLENAVQLPKLGAVKCRISKQVQGRILSATVSQNSSGKYFVALCCTDVDIQPFAPTNQSVGIDVGIKTFAVSSDGAEFANPKYLRKSEKQLARLQRSLSRKTKGSRNREKARMKVARLHEHIANQRKDMLHKLSTELMKNYDVICLEDLAPSNMMKNHHLAKSIADASWSEFRRQLHYKADWYGKRIVETDRFYPSSQLCSNCGTQWEGTKDLKIRKWECPHCGTALNRDTNAAINILNEGLRLLA

SEQ ID NO: 2174 - protein, 372 aa, unidentified
MEYSYKFRLYPNKEQENLILRTLGCCRYVYNYYLALRKEHYEQTGETLNYVGCAKDLTGLKQQAETNWLKEVDATALQSSLRNLDDAYQHFFRRVKIGEKPGYPKFKSKRNHRQSYKSKCVGPNIKVLEGAVQLPKLGKVKCRISKLVKGRILSSTVSRTSSGKYFVALCCTDVDMEPLPSTGAVVGIDMGLKALAITSDGVEYPNHKYLSKSQKKLAKLQRQLSRKTKGSNRWEKARLQVARLHEHVANQRRDMLHKLSTELVRQNDIICMEDLASKNMMRNHKLARSIADVSWREFRRQLLYKAEWYGKKVVTIDRFFPSSQLCSACGTQWPGTKDLKVRQWTCPECGTEHNRDTNAAINILHEGLRLLA

SEQ ID NO: 2175 - protein, 370 aa, unidentified
MEYSYRFRLYPNQGQKNQILRTFGCCRFVWNHYLAKRKEVYEQDGKTFNYYDCAGDMTQLKKPLDWLREADATALQSSLRDLDTAFQNFFRRVKQGEKPGYPRFKSKRDHRQSYKSKCVGTNIKVLDNAVQLPKLGRVKCRVSKEVKGRILSATVSRNPSGKYFVALCCTDVEIGPLPSTGATVGLDMGIKAFAVTSDGIEYPNHKHLAKSEKKLARLQRQLSRKTKGSNRREKARLRVAKLHEHVAYQRQDMLHKLSTEIIRQNDIICIEDLAPKNMVKNHRLAKSISDASWGEFRRQLEYKAVWYGRQVVTVDRFYPSSQLCSACGAQWSGTKDLSVREWVCPACGVVHDRDINAAKNILQEGLRLLA

SEQ ID NO: 2176 - protein, 373 aa, unidentified
MVEYSYKFRLYPNREQENLILRTFGCCRFVFNHYLALRKETYEQTGETLNYYACAKDMTTLKQQEETLWLKEVDATALQSSLRDLDDAYQHFFRRVKKGEKPGYPRFKSRHHHRQSYKSKCVGANIKVLDTAVQLPKLGLVKCRISKEVRGRILSATISQNASGKYFVSICCTDVEIEPMPPTGAAVGIDVGIKDFAVTSDGVSYPNHKYLAKSEKKLARLQRQLSRKSKGSRRREKARIKVARLHEHIANQRQDAAHKLSTQIICENDIICIEDLAPKNMVRNHSLAKSISDAGWGEFRRQLQYKAEWYGKTVVGIDRFYPSSQLCSCCGAQWSGTKDLSVRGWTCPECGAQHDRDINAAKNILHEGLRLLA

SEQ ID NO: 2177 - protein, 372 aa, unidentified
MEYSYKFRIYPNIAQAQQIHRTFGCCRFVWNHYLAQRIEAYRETGKSPTRFIQDKDLTSLKKQDGTIWLREVDATALQSSLQDLDTAYQSFFRRVKKCAEPGYPKFKSKRNHRQSYKSKCVGTNIKVLEGAVQLPKLGKVKCRISKHVEGRILSATVSQTPSGKYFVALCCTDIDIEHLPSTGTVVGIDMGLKAFAITSDGVEYPNHKYLSKNQKKLAKLQRQLSRKTKGSNRWNKDRIKVARAHEHVSNQRQDTMQKLSTQLIRGNDVICIEDLAPKNMVRNHKLAKSISDASWGEFRRQLQYKADWYGKKVVAIDRFYPSSQLCSCCGTQWAGTKDLSVRDWICPVCGARHDRDVNAARNILNEGLRLLA

SEQ ID NO: 2178 - protein, 407 aa, unidentified
MQLRYSFRLYPDTGQRRALARTFGCARVVFNDAVRAREEARAAGQPFPTAAELSKRLITEAKQTLERSWLGEVSAVVLQQSLRDVEAAYKNFFASLKGTRKGPKLGAPRFKSCKDARQSIRFTANARWSITDSGRLNLPKIGAVKVKWSRTLPTAPTSVTVIRDAAGRFFASFVIDTDPAEDAARMPDTDRSIGIDLGLTHFAVLSDGTKIDSPRFLRRAEKKLKKAQQELSRKQKGSRNREKARLKVARAHAKVTDARKEFHHQLSTRLISDNQGIAVEDLPVAGLARTRLAKSVHDAGWSSFISMLEYKADRYGRTLVKIGRFEPTSQTCSTCGVKDGPKPLSVREWTCAACGTVHDRDHNAAINVKTAAGLAVTACGAPVGPEPVLAQREETGSHGFPTGNRAA

SEQ ID NO: 2179 - protein, 593 aa, unidentified
MPVTEVLRAYRFTLDPSDRERAALSRYSGACRWAYNYAVAKKTQAHRAWADRRTAYVEAGLTEAEAKERIKADGAELTDRIKVWDHHRKSLTLTVVGKPPPAAMRSPAGQEALVRRLATARADAAGTSRERALLAEGRAMVNALKAQAFRAGFRTPTATDTSNLWRMERDLPKEEGGSPWWSEVNVYCFTSGFDRAQVAWKYWQDSLSGRHAGQRHGYPRFKKKGHAESFSLFHDVMRPIIRLEGYRRLVMPGLGSIRIHDSGKRLARLVDRGQAVIQSVTVSRGGHRWYASVLAKVQQDVPVLWEHVHDDGTRTPYLSRIQAEKASENGGRVEQIGRPTARQRAGGLVGVDLGSHHLATLSSPLDPADPATTVVHLPRLLADSLARLSKAQRAMSRCQQGSGRWRKATARVSRAHQQVRVRRASFLHGLSKKLATGFTHVAIEDPDITALTTSTEGTRGKPRKNATAKARLNQHLLDAGLGSLRKKLAYKTAWYGSQLVVLDHGEPVTASCATCKERNPSSDPSCSKVHCPSCGAVVHRHVNSTASIVDAAHRKLKTVASDRGETQNARRAPGSPGARKAPGQGASKREDTG

SEQ ID NO: 2180 - protein, 372 aa, unidentified
MYVEYSYKFRLYPNRTQENQILRTLGCCRFVFNHYLAIRKEVYERDGRTFNYYDCAGDVTQLKKTLEWLREVDATALQSSLRDLDAAYQNFFRRVKRGEKPGYPRFKSKHDHRQSYKSKCVGTNIKVLDKAVQLPKLGLVKCRVSKEVKGRILSATVSRNPSGKYFVALCCTDVEIEPLLSTGVAVGLDMGLKSFAVSSDGVEYPNHKFLTKSQEKLARLQRQLSRKTKGSKRREKARLQVARLHERISNQRQDMLHKLSSQLVRDYDFIAIEDLAPKNMVRNHRLARSISDASWGEFRRQLEYKAGWYGKQVVTIDRFYPSSQLCSACGAQWPGTKDLSVREWNCPSCGTVHDRDTNAAKNILNEGLRLLA

SEQ ID NO: 2181 - protein, 372 aa, unidentified
MEYSYKFRIYPNIAQAQQIHRTFGCCRFVWNHYLAQRIEAYRETEKSPTRFMQDKDLTSLKKQEKTIWLREVDATALQSSLRDLDTAYQNFFRRVKKGEKPGYPKFKSKRNHRQSYKSRCMGANIKVLEGAVQLPKLGKVKCRISKPVEGRILSATVSQTPSGKYFVALCCTDVDMEPLPSTGAVVGIDMGLKAFAITSDGVEYPNHKYLAKSEKKLARLQRQLSRKSKGSNRWEKARLQVARLHEHIANQRQDAAHKLSTQLIRDNGVICIEDLAPKNMVQNHRLAKPISDAGWGEFRRQLQYKAKWYGKTVVTIDRFYPSSQTCSCCGAQWSGTKDLSVRIWTCPECGAVHDRDINAAKNILNEGLRLLA

SEQ ID NO: 2182 - protein, 434 aa, unidentified
MLEAVKVALDPTPRQERLLESHAGAARFAYNAGLAHVKAMLERQEKLEWSYYALRRWWNANKDALAVSMETGKPWWPENSKESYNSGLESLADALKNFSKSRKGQRKGRRMGFPRFKSKDRAVPGFAYTTGSFGLIDCDPYALRLPKIGRVHCMENVSKRVDGAKVLRMSVSKRGGRWQASLTVERADLPVPSPPKGGSVGIDLGVKELATLSDGTIIHNPHALKSNFGRLKKAQRNLSRKRKGSNRRREARTRVARLHARVADLRRDLLDKTTTMLARAYADISIEDLNVAGMVRNHRLARSVEDAAFAEFRRQLEYKTARTGARLHVIDRWHPSSKTCSNCGTVKAKLSLSERVYHCEECGLVIDRDLNAAINIQVAGSAPETLNARGGSGKRTDASRRATRHPVKREPSDGVSRVSLGAGLGNEAMQMTSL

SEQ ID NO: 2183 - protein, 434 aa, unidentified
MLEAVKVALDPTPRQERLLESHAGAARFAYNAGLAHVKAMLERQEKPEWSYYALRRWWNQAKGTLAVNAVTGETWWRENSKEAYNAGLKSLADALSNWSKSRKGLRKGRRVGFPRFKSKDRATPRFAYTTGSFGLIDGDPHALRLPRIGRVHCMENVSKRVDGAKVLRMSVSKRGGRWQASLTVERADLPIPSPPKGGSVGIDLGVKELATLSDGTVIRNPHALKSNLGRLKKAQRNLSRKRKGSNRRRKARTRVARLHARVADLRRDLLDKTTTMLARTYADISIEDLNVAGMVRNHRLARSVEDAAFAEFRRQLEYKTARTGARLHVIDRWYPSSKTCSNCGTVKAKLSLSERVYHCEECGLVIDRDLNAAINIQVAGSAPETLNARGGSGRRADASRRATRHPVKREPSDGVSRVSLGAGLGNEAMQMTSL

SEQ ID NO: 2184 - protein, 434 aa, unidentified
MLEAVKVALDPTPRQERLLESHAGAARFAYNAGLAHVKAMLERQEKPEWSYYALRRWWNANKDALAVSMETGKPWWPENSKESYNSGLESLADALKNFSKSRKGQRKGRRMGFPRFKSKDRAVPGFAYTTGSFGLIDCDPYALRLPKIGRVHCMENVSKRVDGAKVLRMSVSKRGGRWQASLTVERADLPVPSPPKGGSVGIDLGVKELATLSDGTIIHNPHALKSNLGRLKKAQRNLSRKRKGSNRRRKARTRVARLHARVADLRRDLLDKTTTMLARAYADISIEDLNVAGMVRNHRLARSVEDAAFAEFRRQLEYKTARTGARLHVIDRWHPSSKTCSNCGTVKAKLSLSERVYHCEECGLVIDRDLNAAINIQVAGSAPETLNARGGSGKRTDASRRATRHPVKREPSDGVSRVSLGAGLGNEAMQMTSL

SEQ ID NO: 2185 - protein, 434 aa, unidentified
MLEAVKVALDPTPRQERLLESHAGAARFAYNAGLAHVKDMLGRQGKPEWSYYALRRWWNANKDALAVSMETGKPWWPENSKESYNSGLESLADALKNFSKSRKGQRKGRRMGFPRFKSKDRAVPGFAYTTGSFGLIDCDPYALRLPKIGRVHCMENVSKRVDGAKVLRMSVSRHAGRWMASLTVERKDGPMPTPLKGGSVGIDLGVKQLATLSDGTIIRNPRALDSNLRRLRREQKNLSRKRKGSNRRREARTRVARLHARVADLRRDLLDKTTTMLARAYADISIEDLNVAGMVRNHRLARSVEDAAFAEFRRQLEYKTARTGARLHVIDRWYPSSKTCSNCGTVKAKLSLSERVYHCEECGLVIDRDLNAAINIQVAGSAPETLNARGGSGRRTDASRRATRHPVKREPSDGVSRVSLGAGLGNEAMQMTSL

SEQ ID NO: 2186 - protein, 407 aa, unidentified
MQLRYAFRLYPDPGQQRALAKAFGCARVVFNDAVRAREDARKAQQPFPKIGELSTRLITQAKQTTSRSWLGEVSAVVLQQSLRDVETAYRNFFVSLKGTRKGPKVGAPRFKSRKDARQSIRFTANARWHLTDSGRLNLPKIGPVKVKWSRTLPATPTSVTVIKDSAGRYFASFVIDTDPQADAERVPATDRTIGIDLGLTHFAVLSDGTKIDSPRFLRRAEKKLKKAQRELSRKQKGSKNREKARLKVARAHVKVTDARHEFHHQLSTKLISENQGIAVEDLSVTGLARTRLAQSVHDAGWASFVNMREYKAQRYGRALIKIGRFEPTSQVCSTCGVKDGPKPLGVREWTCAACGTVHDRDINAAINVKTAAGLAVSACGAPVRPELVLAHCEETGSHGFPTEPRAA

SEQ ID NO: 2187 - protein, 407 aa, unidentified
MQLRYSFRLYPDTIQQAALARAFGCARVVFNDAVRAREDARKAARPFPTAGELSRKLITEAKQTKERSWLGEVSAVVLQQSLRDAETAYRNFFASLKGTRKGPRTGPPRFKSRKDARQSIRFTANARWSITGSGRLNLPKIGAVKVKWSRTLPTAPTSVTVIKDAAGRYFASFVLDTDPTADQARMPETDRTIGIDLGVTHFAVLSDGTKIDSPRFLRRVEKKLKKAQRELSRKQKGSKNRVKARLKVARAHARVADARREFHHQLSTKLISENQGIAVEDLSVAGLARTKLAKSVHDAGWAQFLSMLRYKAERYGRTLITIGRFEPTTQVCSTCGVKDGPKPLNVREWTCAGCGTVHDRDTNAAINVKTAAGLAVSACGAPVRPGAIPAQREETGSRGFPTEPRAA

SEQ ID NO: 2188 - protein, 407 aa, unidentified
MQLRYAFRLYPNAGQRTALARAFGCARVVFNDAVRAREDARKAGQPFPTAGQLSRKLITEAKRSKERSWLGEVSAVVLQQSLRDAESAYRNFFASLKGARKGPKTGAPRFKSRKDARQSIRFTANARWNITGSGRLSLPKIGAVKVKWSRTLPSAPTSVTVVKDAAGRYFASFVIDTDPAADQARMAQTNRTVGIDLGLNHFAVLSDGTKIDSPRFLRRAEKKLKKAHKELSRKRKGSKNRAKARLKVARAHSRVADARREFHHQLSTRLISENQGIAVEDLSVAGLARTRLAKSVHDAGWAQFIRMLEYRAERYGRTLVKIGRFTPTSQTCSTCGVVDGPKPLNVREWTCSACGTVHDRDHNAALNVKTAAGLAVSACRAPVRPEPVLAQREETGSHGFPTGNRAA

SEQ ID NO: 2189 - protein, 434 aa, unidentified
MLEAVKVALDPTPRQERLLESHAGAARFAYNAGLAHVKDMLERQEKPEWSYYALRRWWNANKDALAVSMETGKPWWPENSKESYNSGLESLADALKNFSKSRKGQRKGRRMGFPRFKSKDRAVPGFAYTTGSFGLIDCDPYALRLPKIGRVHCMENVSKRVDGAKVLRMSVSKRGGRWQASLTVERADLPVPSPPKGGSVGIDLGVKELATLSDGTIIHNPHALKSNLGRLKKAQRNLSRKRKGSNRRRKARTRVARLHARVADLRRDLLDKTTTMLARAYADISIEDLNVAGMVRNHRLARSVEDAAFAEFRRQLEYKTARTGARLHVIDRWHPSSKTCSNCGTVKAKLSLSERVYHCEECGLVIDRDLNAAINIQVAGSAPETLNARGGSGKRTDASRRATRHPVKREPSDGVSRVSLGAGLGNEAMQMTSL

SEQ ID NO: 2190 - protein, 434 aa, unidentified
MLEAVKVALDPTPRQERLLESHAGAARFAYNAGLAHVKDMLERQEKPEWSYYALRRWWNANKDALAVSMETGKPWWPENSKESYNSGLESLADALKNFSKSRKGQRKGHRMGFPRFKSKDRAVPGFAYTTGSFGLIDCDPYALRLPKIGCVHCMENVSKRVDGAKVLRMSVSRHAGRWMASLTVERKDGPMPTPLKGGSVGIDLGVKQLATLSDGTVIHNPHALKSNLGRLKKAQRNLSRKRKGSNRRREARTRVARLHARVADLRRDLLDKTTTMLARAYADISIEDLNVAGMVRNHRLARSVEDAAFAEFRRQLEYKTARTGARLHVIDRWYPSSKTCSNCGTVKAKLSLSERVYHCEECGLVIDRDLNAAINIQVAGSAPETLNARGGSGRRTDASRRATRHPVKREPSDGVSRVRLGAGLGNEAMQMTSL

SEQ ID NO: 2191 - protein, 384 aa, unidentified
MRLFAGACRFVFNRALALQNENYEAGNKYIPYTKMASWLVEWKKDTETEWLKDSPSQPLQQSLKDLERAYKNFFQKRAAFPRFKKRGQNDAFRYPQGVKLDQENSRIFLPKLGWVRYRNSRQVTGIVKNVTVSQSCGKWYISIQTESEVSTPVHPSASMVGLDAGVARLATLSDGTVFEPVNSFQKNQKKLARLQRQLSRKVRFSNNWQKQKRKIQQLHSRIANIRRDYLHKVTTIISKNHAMIVIEDLKVKHMSKSAAGTISQPGRNVRAKSGLNRSILDQGWYEMRRQLEYKQLWHGGQVLAVPTAYTSQRCACCGHTAKENRLSQSKFRCQVCGYTANADVNGARNILAAGHAVLACGGMVQSGRPLKQEPTEMIQATALT

SEQ ID NO: 2192 - protein, 359 aa, unidentified
MHIAGFTIELGKAATRSDIPLLGPGPHSYDHGVQLRYNVRLYPTAGQRQALTKAFGCARTVYNDALRVREQARAGGLPYVSDAELSRRVITQAKKTPERAWLGEVSAVVLQQALADVNTAYRNFFSSLAGKRKGPKIAAPRFRSRKDRRQAVRFTRNARFSITASGKLRLPKIGDVDVRWSRDLPSEPSSVTVIKDAAGRYFASFVVEAGDEPLPETAGEVGIDLGLTHFAVLSDGRKIGNPRFLRRAERRLKKAQRALSRKAKGSKNREKAVVQVARVHAKVADARRDFAHKLSTQIIRENQTVVVEDLCVKGLARTKLAKSVHDAGWSRFVGMLAYKAARHGRVFVRIDRPPDGRTG

SEQ ID NO: 2193 - protein, 363 aa, unidentified
MRKAYRYRIYPSKSQVSLLEQTLEICRWIYNDTLALRKNAWEEEQRSLSLYETNKILTQWKKERPDLNQVYSQVLQNVQMRVDLAFKAYFRRVKAGEKPGYPRFKGKGRYDSITYKQSGFKLIGDRLHLSKVGDVRIVLHRPVEGTIKTLTIRRSSTGKWYACFSVEYDPSPAPQKETVVGIDVGLESFATLSNGEKIKNPRFFRTDEKALAKAQRKLSKAEKGTPERKKARKIVAHIHERIANRRLNFAHQTSRQLVDRFGTIVFEDLNIIKMEKNHHLAKSIADVAWNMFITITESKAEDAGSRVVLVNPRNTSQQCSRCGMIVAKTLSDRVHSCPHCGLVIDRDQNAAINIVRLGLQSQG

SEQ ID NO: 2194 - protein, 381 aa, unidentified
MRYNFRLYPTPGQRAALARAFGCARVVYNDGLRLRAEAHERGLPYIPDGELSRRVITEAKKTPQRAWLGEVSAVVLQQALADLNTAYRNFFASLTGRRTGPKIAEPRFKSRKDARQSIRFTRNARFTVTAGGRLRLPKIGDVPVRWSRSLPSEPSSVTVVKDAAGRYFASFVVEVDTEPLPKAAGEVGIDLGLTHFAVLSDGRKITNPRWLRRAERRLRKAQRALCRTAKGSANRAKAQVRVARAHARVADARRDWAHKLSTQIIRDNQAVYVENLCVKGLARTRLAKSVHDAGWAQFTAMLAYKAARHGRTFAKVDRWFPSSKLCSSCGALADSMPLNIRTWACSCGTVHDRDVNAAINILAAGRADRLNACGGAVRPVA

SEQ ID NO: 2195 - protein, 402 aa, unidentified
MRYNFRLYPTAGQRAALARAFGCARVVYNDGLRLRAEAHERGLPYIPDGELSRRVITEAKKTPQRAWLGEVSAVVLQQALADLNTAYRNFFASLTGRRTGPKIAEPRFRSRKDSRQSIRFTRNARFTVTAGGRLRLPKIGDVPVRWSRSLPSEPSSVTVVKDAAGRYFASFVVEVDTEPLPKAAGEVGIDLGLTHFAVLSDGRKITNPRWLRRAERRLRKAQRALCRTAKGSANQAKAQVRVARAHARVADARRDWAHKLSTQIIRDNQAVYVEDLCVKGLARTRLAKSVHDAGWAQFTAMLAYKAARHGRTFAKVDRWLPSSRTCSACGALADSMPLHVRTWACSCGAGHDRDVNAAKNILAAGRADRLNACGGTVRPTAQRRAGPGETGSHQRCRTHGTD

SEQ ID NO: 2196 - protein, 397 aa, unidentified
MSPYSAITQWGDQGVQLRYNFRLYPKPGQRAALARAFGCARTVYNDGLRARQDARAQGLPYVSDTELSKRVITQAKQTSERSWLSEVSAVVLQQALADLNTAYRNFFASLSGKRKGPKVTPPRFRSKRDNRQAIRFTRNARFSITAGGKLRLPKIGDMDVRWSRDLPSAPSTVTVIKDAAGRYFASFVVETSDEPLPETASEVGIDLGLTHFAVLSDGRKIDNPRFLRRAERRLKKAQQALSRTAKGSNHRKKAVVKVAKAHARVADARRDFAHQLSATLIRENQAVVVEDLAVKGLARTKLAKSVHDAGWSQFVAMLTYKAARYGRTLIRIDRWFPSSKMCSVCGALAASMPLNVREWECACGAVHDRDVNAAINILAAGRAERLNACGGTVRPAA

SEQ ID NO: 2197 - protein, 369 aa, unidentified
MANKAYKFRLYPTQEQAQLLAKTFGCVRFVYNKMLEERIQIYEKFKDDKEAMKQHKFPTPAKYKKDFPWLKEVDSLALANAQLNLQKAFTNFFSGRAGFPKFKSRKAKQSYTTNMVNGNIKLADGYIKLPKLKWVKFKQHREIPVHHIIKSCTITKTKTGKYFISILTEYEHQPVPKEVKNVVGLDFSMNTLYVDSEGKRANYPRFYRQALEKLARAQRVLSRRRKGSNRWHKQRLKVARLHEKIANQRQDFLHKASRQLANRYDAVVIEDLNMKGMSQALHFGKSVHDNGWGLFTTFLQYKLEEQGKKLIKIDKWFPSSKTCSCCGQVKVSLSLTERQFRCECGFVADRDINAAINIKKEGLKKLGTA

SEQ ID NO: 2198 - protein, 357 aa, unidentified
MQLRYQFRVYPTPGQQIELARAFGCARVVFNDGLRARQEAREAGQPYVSDGELSKRVITEAKKTETRAWLGEVSAVVLQQALADLNTAYRNFFASVTGKRKGRKVAPPRFRSRKDNRQSIRFTKNSRFKVLDNGRLRLPKIGDLEVRWSRALPSDPSSVAIIRDAAGRYFASFVVTLGTDETLPPVDSEVGIDLGLTHFAVLSDGTKVAAPKFLRRAARKLKWLQQDLSRKQKGSNRRKTAVVKVARAHARVADTRRDWQHKLSTQIIRENQAVYVEDLCVVGLGRTRLAKSVHDAGWASFTACWSTRPPGTGAPSAGWTGSSRPPACARRVAGSTRRWRSTSDRGTARAEQPTTGT

SEQ ID NO: 2199 - protein, 407 aa, unidentified
MQLRYAFRLYPELGQRLALGRAFGCARVVFNDAVRARKDAHAAGLPYPKAAELSRTLVTRAKRTVERSWLGEVSSVVLQQSLRDVEAAYRAFFASLKGERKGARVGAPRFKSRKDSRQSIRFTANARWSITPTGRLNLPKIGEVRVKWSRTLPVVPSSVTVIKDSAGRYFASFVIDTDPAADAARMPATDQAIGIDLGLTHFAVLSDGTKIDSPRFLRRAEKKLKKTQRELSRKRKGSKNRAKARLKVARAHAQVADARKEFHHQLSTRLIRENQAIAVEDLPVKGLARTKLAKSVHDAGWSQFVTMLAYKAARYGRTLIKINRFEPTSQVCSTCGHHDGPKPLHVREWTCPVCGTRHDRDVNAAKNVKQAAGLAASACGAKVRPEPVLAQREETGSHGIPAGSRAA

SEQ ID NO: 2200 - protein, 435 aa, unidentified
MSAGSTINQNGKLAIVQLRYQFRVYPTPDQQIELAKAFGCARVVFNDGLRLRQQAREQGLAYVSDGELSRRVITEAKLTLQRSWLAEVSAVVLQQALADLNTAYRNFFHSLSGKRKGRKVAPPRFRSRKDNRQAIRFTKNARFKILDNGRLRLPKIGDLEVRWSRTLPSDPSSVTIIKDAAGRYFASFVLQATDEALPPVESEVGIDLGLTHFAVLCDGTKVAAPKFLRRAARKLKRLQQALSRKQRGSQNRRKAVIKVARAHARVADTRRDWQHKLSTAIIRDNQAVYVEDLAVAGLGRTRLARSVHDAGWAGFTSMLEYKAARYGRTFARVDRFFPSTRMCSDCGRINEKMALDVRAWDCSCGSHHDRDVNAAKNIRAAGQADLNDRGAHVRPGPVPAVRREAVTHPNAACSTRSVEGISVLQDGEDVKTTGC

SEQ ID NO: 2201 - protein, 429 aa, unidentified
MPARSAINQHGAMSSVQLRYNFRVYPTPGQQIELAKAFGCARVVFNDGLRARQEAREQGLPYVSDGDLSKQVITQAKLTPEREWLGEVSAVVLQQALADLNVAYRNFFASVTGKRKGRRVAPPKFRSRKDNRQAIRFTANARFKVLDNGRLRLPKIGDLDVRWSRGLPSDPSSVTIVKDAAGRHFASFVVTTTDEALPELDSEVGIDLGLTHFAVLSDGTKVTAPKFLRRAARKLKRLQQDLTRKQRGSNNRKKAVVKVARAHARVADTRRDWQHKLSTRIIRENQAVYVEDLCVVGLGRTRLAKSVHDAGWSSFVGMLEYKAARWGRTLGKIDRFAPTSQTCSVCGRIDGPKPLSVRSWACLCGAVHDRDVNAAINVLAQGRWDNSNACGTRVRPALVPAPRPTSRREAGIRPDAACSTRSVEGISAL

SEQ ID NO: 2202 - protein, 354 aa, unidentified
MKSEKQMLTYSYRVKDGNVANKLNQLARATNFVWNYCNETSFNAIKQRGKFLSKYDFRPLTKGASKELPINSQTIQAISDEYVTRRKQFKKIKLKWRGRKSLGWIPFNGQTIKIVNDVVIYDGIKIRFWKHRELLGNIKTGSFCQDSRGRWYVNFQCEVIDKRPHGERKIGIDLGLKDKAICSDGIKYDRENLTKKYEVRLAKYQRAHKKKQVKNLHAKIKNKRKDFSHKVSNEICSTSEIVIVGDISASKLAKTRMAKSVLDAGWSQLTTMLHYKAIRHGMVVKKVSEKWSTQTCSYCGVIPESAPKGISALGVRNWKCSECEAIHDRDINAARNIFNFGAGRCAPTGSLSLQ

SEQ ID NO: 2203 - protein, 456 aa, unidentified
MPSSSAINQWYDGVVQLRYNYRAYPTPGQQIELARAFGCARVVFNDGLRLRRQAREAGEKYVSDGELSRRLITEAKATPERAWLGEVSAVVLQQALADLNTAYRNFFASVTGKRKGRKVAPPRFRSRKDNRQAIRFTKNARFKVLDNSRLRLPKIGDLAVRWSRTLPSDPSSVTIIKDAAGRYFASFVVQTMDEPLPETDSEVGIDLGLTHFAVLSDGTKVTAPKFLRRAARKLKRLQQDLSRKQKGSANRKKAVVKVARAHARVVDTRRDWQHKLSTTIIRENQAVYVEDLCVTGLSRTRLAKSVHDAGWASFTAMLECKAARYGRTFARVDRFFPSTRMCSDCGRINNKTALNVRSWDCPCGSHHDRDVNAAINVRAAGQADLNARGAHVRPASVPAAHREAGTHPDAARSTRSVEGISVLKDSFRTERMSNRTPHRLRHLAGIAPRPGLHVVQ

SEQ ID NO: 2204 - protein, 429 aa, unidentified
MNQHGTVCPVQLRYNFRVYPTPGQQIELARAFGCARVVFNDGLRLRQQARENDEKYISDGELSRRLITEAKLTPARAWLGEVSAVVLQQALADLNTAYRNFFASVTGKREGRKVAPPRFRSRKDNRQAIRFTKNSRFKVLDNGRLRLPKIGDLHVRWSRTLPSDPSSVAIIRDAAGRYFASFVVQTGDEALPTVDSEVGIDLGLTHFAVMSDGTKVSAPKFLRRAARKLKRLQQAVSRRQRGSQNRKKAVVQVARAHARVADTRRDWQHKLSTRIIRENQAVYIEDLCVVGLGRTRLAKSVHDAGWAGFTGMLEYKAARYGRTFGRVDRFFPSTRMCSACGRINDKMALNVRAWDCPCGAAHDRDVNAALNVLAAGQADNSNDRGAQVRPERVPAPRGEAVTHPDAACSTRSVEGISVLQGGEDVNRRR

SEQ ID NO: 2205 - protein, 434 aa, unidentified
MLEAVKVALDPTPRQERLLESHAGAARFAYNNGLAHVKDMLERGDTPEWSYYALRRWWNQAKNTLAMDETTGEPWWPRNSKEAYNSGLESLADALKNFSKSRKGQRKGRRMGFPRFKSKDSGIRRFAYTTGSFGLIDHDPYALKLPRIGRVHCMEDASKRVDGAKVLRMSVSKRGGRWQASLTVERADLPIPSPPKGGSVGIDLGVKELATLSDGTVMHNPHALKSNLRRLKKAQRNLSRKRKGSNRRRKARAQVARLYARVANLRSDALNKTTAMLAHTYADISIEDLNVAGMAGNHGLAQSIQDAAFAEFRRQLTYKTARTGARLHVIDRWYPSSKTCSNCGTVKAKLPLSERVYHCGKCGLSIDRDVNAAINIQVAGSAPETLNARGGSGRQTRLECGTMRHPAKREPSGGESRVRLGAGLGNEAMQMTSL

SEQ ID NO: 2206 - protein, 424 aa, unidentified
MPSSSAINQWYSARVQLRYHYRVYPDAAQREALARSFGCARVVFNDGLRLRQRARENGEKYVSDAELSRRLITEAKLTPQRAWLGEVSSVVLQQALADLNVAYRNLFNSVTGKRKGRKVAPPRFRSRKDNRQAIRFTKNSRFTVLGNGRLRLPKIGDLHVRWSRSLPSEASSVTVIRDAAGRYLASFVVQTNQDETLPPVDPEIGIDLGLTHFAVMSDGAKVTAPKFLRRAARKLKRLQQDLSRKQRGSQNRKKAVVKVARAHARVADTRRDWQHKLSTAIIRDNQAVYVEDLCVVGLGRTRLAKSVHDAGWASFRAMLEYKAARYGRTFARVDRFFPSTRMCSACGRINDKMALAVRAWDCPCGAAHDRDINAAKNIKAAGQADFNDRGAQVRPGLVPAPRGEAVTHPNPACSTRSVEGISVL

SEQ ID NO: 2207 - protein, 381 aa, unidentified
MNHTKTLQVRVRDKHAPLLRQMARSVNFVWNYLNELSHRSIRERGVFLSAFDLHPYTKGAGKELGLHSQTLQYVAAEYVTRRKQYRKARLNWRKSGGVRRSLGWVPFNTAAASWKNGQIYHNGYYFKVWDSYGLGQYRFRSGSFSEDARGRWYFNVVVELDTQLSAGQGAVGIDLGLKDVATCSDGQRLENGRFYRDLEPRLAKAQRADKKARVRAIHAKIVNRRKDALHKFSRSLVERCNMIIVGDVSPQKLVRTTMAKSVLDAGWGQLKTMLAYKCAHAGIVFRVVNEAYTTQTCSCCGALPASRPRGIAGLGIREWICECGVTHDRDVNAARNILALGHERPVEGIFRRLGRGGCQPEPCFTAFSWDLTPMRFSTTKE

SEQ ID NO: 2208 - protein, 374 aa, unidentified
MNKAFKYRIYPSPEQEILINKTFGCVRFVYNKMLANRKEVYEQFKDDKEVQKQQKYLLPADFKKEFEWLKEVDSLALANAQLNLQTAYKNFFRDKSIGFPKFKNKHHDKKSYTTNNQSGTIRMIDSKTIRLPKLKDVRIKLHRQLPKGSVIKSATISKTPTGKYYVSVLVQYEADMKPVAPTIETVLGLDYSSKSLFVDSQAKNADYPKFYRKEEANLKRAQRKLSKRKKGGKNWERQRLKVAKLHEKVANQRKDFLHKLSRQIANAYTAVAIEDLNMRGMAQSLNLAKSTNDNGFGMLKTFLGYKLAEQGKQLVVIDKWFPSSKMCRFCNNENKELTLSDRTWTCSHCGAELDRDVNAAINIKNEGCQMLGIA

SEQ ID NO: 2209 - protein, 505 aa, unidentified
MDPTPGQVEALTRHAGAARWAFNHALGMKVAAHQQWRREVQALVGQGVPEAEARKKVRVPAPSKPQIQKHLNQIKGDSRTGGLPEGVYGPERPCPWWHEVNTYAFQSAFIDADRAWKNWLDSLRGARAGRRVGYPRFKKKGRAREAFRLHHNVKRPAIRLESYRRLLLPRIGSVRLHESAKRLGRLIGRGDAVVQSVTVSRAGHRWYASVLCKVTTDLPDQPTRRQRQRGRVGVDLGVKHLAVLSQPLEPDDAVTAFVTNPRHVRKAEHRLVKAQRALARTQKGSARRDKVRRRVARLHHEVAVRRSTVLHALTKQLATRFAEVAVEDLNVAGMTRTARGTVDKPSRRVRQKAGLNRAILDAAPGELRRQLTYKTCWYGSTLAVLDRWFPSSKTCSACGWQNPRLTLADRTFHCTNCTLAIDRDLNAARNIAAHAVPVDRPVAPGRGETQNARGAPVRPPGPRARRQEAMKREDTSPPRPVPPQRSDPPTLFTHNHIGHEMAKQV

SEQ ID NO: 2210 - protein, 413 aa, unidentified
MLLVQLRYNYRVYPDTAQREALSRSFGCARVVFNDGLHLRQQAREAGEKYLSDGELSRRLITEAKATEERAWLGEVSSVVLQQALADLNTAYRNFFASLTGKRKGRKVAPPRFRSRKDNRQAIRFTKNSRFRVLDNGRLRLPKIGDLDVRWSRTLPADPSSVAIIKDAAGRYFASFVVQTAEDETLPEADSEVGIDLGLTHFAVMSDGTKVAAPKFLRRAARKLKRLQQDLSRKQRGSQNRKKAVVKVARAHARVADTRRDWQHKLSTRIIRENQAVYVEDLCVVGLGRTRLAKSVHDAGWASFTGMLEYKAARYGRTFARVDRFFPSTRMCSACGRINENMALDIRAWDCPCGAAHDRDVNAAINVKAAGQADFNDRGAQARPGLVPAPRGEAVTHPDVACSTRSVEGISVL

SEQ ID NO: 2211 - protein, 416 aa, unidentified
MIPCAFVQLRYQFRVYPTPGQQIELARAFGCARVVFNDGLRARQEAREQGLPYVSDAELSKRVITQAKATPERAWLGEVSAVVLQQALADLNTAYRNFFASITGKRKGRKMAPPRFRSRKDNRQAIRFTKNSRFKVLDNGRLRLPKIGDVTVRWSRSLPSDPSSVTIIRDAAGRHFASFVVQTGDELLPELDSEVGIDLGLTHFAVLSDGTKVAAPKFLRRAARKLKRLQQDLSRKQRGSSNRKKAVVKVARAHVRVADTRRDWQHKLSTAIIRENQAVYVEDLCVAGLARTRLAKSVHDAGWASFTAMLEYKAARHGRTFGRVNRFFPSTRMCSQCGRINDKMALNVRAWDCPCGAAHDRDANAAINVLAAGQAESRNDRGAQVRPGLLPAPRGEAVTHPDAARSTRSMEGISAL

SEQ ID NO: 2212 - protein, 404 aa, unidentified
MKRLQAFKFQLRPGGQQERQMRLFAGACRFVFNRALALQNENYEAGNKYIPYTKMASWLVEWKKDTETEWLKDSPSQPLQQSLKDLERAYKNFFQKRAAFPRFKKRGQNDAFRYPQGVKLDQENSRIFLPKLGWMRYRNSRQVTGVVKNVTVSQSCGKWYISIQTESEVSTPVHPSASMVGLDAGVARLATLSDGTVFEPVNSFQKNQKKLARLQRQLSRKVRFSNNWQKQKRKIQQLHSRIANIRRDYLHKVTTIISKNHAMIVIEDLKVKHMSKSAAGTISQPGRNVRAKSGLNRSILDQGWYEMRRQLEYKQLWHGGQVLAVPTAYTSQRCACCGHTAKENRLSQSKFRCQVCGYTANADVNGARNILAAGHAVLACGGMVQSGRPLKQEPTEMIQATALT

SEQ ID NO: 2213 - protein, 593 aa, unidentified
MPVTEVLRAYRFTLDPSDRERAALSRYSGACRWAYNYAVAKKTQAHRAWADRRTAYVEAGLTEAEAKERIKADGAELTDRIKVWDHHRKSLTLTVVGKPPPAAMRSPAGQEVLVRRLATARADAAGTSRERALLAEGRAMVNALKAQAFRAGFRTPTATDTSNLWRMERDLPKEEGGSPWWSEVNVYCFTSGFDRAQVAWKYWQDSLSGRHAGQRHGYPRFKKKGHAESFSLFHDVMRPIIRLEGYRRLVMPGLGSIRIHDSGKRLARLVDRGQAVIQSVTVSRGGHRWYASVLAKVQQDVPVLWEHVHDDGTRTPYLSRIQAEKASENGGRVEQIGRPTARQRAGGLVGVDLGSHHLATLSSPLDPADPSTAVVHLPRLLADSLARLSKAQRAMSRCQQGSGRWRKATARVSRAHQQVRVRRASFLHGLSKKLATGFTHVAIEDPDITALTTSTEGTRDKPRKNATAKARLNQHLLDAGLGSLRKKLAYKTAWYGSQLVVLDHGEPVTASCATCKERNPSSDPSCSKVHCPSCGAVVHRHVNSTASIVDAAHRKLKTVASDRGETQNARRAPGSPGARKAPGQGASKREDTG

SEQ ID NO: 2214 - protein, 404 aa, unidentified
MKRLQAFKFQLRPGGQQERQMRLFAGACRFVFNRALALQNENYEAGNKYIPYTKMASWLVEWKKDTETEWLKDSPSQPLQQSLKDLERAYKNFFQKRAAFPRFKKRGQNDAFRYPQGVKLDQENSRIFLPKLGWVRYRNSRQVTGIVKNVTVSQSCGKWYISIQTESEVSTPVHPSASMVGLDAGVARLATLSDGTVFEPVNSFQKNQKKLARLQRQLSRKVRFSNNWQKQKRKIQQLHSRIANIRRDYLHKVTTIISKNHAMIVIEDLKVKHMSKSAAGTISQPGRNVRAKSGLNRSILDQGWYEMRRQLEYKQRWHGGQVLAVPPAYTSQRCACCGHIAKENRLSQSKFRCQVCGYTANADVNGARNILAAGHAVLACGGMVQSGRPLKQEPTEMIQATALT

SEQ ID NO: 2215 - protein, 390 aa, unidentified
MLSAIKVRLYPTLTQAEFLNAQFGAVRFAYNKALHIKSHAYRKHAVNLNPKKDLKPLPAIAKKSRKYAWLKQYDSIALQQSVIHLHQAFDNFFNPKLRAKFPQFKRRHGKQSSYHCVGVKVLDSAIKLPKMEPIKANIHRDIIGKIKSITVSLTKTGKYYAAILVDNGVEQPEPLQTIDKVTGIDLGLTHFAIQSNGKKEANPRFIKRAQNNLRRKQRQLSRKAKRSKNRAKARLIVAKCHEKVANARADFQHKLSRTIIDENQAVIVETLKSANMMKNRKLAKHIADASWHSFVLKLAYKAKASGKHLVKIDQWFASSKMCHCCGDKVNDMLLSVRRWDCPSCGAVDIDRDVNAALNIRDKGILDLKASGQVVTACGGLRQSQYYRVAA

SEQ ID NO: 2216 - protein, 436 aa, unidentified
MQLRYAFRLYPDATQQAALARAFGCARVVYNDAVRAREDAREAGRPFPTAGQLSRQLVTEAKQTPERAWLGEVSAVVLQQSLRDAEMAYRNFFASLKGTRKGPKLGPPRFKSRKDNRQSIRFTANARWSITDSGRLSLPKIGTVKVKWSRTLPATPTSVTVIKDAAGRFFASFVLDTDPAADQARMPDTDRAIGIDLGLTHFAVLSDGTKIDSPRFLRRAEKKLKKAHKELSRKLKGSKNRAKAREKVARAHAKVADARREFHHQLSTRLISENQGIAVEDLSVAGLARTRLAKSVHDAGWAQFISMLTYKAQRYGRTLVPIGRFEPTSQVCSTCGAKDGPKPLSIREWICSACGTVHDRDHNAALNIKTAAGLAATACGAPVRPGAIPAQREETGSHGFPDRKPCRVTAQQPVREGQNPRPSEREASQFQVSLVE

SEQ ID NO: 2217 - protein, 352 aa, unidentified
MKTLKLRIKDKHCKVLDQLASEVNFVWNYVNDLSFKHLKRTGDFFSAFDMTQYTKGTSKLCGLHSQTVQGITEEYVDKRRQHKKAKLKWRVSNKKSARRSLGWIPFKKVAIKYADGYVQYGKQKFKLWDSYGISKYSVRTGSFVEDSRGRWYVCLVVDSPKQDKPTATKAIGIDLGLKDVATCSDGTVISNPKFYRNYEQKLGIAQRARNKKRVRALHAKIANCRKDHLHKASTLLVKENALIVVGDLSASKLVKTKMVKSVLDTGFSALKTMLKYKCENAGVLFEEVSEKFTTQICSCCGEITSSSPKGRTDLRIRVWECECGSINHRDLNSAKNILALGHERLAVGIRLL

SEQ ID NO: 2218 - protein, 394 aa, unidentified
MKKKDEPNLSAKNCVTQYNTIKVRLYPNQEQKELFQKTFGCCRYIWNQMLADHERFYLETDAHFIPTPAKYKKGAPFLKEVDHQALTQEYNKLSQAFRNFFRNPKAFGYPNFKRKKEDRDTFSACNQISGNSATIYITKDAVRMTKAGLVKAKFPCRPRSGWKLTRITVERSKTGKYFGYLLFSCVVHKPKPIQPIKERTIGLKYSLSHFYVADNGFTADPPLWLRRSQEKLSQMQQRLCRMKPGSNNYQEMVQKYRLLHEHIANQRRDFLHKESCRIANEWDAVCVRDDSLTDISQELTGGDVFNSGFGRFREMLGYKLERRGKQLLLVDRYLPTTRICSVCGHETQKLAPKTKRWICPVCGTEHEKDKNAAVNIKNQGFHQSSLNLGSSFAS

SEQ ID NO: 2219 - protein, 593 aa, unidentified
MPVTEVLRAYRFTLDPSDRERAALSRYSGACRWAYNYAVAKKTQAHRAWADRRTAYVEAGLTEAEAKERIKADGAELTDRIKVWDHHRKSLTLTVVGKPPPAAMRSPAGQEALVRRLATARADAAGTSRERALLAEGRAMVNALKAQAFRAGFRTPTATDTSNLWRMERDLPKEEGGSPWWSEVNVYCFTSGFDRAQVAWKYWQDSLSGRHAGQRHGYPRFKKKGHAESFSLFHDVMRPIIRLEGYRRLVMPGLGSIRIHDSGKRLARLVDRGQAVIQSVTVSRGGHRWYASVLAKVQQDVPVLWEHVHDDGTRTPYLSRIQAEKASENGGRVEQIGRPTARQRAGGLVGVDLGSHHLATLSSPLDPADPATAVVHLPRLLADSLARLSKAQRAMSRCQQGSGRWRKATARVSRAHQQVRVRRASFLHGLSKKLATGFTHVAIEDPDITALTTSTEGTRDKPRKNATAKARLNQHLLDAGLGSLRKKLAYKTAWYGSQLVVLDHGEPVTASCATCKERNPSSDPSCSKVHCPSCGAVVHRHVNSTASIVDAAHRKLKTVASDRGETQNARRAPGSPGARKAPGQGASKREDTG

SEQ ID NO: 2220 - protein, 429 aa, unidentified
MQLRYNFRLYPTAGQRESLARAFGCARTVFNDGLRLRHEAREQGLPYVSDGDLSKRLITEAKKTPERAWLGEVSAVLLQQALADLNTAYRNFFASATGRRKGPQMAPPRFRSRKDSRQSIRFTKNAKFKVTPAGRLRLPKIGDVPVRWSRRLPSQPSSVTVTKDTAGRYFASFVVQTSDEPLPEVSSEVGVDLGLTHFLVTSDGRKVDNPRFLRRAERRLRKAQQSLARKEKGSQNRKKAVVKVARAHAKVADARRDHAHKLSTQLIRDNQAVYVENLSVSGLARTRLAKSVHDAGWSQFTTMLAYKATLHGRTFARIDRWFPSSRRCSACGVIAGRMPLDVREWTCGCGVTHDRDHNAAKNILAAGRAERRNACGDQAGPDSGPAPVVEAGTHSTLPASAALQGRIPPVRREGCQDAGHALEDRDGRS

SEQ ID NO: 2221 - protein, 505 aa, unidentified
MLSVQLRYQFRVYPTPGQRIELARAFGCARVVFNDGLRLRQQAHEAGEKYISDGELSRRLITEAKATPERAWLGEVSSVVLQQALADLNTAYRNFFASVSGKRKGRAVAPPRFRSRKDNRQAIRFTKNSRFRVLDNGRLRLPKIGDLDVRWSRSLPSDPSSVAIIRDAAGRYYASFVVQTAEDETLPPVESEVGIDLGLTHFAVLSDGTKVAAPKFLRRAAGKLKRLQQALSRKQKGSANRKKAVVKVARAHARVADTRRDWQHKLSTAIVRENQAIYVEDLCVAGLGRTRLAKSVHDAGWASFTGMLEYKAARYGRTFGRVDRFFPSTRMCSDCGRVNEKMVLNVRAWDCPCGSHHDRDVNAARNVRAAGQADLNDRGARVRPPAMVAPRGEAVTHPDAACSTRSVEGISVLQGGEDVNSRTGSAGTCCTTRCGSRSGCGWAGRTGRRATGPPSRSRVSTPAGSCSGWRHRVRHLRLGVRRLAHESLVVICREPSGVTTTATQT

SEQ ID NO: 2222 - protein, 395 aa, unidentified
MRLNQGGEKEIAKKRKSEPLLHQAYKFRIYPTKEQATLIHKSIGCSRFVFNHFLAKWEDTYQETGKGLTYNTCSKFLTALKIELEWLKEVDSTSLQRALKNVDDAFKRFFKKQNDRPRFKSRKNPVQSYTSQCNHPKKGKPTIEVLENKIKLPKLGWVRFAKSREVEGKILSATIRRSPSGKYFVSVLCEMNHCPYVPATNETVGIDLGLKDFTILSDGRKENTPTYFRKYEKQLAKAQRIMSRRTKGGSNWHKARIKVARIHEKITHARHDFLHKLSTKLIHENQVISMEDLQVKNMVKNHNLAKSITDASWSEFVSMLEYKAKWHGRTLVKVGKTFPSSQLCSGCGYRNKEVKKLNLREWICPECNQHHDRDMNAAKNILHEGLRLISVGLTV

SEQ ID NO: 2223 - protein, 366 aa, unidentified
MAKAFGCARVVFNDGLRLRQQAHEQGLPYLSDGDLFKRMITQAKKTPERAWLGEVSAVVLQQALADLNTAFRNFFASVSGKRKGPKMAPPRFRSRKDTRQTVRFTRNARFAITTGGKLRLPKIGEVTLRWSRDLPSEPSSVTVTKDASGRYFASFVVETGDEPLPEATSQIGVDLGLTHFAVLSDGRKIDNPRFLRRAERRLKKAQKALSRKAKGSANRRKAVVKVAKAHAGVADARRDHHHKLSTAIIRDDQTVYVEDLAVNGLACTRLAKSVHDVGWSAFVDMLEYKAARYGRTFAKVGRFLPSSQTCSVCFVIDGPKPLSVREWTCGACQTTHDQDVNASRIVLAAGRAERRNACGGTVRPAA

SEQ ID NO: 2224 - protein, 423 aa, unidentified
MPSSSAINQWYSALVQLRYNYRVYPTPSQQASLARAFGCARVVFNDGLRARQEAREQGLPYLSDAELSKRVTAAKGAPERAWLGEVSSVVLQQALADLNAAYRNFFASITGKRKGRKVAPPRFRSRKDNRQAIRFTANARFKVLDNGRLRLPKIGDVEVRWSRGLPSEPSSVTVIRDAAGRYFASFVVQTADEPLSPVESEVGIDLGLTHFAVLSDGTKVAAPKFLRRAARKLKRLQQDLSRKTKGSNNRKKAVVKVARAHAQVADTRRDWQHKLSTRIIRDNQAVYVEDLCVAGLGRTRLAKSVHDAGWSQFVGMLEYKATRYGRTFARVDRFFPSTRMCSDCGRINDKMALDVRAWDCPCASSHDRDVNAAMNVLAAGRAESLNACGAQVRPAPVPAPREEAGIRPDAACATRSVEGVSVL

SEQ ID NO: 2225 - protein, 434 aa, unidentified
MEDMKHTKTLKVRVRDKHRPLLNQMARSVNFVWNYVNELSHRSIKERGVFLSAYDIQKYTQGAHKELGLHSHTVQKVGAEYGTRRKQFKKSKLAWRKSGGVRRSLGWIPINTGMAKWKNGQVYHNGQYFKVWDSYNLSRYTFRSASFNEDARGHWYFNVVVEVEVDMPAGQDKIGIDLGLKDTATSSDGAKLEAGRFYRDLESKLAVAQRAGKKKRIKAIHAKIANRRKDALHKFSRQLVNRSGEIYVGNVKSSSLAKTKMAKSVLDAGWAMLKTMLEYKCDSAGIVFKEVNESYTTQACSCCGCISVSSPKGRAGLRIREWTCSECGVTHDRDVNAAKNILAVGHGRPVEGIPALKHGEDVNYLQAGMIRAGIAKSALESPAYTDVTNAGSIAEALEVCHLGIIGFGEPPLSQSNGWLRSRSTGRLARKRLMA

SEQ ID NO: 2226 - protein, 363 aa, unidentified
MPKAYRYRLYPTKSQVSQMEQTLEICRWVYNETLAMRKSAWEQEQRSISYYESKRQIPLWKKEHPELSGVYSQVLQDVSMRVDLAFKAFFRRVKAGENPGYPRFKGRGRYDSFTYPQYGFKLDRDRLHLSKIGDVKVLLHRPVEGTIKTLTIRRSSTGKWYACFSVEYDPSPLPQKETTVGIDVGLESFATFSNGEKIENPRFFRTDEKALAKAQRRLSKAEKGTPERKKARKTVAHIHERIANRRLNFAHQTSRKVVDRFGTIVFEDLNITNMQKNHHLAKSIADVAWNLFISITESKAEEAGSHVILVNPRNTSQMCSRCGMIVAKTLSDRVHSCPHCGLVMDRDQNAAINIMRLGLQSQG

SEQ ID NO: 2227 - protein, 436 aa, unidentified
MQLRYAFRLYPNAAQQTALARAFGCARVVFNDAVRAREDAREAGQLFPTAGQLSTRLITEAKRTPERAWLGEVSAVVLQQSLRDAEVAYKNFFASLKGTRKGPKLGAPRFKSRKDARQSIRFTANARWSITGSGRLNLPKIGAVKVKWSRTLPATPTSVTVVKDAAGRFFASFVIDRDTAADQARMPDTDHTVGIDLGLTHFAVLSDGTKIDSPRFLRRAEKKLKKAQRELSRKQKGSKNRAKARLKVARAHAKVTDARREFHHQLSTKLICENQGIAVEDLAVAGLARTRLAKSVHDAGWTQFISMLTYKAQRYGRTMVTIGRFEPTSQTCSTCGVVDGPKPLHVREWTCTSCGTVHDRDTNAAINIKTAAGLAVTACGAPIRPGAIPAQREETGSHGFPTGDVPRSGTVSGGEGQNPRPSGRGACQSLTLPAGG

SEQ ID NO: 2228 - protein, 316 aa, unidentified
MQLRYNFRVYPTTSQQIELARAFGCARVVFNDGLRLRQQAREAGEKYVSDGELSRRLITEAKLTPERAWLGEVSSVVLQQALADLNTAYRNFFASISGKRKGRKLAPPRFRSRKDNRQAIRFTKNSRFKVLDNSRLRLPRIGDLAVRWSRTLPSDPSSVAIIRDAAGRYFASFVVQSTDEALPPVESEVGIDLGLTHFAVLSDGTKVAAPKFLRRAARKLKRLQQALSRKQRGSQNRKKAVVKVARAHARVADTRRDWQHKLSTAIIRENQAVYVEDLCVVGLGRTRLAKSVHDAGWAGFTGMLEYKAARYGRTFG

SEQ ID NO: 2229 - protein, 316 aa, unidentified
MQLRYNFRVYPTTSQQIELARAFGCARVVFNDGLRLRQQAREAGEKYVSDGELSRRLITEAKLTPERAWLGEVSSVVLQQALADLNTAYRNFFASISGKRKGRKLAPPRFRSRKDNRQAIRFTKNSRFKVLDNSRLRLPRIGDLAVRWSRTLPSDPSSVAIIRDAAGRHFASFVVQTTDEALPPVESEVGIDLGLTHFAVLPDGTKVAAPKFLRRAARKLKRLQQALSRKQRGSQNRKKAVVKVARAHARVADTRRDWQHKLSTAIIRENQAVYVEDLCVAGLGRTRLAKSVHDAGWAGFTGMLEYKAARYGRTFG

SEQ ID NO: 2230 - protein, 390 aa, unidentified
MQLRYQFRLYPTPGQQQLLARAFGCARVVFDDALRVRQQAHAAGLPYVSDGDLSKQVITQAKKTGQRAWLGEVSAVVLQQALADLSTAYRNFFASVSGKRNGRKVSPPRYRSRKDRRQAIRFTRNARFTVTAGGRLRLPKIGDVRVRWSRDLPSAPSSVTVIKDAAGRYFASFVVETAGEPLPEVAAEVGIDLGLTHFAVLSDGRKISSPRFLRRAERRLRKAQQALSRKQKGSANRRKAVAKVARLHVRVVDARRDHHHKLSTRLIRDNQAVYVEDLAVNGLAGTRLAKSLHDAGWSTFVGMLEYKAKRHGRTFAKVDRWFPSSKLCSACGAVAESMPLSVREWACPCGTVHDRDINAANNILAAGRAERQNACGGTVSPGRLAEGRTP

SEQ ID NO: 2231 - protein, 433 aa, unidentified
MLEAVKVALDPTPRQERLLESHAGAARFAYNNGLAHVRDMLERGDEPEWSYYGLRRWWNQAKDTLAVDEATGEPWWPENSKEAYNSGLESLADALRNFSKSRKGRRKGRGMGFPRFKSKDRAVPGFAYTTGSFGLIDCDPHALRLPKIGRVHCMENASRRVDGARVLRMSVSRRGGRWQASLTVERADLPVPSPPKGGSVGIDLGVKKLATLSDGTVIHNPHALKSNLGRLKKAQRSLSRKRKGSNRRRKARAQVARLHARVANLRSDALNKTTTMLAHAYSDIGIEDLNVAGLVKNHGLAQSIQDAAFAEFRRLLTYKTARTGARLHVIDRWYPSSKTCSNCGTVKAKLSLSERVYHCDKCGLSIDRDVNAAINIQVAGSAPETLNARGEDVRQTGSSRTMPAPVKREPSGGGSRVRLGAGLGNEAIQMTSL

SEQ ID NO: 2232 - protein, 434 aa, unidentified
MLEAVKVALDPTPRQERLLESHAGAARFAYNAGLAHVKDMLERQEKPEWSYYALRRWWNANKDALAVSMETGKPWWPENSKESYNSGLESLADALKNFSKSRKGRRKGRRMGFPRFKSKDKAVPGFAYTTGSFGLIDCDPYALRLPKIGRVHCMENVSKRVDGAKVLRMSVSKRGGRWQASLTVERADLPIPSPPKGGSVGIDLGVKELATLSDGTIIHNPHALKSNLGRLKKAQRNLSRKRKGSNRRREARTRVARLHARVADLRRDLLDKTTTMLARAYADISIEDLNVAGMVRNHRLARSVEDAAFAEFRRQLEYKTARTGARLHVIDRWYPSSKTCSNCGTVKAKLSLSERVYHCEECGLVIDRDLNAAINIQVAGSAPETLNARGGSGRRADASRRATRHPVKREPSDGVSRVRLGAGLGNEAMQMTSL

SEQ ID NO: 2233 - protein, 433 aa, unidentified
MLEAVKVALDPTPRQERLLESHAGAARFAYNNGLAHVRDMLERGDKPEWSYYGLRRWWNQAKNTLAVDGTTGETWWPENSKEAYNSGLESLADALRNFSKSRKGRRKGRGMGFPRFKSKDRAVPGFAYTTGSFGLIDCDPHALRLPKIGRVHCMENASRRVDGAKVLRMSVSKRGGRWQASLTVERADLPIPSPPKGGSVGIDLGVKKLATLSDGTVIHNPHALKSNLGRLKKAQRSLSRKRKGSNRRRKARAQVARLHARVANLRSDALNKTTTMLAHAYSDIGIEDLNVAGLVKNHGLAQSIQDAAFAEFRRLLTYKTARTGARLHVIDRWYPSSKTCSNCGTVKAKLSLSERVYHCDKCGLSIDRDVNAAINIQVAGSAPETLNARGEDVRQTGSSRTMPAPVKREPSGGGSRVRLGAGLGNEAIQMTSL

SEQ ID NO: 2234 - protein, 434 aa, unidentified
MLEAVKVALDPTPRQERLLESHAGAARFAYNAGLAHVKAMLERQEKPEWSYYALRRWWNANKDALAVSMETGKPWWRENSKEAYNSGLESLADALRNFSKSRKGRRKGRGMGFPRFKSKDKAVPGFAYTTGSFGLIDCDPHALRLPRIGRVHCMEDVSRRVDGARVLRMSVSRRGGRWQASLTVERADLPVPSPPKGGSVGIDLGVKELATLSDGTVMHNPHALKSNLRRLKKAQRSLSRKRKGSDRRRKARAQVARLYARVANLRSDALNKTTTMLAHAYSDIGIEDLNVAGLVKNHGLARSIQDAAFAEFRRQLTYKTARTGARLHVIDRWYPSSKTCSNCGTVKAKLPLSERVYHCEECGIVIDRDLNAAINIQVAGSAPETLNARGGSVRQAHPKGGTMRHPVKREPSGGESRVRLGAGLGNEAMQMTSL

SEQ ID NO: 2235 - protein, 593 aa, unidentified
MPETQVLRAYRFALDPTDAERATLSRYAGACRWAYNYALAKKTESHQAWMARRARYLDAGLSEAEAKSRIKADGAGLTDRIKVWDHHRRSLMATTSGKQHLAMFQPPAGQEVLDRRLAAARADAVATGRESLLLAEARTAVNSLKAEAFRAGFRTPSAMDTSALWRMDRDRPAEAGGSPWWGEVNVYCFTSGFDRAQAAWKNWLESLSGRRAGRRAGYPRFKTKGRAAESFALFHDVKRPIIRLDGYRRLVMPGLGSIRIHGTGKTLARLVGRGRAVIQSVTLTRGGHRWYACVLAKVLQDIPLLWEHIDDDGVRTPYLTRAQADTAAERTGRVKQVGRPTARQRSGGPVGVDLGSRYLALSSPLRPGDPSSTLVEHPRLLTNHLAELTKRQRALARTAKGSRRRAKAADRLVRVHHQIAVRRASSLHGVSKQLATGFTHVVIEDLDLVALSASDTGVPGDPGRDVKIKARWNRNLLDAGLGELRRQLAYKTIWYGSQLVVLDKGEPVAGTCAKCAERNPSSAPSRSGSNCPSCGAVPHRHDHSTANIVHAARRQLKTVASDRGETLNARRASVSPGAHKGSRQAVSKREGTG

SEQ ID NO: 2236 - protein, 378 aa, unidentified
MKHEYAMTSGSVWMIFVHRPNTIGIMKQTKTLKVRVKDKHVAQLNRMARSVNFVWNYLNELSSRSIRERGVFLSAYDMDRYTKGASKDLDLHSQTLQEVSREYATRRQQFSKSRLAWRKSRGIRRSLGWVPFKTGAAKWKNGQVFHNGTYFKVWDSYGLSQYRFRSGSFNEDARGRWYFNVVVEVEVQPSAGQGAVGIDLGLKEVATCSDGEKLENGRFYRDLEAKLATAQRARNKHRVKAIHAKIKNRRKDALHKFTRRLVDQHDEIYVGDVSPLKLAKTRMAKSVLDAGWGQLKTMLEYKCEHAGIVFEEVREAYTSRTCSSCGSLSGPQGVNGLRVRDWKCVECGALHDRDVNAAQNILSLAAGHRRPEVEIFVL

SEQ ID NO: 2237 - protein, 390 aa, unidentified
MLRATKVRIYPTAEQADFLNRQFDAVRFAWNKALAIKTHYYRVRNQNLSPRKHLKPLLATAKKSRKYSWLKNADSIALQQAIINLDTAFQNFFNPKLEARFPRFKSKRGKQSSYHCMSVTVGENWIKVPKCLPLKARVHREITGKVKSITLSKTTTGKYYASILVDDGLAQPNPLTDLNASQVVGIDMGITDLAITSTGHKTGNPRFLKNAQRNLKCKQKALSRCKRGSKGRAKARLLVAKAHERVANARSDFQHKLSRQLIDENQAVIVETLKVKNMLKNKRLARSIADAGWHSLLTKLEYKAKQEGKHLVKIDQWFASSKTCSCCGLKQETMPLTIRTWVCPCGAAHDRDVNAAKNIQNQGILKLKAEGLSVSVDGGKRKSGVLSVAA

SEQ ID NO: 2238 - protein, 410 aa, unidentified
MQLRYNFRVTPDAAQRTALAQAFGCARVVFNDALRLRQQAREAGEKYVSDGDLSRRIITEAKATAERAWLGEVSAVVLQQALADLNTAYRNFFASISGKRKGRKVAPPRYRSRKDNRQAVRFTKNSRFKVLDNGRLRLRKIGDLAVRWSRTLPSDPSSVTIIKDAAGRYSASFVVTIGEDETLPPVEPEIGIDLGLTHFAVMSDGSKVTAPKFLRRAARKLKRLQQALSRKTKGSNRRKKAVMQVARAHARVADTRRDWQHKLSTAIIRDNQAVYVEDLCVVGLGRTRLAKSVHDAGWASFTSMLEYKAARSGRRFGRVDRWFPSTRMCSGCGRINHKMALNVREWDCPCGSHHNRDVNAAINIKAAGQADFNDRGAQVRPGLVPAPRGEAVTHPDVACSTRSVEGTSVL

SEQ ID NO: 2239 - protein, 402 aa, unidentified
MKRLQAFKFQLRQDSQQERQMRRFAGACRFVFNRALALQNENHEAGNKYIPYTRMASWLVEWKNATETQWLKDAPSQPLQQSLKDLERAYKNFFQKRAAFPRFKKRGQNDAFRYPQGVKLDQENSRIFLPKLGWMRYRNSRQVTGVVKNVTVSQSCGKWYVSIQTESEVSTPVHPSASMVGLDAGVAKFATLSDGTVFESVNSFQKNQKKLARLQRQLSRKVKFSNNWQKQKRKIQRLHSRIANIRRDYLHKVTTIISKNHAMIVIEDLKVKHMSKSAAGTISQPGRNVRAKSGLNRSILDQGWYEMRRQLEYKQLWRGGQVLAVSPAYTSQRCACCAHTAKENRLSQSKFRCQVCGYTANADVNGARNILAAGHAVLACGGMVQSDRPLKQEPTEMIQAIA

SEQ ID NO: 2240 - protein, 433 aa, unidentified
MLEAVKVALDPTPVQERLMLSHAGAARFAYNAGLAHVKETIETGGKLEWTLYALRRWWNANKGTLAVDADGTPWWRENSKEAYNSGLEALSDALSNWSKSRKGERKGRRVGFPRFKAKDRETPRFAYTTGSFGLVRADPKALRLPRIGRVHCMENVAGRVDGARALRMTVSCRAGRWHAALTVERADPTARRTPREGAVGIDLGVKSLATLSDGTTIANPHTLKANERRLKRAQRSLSRRQPGSHRRAHARERVVRLHTRVANQRRDMLDKLTTWLADTYSDISIEDLNVAGMVKNHRLAQSIQDATFAEFRRQLTYKTARTGAGLHIIGRWYPSSKTCSNCGTMKTKLSLSERVYHCEECGLSIDRDLNAAVNIQVAGSAPETLNAHGGDGRRNDASRRATQTPVKCEPSSHASGVRLGADDRKTVLQTKTN

SEQ ID NO: 2241 - protein, 392 aa, unidentified
MLKATKVRIYPTPEQEDFLNFQFGAVRLVWNKALAIKTHYYKVREQNLRPKKDLKPLLVNAKKSRKYSWLAEADSISLQQSVINLDKAFKNFFNEKLDARFPRFKSKHGKQSSYHCTSVSVGENWVKIPKCKPIKARIHREIVGKIKSITITKTPTGKFYASILVENGKSEPKSITNLKSDDIVGVDVGLTDIAITSDGVKTGNPRFIKNAQRNLKRKQKKLSRCKKGSKGRAKARLHVAKAHERVVFARNDFQHKLSRQLIDENQAVIVETLKIKNMLKNHCLARSIADAGWHSLITKLEYKAKQEGKHLVKIDQWFASSKTCSCCGHKQEEMPLNIRRWDCPNCGMTGIDRDINAARNIKQQGILKLKAEGLSVSADGGKRKSGTLPVAA

SEQ ID NO: 2242 - protein, 374 aa, unidentified
MNKAYRYRLYPNSEQAILINKTFGCVRFIYNQMLANRITIYEQYKDDKEALKQQKYSLPASYKNQYEWLKEVDSLALANAQLNLNTAYKNFFRDKSVGFPKFKRKHRDKKSYTTNNQKGSIRLIDSKTIRLPKLKDVRIMLHRQLPLNSIIKSATISQTSTGKYYIAILVEFEAKIERITPTVESTLGLDYSSKSLVIDSEARSSDYPRFYRKAETKLKKEQRKLSKRLKGGKNRNKQRQKVAKLHEKVANQRKDFLHKLSRQIANAYAAVAIEDLNMRNMTQCLNLAKSTNDNGFGMLKTFLEYKLAEQGKQLVIIDKWYPSSKLCRYCKNINEELTLADRTWSCKHCGAEIDRDINAAINIKNEGCRILGIA

SEQ ID NO: 2243 - protein, 332 aa, unidentified
MHTKTLKLRIKDKHRTVLNHQARQVNFVWNYINELSSRSIRERGVFLSNFDIQKYTNGASKALGLHSQTVQCLSKEYVTRRNQFKKRQLSWRKSGGTRRSLGWVPVNTGAAKFKNGQVFFNGQYYSVWDSYGLSQYQFRTASFTEDARGRWYFNVVVSVDVKPSTGTALVGIDLGCKEAATASNGEQLANGEYRKLQQQMGIAQRARKKHRVKAIHAKIANRRKDNIHKFTRKLVNNSAAIFVGNVKPLALVKTKMAKSVLDAGWGSIKTILEYKCAHAGIVFEEINEAFSTQTCSCXSLDNDRDINAALNIAAAGHRRLAVGILARGREAA

SEQ ID NO: 2244 - protein, 390 aa, unidentified
MQLRYQFRLYPTPGQQQLLARAFGCARVVFDDALRVRQQAHAAGLPYVSDGDLSKQVITQAKKTGERAWLGEVSAVVLQQALADLSTAYRNFFASVSGKRNGRKVSPPRYRSRKDRRQAIRFTRNARFTVTAGGRLRLPKIGDVRVRWSRDLPSAPSSVTVIKDAAGRYFASFVVETAGEPLPEVAAEVGIDLGLTHFAVLSDGRKISSPRFLRRAERRLRKAQQALSRKQKGSANRRKAVAKVARLHARVVDARRDHHHKLSTRLIRDNQAVYVEDLAVNGLARTRLAKSLHDAGWSTFVGMLEYKAKRHGRTFAKVDRWFPSSKLCSACGAAAESMPQSVREWACPCGTVHDRDINAANNILVAGRAERQNACGGTVSPGRLAEGRTP

SEQ ID NO: 2245 - protein, 407 aa, unidentified
MQLRYSFRLYPNAVQQAALAKAFGCARVVFNDAVHAREGARRAGQPFPTAGQLSRELITEAKRTAGRAWLGEVCAVVLQQSLRDAEAAYRNFFASLKGTRNGPQLGAPRCKSRKDHRQSIRFTANARWKITDAGRLDLPKIGAVKVKWSRALPVTPSSVTVIKDAAGRFFASFVIDTDPAADAERMPQTESTIGIDLGLTHFAVLSDGTKIDSPRFLRRAEKKLKKAQKELSRKQKGSKNRAKARLKVARAHAKVADARREFHHQLSTKLISENQGIAVEDLSVAGLARTRLAKSVHDAGWSSFVNMLKYKAGRYARTLVIIGRFEPTSQTCSTCGTKDGPKPLNVREWTCSACGTVHDRDINAAINVKTAAGLAASACGAPVRPGAIPAQREETGSHGFPTGNRAA

SEQ ID NO: 2246 - protein, 586 aa, unidentified
MPRAEVLRAYRFALDPSGAERAALSRYAGACRWAYNYALARKMRAHQAWADRRSAYLAGGLSEAEAKERIRADGAELTDRIKVWDHHRKTLTLTVAGKPPLPAMQCPAGQEALVRRLAAARADAAGTGSERELLAEGRAMVNALKAQAFTAGFRTPTAIDTSALWRMDRDLPQQEGGSPWWREVNVYCFTSGFDRAQAAWKNWQESLAGRRAGRHHGYPRFKKKGHTESFTLFHDVKRPIIRLESYRRLVMPGLGSIRIHDSGKRLARLVERGQAVIQSVTVTRGGHRWYASVLAKVQQDVPVLWEHVHDDGTRTSYLSRTQAEEAAGSGGHVEQIGRPTARQRAGGLVGVGLGSHYLAALSSPLDPADPATALVQHPRLLADSLAKLSKAQRAMSRCQQGSRRWSKATAGVSRIHQQITVRRASFLHGLSKKLATGFTHVAIEDLDITALTTSAKGTRDEPGKNVKAQARFNRHLLDAGLGSLRKKLAYKTAWYGSQLVVLDQGEPVTATCAKCKERNPSSDPSCSTFHCPSCGAAVHRHENSTANIVDAAHRKLTTVASDRGETQNARRATASPGARKAPGKGH

SEQ ID NO: 2247 - protein, 586 aa, unidentified
MPKTEVLRAYRFALDPSGAERAALSRYAGACRWAYNYALARKTRAHQAWADRRSAYLEAGLSEAEAKERIRADGAELTDRIKVWDHHRKTLTLTVADKPPLPAMQSPAGQEALVRRLAAARADAAGTSSERELLAEGRAMVNALKAQAFTAGFRTPTAIDTSALWRMDRDLPQQEGGSPWWREVNVYCFTSGFDRAQAAWKNWQDSLAGRRAGQRHGYPRFKKKGHTESFTLFHDVKRPIIRLESYRRLVMPGLGSIRIHDSGKRLARLVERGQAVIQSVTVTRGGHRWYASVLAKVQQDVPVLWEHVHDDGTRTSYLSRTQAEKAADNGGHVEQIGRPTARQRAGGLVGVGLGSHYLAALSSPLDPADPATALVQHPRLLADSLAKLSKAQRAMSRCQQGSGRWSKATAGVCRIHQQITVRRASFLHGLSKKLATGFTHVAIEDLDITALTTSAKGTRDKPGKNVKAQARFNRHLLDAGLGSLRKKLAYKTAWYGSQLVVLDQGEPVTATCAKCKERNPSSDPSCSTFHCPSCGAAVHRHENSTANIVDAAHRKLTTVASDRGETQNARRATASPAARKAPGKGQ

SEQ ID NO: 2248 - protein, 402 aa, unidentified
MKQQVSFKFRLRPDGQQEREMRRFAGACRFVFNRALALQNENHEAGKKYIPYTKMASWLVEWKKDTETEWLKDSPSQPLQQSLKDLERAYKNFFRKRAAFPRFKKRGQNDAFRYPQGVKLDQENSRIFLPKLGWMRYRNSRQVTGVVKNVTVSQSCGKWYISIQTEREVSTPVHPSVSMVGLDAGVAKLATLSDGTVFEPVNSFQKNQKKLARLQRQLSRKVRFSNNWQKQKRKIQQLHSRIANIRRDYLHKVTTIISKNHAMIVIEDLKVKHMSKSAAGTISQPGRNVRAKSGLNRSILDQGWYEMRRQLEYKQLWHGGQVLAVPPAYTSQRCACCGHTAKENRLSQSKFRCQVCGYTANADVNGARNILAAGHAVLACGGMVQSDRPLKQEPSEMIQATA

SEQ ID NO: 2249 - protein, 393 aa, unidentified
MLARAFGCARVVFNDGLRARQQAREAGEGYLSDGDLSKRVITQAKQTPEREWLGEVSAVVLQQALADLNVAYRNFFTSISGKRQGRKVAPPRFRSRKDNRQAIRFTANARFKVLDNGRLRLPKIGDLAVRWSRHLPAAPTSVTVIRDAAGRYFASFVVVAADDPLPPVDAEVGIDLGLTHFAVLSNGKKVAAPKFLRRSARKLRRLQQDLSRKQRGSNNRKKAVVKVARAHARVADSRQDWQHQLSTRIIRDNQAVYVEDLCVVGLGRTRLAKSVHDAGWAQFVQMLEYKAARRGRTFAKTNRFLPTSQTCSTCGRIDGPKPLSVRSWTCPCGAVHDRDVNAARNILAAGRAESLNARGAQVRPAPVPAPRREAGIRPDAVRSTRSVEGISVL

SEQ ID NO: 2250 - protein, 407 aa, unidentified
MQLRYSFRLYPDTGQQTALAKAFGCARVVFNDAVRARNDARKAEQPYPTAGQLSRKLITEAKQTKERSWLGEVSAVVLQQSLRDAETAYRNFFASLKGTRKGPRTGAPRFKSRKDTRHSIRFTANARWKITDSGRLNLPKIGAVKVKWSRTLPTTPTSVTVIKDAAGRYFASFVLDTDPAADAARMPETDRIVGIDLGLSHFAVLSDGTKIDSPRFLRRAEKKLKKAQKELSRKQKGSKNRAKARLKVARAHAEVADARREFHHQLSTKLTSENQGIAVEDLSVAGLARTRLAKSVHDAGWSSFISMLQYKAERYGRTLVKIGRFTPTSQTCSTCGVKDGPKPLNVREWTCTACGTVHDRDTNAAINVKTAAGLAVSACGAPVRPGAVPAQREETGSHGFPTGNCAA

SEQ ID NO: 2251 - protein, 413 aa, unidentified
MPSVIVMQLRYAFRLYPDVAQRAALARAFGCARVVFNDAVRAREDARTAGQPFPTAGQLSRKLITEAKQTKERSWLSEVSAVVLQQSLRDAETAYRNFFASLKGTRKGPKLGAPCFKSRKDARQSIRFTANARWNMTDSGRLNLPKIGAVKVKWSRALPATPTSVTVVRDAAGRFFASFVIDTDPAVDAARMPETDRSIGIDLGLTHFAVLSDGTKIDSPRFLRRAEKKLKKAQRELSRKQKGSKNRAKARLKVARAHAKVADARREFHHQLSTKLICENQGIAVEDLSVVGLARTRLAKSVHDAGWAQFIGMLEYKAARYGRTLVKIGRFEPTSQTCSTCGAVDGPKPLNVREWTCTACGTVHDRDTNAARNIKTAAGLAVSACGAPVRPGAIPAQREEAGSHGFPTGNLAA

SEQ ID NO: 2252 - protein, 375 aa, unidentified
MLKSYKYRIYPKDEQKKQLAKTFGCTRFVYNYYLDKKVKLYEEKKETLSKIDCNNHLNRELKKEFIWLKEVDKFALTNAVYHLDTAYQNFFRRIKQGRDKTGFPKFKSKHSNQFSYTTNFTNKNIEVNFAENRIKLPKLKWVEAKVHREFDGKIKSVTVSQSPSGRHFVSILVDTRIKELPKTHKNIGVDLGIRDFLIDSNGNKISNPRNLYKYERKLTKLQRQLSKKQKGSKNRSKMRVKVARLHEKISDTRKDFLHKLSSQIINENQIVVSEDLNVSGMIKNRKLAKAISDVSWSEFTRQLEYKANWYGRDYIKIDKFFPSSQLCSECGYKNIETKDLLVREWVCKNCGSHHDRDINASRNILQEGLRILASA

SEQ ID NO: 2253 - protein, 375 aa, unidentified
MLKSYKYRIYPKDQQRKQLAKTFGCTRFVYNYYLDKKIKLYEEKKETLSKIDCNNHLNRELKKEFIWLKEVDKFALTNAVYHLDTAYQNFFRRIKQGRDKTGFPKFKSKHSNQFSYTTNFTNKNIEVNFAENKIKLPKLKWVEAKVHREFDGKIKSVTVSQSPSGRHFVSILVDTRIKELPKTHKNIGVDLGIRDFLIDSNGNKISNPRNLYKYERKLTKLQRQLSKKQKGSKNRSKMRVKVARLHEKISDIRKDFLHKRSSQIINENQIVVSEDLNVSGMIKNRKLAKAISDVSWSEFTRQLEYKANWYGRDYIKIDKFFPSSQLCSDCGYKNIETKDLLVREWVCTNCGSHHDRDINASRNILQEGLRILASA

SEQ ID NO: 2254 - protein, 412 aa, unidentified
MVVQLRYNFRVTPDAAQRTALAQAFGCARVVFNDGLRLRQQAREAGEKYLSDGDLSKLVITQAKATEDRAWLGEVSAVVLQQALADLNTAYRNFFASVTGKRKGRKVAPPRFRSRKDNRQAIRFTKNSRFKVLDNGRLRLPKIGDLPVRWSRTLPSDPSSVTIIKDAANRYFASFVVTVGEDEMLPPVEPQIGIDLGLTHFAVMSDGTKVTAPKFLRRAARKLKRLQQALSRKRKGSNRRKKAVIKVARAHARVADTRRDWQHKLSTAIIRDNQAVYVEDLCVTGLGRTRLAKSVHDAGWASFTTMLEYKAARYGRTFARVDRFFPSTRMCSDCGRITEKLALNVREWDCPCGSHHDRDVNAAINIKAAGQADFNDRRAQVRPGLIPAPRNEAVTRQNAARATRSVAGIAVL

SEQ ID NO: 2255 - protein, 412 aa, unidentified
MVVQLRYNFRVTPDAAQRTALAQAFGCARVVFNDGLRLRQQAREAGEKYLSDGDLSKLVITQAKATEDRAWLGEVSAVVLQQALADLNIAYRNFFASVTGKRKGRKVAPPRFRSRKDSRQAIRFTKNSRFKVLDNGRLRLPKIGDLPVRWSRTLPSDASSVTIIKDAANRYFASFVVTVGEDEMLPPVEPEIGIDLGLTHFAVMSDGTKVTAPKFLRRAARKLKRLQQALSRKTKGSNRRKKAVIKVARAHARVADTRRDWQHKLSTAIIRDNQAVYVEDLCVTGLGRTRLAKSVHDAGWASFTTMLEYKAARYGRTFARVDRFFPSTRMCSDCGRITEKLALNVRAWDCPCGSHHDRDVNAAINIKAAGQADFNDRRAQVRPGLVPAPRSEAVTRQNAARATRSVAGIAVL

SEQ ID NO: 2256 - protein, 412 aa, unidentified
MVVQLRYNFRVTPDAAQRTALAQAFGCARVVFNDGLRLRQQAREAGEKYLSDGDLSKLVITQAKATEDRAWLGEVSAVVLQQALADLNTAYRNFFASVTGKRKGRKVAPPRFRSRKDNRQAIRFTKNSRFKVLDNGRLRLPKIGDLPVRWSRTLPSDPSSVTIIKDAANRYFASFVVTVGEDEMLPPVEPEIGIDLGLTHFAVMSDGTKVTAPKFLRRAARKLKRLQQALSRKRKGSNRRKKAVIKVARAHARVADTRRDWQHKLSTAIIRDNQAVYVEDLCVTGLGRTRLAKSVHDAGWASFTTMLEYKAARYGRTFARVDRFFPSTRMCCDCGRINDKMTLNVRAWDCACGSHYDRDVNAAINIKAAGQADFNDRRAQVRPGLVPAPRSEAVTRQNAARATRSVAGIAVL

SEQ ID NO: 2257 - protein, 426 aa, unidentified
MPSRLAIDQHDRLVVVQLRYRFRVYPTPGQQIALAKAFGCARVVFNDGLRLRQCAREAGEKYVSDGELSRRVITEAKLMPQRAWLGEVSAVVLQQALADLNTAYRNFFASVTGRRKGRMVAPPRFRSRKDNRQAIRFTRNARFKVLDNGRLRLPKIGDLDVRWSRTLPSDPSSVAIIRDAAGRYFASFVVTRAEDEALPELDSEVGIDLGLTHFAVLSDGTKVAAPKFLRRAARKLKRLQQALSRKQKGSANRKKAVMKVARAHARVADTRRDWQHKLSTAIIRDNQAVYVEDLCVAGLGRTRLAKSVHDAGWAGFTGMLEYKAARYGRTFARVDRFFPSTRMCSQCGRLTEKMTLNVRSWDCPCGATHDRDVNAAVNVLAAGQADNSNDRGARVRPGPVPAPRGEAVTHPDAARSTRSVEGTSVL

SEQ ID NO: 2258 - protein, 407 aa, unidentified
MQLRYAFRLYPDAGQQTALAKAFGCARVVFNDAVRAREDARRAGQPFPTAGQLSRKLITEAKQTKERCWLGEVSAVVLQQSLRDAETAYRNFFASLKGTRKGPRLGAPRLKSRKDTRQSIRFTANARWSITDGGRLNLPKIGAVKVKWSRRLPSTPSSVTVIRDAASRFFASFVIDTDPAADATAMPDSDQSIGIDLGLTHFAVLSTREKIDSPRFLRRAEKKLKKAQRELSRKQKGSKNREKARVKVARAHAKVTDARREFHHQLSTRLIRENQAIAVEDLSVAGLARTRLAKSVHDAGWSQFVAMLEYKAKRYGRTLVKIGRFEPTSRTCHACGAVDGPKPLSVREWTCRVCGTVHDRDTNAAINIKTAAGLAVSACGAPVRPGGIPAQREETGSLGFPTGNRAA

SEQ ID NO: 2259 - protein, 352 aa, unidentified
MKHTKTLQVRVRDKHAPLLRQMARSVNFVWNYLNELSHRSIRERGVFLSAFDLHPYTKGAGKELGLHSQTLQCVAAEYVTRRKQFRKRRLNWRKSGGARRSLGWVPFNTGAASWKNGQVFHNGNCFKVWDSYGLGQYRFRSGSFSEDARGRWYFNVVVELDTQLLNGQGAVGIDLGLKDVATCSDGQRLENGRFYRGLESKLAIAQRASKKARVRAIHAKIANRRKDALHKFSRSLVERCNTIIVGDVSPQKLVKTKMAKSVLDAGWGQLKTMLAYKCAHAGIVFRVVNEAYTTQTCSCCGALPDSRPRGIAGLGIREWICECGVTHDRDVNAARNILALGHERPGEGIPGG

SEQ ID NO: 2260 - protein, 353 aa, unidentified
MKQTKTLKVRVKDKHATRLNRMARSVNFVWNYLNELSSRSIRERGVFLSAYDMDRYTKGASKDLNLHSQTLQEVSREYATRRQQFKKQRLAWRKSRGTRRSLGWVPFKTGAAKWKNGQVFYNGSYFKVWDSYGLSQHRFRSGSFNEDTRGRWYFNVVVEVEVQPSTGQGAVGIDLGLKDVATCSDGEKLENGQFYRDLEARLATAQRARNKRRVKAIHAKIKNRRKDVLHKFSRRLVDQHGEIYVGDVSPLKLAKTRMAKSVLDAGWGQLKTMLEYKCDHAGIVFQEVREAYPSRTCSSCGSLSGPQGVSGLRVRDWECVECGALHDRDVNAARNILSLAAGHRRPEVEISAL

SEQ ID NO: 2261 - protein, 416 aa, unidentified
MCTLVCVQLRYNYRVYPTPGQQIELARAFGCARVVFNDGLRLRQQAREAGEKYISDGELSRRLITEAKATPERAWLGEVSTVVLQQALADLNTAYRNFFNSITGKRKGRKVAPPRFRSRKDNRQAIRFTKNSRFKVLDNDRLRLPKIGDLAVRWSRTLPSDPSSVAIIRDAAGRYFASFVVQTGEDEALPPVDSEVGIDLGLTHFAVLSDGTKVAAPTFLRRAARKLKRLQHDLSRKQKGSANRKKAVVKVARAHGRVADMRRDWQHKLSTAIIRENQAVYVEDLCVVGLGRTRLAKSVHDAGWASFTAMMEYKAARYGRTFGRVDRFFPSTRMCSDCGRINEKMALNVRAWDCPCGAAHDRDVNAAKNVKAAGQADFNARGAHVRPGLVPAARNEAGTHPDAACSTRSVEGISVP

SEQ ID NO: 2262 - protein, 390 aa, unidentified
MLRATKVRIYPTSEQAEFLDRQFDAVRFVWNKALAIKVHYYKARGQSLSPKKHLKPLLAKAKKSRKYSWLKNADSIALQQATINLDTAFQNFFNPKLQARFPRFKKKHGKQSSYHCTSVSVGDNWIKIPKCKPIKAKVHREIVGKVKSITLSRTLTGKYFASILADDTQEQPKQIDNLEANQVVGVDMGITDLAITSTGHKTGNPRFLKKAQRNLKRKQQALSRCKKGSKGRHKARLLVAKAHERVAFARNDFQHKLSKQLIDENQAVIVETLKVKNMLKNKRLARSIADAGWHSLITKLEYKAKQEGKHLVKIDQWFASSKTCSVCDLKQEKMPLRIRSWECSCGAIHDRDINAARNIKKQGILKLKAEGLSVSADGGLRKSGILSVAA

SEQ ID NO: 2263 - protein, 390 aa, unidentified
MLRATKVRIYPTSEQAEFLDRQFDAVRFVWNKALAIKVHYYKVRGQSLSPKKHLKPLLAKAKKSRKYSWLKNADSIALQQATINLDTAFQNFFNPKLQARFPRFKKKHGKQSSYHCTSVSVGDNWIKIPKCKPIRAKVHREIVGKVKSITLSRTLTGKYFASILADDTQEQPKQIDNLEANQVVGVDMGITDLAITSTGHKTGNPRFLKKAQRNLKRKQQALSRCKKGSKGRHKARLLVAKAHERVAFARNDFQHKLSKQLIDENQAVIVETLKVKNMLKNKRLARSIADAGWHSLITKLEYKAKQEGKHLVKIDQWFASSKTCSVCDLKQEKMPLRIRSWECSCGAIHDRDINAARNIKKQGILKLKAEGLSVSADGGLRKSGRLSVAA

SEQ ID NO: 2264 - protein, 390 aa, unidentified
MLRATKVRIYPTSEQAEFLDRQFDAVRFVWNKALAIKVHYYKVRGQSLSPKKHLKPLLAKAKKSRKYSWLKNADSIALQQATINLDTAFQNFFNPKLQARFPRFKKKHGKQSSYHCTSVSVGDNWIKIPKCKPIRAKVHREIVGKVKSITLSRTLTGKYFASILADDTQEQPKQIDNLEANQVVGVDMGITDLAITSTGHKTGNPRFLKKAQRNLKRKQQALSRCKKGSKGRHKARLLVAKAHERVAFARNDFQHKLSKQLIDENQAVIVETLKVKNMLKNKRLARSIADAGWHSLITKLEYKAKQEGKHLVKIDQWFASSKTCSVCDLKQEKMPLRIRSWECSCGAIHDRDINAARNIKKQGILKLKAEGLSVSADGGLRKSGILSVAA

SEQ ID NO: 2265 - protein, 390 aa, unidentified
MLRATKVRIYPTSEQAEFLDRQFDAVRFVWNKALAIKVHYYKVRGQSLSPKKHLKPLLAKAKKSRKYSWLKNADSIALQQATINLDTAFQNFFNPKLQARFPRFKKKHGKQSSYHCTSVSVGDNWIKIPKCKPIRAKVHREIVGKVKSITLSRTLTGKYFASILADDTQEQPKQIDNLEANQVVGVDMGITDLAITSTGHKTGNPRFLKKAQRNLKRKQQALSRCKKGSKGRHKARLLMAKAHERVAFARNDFQHKLSKQLIDENQAVIVETLKVKNMLKNKRLARSIADAGWHSLITKLEYKAKQEGKHLVKIDQWFASSKTCSVCDLKQEKMPLRIRSWECSCGAIHDRDINAARNIKKQGILKLKAEGLSVSADGGLRKSGRLSVAA

SEQ ID NO: 2266 - protein, 390 aa, unidentified
MLRATKVRIYPTSEQAEFLDRQFDAVRFVWNKALAIKVHYYKVRGQSLSPKKHLKPLLAKAKKSRKYSWLKNADSIALQQATINLDTAFQNFFNPKLQARFPRFKKKHGKQSSYHCTSVSVGDNWIKIPKCKPIRAKVHREIVGKVKSITLSRTLTGKYFASILADDTQEQPKQIDNLEANQVVGVDMGITDLAITSTGHKTDNPRFLKKAQRNLKRKQQALSRCKKGSKGRHKARLLVAKAHERVAFARNDFQHKLSKQLIDENQAVIVETLKVKNMLKNKRLARSIADAGWHSLITKLEYKAKQEGKHLVKIDQWFASSKTCSVCDLKQEKMPLRIRSWECSCGAIHDRDINAARNIKKQGILKLKAEGLSVSADGGLRKSGILSVAA

SEQ ID NO: 2267 - protein, 390 aa, unidentified
MLRATKVRIYPTSEQAEFLDRQFDAVRFVWNKALAIKVHYYKVRGQSLSPKKHLKPLLAKAKKSRKYSWLKNADSIALQQATINLDTAFQNFFNPKLQARFPRFKKKHGKQSSYHCTSVSVGDNWIKIPKCKPIKAKVHREIVGKVKSITLSRTLTGKYFASILADDTQEQPKQIDNLEANQVVGVDMGITDLAITSTGHKTGNPRFLKKAQRNLKRKQQALSRCKKGSKGRHKARLLVAKAHERVAFARNDFQHKLSKQLIDENQAVIVETLKVKNMLKNKRLARSIADAGWHSLITKLEYKAKQEGKHLVKIDQWFASSKTCSVCDLKQEKMPLRIRSWECSCGAIHDRDINAARNIKKQGILKLKAEGLSVSADGGLRKSGILSVAA

SEQ ID NO: 2268 - protein, 390 aa, unidentified
MLRATKVRIYPTSEQAEFLDRQFDAVRFVWNKALAIKVHYYKVRGQSLSPKKHLKPLLAKAKKSRKYSWLKNADSIALQQATINLDTAFQNFFNPKLQARFPRFKKKHGKQSSYHCTSVSVGDNWIKIPKCKPIRAKVHREIVGKVKSITLSRTLTGKYFASILADDTQEQPKQIDNLEANQVVGVDMGITDLAITSTGHKTGNPRFLKKAQRNLKRKQQALSRCKKGSKGRHKARLLVAKAHERVAFARNDFQHKLSKQLIDENQAVIVETLKVKNMLKNKRLARSIVDAGWHSLITKLEYKAKQEGKHLVKIDQWFASSKTCSVCDLKQEKMPLRIRSWECSCGAIHDRDINAARNIKKQGILKLKAEGLSVSADGGLRKSGRLSVAA

SEQ ID NO: 2269 - protein, 390 aa, unidentified
MLRATKVRIYPTSGQAEFLDRQFDAVRFVWNKALAIKVHYYKVRGQSLSPKKHLKPLLAKAKKSRKYSWLKNADSIALQQATINLDTAFQNFFNPKLQARFPRFKKKHGKQSSYHCTSVSVGDNWIKIPKCKPIRAKVHREIVGKVKSITLSRTLTGKYFASILADDTQEQPKQIDNLEANQVVGVDMGITDLAITSTGHKTGNPRFLKKAQRNLKRKQQALSRCKKGSKGRHKARLLVAKAHERVAFARNDFQHKLSKQLIDENQAVIVEALKVKNMLKNKRLARSIADAGWHSLITKLEYKAKQEGKHLVKIDQWFASSKTCSVCDLKQEKMPLRIRSWECSCGAIHDRDINAARNIKKQGILKLKAEGLSVSADGGLRKSGRLSVAA

SEQ ID NO: 2270 - protein, 390 aa, unidentified
MLRATKVRIYPTSEQAEFLDRQFDAVRFVWNKALAIKVHYYKARGQSLSPKKHLKPLLAKAKKSRKYSWLKNADSIALQQATINLDTAFQNFFNPKLQARFPRFKKKHGKQSSYHCTSVSVGDNWIKIPKCKPIRAKVHREIVGKVKSITLSRTLTGKYFASILADDTQEQPKQIDNLEANQVVGVDMGITDLAITSTGHKTGNPRFLKKAQRNLKRKQQALSRCKKGSKGRHKARLLVAKAHERVAFARNDFQHKLSKQLIDENQAVIVETLKVKNMLKNKRLARSIADAGWHSLITKLEYKAKQEGKHLVKIDQWFASSKTCSVCDLKQEKMPLRIRSWECSCGAIHDRDINAARNIKKQGILKLKAEGLSVSADGGLRKSGILSVAA

SEQ ID NO: 2271 - protein, 292 aa, unidentified
MLRATKVRIYPTSEQAEFLDRQFDAVRFVWNKALAIKVHYYKVRGQSLSPKKHLKPLLAKAKKSRKYSWLKNADSIALQQATINLDTAFQNFFNPKLQARFPRFKKKHGKQSSYHCTSVSVGDNWIKIPKCKPIRAKVHREIVGKVKSITLSRTLTGKYFASILADDTQEQPKQIDNLEANQVVGVDMGIADLAITSTGHKTGNPRFLKKAQRNLKRKQQALSRCKKGSKGRHKARLLVAKAHERVAFARNDFQHKLSKQLIDENQAVIVETLKVKNMLKNKRLARSIADAG

SEQ ID NO: 2272 - protein, 378 aa, unidentified
MRKAYKYRLYPTKGQIRILNRMLEATRWVYNEALATRKRAWEERHESLGLYDTHSLLPRWKAERPSLKIVHSQVLQNACVRVDLAFKAFFRRVKAGEEPGYPRFKGPGRYDSLTYPQYGNGVRLEGRHLILSKLGSIKVVLHRPIEGTIKTVTIRRASTGKWYACFSVEVEPSPQPVPDAAVGIDVGLESFATLSNGEKIANPRFFRREEKALAKAQRRLARAEKGTPERAKRRKVVARIHERIANRRRDFAHQHSRTLVNRFGIIAFEDLNVQGMLENRCLAKSIADAAWKQFVQYTMSKAAEAGRRVVLVDPRNTSQRCSRCGQLVQKDVSVRVHSCPVCGLVLDRDENAAINILRLGRQSLGANPWKPNPFEGWE

SEQ ID NO: 2273 - protein, 374 aa, unidentified
MIKAFKYRLYPNKEQDVLLQKTFGCVRFIYNQMLANRMAIYEQYRDNKEALKQQKYALPADYKKEYPWLKEVDSLALANAQLNLNAAYRNFYRDPSIGFPKFKSKHKSKKSYTTNNQKGTIRLIDSKTIRLPKLKNVRIKLHRQLPKNATIKSATISQKATGKYEISILVEWEAAIKPVAPTIESTIGLDYSSGSLFVDSQASSPEYPKFYRLAEARLKKEQRKLSRRKKGSKNREKQRQIVAKLHEKVVNQRKDFLHNVSRKIANNYDAVVIENLNLKNMAQGLNLAKSTNDNGFGMLKRFLQYKLAEQGKQLITIDKWYPSSKLCHCCGEKNNQLSLSERTWTCQRCGTTLDRDVNAAINIKLEGCRILGIA

SEQ ID NO: 2274 - protein, 463 aa, unidentified
MSGVQLRYNYRITPDAAQRTALAQTFGCARVVFNDGLRLRQQAREAGEKYICDGDLSKLVITAAKATEPRAWLGEVSAVVLQQALADLNTAYRNFFTSLSGKRQGRRVAPPRFRSRKDYRQAIRFTRNSRFKVLGNGRLRLPKVGDVPVRWSRSLPSEPSSVTIIKDAAGRYFASFVVTIGEDETLPPVDSEIGIDLGLTHFAVMSDGTKVTAPKFWRRAARKLKRLQQALSRKQKGSNRRKKAVVQVARAHARIADTRRDWQHQLSTTIIRENQAVYVEDLCVVGLGRTWLAKSVHDAGWAAFTGMLEYKAQRYGRVFDRVDRWFPSTRRCSDCGRITEKMALNVREWDCPCGSHHDRDVNAAINIKAAGQADFNDRGAQVRPGLVPAPRGEAVTHPDVACCTRSVEGISALQGGEDVNSARPRCGRGSSRRCSTPPCWAGGHRSRRCRTSTTCSSAKRSAT

SEQ ID NO: 2275 - protein, 402 aa, unidentified
MKRLQAFKFQLRPGGQQECEMRRFAGACRFVFNRALALQNENHEAGNKYIPYGKMASWLVEWKNATETQWLKDAPSQPLQQSLKDLERAYKNFFRKRAAFPRFKKRGQNDAFRYPQGVKLDQENSRIFLPKLGWMRYRNSRQVTGVVKNVTVSQSCGKWYISIQTESEVSTPVHPSASMVGLDAGVAKLATLSDGTVFEPVNSFQKNQKTLARLQRQLSRKVKFSNNWQKQKRKIQRLHSRIANIRRDYLHKVTTTVSKNHAMIVIEDLKVSNMSKSAAGTVSQPGRNVRAKSGLNRSILDQGWYEMRRQLEYKQLWRGGQVLAVSPAYTSQRCTCCGHTAKENRLSQSKFRCQVCGYTANADVNGARNILAAGHAVLACGGMVQSGRPLKQEPTEMIQATA

SEQ ID NO: 2276 - protein, 407 aa, unidentified
MQLRYAFRLYPEPGQRLALARAFGCARVVYNDAVRAREDARRAGEPFPTAGVLSQKLITQAKRTPGRSWLGGVSAVVLQQSLRDAEVAYKNFFASLKGERKGAKSGAPRFKSRKDSRQSIRFTANARWSITGSGRLNLPKIGAVKVKWSRTLPAQPSSVTVIKDAAGRYFASFVIDTDPAADAARMPDTDQSVGIDLGLTHFAVLSDGTKIDSPRFLRRAEKRLKRAQRELSRKQKGSKNREKARLKVARAHAKVADARHEFHHQLSTRLIRENQAIGVEDLAVKGLARTRLAKSVHDAGWSAFVHMLEYKAARYGRTLVRIGRFEPTSQTCSACGVKDGPKPLSVREWTCAACGAVHDRDHNAAINVKTAAGLAVTACGAPVRPGLVPAQREETGSHGFPPQPCAA

SEQ ID NO: 2277 - protein, 564 aa, unidentified
MPRTEVLRAYRFALDPSDAERAALSRYAGACRWAYNYALAKKTQAHQAWADRRTAYLEAGLSEAEAKQRIKADGAELTDRIKVWDHHRKNLTLTIAGKPPLPEMQPPAGQETLVHRLVAVRADAAETTRERELLAEARATVNALKTKAFSAGFRTPTATDTSALWRVERDLPKEQRGSPWWREVNVYCFTSGFDRAQVAWNHWQDSLAGRHAGQRHGYPRFKKKGHAESFTLFHDVKRPIIRLEGYRRLVMPGLGSIRIHNSGKRLALLVDGGQAVIQSVTVTRGGHRWYASVLAKVQQNVPMLWEHVHDDGTRTPYLSRTPAEEAAENGGRVERIGRPTARQRAGGLVGVDLGSHYLAALSSPLDPADPATALVQHPPLLADSLAKLSKAQRAMSRCQQGSGRWRKATARVSRVHQQITVRRASYLHGLSKKLATGFTHVAIEDLDLTTNRHLLDAGLGNLRKKLAYKTAWYGSQLVVLDQGEPVTSTCAKCKKRNPSSDPSCSTFHCPSCGAVVHRHQNSTANIVDAAHRQLETVASDRGETQNARRAPGSPRARKAPGQGA

SEQ ID NO: 2278 - protein, 407 aa, unidentified
MQLRYSFALYPNTPQRTALARAFGCARVVFNDAVRAREDARTTGEAFPAAGELSKKLITEAKQTDARSWLGEVSAVVLQQSLRDAEAAYRNFFGSLKGARKGPKMGAPRFKSRKDSRQSIRFTANARWSITESGRLKLPKIGEVKVKWSRTLPTTPTSVTVIKDAAGRYFASFVIDTDPAADAARMPDTDQSVGIDLGLTHFAVLSDGTKIDSPKFLRRAEKKLKKAQRELSRKQKGSKNREKARLKVARAHAKVTDARHEFHHHLSTQLIRDNQAIGVEDLAVKALARTRLAKSVHDAGWSTFVTMLEYKAARYGRTLIKIGRYEPTSQTCSVCGTKDGPKPLHIREWTCAACGTLHDRDHNAAINIHTAAGLAVTACGAPVRPGLVPAQRDETGSHGFPPEPRAA

SEQ ID NO: 2279 - protein, 407 aa, unidentified
MQLRYAFRLYPEPGQRAALARAFGCARVVFNDAVRAREDARKAGRPSPTAGELSLSLITEAKRTSERSWLGEVSAVVLQQSLRDAESAYRNFFASLTGARKGPKLGPPRFKSRKDARQSVRFTANARWSITDSGRLNLPKIGAVKVKWSRSLPTTPTSVTVIKDAAGRYFASFVIDTDPAADAARMPDTDQVIGIDLGLTHFAVLSTGEKIDSPRFLRRAEKKLKKAQRELSRKQKGSKNRAKARLKVARAHTQVTDARREFHHQLSTKLISENQGIAVEDLSVAGLARTRLAKSVHDAGWSTFVGMLAYKAQRYGRTLVKIGRFEPTSQTCSTCGVKDGPKPLGVREWTCTACGVVHDRDVNAAINIKTAAGLAVSACGAPVRPGAVPAQRTETGSHGIPTESRAA

SEQ ID NO: 2280 - protein, 600 aa, unidentified
MPALEVTRSFQFALAPTELQREGFLKSAGACRWAYNYALEKKTRSHQAWVSRRDALLANGLTKEQWKAQMRDEAADLKASCAAWDHHRRALISMARAAGPKVSPLPQEPNELVAQLAREREEARPGGSGEEYARALSRARRMVARLKAELFVRGDQIPNQHDMAAIWRTERDLPKEEGGTPWWNEVNVFSFTSGFDRAQAAWNNWMNSARGQRGGRRVGYPRYKKKGRCLDSFTLYHDVQKPRIRLDGYRHLIIPTSGRVRIHGSSRRLARLIAGGEARVQSVTITRRAHRWYASVSCRIIQPSSAKQTVRQRVGGTVGVDLGSRYLAVLSHGPVRRSDVGNFIPHPEHLTRSLPRINRINRRLNRTQSGSRRARLLSAQLATEQHLVALRRAGTLHGITKTLAQSYSCIAIEDFDLVSLVSSVKGSRSRPGVKVKVKSYFNRRLLDASLGEFRRQLAYKCAQYGSQLITLDRGEPVATTCSRCGERNLNAKPFRERFTCSACSYTTCRHENAAACIFLAARRKISIVASGSGETENARRALVSPRIPRESRLTAMKREDTRVPPPASDHRVPIGQETRQPVLLPRPAGQPQQCAVNPAL

SEQ ID NO: 2281 - protein, 407 aa, unidentified
MQLRYSFRLYPDTGQRIALSRAFGCARVVFNDAVRAREDARQTNKPFPTAGELSTRLITQAKRTAERSWLGEVSAVVLQQSLRDAETAYRNFFASLKGTRKGPRTGPPRFKSRKDARQSIRFTANARWTITDSGRLNLPKIGAVKVKWSRTLPTNPSSVTVIKDAAGRYFASFVIDTDPAADATRMPETDRTIGIDLGLTHFAVLSDGTKIDSPRFLRRAEKKLKKVQKELSRKQKGSKNRAKARLKVARAHAKVTDARREFHHQLSTKLISENQGIAVENLSVAGLARTKLAKSVHDAGWSSFISMLEYKAARHGRTLIKIGRFEPTSQTCSTCGVKDGPKPLNVRQWTCTACGTVHDRDTNAAINVKTAAGLAASACGAPVRPGAIPAQREETGSHGFPTEPCAA

SEQ ID NO: 2282 - protein, 407 aa, unidentified
MQLRYAFRLYPDPGQRSALARAFGCARVVYNDAVRAREEARRAGAAFPAAGVLSRKLITQAKQTPERSWLGEVSAVVLQQSLRDAEAAYRNFFASLKGERKGAKSGVPRFKSRKDSRQSIRFTANARWSVTGSGRLNLPKIGAVKVKWSRTLPTQPSSVTVVKDAAGRYFASFVVDTDPAADSARMPGTDQSVGIDLGLTHFAVLSDGTKIDSPRFLRRAEKKLKKAQRELSRKQKGSKNREKARLKVARAHAKVADARREFHHQLSTQLIRENQAIGVEDLAVKALARTRLARSVHDAGWSAFVHMLEYKAARYGRRLVRIGRFEPTSQTCSACGVKDGPKPLNIREWTCTACGTVHDRDHNAAKNVRSAAGLAVTACGAPVRPGLVPAQREETGSHGFPPEPRAA

SEQ ID NO: 2283 - protein, 407 aa, unidentified
MQLRYGFRLYPDAAQQTALARAFGCARVVFNDAVRAREDARQAGRPFPTAGGLSRKLITEAKQTKERSWLGEVSVVVLQQSLRDAESAYRNFFTSLRGARKGPKLGAPRFKSRKDARQSVRFTANARWNITGSGRLSLPKIGAVKVKWSRTLPTTPTSVTVVKDAAGRYFASFVIDTDPAADATRMPDTAHTIGIDLGLTHFAVLSDGTKIDSPRFLRRAEKKLKKAQRELSRKQKGSKNRAKARLKVARAHARVADARREFHHQLSTKLISENQGIAVEDLAVKALARTRLAKSVHDAGWSSFISMLEYKAERYGRTLVTIGRFEPTSQVCSTCGVKDGPKPLNVREWTCSACGTVHDRDHNAAINVKTAAGLAVSACGAPVRPESVLAQCEETGSHGFPTGSRVA

SEQ ID NO: 2284 - protein, 407 aa, unidentified
MQLRYAFRLYPEPGQRLALARAFGCARVVYNDAVRAREDARRAGEPFPTAGVLSQKLITQAKQTPERSWLGGVSAVVLQQSLRDAEVAYKNFFASLKGERKGAKSGAPRFKSRKDSRQSIRFTTNARWSITGSGRLNLPKIGAVKVKWSRTLPAQPSSVTVIKDAAGRYFASFVTDTDPAADAARMPDTDQSVGIDLGLTHFAVLSDGTKIDSPRFLRRAEKKLKRAQRELSRKQKGSKNREKARLKVARAHAKVADARHEFHHQLSTQLIRDNQAVGVEDLAVNGLARTRLARSVHDAGWSAFVHMLEYKAARYGRTLVRIGRFEPTSQTCSACGVKDGPKPLNVREWTCSACGTVHDRDHNAAINVKTAAGLAASACGAPVRPGLVPAQREETGSHGFPPQPCAA

SEQ ID NO: 2285 - protein, 407 aa, unidentified
MQLRYAFRLYPEPGQRLALARAFGCARVVYNDAVRAREDARRAGEPFPTAGVLSQKLITQAKQTPERSWLGEVSAVVLQQSLRDAEVAYKNFFASLKGERKGAKSGTPRFKSRKDSRQSIRFTTNARWSTTGSGRLNLPKIGAVKVKWSRTLPAQPSSVTVIKDAAGRYFASFVTDTDPAADAARMPDTDQSVGIDLGLTHFAVLSDGTKIDSPRFLRRAEKRLKRAQRELSRKQKGSKNREKARLKVARAHAKVADARHEFHHQLSTQLIRDNQAIGVEDLAVKGLARTRLARSVHDAGWSAFVHMLEYKAARYGRTLVRIGRFEPTSRTCSACGVKDGPKPLNVREWTCSACGTVHDRDHNAAINVKTAAGLAASACGAPVRPGLVPAQREETGSHGFPPQPCAA

SEQ ID NO: 2286 - protein, 407 aa, unidentified
MQLRYAFRLYPEPGQRLALARAFGCARVVYNDAVRAREDARRAGEPFPTAGVLSQKLITQAKQTPERSWLGEVSAVVLQQSLRDAEVAYKNFFASLKGERKGAKSGAPRFKSRKDSRQSIRFTTNARWSITGSGRLNLPKIGAVKVKWSRTLPAQPSSVTVIKDAAGRYFASFVIDTDPAADAARMPDTDQSVGIDLGLTHFAVLSDGTKIDSPRFLRRAEKRLKRAQRELSRKQKGSKNREKARLKVARAHAKVADARHEFHHQLSTQLIRDNQAIGVEDLAVKGLARTRLARSVHDAGWSAFVHMLEYKAARYGRTLVRIGRFEPTSQTCSACGVKDGPKPLSVREWTCAACGAVHDRDHNAAINVKTAAGLAVTACGAPVRPGLVPAQREETGSHGFPPQPCAA

SEQ ID NO: 2287 - protein, 407 aa, unidentified
MQLRYAFRLYPDAAQQTALARAFGCARVVFNDAVRAREDARQAGRPFPTAGGLSRKLITEAKQTKERSWLGEVSVVVLQQSLRDAESAYRNFFASLRGARKGPKLGAPRFKSRKDARQSVRFTANARWNITGSGRLSLPKIGAVKVKWSRTLPTTPTSVTVVKDAAGRYFASFVIDTDPAADATRMPDTAHTIGIDLGLTHFAVLSDGTKIDSPRFLRRAEKKLKKAQRELSRKQKGSKNRAKARLKVARAHARVADARREFHHQLSTKLISENQGIAVEDLAVKALARTRLAKSVHDAGWSSFISMLEYKAERYGRTLVTIGRFEPTSQVCSTCGVKDGPKPLNVREWTCSACGTVHDRDHNAAINVKTAAGLAVSACGAPVRPESVLAQCEETGSHGFPTGSRVA

SEQ ID NO: 2288 - protein, 407 aa, unidentified
MQLRYAFRLYPEPGQRIGLARAFGCARVVFNDAVRAREDARKEGQPFPTAGQLSRKLVTEAKRTAERSWLGEVSAVVLQQSLRDADRAYRNFFASLKGERKGPKVGPPRFKSRKDTRQSIRFTTNARWSITDSGRLNLPKIGKVKVKWSRTLPATPTSVTVIKDAAGRYFASFVIDTDPAADAIRMPDTDRTIGIDLGLTHFAVLSDGTKIDSPRFLRRAEKKLKKAQRELSRKQKGSKNRAKAGLKVARAHAKVADARREFHHQLSTMLISENQGIAVEDLSVAGLARTKLAKSVHDAGWSSFIGMLKYKAERYGRTLVTIGRFEPTSQVCSTCGVKDGPKPLNVREWTCTACGTVHDRDTNAALNIETAAGLAVSACGAPVRPGAVPAQREETGSHGFPTQSRAA

SEQ ID NO: 2289 - protein, 407 aa, unidentified
MQLRYAFRLYPEPGQRAALARAFGCARVVFNDAVRAREDARKAGRPSPTAGELSRSLITEAKRTSERSWLGEVSAVVLQQSLRDAESAYRNFFASLTGARKGPKLGPPRFKSRKDARQSVRFTANARWSITDSGRLNLPKIGAVKVKWSRSLPTTPTSVTVIKDAAGRYFASFVIDTDPAADAARMPDTDQVIGIDLGLTHFAVLSTGEKIDSPRFLRRAEKKLKKAQRELSRKQKGSKNRAKARLKVARAHTQVTDAGREFHHQLSTKLISENQGIAVEDLSVAGLARTRLAKSVHDAGWSTFVGMLAYKAQRYGRTLVKIGRFEPTSQTCSTCGVKDGPKPLGVREWTCTACGTVHDRDINAAINIKTAAGLAVSACGAPVRPGAVPAQRTETGSHGIPTESRAA

SEQ ID NO: 2290 - protein, 407 aa, unidentified
MQLRYAFRLYPEPGQRLALARAFGCARVVYNDAVRAREDARRAGVPFPTAGVLSQKLITQAKQTPERSWLGGVSAVVLQQSLRDAEVVYKNFFASLKGERKGAKSGAPRFKSRKESRQSIRFTTNARWSITGSGRLNLPKIGAVKVKWSRTLPAQPSSVTVIKDAAGRYFASFVTDTDPAADAARMPDTDQSVGIDLGLTHFAVLSDGTKIDSPRFLRRAEKRLKRAQRELSRKQKGSKNREKARLKVARAHAKVADARHEFHHQLSTKLIRDNQAIGVEDLAVNGLARTRLARSVHDAGWSAFVHMLEYKAARYGRTLVRIGRFEPTSQTCSACGVKDGPKPLNVREWTCSACGTVHDRDHNAAINVKTAAGLAASACGAPVRPGLVPAQREETGSHGFPPQPCAA

SEQ ID NO: 2291 - protein, 407 aa, unidentified
MQLRYAFRLYPEPGQRLALARAFGCARVVYNDAVRAREDARRAGEPFPTAGVLSQKLITQAKQTPERSWLGGVSAVVLQQSLRDAEVVYKNFFASLKGERKGAKSGAPRFKSRKDSRQSIRFTTNARWSITGSGRLNLPKIGAVKVKWSRTLPAQPSSVTVIKDAAGRYFASFVTDTDPAADAARMPDTDQSVGIDLGLTHFAVLSDGTKIDSPRFLRRAEKKLKRAQRELSRKQKGSKNREKARLKVARAHAKVADARHEFHHQLSTQLIRDNQAVGVEDLAVNGLARTRLARSVHDAGWSAFVHMLEYKAARYGRTLVRIGRFEPTSQTCSACGVKDGPKPLNVREWTCAACGTVHDRDHNAAINVKTAAGLAVTACGAPVRPGLVPAQREETGSHGFPPQPCAA

SEQ ID NO: 2292 - protein, 434 aa, unidentified
MLEAVKVALDPTPRQERLLESHAGAARFAYNNGLAHVKDMLERGDTPEWSYYALRRWWNQAKNTLAMDETTGEPWWPRNSKEAYNSGLESLADALKNFSKSRKGQRKGRRMGFPRFKSKDSGIRRFAYTTGSFGLIDHDPYALKLPRIGRVHCMEDASKRVDGAKVLRMSVSKRGGRWQASLTVERADLPIPSPPKGGSVGIDLGVKELATLSDGTVMHNPHALKSNLRRLKKAQRNLSRKRKGSNRRRKARAQVARLYARVANLRSDALNKTTAMLAHTYADISIEDLNVAGMAGNHGLAQSIQDAAFAEFRRQLTYKTARTGARLHVIDRWYPSSKTCSNCGTVKAKLSLSERVYHCGKCGLSIDRDVNAAINIQVAGSAPETLNARGGSGRQTRLECGTMRHPAKREPSGGDSRVRLGAGLGNEAMQMTSL

SEQ ID NO: 2293 - protein, 434 aa, unidentified
MLEAIKVALDPTPRQERLLESHAGAARFAYNNGLAHVKDVLERGDTPEWSYYALRKWWNQAKNGLAVDETTGEPWWPRNSKEAYNSGLESLADALRNFSKSRKGQRKGRRMGFPRFKSKDKAVPRFAYTTGSFGLIDCDPHALRLPKIGRVHCMENVSKRVNGAKVLRMSVSKRGGRWQASLTVERADLPIPSPPKGGSVGIDLGVKELATLSDGTVIHNPHALKSNLRRLKKAQRNLSRKRKGSNRRRKARAQVARLYARVANLRSDVLNKTTAMLAHTYADISIEDLNVAGMVENHRLAQSIQDAAFAEFRRQLTYKTARTGARLHVIDRWYPSSKTCSNCGTVKAKLPLSERVYHCGKCGLDMDRDLNAAINIMVAGSAPETLNARGGSVRQAHPKGGTMRHPAKREPSGGESRVSLGAGLGNEAMQMTSL

SEQ ID NO: 2294 - protein, 434 aa, unidentified
MLEAVKVALDPTPRQERLLESHAGAARFAYNNGLAHVKDVLERGDTPEWSYYALRKWWNQAKNGLAVDETTGEPWWPRNSKEAYNSGLESLADALRNFSKSRKGQRKGRRMGFPRFKSKDKAVPRFAYTTGSFGLIGCDPHALRLPKIGRVHCMENVSKRVNGAKVLRMSVSKRGGRWQASLTVERADLPIPSPPKGGSVGIDLGVKELATLSDGTVIHNPHALKSNLRRLKKAQRNLSRKRKGSNRRRKARAQVARLYARVANLRSDVLNKTTAMLAHTYADISIEDLNVAGMVENHRLAQSIQDAAFAEFRRQLTYKTARTGARLHVIDRWYPSSKTCSNCGTVKAKLPLSERVYHCGKCGLDMDRDLNAAINIMVAGSAPETLNARGGSVRQAHPKGGTMRHPAKREPSGGESRVSLGAGLGNEAMQMTSL

SEQ ID NO: 2295 - protein, 426 aa, unidentified
MLEAVRVALDPTPRQERLLESHAGAARFAYNAGLAHVKAMLERQEKPEWSYYALRRWWNANKDALAVSMETGKPWWPENSKESYNSGLESLADALKNFSKSRKGQRKGRRMGFPRFKSKDRAVPGFAYTTGSFGLIDCDPYALRLPKIGRVHCMENVSKRVNGAKVLRMSVSKRGGRWQASLTVERADLPIPSPPKGGSVGIDLGVKELATLSDGTVIHNPHVLKSNLGRLKKAQRNLSRKRKGSNRRRKARTRVARLHARVADLRRDLLDKTTTMLARAYADISIEDLNVAGMVRNHRLARSVEDAAFAEFRRQLEYKTARTGARLHVIDRWYPSSKTCSNCGTVKAKLSLSERVYHCEECGLVIDRDLNAAINIQVAGSAPETLNAHGGSGRRTDASRRATRHPVKREPSDGVSRVSLGAGLGG

SEQ ID NO: 2296 - protein, 407 aa, unidentified
MQLRYNFRLYPSAGQRESLARAFGCARVVFNDGLRMRQDTRDAGLPYISDGDLSKRVITQAKKTPERAWLGEVSAVILQQALADLNTAFRNFFASVTGRRKGRGVAPPRFRSRKDNRQAIRFTKNACFAITAGGRLRLPKIGDVPVRWSRPLPSDPSSVTVVKDACGRYFASFVVETSEEPLPETPHEVGIDLGLTHFAVLSDGRKIGNPRFLRRAAKKLRKAQQALSRKQKGSANRKKAVVRVARAHARVADARRDWAHKQSTTLIRDNQAVYVENLSVSGLGRTKLAKSVHDAGWSQFVGMLEYKATRYGRHFARIDRWFPSSRLCSACGTVAASMPLDIRSWSCPCGAVHDRDVNAAINILAAGQADRLNDRGARVGPGPVPAPRGEALTHPKPHTRQTGISIH

SEQ ID NO: 2297 - protein, 388 aa, unidentified
MEKAYKFRLYPTAKQEELIRKTIGCSRFVYNQTLAARKGAYASGSSIHMTFKESHSGYDCVKLLPGLKDTYPWLREVDSTALQASVLNMDHAYKNFFSGRKGRRKVGFPKFKAKHHSKASYTSKVVGHNIQASDRAVKLPKLGWVKAKVSTTVQGRILNATVSMSRSGKFFVSLCCTEVDIPQLLSTGAAVGLDVGIKDLVITSDGQKFDNPKYLRKAEKKLATLQRRLSRKPKGSCNREKARLRLSRQHEYIANCRQDYLHKLTTQLVRDYDIICVESLNVGGMLKNHKLAKAIADASWGELARQLKYKAAWQHKMLVEVGTFFPSSQLCSCCGYQNKEVKDLSVREWTCPQCGAHHDRDQNAAQNLLIEGLRLLPHDFQRKSQASA

SEQ ID NO: 2298 - protein, 380 aa, unidentified
MEKAYKFRLYPTAKQEELIRKTIGCSRFVYNQTLAARKGAYASGSSIHMTFKESHSGYDCVKLLPGLKDTYPWLREVDSTALQASVLHMDQAYKNFFSGRKGRRKVGFPKFKAKHHSKASYTSKVVGKNIHATDKAVKLPKLGWVKAKISTTVQGRILNATVSMSRSGKYFVSLCCTEVDISQYPSTSAAVGLDVGIKDLVITSDGQKYDNPKYLQKAEKKLATLQRRLSRKPKGSCNREKARLRLARQHEYIANCRQDYLHKLTTQLVRDYDIICVESLNVGGMLKNHKLAKAITDASWGELARQLKYKAAWQHKMLVEVGTFFPSSQLCSCCGYQNKEVKDLSVREWTCPQCGAHHDRDQNAAQNLLMEGLRLLKAST

SEQ ID NO: 2299 - protein, 407 aa, unidentified
MQLRYAFRLYPDTSQRTALAKAFGCARVVFNDAVRAREDARKAQQPFPKIGELSTRLITEAKRTAERSWLGEVSAVVLQQSLRDAETAYRNFFASLKGDRKGPRAGPPRFKSRKDARQSIRFTANARWNITGKGRLNLPKIGAVKVKWSRTLPATPSSVTVIKDAAGRCFASFVIDTDPAADAARMPDTGRTIGIDLGLTHFAVLSDGTKIDSPRFLRRAEKKLKKAQRELSRKQKGSKNREEARLKVARAHAKVTDARHEFHHQLSTKLISENQGIAVEDLSVAGLARTKLAKSVHDAGWSSFISMLQYKAERYGRTLVKIGRFEPTSQTCSTCGVKDGPKPLNVREWTCTACGSVHDRDHNAAINVKTAAGLAASACGAPVRPGTIPAQREETGSHGFPTEPRAA

SEQ ID NO: 2300 - protein, 374 aa, unidentified
MLKAYKFRIYPTKSQRTKMERTLDLCRWTYNQTLAYRKDAWEKEGKSVSKYETHNLLPAWKEEKPELNDVFSQTLQNAQERVDLALKAFFRRVKAGENPGYPRFRGRGWYDSFTYPQKGFKLNAGKLYLSKIGNIKIKLHRSIEGKIKRLTVRRAATGKWFACFSVEIEDQLKPPWKVGSLVGVDVGLESFATLSNGETIANPRFFREEEKELARVQRKLSKAPKGTPERKKALRMVERVHERIANKRYDFAHKVSRYLVNRFGLIAFEDLSIQNMLKNHCLAKSISDVAWNMLVTLTSYKAASAGSMVVLVDPRNTSKMCSRCGILVGKTLSDRVHNCPQCGLSMDRDWNAAINILRLGLQSVGIKSVEAPVF

SEQ ID NO: 2301 - protein, 374 aa, unidentified
MLKAYKFRINPTKSQRTKMEQTLDLCRWTYNKTLEIRKNAWENEGKSLSKYETNNLLPEWKADKPELKDVFSQVLQNVHERVDLALKAFLRRVKAGEKPGYPRFRGRGRYDSFTYPQKGFKIDSGKLYLSKIGNIKINLHRPIEGKIKRLTVRRAATGKWYACFSVEIEDQPKPPWKDGSLVGIDVGLESFATLSNGEKISNPRFFREEEHELARAQRKLSKAPKGTPDRKKALKVVERVHERIANKRYEFAHQISNDLVKRFGLIAFEDLNIKRMTKNHCLAKSIHDVAWNMLVTLTSYKAESAGSMVVLVDPRNTSKMCSRCGILVQKDLSERFHNCTQCGLSVDRDWNAAINILRLGLQSVGIKTVEACPF

SEQ ID NO: 2302 - protein, 382 aa, unidentified
MLKAYKFRIYPTKSQRTKMERTLDLCRWTYNETLEIRKTAWEDEGKSLSKYETNNLLPEWKENKPELKEVFSQVLQNVHERVDLALKAFFRRVKAGEKPGYPRFKGIGRYDSFTYPQKGFKVDSGKLYLSKIGEIKIKLHRPIEGKIKRLTVRRSATGKWYACFSVDLEDLPKPPWKDGSLVGVDVGLESFATLSNGVKIANPRFFREEEHELARVQRKLSKAPKGTPERKKALKVVERVHERIANKRYEFAHRISNQLVNRYGLIAFEDLNIKGMMHNHNLAKSIGDVAWNMLVTLTSYKAASAGSMVVLVDPRNTSKMCSRCGILVQKDLSERVHNCTQCGLSMDRDWNAAINILRLGLQSVGIQSVQARPFSRAGVVTG

SEQ ID NO: 2303 - protein, 352 aa, unidentified
MKHIKTLQVRVRDKHAPLLRQMARQVNFVWNYLNELSHRSIRERGVFLSAFDLHPYTKGAGKELGLHSQTLQCVAAEYVTRRKQFRKARLNWRKSGGVRRSLGWVPFNTAAASWKNGQVYHNGHYFKVWDSYGLAQYRLRSGSFSEDARGRWYFNVVVELETQLSTGQGAVGIDLGLKDVATCSDGQRLENGRFYRDLEPKLASAQRAGKKARVRAIHAKIANRRKDALHKFSRSLVERCNTIIVGDVSPQKLVRTRMAKSVLDAGWGQLKTMLAYKCAHAGIVFRVVNEAYTTQTCSCCGALPASRPRGIAGLGIREWICECGVTHDRDVNAARNILALGHGRPVEGIPGP

SEQ ID NO: 2304 - protein, 374 aa, unidentified
MLKAYKFRIYPTKSQRTKMEQTLDLCRWTYNKTLEIRKNAWENEGKSLSKYETNNMLPEWKADKPELKDVFSQVLQNVHERVDLALKAFLRRVKAGEKPGYPRFRGRGRYDSFTYPQKGFKIDSGRLYLSKIGNIKINLHRPIEGKIKRLTVRRAATGKWYACFSVEIEDQPKPPWKDGSLVGIDVGLESFATLSNGEKISNPRFFREEEHELARAQRKLSKAPKGTPDRKKALKVVERVHERIANKRYEFAHQISNELVKRFGLIAFEDLNIKGMTKNHCLAKSIHDVAWNMLVTLTSYKAESAGSMVVLVDPRNTSKMCSRCGILVQKDLSERFHNCTQCGLSVDRDWNAAINILRLGLQSVGIKTVEACPF

SEQ ID NO: 2305 - protein, 407 aa, unidentified
MQLRYAFRLYPDPGQQRALAKAFGCARVVFNDAVRAREDARKAQQPFPKIGELSTSLITQAKQTASRSWLGEVSAVVLQQSLRDVETAYRNFFASLKGTRKGPRIGPPRFKSRKDARQSIRFTANARWSVTDSGRLNLPKIGPVKVKWSRTLPATPTSVTVIKDAAGRFFASFVIDTDPAADAARMPSSDRTVGIDLGLTHFAVLSDGTKIDSPRFLRRAEKKLKRAQRELSRKQKGSRNREKARLKVARAHAQVTDARREFHHQLSTRLISENQGIAVEDLAVRALARTKLAKSVHDAGWSQFVHMLEYKAVRYGRTLVKIGRFTPTSQVCSQCGAKDGPKPLHVRTWTCAACGAVHDRDHNAAKNVKAAAGLAVTACGAQVGPGLVLAQRDEAGSHGFPPEPRAA

SEQ ID NO: 2306 - protein, 437 aa, unidentified
MSIYKNFEYRVYPTDEQKKWFEEHFEVNRFLYNHLLSMSIKKYNTEVDERFLRLIKDIDFYSEKIQQWTQIDYEKLYKKAKKGVKIYSKNEFSKLITKAVNNPDFPWVNKSYDGRAMREVATSVDTAYKNFFKGKDFPRFKKKYSVRTLRFPVSKQGEWYSIRFESDKILVLPKKIKLRIVQHRPFEGEVIAATIKKAQSGKWFVTILSRVDPPTQLIKTGDIIALNRGVREYMIGYDSNHKLINYAPFVKDPTLISKINKLHKKFSQKYKSAKQESRSLRDSKNYQKNKESLARLYEKLKFQKEYYLQQLSRKIIEDYDLIILESLSIKELASSNIGEKVKSGERIVQRRFSKKIMGMSHYRLETLLKEKAELYGKRVVMLPKGFNSNGVCSECGTIFEESIPLNNKEFICPNCNIKITRGENSVKNILREGMKYL

SEQ ID NO: 2307 - protein, 407 aa, unidentified
MQLRYSFRLYPNHAQRGALARAFGCARVVFNDAVRAREDARAVGGPFPKAGELSTRLITQAKQTEARSWLGEVSAVVLQQSLRDAETAYKNFFASLKGERKGPKLGAPRFKSRKDARQSIRFTANARWSVTDSGRLSLPKIGPVKVKWSRILPTTPTSVTVIKDAAGRYFASFVIDTDPAADAARTPDSDQSVGIDLGLTHFAILDDGTKIDSPRFLRRAEKKLKKAQRELSRKQKGSKNREKARLKVARAHAQVADARREFHHQLSTKLIRENQAIGVEDLAVNALARTPLAKSVHDAGWSQFVAMLVYKADRYGRTLIKIGRFVPTSQTCSHCDHVEGPKPLHIREWTCPACGALLDRDINSARNVKKAAGLAESACGAPIRPESVLAQRNEAGSHGFPPKASAA

SEQ ID NO: 2308 - protein, 391 aa, unidentified
MLKATKIRIYPTVEQVAFLNRQFGAVRFCYNTGLRIMSHRYKRHGQSLSAKHDIKKLLPVAKKSRKYGWLKEADSMALQQSCINLDQAFQRFFDPKQKAGYPRFKSKRGQQSSYHCVGVNAGDSWIKVPKLGPIKARMHRQVEGRLKSITLTRTVTGKHYASLLFETAHVAPEPLMDVDAASVVGLDMGLSHLAIDSSGRKIANPRFLKQAQKNLKRKQQALSRTKKGSRRRAKARLLVAKAHERVANARNDFQHKLSRQIVDDNQAVIVETLKVRNMMKNAKLAKHIGDASWHALTAKLDDKTREQGKHLVKIDPWFASSRTCHVCQHKMDAMPLNVRSWECPACHTQHDRDINAALNIKHQGIVKLKAEGLSVSAHGGLRKSGISPAAA

SEQ ID NO: 2309 - protein, 352 aa, unidentified
MTHTKTLKVRIRDKHAPMLRHMARSVNFVWNYLNELSQRSIREHGVFLSAYDMQKYTNGCAKELGLHSHTVQAVGKEYATRRLQFRKSRLNWRKSGGVRRSLGWIPLNTGAASWKNGQVYHNGHFFKVWDSFGLGQYRFRSGSFTEDARGRWYFNVVVDVEAKPSAGKHAVGIDLGLKTVATCSDGAVLENARFYRDLEPALAIAQRAGKKARIRAIHARIANRRKDALHKFSRSLVERCNLIVVGDVSPHKLVKTNMAKSVLDAGWGQLKTMLAYKCAHAGIVFREVSEAYTTQTCSCCGALPDSRPRGIAGLGIREWTCECGVTHDRDINAARNILALGHERPDVGIPAL

SEQ ID NO: 2310 - protein, 383 aa, unidentified
MRLRYNVRLYPTPGRCQALARAFGCARTVFNDGLRARRDAREKGLPYISDGELSKQVITRAKGTPERSWLSEVSAVVLQQALADLNTAYRNFFASLSGKRKGPKVAPPRFRSRKDNRQAIRFTRNARFAITTGGKLRLPKIGDVPVRWSRDLPAEPSSVTVVKDAAGRYFASFVVETASEPLPETATEVGIDLGLTHFAVLSDGRKIDNPRFLRRAERRLKKAQQTLSRKVKGSANRRKAVVKVARAHATVTDARRDFAHKLSTRIIRDNQAVYVEDLSVKGLARTNLTKSVHDAGWSQFLAMLEYKATRYGRTFARIDRWFPSSKTCSRCGTVTGSMPLNVRSWECPCGAVHDRDVNAAINILAAGRAERSNACGGTIRPAA

SEQ ID NO: 2311 - protein, 407 aa, unidentified
MQRAFKVTLIPNHNQEVLINKSIGCARFVYNHFLALKQELYQSEQKTLNYNACSQRLTLLKKEIEWLKEVDKFALQNSLKNLETAYKNFFADLKKVKGKKGVGFPKFKKKHGCKQSYKTNLTNGNIQVIENRLKLPKLGWVKFHKSQEVTGKLINVTITRTSSGKYVASILCDTEIEKHPQVSQNIGIDLGIKSYLVTSNGEVVDNPKYYRTQTRKLRKAHKKLSRSVKGSTNRVKAKIKLARSYERITNLRDDFLHKLSTRLIKENSIICIEDLRVANMVKNHKLSLSISDASWSKFVAMLEYKAFWHDRIVQKVGTFYPSSQTCNHCGFINPLVKDLKLREWACPGCSGYNLRDNNAALNILGEGLRLIAAVGIPEALNACGELVSPGAIQAEIVEAGITRLQVV

SEQ ID NO: 2312 - protein, 391 aa, unidentified
MVLKHKAYRFRIYPTKEQEILIAKTIGCSRFVFNHFLAKWEEMYKTTGKGLSYGSCSKEIPLLKQEFDWLKEVDSTSVQISVKHLADAFDRFFKKQNDHPRFKSKRHPVQSYTTNIQGKSQLPEVSIVCNKLKLPKLKWVRFAYSKQITGRILNATIRRNASGKYFVSLLVEQEIHELPKTGSSVGVDVGLKNFATLSDGTIYKNDRYFRTLEKKLAREQRKLSHRQRIALAKKVRLSDSKNYQKQKRKVARIHEKIANKRTDFLHKVSTEIVKNHDVIGIETLQVKNMQKNSKWSKAISDVSWSEFFRLLEYKAGWYGKTVVKVGKTFASSQLCSSCGHQHKNVKHLGLREWTCPSCGIHHDRDVNAGLNLKQEAERILASSTVGTTGLA

SEQ ID NO: 2313 - protein, 391 aa, unidentified
MVLKHKAYKFRIYPTKEQEILIAKTIGCSRFIFNHFLAKWDEMYKTTGKGLSYGSCSKEIPLLKQEFDWLKEVDSTSVQISVKHLADAFDRFFKKQNERPRFKSKRNPIQSYKTNIQGKNQLPEVSIGCNKLKLPKLKWVRFAHSKHITGRILNATIRRNASGKYFVSLLVEQEINELPKTGSSVGVDVGLKNFAILSDGTVYKNDRYFRSLEKKLAREQRKLSCRQRIALNKKITLSEARNYQKQKRKVARIYEKIANKRTDFLHKVSTEIVQNHDVIGIETLQVKNMQKNRKLSKAISDVSWSEFFCMLEYKAKWYGKTVVKVGKTFASSQLCSSCGHQHKDVKHLGLREWTCPSCGIHHDRDVNAGLNLKQEAERILASSTVGTTGLA

SEQ ID NO: 2314 - protein, 391 aa, unidentified
MTTHRKVYRYRIEPTPVQESKLYMLAGSRRFVFNWALARRREHYAETGKTLGYNAQAGELTALKNQEETSWLKESDSQLLQQALKDVERAFVNFFEKRARFPRFKSKKTDTPRFRIPQRVRIEGSRVYVPKVGWVKLRKSQEIEGKTKSATFKREADGHWYVLLVSEFEMPDVPLPPVPESEVVGIDLGLKDFYVLSDGGRKEAPRFARKGQRKLRRAARRHSKCTRGSNRKAKAKRKLARVHRQIANQRKDFVHKATSGLVQQYQGFCIENLSIKGMAKTKLSKSVLDAALGEFRRQLAYKAQWHRKWLAVIDRWFPSSKLCGECGSINADLTLSDREWTCECGAVHDRDLNAARNIKREGLSQIVVAGHAETLNARGEGVRPAIAGSPR

SEQ ID NO: 2315 - protein, 390 aa, unidentified
MLKHKAYKFRIYPTKEQEILIAKTIGCSRFIFNHFLAKWDEMYKTTGKGLSYGSCSKEIPLLKQEFDWLKEVDSTSVQISVKHLADAFDRFFKKQNERPRFKSKRNPIQSYKTNIQGKNQLPEVSIGCNKLKLPKLKWVRFAHSKHITGRILNATIRRNASGKYFVSLLVEQEINELPKTGSSVGVDVGLKNFAILSDGTVYKNDRYFRSLEKKLAREQRKLSCRQRIALNKKITLSEARNYQKQKRKVARIYEKIANKRTDFLHKVSTEIVQNHDVIGIETLQVKNMQKNRKLSKAISDVSWSEFFCMLEYKAKWYGKTVVKVGKTFASSQLCSSCGHQHKDVKHLGLREWTCPSCGIHHDRDVNAGLNLKQEAERILASSTVGTTGLA

SEQ ID NO: 2316 - protein, 371 aa, unidentified
MRTLTRCYKYRLYPATDQQNTLVQWAGCRRFVWNWALHCKQTHYQATGQRLSYQRLAAMLVDLKRQPKTAFLRDCHSQPLQQALMDLETAFTHFFAKRAKYPRFKARKVTPHSLRFPQGVVVVDEHTISVPKIGLMQAIIHRPLLGTAKGATIKQDATGAWWVVFVCHINRPDVLLTTDNPVGIDVGLESFTTLSTGEKTTPPKFYRRSQKKLARAQRKLSRAQKGSNNRLKARKHVAKIHQKISNQRADWLHKHALGIVRQFDVVCIEDLNLKGLAKTKLAKSFSDAALSTFMQMLHDKAEWHGRRVIKVGRFYASSKTCHHCQTKTALMLSDRVWTCPTCGTIHDRDRNAAINIVHEGIRLLAVGTTES

SEQ ID NO: 2317 - protein, 372 aa, unidentified
MIVVEKAYKFRMYPNKKQQELINKTFGCCRFVYNKYLAKRIEVYKNDKETFTYKQCSSDLTNLKKELKWLKEPDKFSLQNALKDLDNAYKKFFKEKAGFPKFKSKKINRFSYKTNFTNGNIMYCGQHIKLPKLGMVKIRDKQVPKGRILNATISKEPSGRYYVSLCCTDVDIEAFENTNNQIGLDLGIKEFCISSCGEFIENPKYLKKSLSKLAKLQRELSRKTIGSLNRNKARLKVARLQEHIANQRNDFLQKLSTKLIKENDIICIEDLQVKNMIRNRKLSRLISDVSWSEFIRQLKYKANWHGRQIVKVGKFFASSQICNKCGYKNEEVKDLNIREWICPSCNETHDRDINASINILKEGLRLITIQNK

SEQ ID NO: 2318 - protein, 385 aa, unidentified
MRTLTRCYKYRLQPSPTHVETLVQWAGCRRFVWNWALGQKTDHYRATGQRLSYSQLAAALVDLKRQPKTAFLRECHSQPLQQALIDLETAFTNFFAKRAKYPRFKARKVTLHSLRFPQGVAVVNERTISVPKIGHMQAIIHRPLLGIVKGATIKQDTTGAWWVVFVCHTERPDVLLTTDRPVGIDVGLESFTTLSTGEKTAPPKFYRRSQKKLARAQRKLSRAQKGSNNRLKARKRVARIHKKISNQRADWLHKQALGMVQRFDVVCIEDLNIKGLARTKLAKSFSDAALSTFMQRLQEKAEWHGRRVIKVGRFYASSKTCHHCHIKTALTLADRVWTCHACGTTHDRDGNAAINIVHEGLRLLAVGTAESQNAARDGVNPAKRW

SEQ ID NO: 2319 - protein, 385 aa, unidentified
MRMLTRCYKYRLQLTPTHVETLVQWAGCRRFVWNWALHCKQTHYQTTGQRLSYQRLAAALVDLKRQPKTAFLRDCHSQPLQQTLMDLETAFSNFFAKRAKYPRFKSRKITPHSLRFPQGVIVVDEHTISVPKIGLIRAIIHRPLQGIAKSATIKQDATGAWWVIFVCHIDLPDVQPTADRPVGIDVGLESFTTLSTGEKTAPPKFYCRSQKKLARAQRKLSRAQKGSNNRLKAKKHVARIHKKINNQRADWLHKHALGIVRQFDVVCIEDLNIKGLARTKLAKSFSDAALSTFMQRLQEKAEWHGRRVVKIGRFYASSKTCHFCHSKTALTLADRVWTCPTCGTTHDRDGNAAINMLYEGLRLLAVGTTESQNAARDGVNPAKRW

SEQ ID NO: 2320 - protein, 400 aa, unidentified
MLREFCHRSKNLYNHGNYLIRQTFIEDGKWLRYGEVDRLLKADAEYPDYREMPTAQTAQQTLRLLDKNWASFFAAIKDWKAHPEKYKGRPKLPKYKPKNGYFPLVLTNQNCKLKDGVIRFPRVFQGFTVKAIFASQPDAVFNQARIIPHGGEIDLELVYELPEVEEKADNGKYAAIDIGVDNLAALAWNTGERPVLLKGTPLKSVNQYYNKQMAKRRSICELMNGRHSSKRIARLTAKRNRKVEDYLHKASRKVIDLCAEQDVSVLVVGKNKGWKQKANLGRRVNQSFVQLPFARFLQMLQYKAESIGMKVVLTEESYTSGTSFLDGEAPTKDRYDKSRRVYRGLFQANDGRKINADVNGAYQIMRKVFPNVNADGIEGVALRPAVVALSMSARCGSGCA

SEQ ID NO: 2321 - protein, 370 aa, unidentified
MHRAYRFRLYPTQKQAKLINETIGCCRFVYNHFLAEWNQAYETTGRGLSYNECSKRLTALKQTLPWLKTPDSTALQNALQQLAEAFDRFFDGTSNAPRFKSKKHPNQSYTAQCNYPKNGRPTIEVDGHRLKLPKLGWVKFAKSREVQGRILSATIRRNRTGKYFVSILVETDIPPLPQTDKKVGVDLGLKQIVVLSTGETIEHPRYWRRYEEKLAYWQRVMSRRKPGGSNWEKARLKVAKLHEKIANCRNDFLYKLSTRLIRENQVVCVEDLRVRNMQKNRKLAKSISDSAWGRFLNMLEYKATWYGRTVVRVASTFSSSQLCSCCGHRQVEVKSLGIREWVCPTCGAEHDRDHNAARNILNEGLRLLSL

SEQ ID NO: 2322 - protein, 391 aa, unidentified
MLKATKIRIYPTTEQAAFLNRQFGAVRFCYNTGLRIMSHRYQRHGQSLSAKHDIKKLLPVAKKSRKYGWLKEADSMALQQSCINLDQAFQRFFDPKQKAGYPRFKSKRGKQSSYHCVGIQAGENWIRVPKLGPIKARVHRKVEGKLKSITLTRTVTGKHYASLLFETEQVAPEPLKDVDAAGVIGLDMGLSHLAIDSTGHKTSNPRFLTQAAANLRRKQKALSRCQKGSANRAKARLLVAKAHERLANARNDFQHKLSRQIVDDNQAVIVETLKVRNMMKNTRLAKHIGDASWHALTTKLDYKAREQGKRLVRIDPWFASSKTCHVCHHKMDAMPLSVRSWECPACHTQHDRDINAALNIKHQGLIHLKAEGLSVSAHGGSRKSGMPPVAA

SEQ ID NO: 2323 - protein, 507 aa, unidentified
MKPQEKIKRVFTIRVGGKERKRKVRTLLLDLAHFRNILTILITKYYTLYKEHLLNQSILYGLVAKNYTGKYKEEFEKVLKNIENNPELADLLIKLKNQKEKVDNPHYIQYIIRQTIKDFKNFFKSLESFKTNPEKFKEIPRPPKAKKLKYLINFSVEGNVNTFKQEGDKIIIRLKNNKYLKVKLPKDFPYKISSLRIKLFGDDLYVDAVYEQEVELKNPVGEYKAGIDIGLDEMISVVSENVELKSFIVSGKEIKAFNQWFNKEMSKLRAEINNLKNSVKRGFIENQVATKKIYELELKMKSLSSHRKRWLDNNFHKIARKLVDLLHETGHKTIYIGKNAIESKNGIDLGKKTNQEFVSIPFRRLIKLIEYKAYEYGMEVIEVDESYTSKTSPLANIFEVKETKNKEVCQGKRDGDIFKDKVLNKVFHADLVGAVNIIRVGAKLLRLRFYENLKTFFIKLCNPVKLKLIDLFYKVSPESLRIGSSRWGASFPAGWMEKSGYLNTFGT

SEQ ID NO: 2324 - protein, 507 aa, unidentified
MKPQEKIKRVFTIRVGGKERKRKVRTLLLDLAHFRNILTILITKYYTLYKEHLLNQSILYGLVAKNYTGKYKEEFEKVLKNIESNPELADLLIKLKNQKEKVDNPHYIQYIIRQTIKDFKSFFKSLESFKTNPEKFKEIPRPPKAKKLKYLMNFSVEGNVNTFKQEGDKIIIRLKNNKYLKVKLPKDFPYKISSLRIKLFGDDLYVDAVYEYPLKVEQPEGEYKAGIDIGLNELLSVVSENPELKSFIVSGKEIKAFNQWFNKEMSKLRAEIDNLKNSVKKGFIENQVATKKIYELELKMKSLSSHRKRWLDNNFHKIARKLVDLLHETGHKTIYIGKNAIESKNGIDLGKKTNQEFVSIPFRRLIKLIEYKAYEYGMEVIEVDESYTSKTSPLANIFEVKETKNKEVCQGKRDGDIFKDKVLNKVFHADLVGAVNIIRVGAKLLRLRFYENLKTFFIKLCNPVKLKLIDLFYKVSPESLWIGSSRWGASFPAGWMEKSGYLNTFGT

SEQ ID NO: 2325 - protein, 507 aa, unidentified
MKPQEKIKRVLTIRVGGKERKRKVRTLLLDLAHFRNILTILITKYYTLYKEHLLNQSILYGLVAKNYTGKYKEEFEKVLKNIESNPELADLLIKLKNQKEKVDNPHYIQYIIRQTIKDFKNFFKSLESFKTNPEKFKEIPRPPKAKKLKYLMNFSVEGNVNTFKQEGDKIIIRLKNNKYLKVKLPKDFPYKISSLRIKLFGDDLYVDAVYEQEVELKNPVGEYKAGIDIGLDEMISVVSENVELKSFIVSGKEIKAFNQWFNKEMSKLRAEINNLKNSVKRGFIENQVATKKIYELELKMKSLSSHRKRWLDNNFHKIARKLVDLLHETGHKTIYIGKNAIESKNGIDLGKKTNQEFVSIPFRRLIKLIEYKAYEYGMEVIEVDESYTSKTSPLANIFEVKETKNKEVCQGKRDGDIFKDKVLNKVFHADLVGAVNIIRVGAKLLRLRFYENLKTFFIKLCNPVKLKLIDLFYKVSPESLRIGSSRQGVKFSAGWMEKSGYLNTFGT

SEQ ID NO: 2326 - protein, 399 aa, unidentified
MLLRKVYRFRMEPTQAQAEALLRMAGARRFVWNWGLARRKEAYAATGKGLTYNGQATELTALKKRPEMAWLREADSQLLQQALQDLDRAFKAFFERRAGFPRFKTRKKDPPRFRIPQRVRVEEGKVYLPKVGGVKIRQSQPIDCVIKGATFKRDTEGHWHVTLTAEFEMPDVPLPPVNPEHVVGIDLGLKDFAVLSDGTRIAPPKFYRKAERKLRRAQRELSRKQKGSKNREKARHRLNRVHAKVRNQRQDWLHKLTTGLVQKYDGLCIEDLNLKGMAKTKLSKSVLDAAPGEFRRQLEYKAVWYRKHLVVIDRYFPSSKLCRECGTIHTALTLSDRVWTCECGAVHDRDLNAALNIRAEGIRAIPVAVGHPETLNAWGEGVRPTQRRQSSSNQESHVL

SEQ ID NO: 2327 - protein, 418 aa, unidentified
MMKRVEHHRLKPSSPFYTMLREFCHRSKNLYNHGNYLIRQTFIEDGKWLRYGEVDRLLKADAEYPDYREMPTAQTAQQTLRLLDKNWASFFAAIKDWKAHPEKYKGRPKLPKYKPKNGYFPLVLTNQNCKLKDGVIRFPRVFQGFTVKAIFASQPDAVFNQARIIPHGGEIDLELVYELPEVEEKADNGKYAAIDIGVDNLAALAWNTGERPVLLKGTPLKSVNQYYNKQMAKRRSICELMNGRHSSKRIARLTAKRNRKVEDYLHKASRKVIDLCAEQDVSVLVVGKNKGWKQKANLGRRVNQSFVQLPFARFLQMLQYKAESIGMKVVLTEESYTSGTSFLDGEAPTKDRYDKSRRVYRGLFQANDGRKINADVNGAYQIMRKVFPNVNADGIEGVALRPAVVALSMSARCGSGCA

SEQ ID NO: 2328 - protein, 418 aa, unidentified
MMKRVEHHRLKSSSPFYAMLREFCHCSKNLYNHGNYLIHQTFIEDGKWLRYGEVDRLLKADAEYPDYREMPTAQTAQQTLRLLDKNWASFFAAIKDWKAHPEKYKGRPKLPKYKPKDGYFPLVLTNQNCKLKDGFIRFPRVFQGFTVKAIFASQPEAVFKQARFIPHGGEINLELVYEIPEVEEKVDNGKYAAIDIGVDNLAALAWNTGKRPVLLKGTPLKSVNQYYNKQMAKRRSICELMNGRHSSKRIARLTAKRNRKVEDYLHKASRKVIDLCAEQDVPVLFIGKNKGWKQEAKLGRRVNQSFMQLPFARFIQMLQYKAKLIGMKVMLTEESYTSGTSFLDGETPTKDRYDKSRRVHCGLFQASDGRKINADINGAYQIMRKVFPNVNADGIEGVALRPAVVALSMSARRSSGCA

SEQ ID NO: 2329 - protein, 421 aa, unidentified
MYFLVGFMGYVSTRSRLKEMRNLLKAFKTELRLTERQKDKVRRSLGICRFLANQYIARNIWLYRLYQRGVLDEKQRRFVTANDFDKYVNHVLKKKFPWIDQCGSKARKKILINAEQAFRRFFKGQAHFPRFKRKNQQNVKLYFPKNNKGDWTIWRHKIQIPTIGKVRLKEFGYLPQSVTIKNGHVSYEAGRYYVSVTAEIEETSRYNNDLEASYHPQSDGIGVDLGVKSLAIVSDGRIFENINTSSRARRLEKRLRREQRRLSRKYEMRKRKGGSTATASANIEKKKLSVQKLHKRLVNLRRNHENQVIHALVEQKPRFITVEYLNVTGMMKNRHLSKAVAQQRFYSFREKLRRKAEIIGIEVRIADRFYPSSKTCHACGHVHSGLKLKDRTYVCPACGYKKDRDFNAALNLRDTKNYRIA

SEQ ID NO: 2330 - protein, 402 aa, unidentified
MKPLLKSFKTELRLTESQKDKVRRSLGICRFLVNQYIARNIWLYRLYQRGVLDEKQRRFVTANDFDKYVNHVLKKKFPWIDQCGSKARKKILINAEQAFRRFFKGQAHFPRFKRKNQQNVKLYFPKNNKGDWTIWRHKIQIPTIGKVRLKEFGYLPQSVTIKNGHVSYEAGRYYVSVTAEIEETSRYNNDLEASYHPQSDGIGVDLGVKSLAIVSDGRIFENINTSSRARRLEKRLRREQRRLSRKYEMRKRKGGSTATASANIEKKKSSVQKLHQRLANLRRNHENQVIHALVEQKPRFITVEDLNVTGMMKNRHLSKAVVQQRFYSFREKLRRKAEIIGIEFRIADRFYPSSKTCHACGHVHSGLKLKDRVYVCPACGYTEDRDLNAALNLRDTKNYRIA

SEQ ID NO: 2331 - protein, 359 aa, unidentified
MYFLVGFMGYVSTRSRLKEMRNLLKAFKTELRLTERQKDKVRRSLGICRFLANQYIARNIWLYRLYQRGVLDEKQRRFVTANDFDKYVNHVLKKKLPWIDQCGSKARKKVLVNAEQAFRRFFKGQAHFPRFKRKNQQNVKLYFPKNNKGDWTIWRHKIQIPTIGKVRLKEFGYLPQGVTIKNGHVSYEAGRYYVSVTAEIDEMSRYNNDLEASYRPQSDGIGVDLGVKSLAIVSDGRIFENINMSSRARRLEKRLRREQRRLSRKYEMRKRKGGSTATASANIEKKKSSVQKLHQRLANLRRNHENQVIHALVEQKPRFITVEDLNVTGMIKNRHLSKAVSEQRFYSFHEKLRRKAEII

SEQ ID NO: 2332 - protein, 402 aa, unidentified
MKPLLKSFKTELRLTESQTDKVCRSLGICRFLANQYIARNIWLYRLYQRGVLDEKQRRFVTANDFDKYVNHVLKKKFPWIDQCGSKARKKVLVNAEQAFKRFFKGQAHFPRFKRKNQQNVKLYFPKNNKGDWTIWRHKIQIPTIGRVRLKEFGYLPQGVTIKNGHVSYEAGRYYVSVTAEIDEMSRYNNDLEASYRPQSDGIGVDLGVKSLAIVSDGRIFENINTSSRARRLEKRLRREQRRLSRKYEMRKRKGGSTATASANIEKKKSSVQKLHQRLANLRRNHENQVIHALVEQKPRFITVEDLKVTGMMKNRHLSKAVAQQRFYSFREKLRRKAEIIGIEFRIADQFYPSSKTCHACGHVHSGLKLKDRVYVCPACGFTEDRDLNAALNLRDTKNYRIA

SEQ ID NO: 2333 - protein, 498 aa, unidentified
MLSSKRVLTIRVGGKERKRKVRTLLLDLAHFRNMLIILITKYKELYGMYPLHQSILYGLVAKTYTGKYRQEFEKVLKNIESNPKLGELLKKLKTQKERIDNPHYVQYVIRQVIRDFKSFFKAVENFRANPERFKEAPRPPKPKKLRYLMNFSVEGNANTFKQEGDKLIIKLRNGKYLKVKLPKDFSLRVSSVRLKLFGNDLYVDLVYEQEVEARNPVGEYTAGIDIGLDEMLSLVSENPNLKSFVISGKEIKAFNQWFNKERAKLRSQMDCLKNEIKRGDYKDTKKLERKLRELEIKEKVLSAHRKRWLDNNLHKIARKLLDLLYETGHKVIYIGKNALESKNGVNLGKRTNQNFVSIPFRRLVELIKYKAQQYGIEVVEVDESYTSKTSPFANVMEIQRTKNKELCYGERMGNLFKDKVLNKVFHADLVGALNIMRVGAKLLRLSFYENLKILFIKLCNPLRLKLIDLFYKVSSESLWIGGSRQGVSVPAGWMEKLG

SEQ ID NO: 2334 - protein, 416 aa, unidentified
MAIQVTRTYVGSIQNHQQVCDGLDSLGDSASKIWNVARWTADRVWDEVGKIPNEGSLKSYMKNQACWKDLNAQSSQKVIEELSDAFQSWFDLRHKDSKSNPPGYRKHGDKRPRSTVTFKADGFKHDPENNRVRLSKGSNLKEHFSDFILCEYQTRPDVDLSEVESVQNVRAVWNGDEWELHFVCKVSLETNDSAGDKVAGIDLGIKNIATVAFSDEYVLYPGNSLKQDKHYFTRAEYDTEGENGPSERLMWARRKLAERETHFYHTLTDTIITECAERGVGTLAVSWPEDVRDSDWGKTGNKKLHTWAFDRIYQYLEYKGKIRGVEVLKENEWDTSKTCSRCGDDTKGNRKHRGLYVCSSCGLVGNADCNGAENMRQKITPSPHGEDRSNGCVAQPSVHLFDSESGCFAPREQVVS

SEQ ID NO: 2335 - protein, 399 aa, unidentified
MLLRKVYRFQMRPTKAQEELLCQMAGAKRFVFNWALARRRDFYEANKEGISAKQLSSELTDLKKQPETGWLKGVDSQLLQQALKDVDRSFKNFFEKRSRFPRFKSRKREMPSFRIPQRVKVEDGKVYVPKIGWVRIRQSQDIDCKTKSATFKRDATGKWYVTLTAEFEMPDVPLPPAKPENVVGIDLGLKDFAVLSSGEREAPPKHYRAAEKKLKRAQRALSRKQKGSKNRDRARQQLARIHQKVRNKRQDFLHKMTTSLVRGYEGICIEDLSLKGMARTKLAKSVSDAALGEFRRQLEYKTVWHRKHLAVIDRFFPSSKLHMECGAINDALTLADRVWTCACGAVIDRDLNAAHNIKVEGLKQLVAAGHAETLNACGAQVRPTLISRHSAVKQESHVL

SEQ ID NO: 2336 - protein, 363 aa, unidentified
MQKAFKFRIYPNKKQIELIKNTFGCVRFVYNYYLAKREEEYKTNGVTFNYNKCSADLTKQKQVNTWLKEVDKFALQNALKDLDKAFKNFFEGRANYPKFKSKKNKHQSFRTNFSNNNIKIEGNKIKLPKLGWVKFAKSREIEGKILNVTVSRTPTGKYFISICCSVDKIEEKPKTDRVIGIDLGINHFLIDSDGNKISNPKYLIKLEKRLIREQRKLSRKQIGSNNYKKQALKVAKIYEKIRNQREDFLHKLSSKIINENQVIILEDLKVKNMLKNDRLSKFISDSAWAKFVKMLEYKAFWYGRAIVKVDTFYPSSQICSVCGYRNEEVKDLKIREWRCPECGIVHDRDINASINILKEGKKF

SEQ ID NO: 2337 - protein, 377 aa, unidentified
MQHLDVFFKLRDQIDYRALPAQANQNVLHMLYRDWKSFFAALADYKAHPDKYEAVPHIPRYADKDGYKPLIFTNQICKLRKDKHGWYVKFPKAVLQAGCIRDRYDLGKMDLHEQKLKEVRLIPNGDTIKLEIVCEIEIKEPTITIHEATRVAGIDIGVDNLTAIAFTSGHHPVLIKGNEIKAVNQFYNKQIAHYRSLLRTGKKDSEGIHQTKRMKRISEKRNRRVKDILHKASRKIIDLCVEEGIEVIVVGNNAGWKKRIHIGKKNNQTFVQISFHTLIEMIKYKGEAAGIRVVICEESYTSKASSIDEDQIPVYGNDVTHAFSGKRIKRGLYRSKNGILMNADINGASNIIRKVYPCMPKRERWSRGTVNVPVTCI

SEQ ID NO: 2338 - protein, 530 aa, unidentified
MLSSRVLSIRISGKDRKEKVRKLLFDLAHFKNLWIILIRRYKELYGYYSTDQSILYGLIADKEYSSKKEGKLRKFKEVRENILKDEELTGLLKALKEQKRKVDNNYLLQQVIRSVVKSFNDYRKAYKEYQKNPKKFKGTPKPPKSKKLKFLMNFSVELNVNTFERLEDSILIKLRINSKEFLKVKLPKNFNFEIKSIRLKLFGTDVYADVVYKVETLELRTTGEYTAGIDLGLNNLIALVSTNPNLESLIVSGKEIKAFNQWFNKEKAKLQSEIDTIRNKLSQIEEEEETQNLKQLLTEKLIILKELSAYRKRRIDNDFHKISRKVVDILKATDHKKLYIGKGATESKDGINIGKKNNQHFVSVPFRRLIGLIKYKAEEVGIKALEVEEAFTSKTSPFADILEVRKIGKKYLKAKEKEDKTLLQELLNQLKSLRKAIRKFRGLLKDKVSGAFFNADLVGAYNILRVGENSLRLIEDLKLLFVKLCNPVKFRLIEFFYKVSCGTRKGAGSSSHNAGLSPFDYQSCGNLTTF

SEQ ID NO: 2339 - protein, 523 aa, unidentified
MQSNRVLNIRISGKERKEKVRKLLLDLAHFKNLLILLIRRYKELYGYYPTDQSILYGLIKEGEYSSKKEEKLKSFREVKENILKDEELTRFLKALKEQKKKTDNNYILQQVIRDVVKSFKSYRKAYKEYLKSPKKFKGTPRSPKPKKLKYLMNFSVELNVNTFKRLEDSILISLRINNKEFLKVKLPKDFDFEVKSIRLKLFGTDVYADVVYKAELPKVEKTGKHVAGIDLGLNNLITLLSTNKDLKSFIVSGKEIKAFNQWYNKEKSKLQSEIDTIRNKLSQVEDEKEGESLKQLITEKLIRLKELSAYRKRKIDNDFHKISRKVVDVLKATDHKKLYIGKGATESKDGVNLGKKNNQHFVSIPFRRLIELIKYKAEELGIKVFEIEEPFTSKTSPFADIFEVKRIGKEYLKAKEEGDKDLLKELLIKLKKLTQAVRRRRGVLKDKVLDKIFNADCVGAYNIIRVGENSPRLIKDLKLLFIKLCNPIRFKLTDFLYKVSCESLCECRGIAGSSSLLSRVESF

SEQ ID NO: 2340 - protein, 532 aa, unidentified
MLINRVLTIRISGKERKEKVKNLLLDLAHFKNLLILLLRRYKELYGYYPTDQSILYGLIKEGEYSSKKEEKLKSFREVKENILKDEELKRFLNALKEQKKKTDNNYILQQVIRDVVKSFKSYRKAYKEYLKNPKKFKGTPRPPKPKKLKYLMNFSVELNVNTFERLEDSILIKLRINNKEFLKVKLPKEFTFEVKSLRLKLFGTDVYADVVYKVELPEVEKTGKHVAGIDLGLNNLITLLSTNKDLKSLIVSGKEIKAFNQWFNKEKSKLQSEIDTLTNKLSQTEDREKAENIKKTLAEKLIKLKELSSYRKRKIDNDFHKISRKVVDVLKATDHKKLYIGKGATESKDGVNLGKKNNQHFVSIPFRRLIELIKYKAEELGIKVFEIEEPFTSKTSPFADIFEVREAGKEYLKAKEKGNRELLKELLVKLKGLTQAVRRCRGVLKDKVLDKIFNADCVGAYNIVRVGESSLRLIEDLKLLFVKLCNPIKFKLTDFLYKVSCESLCGGIAGSSSLLGRVESFDYQLCGNLTTS

SEQ ID NO: 2341 - protein, 282 aa, unidentified
QAGCVRDRYDLGKMDLHEQKLKEVRLIPNGDTIKLEIVCEIEIKEPTITIHEATRVTGIDIGVDNLMAIAFTSGHHPVLIKGNEIKAVNQYYNKQIAHYRSLLRTGKKDSKGIHQTKRMKRISEKRNRRVKDILHKASRKIIDLCVEEGIEVIVVGNHAGWKKRIHMGKKNNQTFVQIPFRTLIEMIKYKGEAAGIRVVVCEEAIQSKASSIDEDQIPVYGNDVAHTFTGKRIKRGLYRSKNGILMNADINGASNIIRKVYPCMPKRERWSRGTVNVPVTCI

SEQ ID NO: 2342 - protein, 377 aa, unidentified
MQHLDVFFKLRNQIDYRALPAQANQNVLHMLYRDWKSFFAALAGYKAHPDKYEAIPHIPRYADKNGYKPLIFTNQICKLRKDKHGWYVKFPKAMLQAGCVRDRYDLGKMDLHEQKLKEVRLIPNGDTIKLEIVCEIEIKEPTITIHEATRVAGIDIGVDNLTAIAFTSGHHPVLIKGNEIKAVNQFYNKQIAHYRSLLRTGKKDSKGIHQTKRMKRISEKRNRRVKDILHKASRKIIDLCVEEGIEVIVVGNNAGWKKRIHMGKKNNQTFVQIPFHTLIEMIKYKGEAAGIRVVVCEEAIQSKASSIDEDQIPVYGNDVTHTFTGKRIKRGLYRSKNGILMNADINGASNIIRKVYPCMPKRERWSRGTVNVPVTCI

SEQ ID NO: 2343 - protein, 415 aa, unidentified
MAIQVTRTYVGDVQNHQQVQSDLDSLGDAASKIWNVARWTVDRVWEATGEIPDEGTLKAYMKAQHCWKNLNAFSSQKVIEELSDAFQSWFDVRHKDETANPPGYRKEYDTRPRSTVTFKDNGFKHDPKHNRVRLSKGANLKDGWGDFVLCEYDTRNDIDLSTVDTVQNVRAVWNGEQWEVHFVVRETIETPDSPGKGVAGVDLGVSNIAAVAYPDEYVLYPGNTIKQDNHYFQRKEYNTEGENGPSQQAQRLRQKRTRRETHFYHTLTKTIIEECVDRDVGTLVVGWPEDVRSEDLGKTANKWLHTWAFDRIYQYLAYKGENHGIEVLKENEWNTSKTCCKCGDTTDSNRVERGLYVCGSCELVANADCNGAENIRQKITPNPSVDRSSGCLAQPSTYLFDRESGTFHTREQAVS

SEQ ID NO: 2344 - protein, 377 aa, unidentified
MQHLDGFFKLRDQIDYRALPAQANQNVLHMLYRDWKSFFAALADYKAHPDKYEAIPHIPRYADKDGCKPLIFTNQICKLRKDKHGWYVKFPKAVLQAGCVRDRYDLGKMDLHEQKLKEVRLIPNGDTIKLEIVCEIEIKEPTITIHEATRVAGIDIGVDNLTAIAFTSGHHPVLIKGNEIKAVNQFYNKQIAHYRSLLRTGKKDSKGIHQTKRMKRISEKRNRRVKDILHKASRKIIDLCVEEGIEVIVVGNNAGWKKRIHMGKKNHQTFIQIPFHTLIEMIKYKGEAAGIRVVVCEEAIQSKASSIDEDQIPVYGNDVAHTFTGKRINRGLYRSKNGILMNADINGASNIIRKVYPCMPKRERWSRGTVNVPVTCI

SEQ ID NO: 2345 - protein, 384 aa, unidentified
MAIEVTRTYVGSIQNQQQVRDDLDSLGGSASKIWNSARWTADRIWNATGEIPDEGTLKAYMKNQPCWKDLNAQSSQKVIEELSDAFQSWFDLRQTDDEANPPGYRKHGDTRPKSTVTFKADGFKHDPENNRVRLSKGSNLKEHWSDFILCEYQTRPDVDLSEVNKVQNVRAVWNGDEWELHFVCKVVLETNDAAGDGVAGIDLGITNIATVAFPDEYVLYPGNLLKQDKHYFTRAAYETAGENGPSEKSMWARRKLAERETHFYHVLTDTIITECVERDVGTLAVSWPEDVRKSDWGKTGNKKLHSWAFDRLYQYLEYKGEIRGVEVLKENEWNTSKTCSRCGDDTTSNRVERGLYVCSSCELVANADCNGAENMRRSCGGDCW

SEQ ID NO: 2346 - protein, 376 aa, unidentified
MERLRHKAYKFRIYPNKTQESLIAKTIGCARFVFNHFLSEWSSAYKETGKGLSYSTCSKQLPKLKREFLWLKEVDSTAIQTSVKHLSDAYERFFKKQNQAPRFKSKKNKVQSYTTKCTNGNIAIQDRKIKLPKLGLVRFAKSREVKGRILSATVRRNPTGKYSVSILVKTDIQELPKSNTYVGIDLGLKDFAALSNGTTYQNPRYLRKTEKKLAKAQRILSRREKGSSNWHKQRIKVARLHEKIANSRKDYLQKISTEIIKNHDVIGVENLQISNMLKNRKRSKSISDVSWSMFTSMLEYKAKWYGKQLVTVSKVFASSQLCSKCGYQNREVKNLAVRTWDCPDCGCHHDRDLNASFNILKEIQRILTTVGATGLA

SEQ ID NO: 2347 - protein, 376 aa, unidentified
MERLKHKAYNFRIYPNKTQESLIAKTIGCARFVFNHFLSEWSSAYKETGKGLSYSTCSKQLPKLKREFLWLKEVDSTAIQTSVKHLSDAYERFFKKQNQAPRFKSKKNRVQSYTTKCTNGNIAIQDRKIKLPKLGLVRFAKSREVKGRILSATVRRNPTGKYSVSILVKTDIQELPKSNTYVGIDLGLKDFAALSNGTTYQNPRYLRKTEKKLAKAQRILSRREKGSSNWHKQRIKVARLHEKIANSRKDYLHKISTEIIKNHDVIGVENLQISNMLKNRKRSKSISDVSWSMFTSMLEYKAKWYGKQLVTVSKVFASSQLCSKCGYQNSEVKNLAVRTWDCPDCGCHHDRDLNASFNILKEIQRILTTVGATGLA

SEQ ID NO: 2348 - protein, 403 aa, unidentified
MQKAFKIALIPSHNQEVLINKTIGCARFVYNRFLALRKELYATEQKTLNYNTCSQELTILKKEIEWLKEVDKFALQNSLKNLEAAYKNFFTDLKKSKKKKGVGFPKFKKKYGCKQSYKTNLTNGNIQIIENRLKLPKLGWIKFYKSQEITGKLVNVTVTRTSSGKYIASILCETEIEKYPIGTQNIGLDLGIKSYLVTSEGEVIENPKYYRLQLKKLRKANKKLSRSTKGSSNRVKAKIKLARIYERITNLRDDFLHKLSTRLIKENSIICIEDLRVANMVKNHKLAMSISDASWSKFVVMLEYKAIWHDRIVQKVGTFYPSSQTCNCCGFVNPLVKDLKLREWNCPSCNTHNLRDKNAALNILSEGLRLLTAVGMPEVVKNACGELVSPELFQAEIVEAGIA

SEQ ID NO: 2349 - protein, 403 aa, unidentified
MQKAFKIALIPSHNQEVLINKTIGCARFVYNRFLALRKELYATEQKTLNYNTCSQELTLLKKEIEWLKEVDKFALQNSLKNLEAAYKNFFTDLKKSKKKKGVGFPKFKKKYGCKQSYKTNLTNGNIQIIENRLKLPKLGWIKFYKSQDITGKLVNVTVTRTSSGKYIASILCETEIEKYPIGTQNIGLDLGIKSYLVTSEGEVIENPKYYRLQLKKLRKANKKLSRSTKGSSNRVKAKIKLARIYERITNLRDDFLHKLSTRLIKENSIICIEDLRVVNMVKNHKLALSISDASWSKFVTMLEYKALWHDRVVQKVGTFYPSSQTCNCCGLINPLVKDLKLREWSCPSCNSYNLRDKNASLNILSEGLRLLTAVGTPEVIKNACGELVSPELFQAEIVEAGIA

SEQ ID NO: 2350 - protein, 403 aa, unidentified
MQKAFKIALIPSHNQEVLINKTIGCARFVYNRFLALRKELYATEQKTLNYNTCSQELTLLKKEIEWLKEVDKFALQNSLKNLEAAYKNFFTDLKKSKKKKGVGFPKFKKKYGCKQSYKTNLTNGNIQIIENRLKLPKLGWIKFYKSQDITGKLVNVTVTRTSSGKYIASILCETEIEKYPHVTQNIGLDLGIKSYLVTSEGEVIENPKYYRLQLKKLRKANKKLSRSTKGSSNRVKAKIKLARIYERITNLRDDFLHKLSTRLIKENSIICIEDLRVVNMVKNHKLALSISDASWSKFVTMLEYKALWHDRIVQKVGTFYPSSQTCNCCGLINPLVKDLKLREWSCPSCNSYNLRDKNAALNILSEGLRLLTAVGTPEVIKNACGELVSPEVIPAQFDEAGIA

SEQ ID NO: 2351 - protein, 416 aa, unidentified
MAIEVTRTYVGSIQNQRQVCDGLDLLGDAASKIWNVARWTADRIWDATGEIPDESSLKAYMKNQSCWKDLNAQSSQKVIEELSDAFQSWFDLRQNDTKANPPGYRKHGDERPKSTVTFKADGFKHDPENNRVRLSKGSNLKETWADFILCEYQTRPDVDLTEVNTVQNVRAVWNGDEWELHFVCKVELETNDSAGDGVAGIDLGITNISTVAFPDEYVLFPGNSLKQDKHYFMRAEYDTEGENGPSEKSMWARRKLTERETHFYHVLTDTIITECVERGVGTLAVSWPEDVRESDWGKTGNKKLHSWAFDRIYQYLAYKGETRGIEVLKENEWDTSKTCSRCGDDTRSNRVKRGLYVCSSCELVANADCNGAENMRQKITPSPHGEDRSNGCVAQPSTYLFDRESGMFRTREQVVS

SEQ ID NO: 2352 - protein, 398 aa, unidentified
MAVGATRTYVGSIQNQQQVCDGLDSLGDSASKIWSVARWTADRIWDEAGEIPDEGTLKAYMKNQSCWKDLNAQSSQKVIEELSDAFQSWFDLRHKFDEANPPGYRKHGDTRPKSTVTFKADGFKHDPEHDRVRLSKGKNLKEHWSDFLLCEYQTRPDVDLSEVNKVQNVRAVWNGDEWELHFVCKVELETNDSAGNEVAGIDLGIKNIATVAFPDEYILYPGNSLKQDKHYFTRAEYDTEGENGPSEKSMRARRKLTDRETHFYHTLTDTIITECVERGVGTLAVSWPEDVRESDWGKTGNKKLHSWAFDRIYQYLAYKGEIRGVEVLKENEWDTSKTCSRCGDDTRSNRVERGLYVCSSCGLVGNADCNGAENMRQKITPSPYGEDRSNGCVVVRET

SEQ ID NO: 2353 - protein, 416 aa, unidentified
MAIEVTRTYVGSIQNHRQVCDSLDSLGDSASKIWNVARWTADRVWDEIGEIPNEGPLKSYMKNQACWKDLNAQSSQKVIEELSDAFQSWFDLRHKFDEANPPGYRKHGDTRPRSTVTFKEDGFKHDPKNNRVRLSKGSNLKEYWSDFLLCEYQTRPDVDLSEVNSVQNVRAVWNGDEWELHFVCKVELEANDSAGEGVAGIDLGIKNIATVAFPDEYVLYPGNSLKQDKHYFKRAEYDTEGENGPSEKSMWARRRLADRETHFYHTLTDAIITECVERGVGTLAVSWPEDVRESDWGKTGNKKLHTWAFDRIHHYLEYKGEIRGVEVLKENEWNTSKTCSWCGDDTKSNRVERGLYVCSSCGLVGNADCNGAENMRQKITPSPHGEDRSNGCVAQPSTYLFDRESGTFRTREQVVS

SEQ ID NO: 2354 - protein, 416 aa, unidentified
MAIEVTRTYIGSIQNHRQVCGGLDSLGDSASKIWNVARWTADRIWNATGEIPDEGVLKSYMKNQACWKDLNAQSSQKVIEELSDAFQSWFDLRQKDDTANPPGYRKHGDKRPRSTVTFKEDGFKHDAENNRVRLSKGSNLKDHFSDFLLCEYQTRPDVDLSEVTSVQNVRVVWTGDEWELHFVCKVELETNDSAGDGVAGIDLGITNIATVAFPDEYVLYPGNSLKQDKHYFTHTEYDTEGENGPSEKSMRARQKLAERETHFYHTLTDTIITECVERGVGTLAVSWPEDVRESDWGKTGNKKLHSWAFDRIYQYLTYKGEIRGVAVLKENEWDTSKTCSRCGDDTKSNRVERGLYVCSSCELVGNADCNGAENMRQKITPSPHGEDRSNGCVAQPSIYLFDRESGMFHTREQVVS

SEQ ID NO: 2355 - protein, 416 aa, unidentified
MAIKATRTYVGSIKNHQQVCDGLDSLGDSASKIWNVARWTADRIWDATGEIPDSGALKSYMKNQPCWKDLNAQSSQKVIEELSDAFQSWFDLRHKFDEANPPGYRKHGNTRPRSTVTFKEDGFKHDPENDRVRLSKGSNLKKHFSDFLLCEYQTRPDVDLSEVNSVQNVRAVWNGDEWELHFVCDVELESADTAGDGIAGIDLGITNIATVAFPDEYVLYPGNSLKEDKHYFTRAEYDTEGESGPSEQSMWARRKLSKRETHYYHTLTDAIIAECVERGVGTLAVSWPEDVRASDWGKTGNKKLHSWAFDRIYQYLEYKGEMRGVEVLKENEWNTSKTCSRCGDDTKSNRVERGLYVCSSCELVANADSNGAENMRQKITPSPHGEDRSNGCVAQPSTYLFDRESGTFHTREQVVS

SEQ ID NO: 2356 - protein, 374 aa, unidentified
MIVYKAYRFRIYPNQKQKILINKTFGCARFVFNHFLAKWNNAYKETGKGLSYQSCSAQLTKLKKEYTWLKEVDSIALQTSLKHLSDAYTRFFQKQNDRPRFKSKKNKVQSYTTKYTNGNIAIVGNKIKLPKLGFVRFAKSREVEGRILSTTIRRNPSGKYFVSILAETDVQPLPKTHTTVGIDMGLKHFAILSDGTKYANPIFFRKLEEKLAKAQRILSRRQRGSSNWHKQRMKVARIHESIVNARNDYLHKISTEIVKNHDIIGMEDLSVSNMLKNDKLAKAISEASWATFEAMIAYKAKWYGKQLIVVAKNFPSSQLCSCCGYQNKDVKHLALREWECPNCHTHHDRDVNASINIKNEAVRLLTAGTAGLAY

SEQ ID NO: 2357 - protein, 377 aa, unidentified
MQHLDGFFKLRDQIDYRALPAQANQNVLHMLYRDWKSFFAALADYKAHPDKYEAIPHIPRYADKDGYKPLIFTNQICKLRKDKHGWYVKFPKAVLQAGCVRDRYDLGKMDLHEQKLKEVRLIPNGDTIKLEIVCEIEIKEPTITIHEATRVAGIDIGVDNLMAIAFTSGHHPVLIKGNEIKAVNQFYNKQIAHYRSLLRTGKKDSKGIHQTKRMKRISEKRNRRVKDILHKASRKIIDLCVEEGIEVIVVGNHAGWKKRIHMGKKNNQTFVQIPFRTLIEMIKYKGEAAGIRVVVCEEAIQSKASSIDEDQIPVYGNDVAHTFTGKRIKRGLYRSKNGILMNADINGASNIIRKVYPCMPKRERWSRGTVNVPVTCI

SEQ ID NO: 2358 - protein, 389 aa, unidentified
MNVIRQKHHSTPIHIIDHDHRFVSMQHLDGFFKLRDQIDYRALPAQANQNVLHMLYRDWKSFFAALADYKAHPDKYEAIPHIPRYADKDGYKPLIFTNQICKLRKDKHGWYVKFPKAVLQAGCVRDRYDLGKMDLHEQKLKEVRLIPNGDTIKLEIVCEIEIKEPTITIHKATRVTGIDIGVDNLMAIAFTSGHHPVLIKGNEIKAVNQYYNKQIAHYRSLLRTGKKDSKGIHQTKRMKRISEKRNRRVKDILHKASRKIINLCVEEGIEVIVVGNNAGWKKRIHMGKKNNQTFVQIPFRTLIEMIKYKGEAAGIRVVVCEEAIQSKASSIDEDQIPVYGNDVAHTFTGKRIKRGLYRSKWHSNECRYQWSKQYHTKSISMYARARAME

SEQ ID NO: 2359 - protein, 377 aa, unidentified
MQHLDGFFKLRDQIDYRALPAQANQNVLHMLYRDWKSFFAALADYKAHPDKYEAIPHIPRYADKDGYKPLIFTNQICKLRKDKHGWYVKFPKAVLQAGCVRDRYDLGKMDLHEQKLKEVRLIPNGDTIKLEIVCEIEIKEPTITIHEATRVTGIDIGVDNLMAIAFTSGHHPVLIKGNEIKAVNQFYNKQIAHYRSLLRTGKKDSKGIHQTKRMKRISEKRNRRVKDILHKASRKIIDLCVEEGIEVIVVGNNAGWKKRIHMGKKNNQTFVQIPFRTLIEMIKYKGEAAGIRVVVCEEAIQSKASSIDEDQIPVYGNDVTHAFSGKRIKRGLYRSKNGILMNADINGASNIIRKVYPCMPERERWSRGTVNVPVTCI

SEQ ID NO: 2360 - protein, 386 aa, unidentified
MITTKTYKFRLDPTREQEQEFLRFAGCRRFVWNWALARKQAVYKETGKTLGYNALASELVALKKQPETAFLKECHSQALQQTLMDLDKAFVSFFAKRTKFPRFKSRKRTPNAFRIPQNVTIVDGRVSIPKVGLVKARLHREMQGTIKSATIKQEPNGHWYVCFISHIELPDVEPVWDAPVGIDVGLESFFTLDNGEKVKPPKFYRKAERKLKRLQRAVSRSQKTSRRRCKRKKVLAVYHARVRNQRNDWLHKISSKLISRYDTLCIEDWNLKGLVKTKLAKSFTDASLGAFVRMLVYKAEWNRCRIVKVDRFFPSSQTCHPCNHRQHLELSDRQWTCGGCGVIHDRDPNAAINLLLEGMRILAVGSPESQNDKGGNVRLAKVSSSR

SEQ ID NO: 2361 - protein, 379 aa, unidentified
MLVHKAYKFRIYPTKEQEILIVKTFGCARFVFNHFLAEWERAYRTTGKGLTYKVCSSQLTNLKKQFVWLKEVDSIALQTSLKHLSDAYTRFFQKQNNKPRFKSKKNKVQSYTTKYTNGNIAVVGNRIKLPKLGLVRFAKSREVEGRILSATIRRNASGKYFVSILAEVDVQPLPKTNRAIGIDLGVKHFAILSDGTTYANPKFLRKLEEKLAKAQRILSRRQIGSSNWHKQRIKVARLHEKMTNFRNDYLHKLSTEIVKNHDIIGIEDLQVSNMMKNHNLAKAIAEVSWSTFTDMLMYKAIWYGKQVVVVAKNFPSSQLCSHCGYKNKDVKHLHLREWKCPSCGTHHDRDVNASMNLKNEAIRLLTAGTAGLACSFSLR

SEQ ID NO: 2362 - protein, 364 aa, unidentified
MHKAYKFRLYPTKEQETIIAKSIGCNRFVYNHFLAKRKEAYEEYDTTINYNGCSALLTKLKKEFPWLKEPDSTSLQTTLKDLDSAYQKFFKEKKGYPKFKSKKNPVQSYTSKCNNSSIRIVDNIIKLPKLGLVKFAKSREVDGQIISATIRRNPSGKYFVSVLVDVEIDQLPVVGQSIGVDLGVKDFAILSTGEKIHNPKYYRKLERKLTKLQRSLSRKTKGSNNRNKARIKLARHHEKIANCRRDFLQKLSTRLIRDNQTICLEDLQTSNMIKNHKLAKSIADVGWSEFRSMLDYKANWYGRTISVIGKSFPSSQNCSVCGYRNREVKNLNLREWECPNCHTVHDRDVNAANNILAEGLRLLA

SEQ ID NO: 2363 - protein, 364 aa, unidentified
MHKAYKFRLYPTKEQETIIAKSIGCNRFVYNHFLAKRKEAYEEYDTTINYNGCSALLTKLKKEFPWLKESDSTSLQTTLKDLDSAYQKFFKEKKGYPKFKSKKNPVQSYTSKCNNSSIRIVDNIIKLPKLGLVKFAKSREVDGQIISATIRRNPSGKYFVSVLVDVEIDQLPVVGQSIGVDLGVKDFAILSTGEKIHNPKYYRKLERKLTKLQRSLSRKTKGSNNRNKARIKLARHHEKIANCRRDFLQKLSTRLIRDNQTICLEDLQTSNMIKNHKLAKSIAEVGWSEFRSMLEYKANWYGRTISVIGKSFPSSQSCSVCGYRNREVKNLNLREWECPNCHTVHDRDVNAANNILAEGLRLLA

SEQ ID NO: 2364 - protein, 303 aa, unidentified
MAQLVKRAYKYRFHPTPEQAEQLVRTFGCVRLVYNKALEERTRAYTLEGRGVSYTESSAALTGWKKTPELAFLCEVSSVPLQQTLRHLQAAFANFFAKRAGYPTFKSRKRSRASAEYTRSGFRWRDGRLTLAKMDTPLDIVWSRPLPGGAEPSTVTVSRDAAGRWFVVLLVEEKIAPLPPVEQSTGLDAGLTALLTLSCGEQIANPRHERRERRSLTKAQRALARAISDAGWRELRRMLEYKTAWYGRTLVVVDRFFPSSKLCSVCGALQEEMPLSVREWVCACGAVHDREVNAAQNMLLAAG

SEQ ID NO: 2365 - protein, 385 aa, unidentified
MAIQVTRTYVGHITNQQQVRTDLDSLGDAASKLWNVARWTADRVWDAIGEIPDVATLKAYMKTRQCWKNLNSQSSQKVIEELSDAFQSWFDVRQKDETANPPGYRKEYDSRPRSTVTFKEDGFKHDPKHGQVRLSKGSNLKDGWGDFVLCEYETRNDIDLGSVDTVQNVRAVWDGDEWTVHFVCKETIETPDSPGGGVAGVDLGVSNIAAVAFPDEYVLYPGNTIKQDNHYFQQQEYATEGENGPSQQAKRLRQKRKRRETHFYHTLTKTIIEECVDRGIGTLVVGWPEDVRSEDLGKTANKWLHTWAFDRLYQYLNYKGEEHGVEVLKENEWNTSKTCCECGDTADSNCVERGLYVCDSCGLVANVDCNGAENIRXXXXXXXXL

SEQ ID NO: 2366 - protein, 416 aa, unidentified
MVIEVTRTYVGSIQNHRQVCDGLDSLGDSASKIWNVARWTADRIWNQTGEIPDEGALKSYMKNQSCWKDLNAQSSQKVIEELSDAFQSWFDLRHKDDKANPPGYRKHGDERPHSTVTFKSDGFKHDPENNRVRLSKGSNLKDYWSDFVLCEYQTRPDVDLSAVNKMQNVRAVWSGDEWELHFVCKVNPETQDSGGDDVAGVDTGIKNIATVAFPDEYVLYPGNSLKQDKHYFAREEYDTEGENGPSEQSMWARRKLTERETHLYHALTDAIITECVERDVGTLAVGWPEDVRNSDWGKTGNKKLHSWAFDRIYQYLEYKGEIRGVEVLKENEWNTSKTCSRCGDDTRTNRVERGLYVCSSCGLVGNADCNGAENMRQKITLSPHGADRSNGCVAQPSTYLFDRESGMFHTREQVVS

SEQ ID NO: 2367 - protein, 432 aa, unidentified
MSVFVIIIFFHATNIHDFLVVYKVIIIFINNMRKINRTYKFRLYPNKAQTDLLARHFGCARFVYNYFLNQRKEQYRLTGKSDNYYAQAKTLTALKKQEATAWLKEVNSQTLQFAIRSLEVAYTNFFQKRTKFPNFKSKHSKNSFTVPQFASIADNRLFIPKFKEGIKCRVHREIKGKIGKITISKTPSGKYFVSVFTEEEYATPLEKTNKSVGVDMGLKDLLITSEGETFKNNRYTRKYEHKLARAQRNLSRKKKGSRGFENQKLKVARLHEKISNSRADYLHKCSISLVRRYDTICIEDLNVKGMERNHHLAKSITDASWSSFVTMLTYKADWNGKKVVKIDRYFPSSQTCNVCGYVNKQTKDLSVREWECPVCHTHHNRDVNAAINILRFGLNNISAGTVDYTDGEDVRANLLKGRSSVKSEAHESLAHG

SEQ ID NO: 2368 - protein, 391 aa, unidentified
MLKATKVRLYPTTEQAEFLNRQFGAVRFVYNTGLRIMSHRHKRHGQSLSAKHDIKKLLPVAKKSRKYGWLKDADSIALQQACLNLDHAFQRFFDPVKKAGYPRFKSKRGKQSSYHCVGVKAGDDWIKVPKLGPIKARMHRQVEGRLKSITLTRTVTGKHYASLLFDTEQAAPAPLKDVDAAKVLGLDMGLSHLAIDSTGRKIANPRFLKQAQKNLKRKQQALSRTKKGSARRAKARLLVAKAHERVANARNDFQHKLSRQIVDDNQAVIVETLKVSNMMKNARLAKHIGDASWHALMSKLDYKAREQGKHLVKIDPWFASSKTCHICQHKMDAMPLNVRSWECPACHTQHDRDINAALNIKHQGIIELKAEGLSVSAHGGLRKSGTSPVAA

SEQ ID NO: 2369 - protein, 416 aa, unidentified
MAIQATRTYVGSIQNHRQVREGLDSLGDSASKIWNVARWTADRIWDAIGEIPDEGPLKSYMKNQACWKDLNAQSSQKVIEELSDAFQSWFDLRHKFDEANPPGYRKHGDTRPKSTVTFKEDGFKHDPKNNRVRLSKGSNLKEHFSDFILCEYQTRPDVDLSEVNSVQNVRAVWNGDHWEIHFVCKVSLETNDSAGDGVAGIDLGIKNIATVAFPDEYVLYPGNSLKEDKHHFNRAEYDTEGENGPSEKSMWARRKLTKRETHFYHTLTDAIITDCVERGVGTLAVSWPEDVRESDWGKTGNKKLHSWAFDRIYQYLDYKGEIRGVEVLKKNEWDTSKTCSKCGDDTKSNRVERGLYVCSSCGLVGNADCNGAENMRQKITPSPQSEDRSNGCVAQPSTYLFDRESGTFHTREQVVS

SEQ ID NO: 2370 - protein, 412 aa, unidentified
MLKATKVRIYPTPEQAEFLNRQFGSTRFVYNKALHIISSQYKRHGLKLKAKKDLKPLLAVAKKSRKYHWLKDFDSIALQQACINLDKAFQNFFDPKLPARYPKFKRKHGKQSSYHCMSVSAGENWIKVPKMKPIKARVHRELDGKLKSITLSRTVTGKYYASLLVEDGLETPAPLHTVDTVLGVDMGLTHLAIDSEGNKTANPRFLKRAQSNLRRKQKALSRCQKGSKGRAQACLKLAKAHEHLANARADFQHNLSRQLIDENQAVVVETLKVKKLLKNRKLAKHIADASWFSLIQKLEYKAKEQGKHLVKIDQWFASSKTCSCCGHKVDTLPLSVRNWSCPACTVELDRDVNAAINIHQQGVIKLRAEGLSVPANGACVNPATRRLLPEKLEASPVRAGSSHPQILFSTEH

SEQ ID NO: 2371 - protein, 382 aa, unidentified
MRRFAGACRFVFNRALALQNENYEAGNKYIPYTKMASWLVEWKKDTETEWLKDSPSQPLQQSLKDLERAYKNFFQKRAAFPRFKKRGQNDAFRYPQGVKLDQENSRIFLPKLGWMRYRNSRQVTGVVKNVTVSQSCGKWYISIQTESEVSTPVHPSASMVGLDAGVAKLATLSDGTVFEPVNSFQKNQKTLARLQRQLSRKVRFSNNWQKQKRKIQQLHSRIANIRRDYLHKVTTIISKNHAMIVIEDLKVKHMSKSAAGTVSQPGRNVRAKSGLNRSILDQGWYEMRRQLEYKQLWRGGQVLAVPPAYTSQRCACCGHTAKENRLSQSKFRCQVCGYTANADVNGARNILAAGHAVLACGEMVQSGRPLKQEPTEMIQATA

SEQ ID NO: 2372 - protein, 410 aa, unidentified
MHKAFKFRIYPTKEQEILINKTFGCCRFVFNHFLEKWNEAYEQTGKGLTYHTCANQLTQLKKEWEWLNEADSTVLQNALKHLDDSFQRFFKKQNDSPRFKSKKNPVQSYTSQCNYPKKGKPTVEVVGNQIKLPKLGWVTFAKSREVEGKILSATIRRNPTGKYFVSIVCETEIEPLPTSKKAVGVDLGLKDFAILSTGKKINTPKYFRKYEKKLVRWQRILSRRQKGGSNWNKARLKVARIHEKIVNARRDFLHKLSTKLIDENQVICLEDLQVKNMVKNHNLAKSIADASWSEFVIMLEYKAKWYGRTIVKVGKQFPSSQRCSDCGYQNKEVKSLKLRVWTCPNCGAQGRKRSYKHLTRRDKTIHRWAGGWSLVHFSSVEGITQESPAFRHGEWSNYMYHIGIEEGLLF

SEQ ID NO: 2373 - protein, 390 aa, unidentified
MLKHKAYKFRIYPTKEQEILIAKTIGCSRFVFNHFLAKWDERYKTTGKGLSYGSCSKELPLLKQEFDWLKEVDSTSVQISVKHLADAFDRFFNKQNKRPRFKSKRNPVQSYKTNIQGKNQLPAVSIVGNKLKLPKLKWVRFAHSKQITGRILNATIRRNASGKYFVSLLVEQEINELPKTGSSVGVDVGLKNFATLSDGTIYKNDRYFRSLEKKLAREQRKLSRRQRIALNRKVKLSESKNYQKQKRKVARIHEKIANKRTDFLHKVSIEIVQNHDVIGIETLQVKNMQKNRKWSKSISDVSWSEFFRMLEYKAGWYGKTVVKVGKTFASSQLCSSCGHQHKDVKHLGLREWTCPSCGIHHDRDVNAGLNLKQEAERLLASSTVGTTGLA

SEQ ID NO: 2374 - protein, 390 aa, unidentified
MLKHKAYRFRIYPTKEQEILIAKTIGCSRFVFNHFLAKWEEMYKTTGKGLSYGSCSKEIPLLKQEFDWLKEVDSTSVQTSVKHLADAFDRFFKKQNERPRFKSKRHPVQSYKTNIQGKNQLPEVSIVCNHLKLPKLKWVRFAYSKQITGRILNATIRRNASGKYFVSLLVEQEIHELPKTGSSVGVDVGLKNFAILSDGTIYQNDRYFRSLEKKLACEQRKLSRRQRIALTKKVKLSEARNYQKQKRKVARIHEKIANKRTDFLHKVSTEIVQNHDVIGIETLQVKNMQKNRKWSKAISDVSWSEFFRMLEYKADWYGKTIVKVGKTFASSQLCSSCGHQHKDVKHLSLREWTCPSCGIHHDRDVNAGLNLKREAERILASSTVGTTGLA

SEQ ID NO: 2375 - protein, 390 aa, unidentified
MLKHKAYKFRIYPTKEQEILIAKTIGCSRFIFNHFLAKWDETYKTTGKGLSYGSCSKEIPLLKRQFDWLKEVDSTSVQISVKHLADAFDRFFKKQNERPRFKSKRHPVQSYKTNIQGKNQLPEVSIGCNKLKLPKLKWVRFAHSKQVTGRILNATIRRNASGKYFVSLLVEQEINELPKTGSSVGVDVGLKNFAILSDGTVYKNDRYFRLLEKKLVREQRKLSRRQRIALNKKVKLSEARNYQKQKRKVARIHEKIANKRTDFLHKVSTEIVKNHDVIGIETLQVKNMQKNRKLSKAISDVSWSEFFRMLEYKAEWYGKTLVKVGKTFASSQLCSSCGHQHKDVKHLGLREWTCPSCGIHHDRDVNAGLNLKQEAERILASSTVGTTGLA

SEQ ID NO: 2376 - protein, 390 aa, unidentified
MLKHKAYKFRIYPTKEQEILIAKTIGCSRFIFNHFLAKWDETYKTTGKGLSYGSCSKEIPLLKQEFDWLKEVDSTSVQISVKHLADAFDRFFKKQNEHPRFKSKRHPVQSYKTNIQGKNQLPEVSIGCNQLKLPKLKWVRFAHSKQVTGRILNATIRRNASGKYFVSLLVEQEINELPKTGSSVGVDVGLKNFAILSDCTVYKNDRYFRLLEKKLVREQRKLSRRQRIALNKKVKLSEARNYQKQKRKVARIHEKIANKRTDFLHKVSTEIVKNHDVIGIETLQVKNMQKNRKLSKAISDVSWSEFFRMLEYKAEWYGKTVVKVGKTFASSQLCSSCGHQHKDVKHLGLREWTCPSCGIHHDRDVNAGLNLKQEAERILASSTVGTTGLA

SEQ ID NO: 2377 - protein, 390 aa, unidentified
MLKHKAYKFRIYPTKEQEILIAKTIGCSRFIFNHFLAKWDEMYKTTGRGLSYGSCSKEIPVLKQEFDWLKEVDSTSVQISVKHLADAFDRFFKKQNERPRFKSKRNPVQSYKTNIQGKNQLPEVSIGCNKLKLPKLKWVRFAHSKHITGRILNATIRRNASGKYFVSLLVEQEIKELPKTGSSVGVDVGLKNFAILSDGTVYKNDRYFRSLEKKLAREQRKLSRRQRIALNKKITLSEARNYQKQKRKVARIHEKIANKRTDFLHKVSTEIVQNHDVIGIETLQVKNMQKNRKLSKAISDVSWSEFFRMLEYKAEWYGKTVVKVGKTFASSQLCSSCGHQHKDVKHLGLREWTCPSCGIHHDRDVNAGLNLKQEAERILASSTVGTTGLA

SEQ ID NO: 2378 - protein, 390 aa, unidentified
MLKHKAYKFRIYPTKEQEILIAKTIGCSRFIFNHFLAKWDETYKTTGKGLSYGSCSKEIPLLKQEFDWLKEVDSTSVQISVKHLADAFDRFFKKQNERPRFKSKRNPVQSYKTNIQGKNQLPEVSIECNQLKLPKLKWVRFAHSKQVTGRILNATIRRNASGKYFVSLLVEQEINEPPKTGSSVGVDVGLKHFAILSDGTMYKNDRYFRTLEKKLAREQRKLSRRQRIALNKKVKLSESKNYQKQKRKVARIHEKIANKRTDFLHKVSTEIVKNHDVIGIETLQVKNMQKNRKLSKAISDVSWSEFFRMLEYKADWYGKTVVKVGKTFASSQLCSSCGHQHKDVKHLGLREWTCPSCGIHHDRDVNAGLNLKQEAERILASSTVGTTGLA

SEQ ID NO: 2379 - protein, 390 aa, unidentified
MLKHKAYKFRIYPTKEQEILIAKTIGCSRFIFNHFLAKWDETYKTTGKGLSYGSCSKEIPLLKQEFDWLKEVDSTSVQISVKHLADAFDRFFKKQNERPRFKSKRHPVQSYKTNIQGKSQLPEVSIIGNKLKVPKLKWVRFAHSKQVTGRILNATIRRNASGKYFVSLLVEQEINELPKTGSSVGVDVGLKNFAILSDGTVYKNDRYFRSLEKKLAREQRKLSRRQRIALNKKVKLSEARNYQKQKRKVARIYEKIANKRTDFLHKVSTEIVQNHDVIGIETLEVKNMQKNRKLSKSISDVSWSEFFRMLEYKAEWYGKTVVKVGKTFASSQLCSSCGHQHKDVKHLGLREWTCPSCGIHHDRDVNAGLNLKREAKRILASSTVGTTGLA

SEQ ID NO: 2380 - protein, 390 aa, unidentified
MLKHKAYKFRIYPTKEQEILIAKTIGCSRFIFNHFLAKWDEMYKTTGKGLSYGSCSKEIPLLKQEFDWLKEVDSTSVQISVKHLADAFDRFFKKQNERPRFKSKRHPVQSYKTNIQGKSQLPEVSIGCNKLKLPKLKWVRFAHSKHITGRILNATIRRNASGKYFVSLLVEQEIDELPKTGSSVGVDVGLKNFAILSDGTVYKNDRYFRSLEKKLAREQRKLSRRQRIALNKKVTLSEARNYQKQKRKVACIHEKIANKRNDFLHKVSTEIVQNHDVIGIETLQVKNMQKNRKLSKSISEVSWSEFFRMLEYKAEWYGKTIVKVGNTFASSQLCSSCGHQNKDVKHLSLREWTCPSCGIHHDRDVNAGLNLKQEAERILASSTVGTTGLA

SEQ ID NO: 2381 - protein, 390 aa, unidentified
MLKHKSYKFRIYPTKEQEILIAKTIGCSRFIFNHFLAKWDEMYKTTGKGLSYGSCSKEIPLLKQEFDWLKEVDSTSVQISVKHLADAFDRFFKKQNQRPRFKSKRHPVQSYKTNIQGKNQLPEVSIGCNQLKLPKLKWVRFAHSKQVTGRILNATIRRNASGKYFVSLLVEQEIHELPKIGSSVGVDVGLKNFAILSDGTIYKNDRYFRSLEKKLEREQRKLSRRQRIALNKKVKLSEARNYQKQKRKVARIHEKIANKRTDFLHKVSTEIVKNHDVIGIETLQVKNMQKNRKLSKVISDVSWSEFFRMLEYKADWYGKIVVKVGKTFASSQLCSNCGHQHKDVKHLSLREWTCPSCGTHHDRDVNAGLNLKQEAKRILASSTVGTTGLA

SEQ ID NO: 2382 - protein, 390 aa, unidentified
MLKHKAYKFRIYPTKEQEILIAKTIGCSRFIFNHFLAKWDEMYKTTGRGLSYGSCSKEIPVLKQEFDWLKEVDSTSVQISVKHLADAFDRFFKKQNEYPRFKSKRNPVQSYKTNIQGKNQLPEVSIGCNQLKLPKLKWVRFAHSKQITGRILNATIRRNASGKYFVSLLVEQEINERPKTGSSVGVDVGLKNFAILSDGTVYKNDRYFRKLEKKLAREQRKLSRRQRIALNKKVTLSEARNYQKQKRKVARIHEKIANKRTDFLHKVSTEIVQNHDVIGIETLQVKNMQKNRKLSKAISDVSWSEFFRMLEYKANWYGKTVVKVGKTFASSQLCSSCGHQHKDVKHLGLREWTCPSCGIHHDRDVNAGLNLKQEAERILASSTVGTTGLA

SEQ ID NO: 2383 - protein, 390 aa, unidentified
MLKHKAYKFRIYPTKEQEILIAKTIGCSRFIFNHFLAKWEEMYKTTGKGLSYGSCSKEIPLLKQEFDWLQEVDSTSVQISIKHLADAFDRFFKKQNERPRFKSKRNPVQSYNTNIQGKSQLPEVSIVCNQLKLPKLKWVRFAHSKQVEGRILNATIRRNASGKYFVSLLVEQEINELPKTGSSVGVDVGLKNFAILSDGTVYKNDRYFRTLEKKLAREQRKLSRRQHIALNKKVKLSEARNYQKQKRKVARIHEKIANKRTDFLHKVSTEIVQNHDVIGIETLQVKNMKKNRKLSKAISDVSWSEFFRMLEYKAEWYGKIVVKVGKTFASSQLCSSCGHQHKDVKHLGLREWTCPNCGIHHDRDVNAGLNLKQEAERILASSTVGTTGLA

SEQ ID NO: 2384 - protein, 402 aa, unidentified
MIRLLKAFKTEIAPTKEQKIKIIRSIGVARFLYNQYIAYNCRLYKMFQRGQLDEKQKHFVTANDFDKHVNRNLKKDLPWIDQCGSKARKKALVNAEQAFRRFFDGVSGFPNFKKKANQDVKLYFPKNNKGDWTIWRHKLMIPTLKQVRLKEFGYLPTGTKVTNGTVSYVAGRFYVSVVVDVDEKSKYNKDLEASYHTVTNGVGIDLGVKDLAIVSNGKVFKNINKSSKVKRLEKRLRREQRCLSRKYEFRRKKGGKTATASANIEKQKLKVQKLHHRIDKIREDYENKTIHEIVKQKPRFITVEDLNVKGMMKNKHLAKDVAAQRFNRLLTKLKRKAEIIGIEFRMVDRFYPSSKTCHVCGYIHKGLKLKDRVYVCPECGYTEDRDFNASLNLRDAKEYRVA

SEQ ID NO: 2385 - protein, 377 aa, unidentified
MEIKRAYRFRFYPTPEQKMVLARTFGCARFAYNHMLQFRTDAWYQRQERIGYHETSAALTALKKTPEYAWLNEVSSVPVQQALRHLQTAFANFFAKRAKYPNFRCKDGMQSAEYTTSAFKWDGKALTLAKMREPLAIRWSRTIPKGCKVTTCIVSKDAAGRYHVSMLCKDVVCPKSEVDAKVGVDLGLTHFAILSTGEKIGAPNAFRKSEKKLAKLQRRLAKKQKGSANRNKAKLKVARMHAKIVDARRDFLHKLSTRLINENQVIVIESLAVKNMQKNSRLAKSISDASWSEFLRQLKYKAQWYGRTLVRIDRWYPSSKLCSDCGHTAAKMPLSVRSWTCPECGSIHDRDINAARNVLAAGLAVSAHGESVNPMSL

SEQ ID NO: 2386 - protein, 373 aa, unidentified
MLVNKAYKFRIYPNKEQSTLINKTIGCSRFVFNRFLTLWNDAYKATGEGLTYNSCSKQLTALKKEVPWLKEVDSIALQSSLKNLDDAFKRFFKKQNDAPRFKSKRNKVQSYTTKHTNGNIAVEGNYIKLPKLGLVHFAKSREVEGRILSATVRRNPSGKYFVSLLAEVEVQPKQKMGSSVGIDLGIKDFAILSTGEVFSNPKWFRTLEAKLTKAQRVLSRRTKGSANWNKQRIKVARIHERIVNARTDYLQKISTYVVENHDLIGIEDLQVSNMLKNGKLAKAISEVSWSQFRTMLAYKAKWYGKQIVAVSKTFASSQLCSRCGYKHKDVKNLNLRKWTCPSCETHHDRDLNAGQNLRNEAIRLSTVGATGVA

SEQ ID NO: 2387 - protein, 493 aa, unidentified
MKVIGRIYIYDNRLKNIAPFTIQLAHFRNMLIILILKLKEHLSYYPTNEALLYSLLADRLNKRTLNNLEKLQKLNEISNIIKSDNFLSKLLNSMKKLKKELNNNYAIQSIIRQVCRDFKAYRKAYEEYLANSNKFSGKPKPPKAKKLKNIDKFTVELNKMSFKINNKILHVKLHKNKQIRIKLPEFIKEPSSVRITYYLGFAYVDIVYDKHIEELKPLGKYKAGIDLGVENFATVVSTNDNVPSIVVKSSYLKSFNQWWNKLSAKLRSQIDTIKNLLKENPDDKNILLELKILTKRIKKLHLHRKKWMENIVHQVSKAISVFLHQTEHDKVFIGRNILEAKNGSNLSKRVNQNFVQIPFRLFIDKLAYKLKWLGIKLVEVDESYTSKASCISDDIIEIQRRVGNNEKVSMSGDRICRGLYFDKIVNLIFHADVNGAFNILKVGLKKKRLFKKVDKIVKVKLCRPKAVRLFEFCRAVLGNLCPPNWAVEVGLSR

SEQ ID NO: 2388 - protein, 372 aa, unidentified
MIAVKKAYKFRMYPNKKQQELINKTFGCCRFVYNKYLAKRIDVYKNDKETFTYKQCSSDLTNLKKELKWLKEPDKFSLQNALKDLDNAYKKFFKEKAGFPKFKSKKINRFSYKTNFTNGNIMYFSQHIKLPKLGMVKIRDKQVPKGRILNATISKEPSGRYYVSLCCTDVDIEVFENTNNHIGLDLGIKEFCISSCGEFIENPKYLKKSLNKLAKLQRELSRKTIGSLNRNKARLKVARLQEHIANQRNDFLQKLSTKLIKENDIICIEDLQVKNMIRNRKLSRLISDVSWSEFIRQLEYKANWHGRQIVKVGKFFASSQICNKCGYKNEEVKDLNIREWICPSCNEIHDRDINASINILKEGLRLITIQNK

SEQ ID NO: 2389 - protein, 379 aa, unidentified
MIVHKAYKFRIYPTKEQEILIAKTFGCARFVFNHFLAEWERAYRTTGKGLTYKVCSSQLTNLKKQFVWLKEVDSIALQTSLKHLSDAYTRFFQKQNNKPRFKSKKNKVQSYTTKYTNGNIAVVGNRIKLPKLGLVRVAKSREVEGRILSATIRRNASGKYFVSILAEVDVQPLPKTNRAIGIDLGVKHFAILSDGTTYANPKFLRKLEEKLAKAQRILSRRQIGSSNWHKQRIKVARLHEKMTNSRNDYLHKLSTEIVKNHDIIGIEDLQVSNMMKNHNLAKAIADVSWSTFTDMLMYKATWYGKQVVVVAKNFPSSQLCSRCGYKNKDVKHLHLREWECPSCGTHHDRDVNASMNLKNEAIRLLTAGTAGLACSFSLR

SEQ ID NO: 2390 - protein, 390 aa, unidentified
MLVNKAYKFRIYPNKEQEILIAKTFGCSRFVFNHFLAKWNETYQETGKGLTYNACSSQLTQLKKEFTWLKEVDSIALQSSLKHLDDAYDRFFKKQNDKPRFKSKKNPVQSYTTKYTNGNIAVLDKHIKLPKLGLVRFAKSREVEGRILSATIRRNPNGKYFVSILVETDVQALPKTGSAVGIDVGLKEFAILSDGTKYANPKWLHKLEEQLAKAQRILSRRKKGGSNWNKQRIKVARLHEKMTNARHDYLHKISTEIVKNHDIIGMEDLSVSHMLKNHNLAKAIQEVSWSTFKAMIEYKARWYGKQVVTVAKNFPSSQLCSCCGYQNKDVKHLALREWECPVCHTHHDRDVNASINIKNEAIRLLNRRNCGDRLLNNRRDFGVRRNPLWL

SEQ ID NO: 2391 - protein, 364 aa, unidentified
MHKAFKFRLYPTKEQIVLLNKTIGCTRYVYNHFLDARIKLFEAERKTLNFNSCCLELTQLKKQIEWLQEVDSMALQQTLKDLDKAYQKFFKEKKGFPNFKCKKNPKQSYRTNANKSSIEVSDSKIKLPKLGWVSFAKSREVDGKVISATIRRSPSGTYFISILCEVEIQPLPRVDQAVGIDLGIKEFAITSDGEHFRNPKHYRKHERKLKRLQRKLSKKQKGSLNRDKARKKVAKAHETIRNCRQDFLHKLTTKLIRENQTVCLEDLQVKNMIQNHNLAKSIADVSWSEFRSMLEYKAGWYGRELSIIGKTFPSSQLCSACGYRNKDVKNLNLREWICPICGLYHDRDENAAKNILREGLRLAG

SEQ ID NO: 2392 - protein, 373 aa, unidentified
MHKAFKFRIYPTKEQAELINKTFGCSRFVFNYFLAKWNETYEQTGKGLSYNVCAKQLTQLKKELSWLKEVDATALQNSLKHLDNAFKRFFEKQNNKPKFKSKRNPVQSYTSQCNYSSSRPSIEVIDNKIKLPKLGWVKFAKSREVEGKILSVTIRRNPTGKYFVSILCETEINSLPASEKAIGIDLGLKDFVILSTGEKISAPKYFRKYEKQLVKWQRILSRRKYGGSNWNKARLKVAKIHEKIVNARRDFLHKLSTKLIHENQVICLEDLQVENMMKNHHLSKSITDASWSEFVSMLEYKANWYGRTVVKIGKTFPSSQLCSECGYRNKEVKKLNLREWICPDCKTYHDRDVNAAVNILREGMRLFTVGQTG

SEQ ID NO: 2393 - protein, 400 aa, unidentified
MAVHRKVYRFRMEPTQAQSDALLRMAGARRFVWNWGLARRKEAYAATGKGLTYNQQAAELTTLKQQPETVWLKEADSQLLQQALKDLDRAYAAFFGKRARFPRFKSKKRDEPRFRIPQRVRVESSKVYIPKIGWVKIRQSQPVDCPIKGATFKRDAEGHWYVTLTAEFEMPEVPLPPANPERVVGIDLGLKDFAVLSDGTRIAPPKFYRKGLSKLRRAQRELSRKQKGGKNRDKARHRLSKVHARVRNQRQDWLHKLTTGLVQKYDGLCIEDLNLKGMARTKLSTSVLDAALGEFRRQLEYKTVWHRKHLAVIDRYFPSSKLCRECGTIHTALTLSDRVWTCGCGAVHDRDLNAARNIRAEGIHRIPVAVGHTETQNAWGAAVRPTHGGQAATNQESHAL

SEQ ID NO: 2394 - protein, 399 aa, unidentified
MLKAFKTELRLTERQKDKVRRSLGICRFLANQYIARNIWLYRLYQRGVLDEKQRRFVTANDFDKYVNHILKKKFPWIDQCGSKARKKVLVNAEQAFRRFFKGQAHFPRFKRKNQQNVKLYFPKNNKGDWTIWRHKIQIPTIGKVRLKEFGYLPQSVTIKNGHVSYEAGRYYVSVTAEIEETSRYNNDLEASYRPQSDGIGVDLGVKSLAIVSDGRIFENINTSSRARRLEKRLRREQRRLSRKYEMRKKKGGSTATASANIEKKRLSVQRLHQRLANLRRNHENRVIHALVEQKPRFITVEDLNVTGMMKNRHLSKVVAQQRFYSLREKLRRKAEVIGIEFRIADRFYPSSKTCHACGQVHSGLKLKDRVYVCPSCGYTEDRDLNAALNLRDTKNYRIT

SEQ ID NO: 2395 - protein, 418 aa, unidentified
MMKRVEHHRLKPSSPFYAMLREFCHRSKNLYNHGNFLIRQAFIKDSKWLRYGEVDRLLKGDADYPDYREMPTAQTAQQTLRILDKNWTSFFAALKDWKAHPEKYKGRPKLPKYKPKDGYFPLVLTNQNCKLKDGIIRFPKTFQGFTVKAIFVSQPDAVFKQARIIPHGGEIDLELVYEIPEVEEKENNGRYAAIDIGVDNLAALAWNTGERPVLLKGTPLKSVNQYYNKQMAKRRSICERMNGVHSSKRIARLTAKRNRKVEDYLHKASRKVIDLCAGQDVSVLVIGKNKGWKQEANLGRKVNQSFVQLPFARFIQMLQYKAESIGMKVVLTEESYTSGTSFLDDEAPIKACYDKSRRVHRGLFLANDGQRINADVNGAYQIMRKVFPNVNADGIEGVALRPAVVTLSMSARRGSGCA

SEQ ID NO: 2396 - protein, 418 aa, unidentified
MMKRVEHHRLKPSSPFYAMLREFCHRSKNLYNHGNFLIRQAFLEDSKWLRYGEVDRLLKADVKYPDYREMPTAQTAQQTLRILDKNWASFFAAIKDWKAHPEKYKGRPKLPKYKPKDGYFPLVLTNQNCKLKDGVIRFPRVFQGFTVKTIFSSQPDAVFKQARIIPHGGEIDLELVYEIPEVDEKADNGKYAAIDIGIDNLVALAWNTGKRPVLFKGTPLKSVNQYYNKQMAKRRSICERMNGCHSSKRIARLTAKRNRKVEDYLHKASRKVIDLCTEQDVSVLVIGKNKGWKQEANLGHRVNQSFVQLPFARFIQMLQYKAESIGMKVVLTEENYTSGTSFLDGEAPIKACYDKSRRVHRGLFLANDGQRINADVNGAYQIMRKVFPNVNADGIEGVALRPAVVTLSMSARRSSGCA

SEQ ID NO: 2397 - protein, 634 aa, unidentified
MKTVEFKLKLNKIQRATIDSWLESLRWVWNEGLGLLLEFHHQKYYNWLEKKLVGVSANSFRADDRSVISRDREFRKCYLKFSKTNAYAASCPISVGKTPHPVCPLPVPQPRLKYDNFKGLIGYITKTNYADCPHLKGIPAKFIAGTLKHLAEAWQAYKDKKRTIAHQPKFKSKLRGDRLKSLYCIQPENITLHINHNTFACPGVSVLGKLKVLNKNLEKRWQEEIKPRTLQIVKTASEYYLQLSGNLPEETEKPSQKACGLDVGLQYIYSDDLGKQVKPPRYYRASQKRLRKFQRKLTRQQKDSKNSIKTKQAIAKLHEKTKRQRRAYNHKLSSYLVKTFGTKRQRRAYNHKLSSYLVKTFGTKRQRRAYNHKLSSYLVKTFGAIAVEDIKIANLNRRPKPKKCEDGKGWEKNNAKAKSGLNKSFADAGLGQLLTMIETKAKAHQREFIKVKANFTSQDCPKCGTRQKKSLSQRTHRCSNIGCNYVAPRDVAAAICIRAKADFLGNYLPLGGNVKPLKEVHSTSVQEESTIVELGRDALTIPSHEEKTNRKNRRKTQQCAKREVRKNNLYFNAFQTLTIPGLATNFLAEDNRAPDNSGSLGLKAKPKKKRQKNNSVAQTAPEIQLVLNFQAATG

SEQ ID NO: 2398 - protein, 403 aa, unidentified
MQKAFKVTLIPSRNQEILINRTIGCARFVYNRFLARRKELYESEQKTLNYSGCSRELTQLKKEIEWLTEVDKFALQNSLRNLETAYKNFFADLKKPKQKRRSGFPKFKKKHGFKQSYKTNFTNGNIQLHDNYLKLPKLGWVRFHQSQEITGTLVNVTITRTTTGKYVASILCETEVEKYPHVDKSIGLDLGIKSYLVTSNSVEIENPKHYRRALKNIRKANKKLSRSVKGSNNRAKAKTKLAQVHERVANLRDDFLHKLSTRLIRDNSIICIEDLRVANMVKNHKLALSIADASWSKFVAMLEYKASWHDRIVQKVSPFFPSSQTCSCCDFVNPEVKDLSVREWNCLACNTHHLRDCTAAVNILREGLRLLTAAAGSTEALNACRDEVRLGDSQALVSEARIA

SEQ ID NO: 2399 - protein, 400 aa, unidentified
MAVHRKVYRFRMEPTQTQAEALLRMAGARRFVWNWGLARRKEAYAATGKGLTYNQQATELTALKKQPEMAWLREADSQLLQQALKDLDRAFRAFFSKRASFPRFKSKKRDEPRFRIPQRVKVEDSKVYVPKVGWVRLRQSQPVDCPIKGATFKRDGAGHWYVSLTAEFEMPDVPLPSANPERVVGIDLGLKDFAVLSDGTRIAPPRFYRKGLAKLRRAQRALSRKQKGSRNREKARKRLSKLHARVRHQRQDWLHKLTTGLVTRYDGLCIEDLNLKGMAKTKLSLSVLDAALGEFRRQLTYKAVWYGKHLVVIDRFFPSSKLCREGGAINQNLALSERVWTCECGAVHDRDLNAAQNIRAEGMRHIPVAVGHTETLNAWEEGVRPAHGGQSSLNQESHRL

SEQ ID NO: 2400 - protein, 373 aa, unidentified
MIVNKAYKFRLYPNKEQQILINKTFGCSRFVFNHFLAKWDNAYKETGKGLTYNSCSAQLTQLKKELTWLKEVDSIAIQSSLKNLADAYSRFFKKQNDRPRFKSKKNKVQSYTTKYTNGNIAINDNKIKLPKLGWIRFAKSREVEGRILNVTIRRNPSGKYFVSILVETEVQELSKTNSAIGIDVGLKDFAILSNGTTYANPKFFRKLEEKLAKAQRILSRRTKGSSNWNKQRIKVARIHEKITNARNDYLHKISTEIIKNHDIIGIEDLQVSNMLRNHNLAKAISEVSWSQFRTMLEYKAKWYGKQVVTVAKNFPSSQLCSCCGYQNKDVKNPGLREWECPKCHTHHDRDINASLNLKNEAIRLLTVGTTGIA

SEQ ID NO: 2401 - protein, 373 aa, unidentified
MRHKAYKFRIYPNKTQESLIAKTIGCARFVFNHFLSEWSSAYKETGKGLSYSTCSKQLPKLKREFLWLKEVDSTAIQTSVKHLSDAYERFFKKQNQAPRFKSKKNKVQSYTTKCTNGNIAIQDRKIKLPKLGLVRFAKSREVKGRILSATVRRNPTGKYSVSILVKTDIQELPKSNTYVGIDLGLKDFAALSNGTTYQNPRYLRKTEKKLAKAQRILSRREKGSSNWHKQRIKVARLHEKIANSRKDYLQKISTEIIKNHDVIGVENLQISNMLKNRKRSKSISDVSWSMFTSMLEYKAKWYGKQLVTVSKVFASSQLCSKCGYQNREVKNLAVRTWDCPDCGCHHDRDLNASFNILKEIQRILTTVGATGLA

SEQ ID NO: 2402 - protein, 373 aa, unidentified
MKHKAYNFRIYPNKTQESLIAKTIGCARFVFNHFLSEWSSAYKETGKGLSYSTCSKQLPKLKREFLWLKEVDSTAIQTSVKHLSDAYERFFKKQNQAPRFKSKKNRVQSYTTKCTNGNIAIQDRKIKLPKLGLVRFAKSREVKGRILSATVRRNPTGKYSVSILVKTDIQELPKSNTYVGIDLGLKDFAALSNGTTYQNPRYLRKTEKKLAKAQRILSRREKGSSNWHKQRIKVARLHEKIANSRKDYLHKISTEIIKNHDVIGVENLQISNMLKNRKRSKSISDVSWSMFTSMLEYKAKWYGKQLVTVSKVFASSQLCSKCGYQNSEVKNLAVRTWDCPDCGCHHDRDLNASFNILKEIQRILTTVGATGLA

SEQ ID NO: 2403 - protein, 373 aa, unidentified
MKHKAYNFRIYPNKTQESLIAKTIGCARFVFNHFLSEWSSAYKETGKGLSYSTCSKQLPKLKREFLWLKEVDSTAIQTSVKHLSDAYERFFKKQNQAPRFKSKKNRVQSYTTKCTNGNIAIQDRKIKLPKLGLVRFAKSREVKGRILSATVRRNPTGKYSVSILVKTDIQELPKSNTYVGIDLGLKDFASLSNGTTYQNPRYLRKTEKKLAKAQRILSRREKGSSNWHKQRIKVARLHEKIANSRKDYLHKISTEIIKNHDVIGVENLQISNMLKNRKRSKSISDVSWSMFTSMLEYKAKWYGKQLVTVSKVFASSQLCSKCGYQNREVKNLAVRTWDCPDCGCHHDRELNASFNILKEIQRILTTVGATGLA

SEQ ID NO: 2404 - protein, 372 aa, unidentified
MIVVEKAYKFRMYPNKKQQELINKTFGCCRFVYNKYLAKRIEVYKNDKETFTYKQCSSDLTNLKKELKWLKEPDKFSLQNALKDLDNAYKKFFKEKAGFPKFKSKKINRFSYKTNFTNGNIMYFSQHIKLPKLGMVKIRDKQVPKGRILNATISKEPSGRYYVSLCCTDVDIESFENTNNHIGLDLGIKEFCISSCGEFIENPKYLKKSLNKLAKLQRELSRKTIGSLNRNKARLKVARLQEHIANQRNDFLQKLSTKLIKENDIICIEDLQVKNMIRNRKLSRLISDVSWSEFIRQLKYKANWHGRQIVKVGKFFASSQICNKCGYKNEEVKDLNIREWICPSCNETHDRDINASINILKEGLRLITIQNK

SEQ ID NO: 2405 - protein, 402 aa, unidentified
MKRLQAFKFQLRPGGQQERQMRLFAGACRFVFNRALALQNENYEAGNKYIPYTKMASWLVEWKKDTETEWLKDSPSQPLQQSLKDLERAYKNFFQKRAAFPRFKKRGQNDAFRYPQGVKLDQENSRIFLPKLGWVRYRNSRQVTGIVKNVTVSQSCGKWYISIQTESEVSTPVHPSASMVGLDAGVARLATLSDGTVFEPVNSFQKNQKKLARLQRQLSRKVRFSNNWQKQKRKIQQLHSRIANIRRDYLHKVTTIISKNHAMIVIEDLKVKHMSKSAAGTISQPGRNVRAKSGLNRSILDQGWYEMRRQLEYKQLWHGGQVLAVPPAYTSQRCACCGHTAKENRLSQSKFRCQVCGYTANADVNGARNILAAGHAVLACGXMVQSGRPLKQEPTEMIQATA

SEQ ID NO: 2406 - protein, 373 aa, unidentified
MLVNKAYKFRLYPNKEQAILIAKTIGCSRFVFNHFLAQWQETYKETGIGLTYHTCSSQLTQLKKEFVWLKEVDSIALQSSLKNLADSYVRFFKKQNNAPRFKSKKNKVQSYTTKHTNGNIAIAGNQIKLPKLGFVKFAKSREVEGRILNATIRRNSSGKYFVSILAETEVQPVEKTGSSVGVDVGLKDFAILSTGEVFSNPKWFRKMEEKLANAQRILSRRAKGSSNWHKQRIKVAKIHERMTNARTDYLQKISTEIIKNHDVIGIEDLQVSNMLKNHKLAKAISEVSWSQFRTMLEYKAKWYGKQVVAVSKTFASSQLCSCCGYQNKDVKNLNLRKWDCPSCGTHHDRDLNAGQNLKNEAIRLLTVGATGLA

SEQ ID NO: 2407 - protein, 410 aa, unidentified
MESFLLCRNRKPTHRNANTTVYPKSESEVKAMFVHKAYKFRIYPTREQEILIAKTFGCARFVFNHFLAEWERAYRTTGKGLTYKLCSSQLTSLKKQLVWLKEVDSIALQTSLKHLSDAYTRFFQKQNNKPRFKSKKNKVQSYTTKYTNGNIAVVGNRIKLPKLGLVRFAKSREVEGRILSATIRRNASGKYFVSILVETEVQPLPKTNRAVGIDLGIKDFAILSDGTTYANPKYLRKLEEKLAKAQRILSRRQIGSSNWHKQRIKVARLHEKMTNSRNDYLHKLSTEIVKNHDIIGIEDLQVSNMMKNHNLAKAIADVSWSTFTDMLMYKATWYGKQVVVVAKNFPSSQLCSHCGYKNKDVKHLHLREWECPSCGTHHDRDVNASINLKNEAIRLLTAGTAGLACSFSLR

SEQ ID NO: 2408 - protein, 379 aa, unidentified
MFVHKAYKFRIYPTKEQEILIAKTFGCARFVFNHFLAEWERAYRTTGKGLTYKACSSQLTNLKKQFVWLKEVDSIALQTSLKHLSDAYTRFFQKQNNKPRFKSKKNKVQSYTTKYTNGNIAIVGHRIKLPKLGFVRFAKSREVEGRILSATIRRNASGKYFVSIVVETEVQPLPKTNRAVGIDLGVKHFAILSDGTTYANPTYLRKLEKKLAKAQRILSRRQIGSSNWHKQRIKVARLHEKVTNSRNDYLHKLSTEIVKNHDIIGIEDLQVSNMMKNHNLAKAIADVSWSTFIDMLMYKATWYGKQVVVVAKNFPSSQLCSHCGYKNKDVKHLHLREWECPSCGTHHDRDVNASMNLKNEAIRLLTAGTAGLACSFSLR

SEQ ID NO: 2409 - protein, 379 aa, unidentified
MFVHKAYKFRIYPTREQEILIAKTFGCARFVFNHFLAEWERAYRTTGKGLTYKLCSSQLTSLKKQLVWLKEVDSIALQTSLKHLSDAYTRFFQKQNNKPRFKSKKNKVQSYTTKYTNGNIAVVGNRIKLPKLGLVRFAKSREVEGRILSATIRRNASGKYFVSILVETEVQPLPKTNRAVGIDLGIKDFAILSDGTTYANPKYLRKLEEKLAKAQRILSRRQIGSSNWHKQRIKVARLHEKMTNSRNDYLHKLSTEIVKNHDIIGIEDLQVSNMMKNHNLAKAIADVSWSTFTDMLMYKATWYGKQVVVVAKNFPSSQLCSHCGYKNKDVKHLHLREWECPSCGTHHDRDVNASINLKNEAIRLLTAGTAGLACSFSLR

SEQ ID NO: 2410 - protein, 399 aa, unidentified
MLKAFKTEIAPTLEQANRIIRSIGICRFLYNQYIAYNKKLYRMYQRGLLDSHQKHFVSANDFDKYVNHKLKQELSWISECGAKARKKALVNAEAAFKEFFKGQAGFPRFKKKSRQDVKLYFPRNNKGDWKIWRHKLMIPTLKQVKLKEYGYLPVGVAVISGTVSYQAGRFYVSVVADVEETSRYNNDWAASCHPQSEGIGIDLGIKNLAIVSNGQTFKNINKSSKVRRLEKRLRRMQRQLSRKYELKKKKGGAPAIASANIDKQKLKVQKLHQRIKQIREDHENKTIHEIVKQKPSFVTVEDLNIKGMMKNKHLAKSVAAERFYSFLSKLKCKAEIIGIELRVVDRFYPSSKTCHACGYIHKGLKLQDRMYVCPKCGYMIDRDLNASLNLRDAKEYQTA

SEQ ID NO: 2411 - protein, 372 aa, unidentified
MTEPVKKAFKVRIYPTPDQQAQINKTIGCARWVYNHFLAWHVEVYKAEKRYMSYTECSAMLTQIKATPNTGWLAEVDKFALQNSLKDLDESYKNFFEGRAGYPKFKSKRGPKQSYQTNLTNNNIRIDVKHHRIKLPKVGWVEYAADGREIGNIINVTVSRTPSGKYSASILCQVKIKPLNVATGEVGIDMGLKKFAILSSDEVVENPQYYVKAQEKLTKLQRTYSKKKKGSKNREKARIKVARQHEKVVNQRRDFQHKVSKKLVDENKVISMEDLRIKNMVKNRKVAKAISDAGWGEFRRMVEYKATWYGRTVVIIDTFYPSSKLCGKCGTKNAMLTLSVREWQCPVCGTIHDRDINAARNILAEGKRILAS

SEQ ID NO: 2412 - protein, 416 aa, unidentified
MAIKATRTYVGSIQNHQQVCDGLDSLGDSASKIWNVARWTADRIWDATGEIPNGNVLKSYMKNQSCWKDLNAQSSQKVIEELSDAFQSWFDLRHNSSKANPPGYRKHGDTRPKSTVTFKEDGFKHDPGNNRVRLSKGSNLKEHFSDFLLCEYQTRPDVDLSEVNRVQNVRAVWNGERWELHFVCKIDLETADSAGDGVAGIDLGITNIATVAFPDEYVLYPGNSLKEDKHYFTRVEYDTEGENGPSEQSMWARRKLSERETHFYHTLTDAIITECVERGVGTLAVSWPEDVRESNWGKTGNKKLHTWPFDSIYQYLAYKGEMRGVAVLKENEWNTSKTCSRCGDDTKSNRVERGLYVCSSCELVANADCNGAENMRQKITPSPHGEDRSNGCVAQPSTHLFDRESGTFHTREQVVS

SEQ ID NO: 2413 - protein, 416 aa, unidentified
MAIQATRTYVGSIENPQQVYDGLDSLGDSASKIWNVARWTADRIWDATGEIPNGSVLKSYLKNQPYWKDLNAQSSQKVIEELSDAFQSWFDLRQRFSGANPPGYRKHGDTRPRSTVTFKEDGFKHDPENNRVRLSKGSNLKEHFSDFLLCEYQTRPDVDLSAVNAVQNVRAVWNGDEWELHFVCKVELETADSAGDGVAGIDLGITNIATVAFPDEYVLYPGNSLKEDKHYFTRTEYDTEGESGPSEQSMWARRKLSDRETHYYHALTDAIITECVERGVGTLAVSWPEDVRESDWGKTGNKKLHSWAFNRLYQYLAYKGEMRGVEVLKENEWNSSKTCSSCGDDTKSNRVERGLYVCSSCELVANADCNGAENMRQKITPSPHGEDRSNGCVAQPSTHLFDRESGTFHTREQVVS

SEQ ID NO: 2414 - protein, 416 aa, unidentified
MAIKATRTYVGSIQNHQQVCDGLDSLGDSASKIWNVARWTADRIWDATGEIPNGSVLKSYMKNQSCWKDLNAQSSQKVIEELSDAFQSWFDLRHNSKEANPPGYRKHGDTRPKSTVTFKEDGFKHDPENNRVRLSKGSNLKEHFSDFLLCEYQTRPDVDLSEVNGVQNVRTVWNGDEWEIHFVCDVELESADTADDGVAGIDLGITNISTVAFPDEYVLYPGNSLKEDKHYFTRAEYDTEGENGPSEKSMWARQKLSERETHFYHTLTDAIITECVERGVGTLAVSWPEDVRASDWGKTGNKKLHTWAFDRIYQYLEYKGEMRGVEVLKENEWNTSKTCSRCGDDTKSNRVERGLYVCSSCELVANADCNGAENMRQKITPSPHGEDRSNGCVAQPSTYLFDRESGTFHTREKVVS

SEQ ID NO: 2415 - protein, 416 aa, unidentified
MAIKATRTYVGSIKNHQQVCDGLDSLGDSASKIWNVARWTADRIWDATGEIPDSGALKSYMKNQPCWKDLNAQSSQKVIEELSDAFQSWFDLRHKFDEANPPGYRKHGNTRPRSTVTFKEDGFKHDPENDRVRLSKGSNLKKHFSDFLLCEYQTRPDVDLSEVNSVQNVRAVWNGDEWELHFVCDVELESADTAGDGIAGIDLGITNIATVAFPDEYVLYPGNSLKEDKHYFTRAEYDTEGESGPSEQSMWARRKLSKRETHYYHTLTDAIIAECVERGVGTLAVSWPEDVRASDWGKTGNKKLHSWAFDRIYQYLEYKGEMRGVEVLKENEWNTSKTCSRCGDDTKSNRVERGLYVCSSCELVANADCNGAENMRQKITPSPHGEDRSNGCVAQPSTYLFDRESGTFHTREQVVS

SEQ ID NO: 2416 - protein, 416 aa, unidentified
MAIKVTRTYVGSIQNHQQVCGGLDSLGDSASKIWNVARWTADRIWDATGEIPDAGTLKSYMKNQPCWKDLNAQSSQKVIEELSGAFQTWFDLRHKSDEANPPGYRKHGDTRPRSTVTFKEDGFKHDPENNRVRLSKGKNLKNGRSDFLLCEYQTRPDVTLSEVNSVQNVRAVWTGGKWELHFVCKVELETADSAGDGVAGIDLGITNIATVAFPDEYVLYPGNSLKEDKHYFTRTEYDTEGKNGPSEQSMWARQKLADRETHFYHALTDAIITECVERGVGTLAVSWPEDVRESDWGKTGNKKLHSWAFNRLYQYLEYKGEERGVKVLKENEWDTSKTCSKCGDDTKSNRVERGLYVCSSCGLVGNADCNGAENMRQKITPSPHGENRSNGCVAQPSTYLFDRESGMFHTREQVVS

SEQ ID NO: 2417 - protein, 416 aa, unidentified
MAIEVTRTYVGSIQNHRQVCDGLDSLGDSASTIWNVARWTADRIWDETGKIPDGGVLKSYMKNQSCWKDLNAQSSQKVIEELSDAFHSWFDLRHKDDKANPPGYRKHGDRRPKSTVTFKEDGFKHDPENNRVRLSKGSNLKEYWSDFLLCEYQTRPDVDLSGVNSVQNVRTVWTGEEWELHFVCKVSLETNDSAGDGVAGIDLGIKNIATVAFPDEYVLYPGNSLKQDKHYFKRTEYGTEGEDGPSEKSKWARRKLAERETHFYHTLTDSIITECVERGVGTLAVSWPEDVRESDWGKTNNKKLHSWAFDRLYQYLEYKGEIRGVEVLKKNEWNTSKTCSACGDDTKSNRKHRGLYVCSSCELVANADCNGAENMRQKITPSPHGEDRSNGCVAQPSTYLFDRESGTFHSREQAVS

SEQ ID NO: 2418 - protein, 416 aa, unidentified
MAIKATRTYVGSIQNHQQVCDGLDSLGDSASKIWNIARWTADRIWDAIGEIPDSGALKSYMKNQPCWKDLNAQSSQKVIEELSDAFQSWFDLRHKFGEANPPGYRKRGDTRPRSTVTFKEDGFKHDPQNNRVRLSKGSNLKEHFSDFLLCEYQTRPDVDLSEVNSVQNVRAVWNGDEWELHFVCKVELETNDSAGDEVAGIDLGITNIATVAFPDEYVLYPGNSLKEDKHYFTRAEYDTEGENGPSEQSMWARRKLSERETHFYHTLTDAIITECVERGVGTLAVSWPEDVRASDWGKTGNKKLHSWAFDRIYQYLEYKGEMCGVEVLKENEWNTSKTCSRCGDDTKSNRVERGLYVCSSCELVANADCNGAENMRQKITPSPHGEDRSNGCVAQPSTHLFDRESGCFAPREQAMS

SEQ ID NO: 2419 - protein, 416 aa, unidentified
MAIKATRTYVGSIQNHYQVCDGLDSLGDSASKIWNVARWTADRVWDETGEIPDSGTLKSYMKNQPCWKDLNAQSSQKVIEELSDAFQSWFDLRHNSSEANPPGYRKRGDTRPRSTVTFKEDGFKHDPENDRVRLSKGSNLKEHFSDFLLCEYQTRPDVDLSEVNSVQNVRAVWNGDEWELHFVCKVELESADTAGDGVAGIDLGITNIATIAFPDEYVLYPGNSLKEDKHYFTRAEYGTEGENGPSEKSMWARQKLAERETHFYHVLTDTIITECVERGVGTLAVSWPEDVRESDWGKTGNKKLHSWAFDRIYQYLEYKGEMRGVEVLKENEWNTSKTCSRCGDETKSNRVERGLYVCSSCELVANADCNGAENMRQKITPSPHGEDRSNGCVAQPSTHLFDRESGTFHTREQVVS

SEQ ID NO: 2420 - protein, 340 aa, unidentified
MRNLLKAFKTELRLTERQKDKVRRSLGICRFLANQYIARNIWLYRLYQRGVLDEKQRRFVTANDFDKYVNHVLKKKLPWIDQCGSKARKKVLVNAEQAFRRFFKGQAHFPRFKRKNQQNVKLYFPKNNKGDWTIWRHKIQIPTIGKVRLKEFGYLPQGVTIKNGHVSYEAGRYYVSVTAEIDEMSRYNNDLEASYRPQSDGIGVDLGVKSLAIVSDGRIFENINMSSRARRLEKRLRREQRRLSRKYEMRKRKGGSTATASANIEKKKSSVQKLHQRLANLRRNHENQVIHALVEQKPRFITVEDLNVTGMIKNRHLSKAVSEQRFYSFHEKLRRKAEII

SEQ ID NO: 2421 - protein, 401 aa, unidentified
MRKINRTYKFRLYPNKAQTDLLARHFGCARFVYNYFLNQRKEQYRLTGKSDNYYAQAKTLTALKKQEATAWLKEVNSQTLQFAIRSLEVAYTNFFQKRTKFPNFKSKHSKNSFTVPQFASIADNRLFIPKFKEGIKCRVHREIKGKIGKITISKTPSGKYFVSVFTEEEYATPLEKTNKSVGVDMGLKDLLITSEGETFKNNRYTRKYEHKLARAQRNLSRKKKGSRGFENQKLKVARLHEKISNSRADYLHKCSISLVRRYDTICIEDLNVKGMERNHHLAKSITDASWSSFVTMLTYKADWNGKKVVKIDRYFPSSQTCNVCGYVNKQTKDLSVREWECPVCHTHHNRDVNAAINILRFGLNNISAGTVDYTDGEDVRANLLKGRSSVKSEAHESLAHG

SEQ ID NO: 2422 - protein, 401 aa, unidentified
MRKINRTYKFRLYPNKEQAELLARHFGCSRFVYNYFLNQRKEQYRLTGKSDNYYAQAKFLTEMKKQEATAWLKEVNSQTLQFAIRSLEVAYTNFLQKRAKFPSFKSKHSKNSFTVPQFASIAGNRIFIPKFKEGIKCCVHREIVGKIGKVTISKTPSGKYFVSVFTEEEYITPIEKSGKSVGVDLGLKNLLITSEGETFKNNRYTKKYERILAKAQQHLSRKKKGSRGFENQKLKVARLHEKISNSRADYLHKCSVSLVRRYDTICIEDLNVKGMERNHRLAKSVADASWGTFVSMLTYKAEWNGKKIVKIDRFFPSSQTCNVCGNINKQTKDLSVREWECPVCHTHHNRDVNAAINILRFGLNHTSAGTVDYTGGEEVRADLLESRSSVKPEAHKSLACG

SEQ ID NO: 2423 - protein, 401 aa, unidentified
MRKINRTYKFRLYPNKEQAELLARHFGCSRFVYNYFLNQRKEQYRLTGKSDNYYAQAKFLTEMKKQEATAWLKEVNSQTLQFAIRSLEVAYTNFLQKRAKFPSFKSKHSKNSFTVPQFASIAGNRIFIPKFKEGIKCCVHREIVGKIGKVTISKTPSGKYFVSVFTEEEYITPIEKSGKSVGVDLGLKNLLITSEGETFKNNRYTKKYERILAKAQQHLSRKKKGSRGFENQKLKVARLHEKISNSRADYLHKCSVSLVRRYDTICIEDLNVKGMERNHRLAKSVADASWGTFVSMLTYKAEWNGKKVVKIDRFFPSSQTCNVCGNINKQTKDLSVREWECPVCHTHHNRDVNAAINILRFGLNHTSAGTVDYTGGEEVRADLLESRSSVKPEAHKSLACG

SEQ ID NO: 2424 - protein, 370 aa, unidentified
MHRAYRFRLYPTQKQAKLINETIGCCRFVYNHFLAEWNQAYETTGRGLSYNECSKRLTALKQTLPWLKTPDSTALQNALQQLAEAFDRFFDGTSNAPRFKSKKHPNQSYTAQCNYPKNGRPTIEVDGHRLKLPKLGWVKFAKSREVQGRILSATIRRNRTGKYFVSILVETDIPPLPQTDKKVGVDLGLKQIVVLSTGETIEHPRYWRRYEEKLAYWQRVMSRRKPGGSNWEKARLKVAKLHEKIANCRNDFLHKLSTRLIRENQVVCVEDLRVRNMQKNRKLAKSISDSAWGRFLNMLEYKATWYGRTVVRVASTFPSSQLCSCCGHRQVEVKSLGIREWVCPTCGAEHDRDHNAARNILNEGLRLLSL

SEQ ID NO: 2425 - protein, 390 aa, unidentified
MKEHKAYKFRIYPTKEQKILIAKTIGCSRFVFNHFLARWDETYKATGKGLSYGSCSKEIPILKQEFDWLKEVDSTSVQASVKHLTDAYDRFFKKQNERPRFKSKRNPVQSYKTNIQGKSQLPEVSIIGNKLKLPKLKWVRFAYSKQIAGRILNATIRRNASGKYFVSLLVEQEIHELPKTGSSVGVDVGLKNFAILSDGTVYKNDRYFRSLEKKLAREQRKLSRRQRIALARKVKLSEARNYQKQKRKVARIHEKISNKRTDFLHKVSTEIVKNHDVIGIETLQVKNMQKNRKLSKSISEVSWSEFFRMLEYKADWYGKTVVKVGKTFASSQLCSSCGHQHKDVKHLALREWTCPSCGVHHDRDMNAGLNLKQEAERILASSTVGTTGLA

SEQ ID NO: 2426 - protein, 416 aa, unidentified
MAIKATRTYVGSIKNHQQVCDGLDSLGDSASKIWNVARWTADRIWDATGEIPNGSVLKSYMKNQPCWKDLNAQSSQKVIEELSDAFQSWFDLRHKDEKANPPGYRKHGDSRPRSTVTFKEDGFKHDPENNRVRLSKGSNLKDHFSDFLLCEYQTRPDVDLSEVNRVQNVRAVWNGDEWKLHFVCKIELETAESTGDGVAGIDLGITNIATVAFPDEYVLYPGNSLKEDKHYFTRAEYDTEGENGPSEQSRWARRKLSERETHYYHTLTDAIITECVERGVGTLAVSWPEDVRESDWGKTGNKKLHSWAFDRIYQYLEYKGEMRGVEVLKENEWNTSKTCSRCRDGTKSNRVERGLYVCSSCELVANADCNGAENIRQKITPSPHGEDRSNGCVAQPSTHLFDRESGTFHTREQVVS

SEQ ID NO: 2427 - protein, 418 aa, unidentified
MMKRVEHHRLKPSSPFYAMLREFCHRSKNLYNHGNFLIRQTFIDDGKWLRYGEVDRLLKADTEYPDYREMPTAQTAQQTLRILDKNWTSFFAAIKDWKAHPEKYKGRPKLPKYKPKDGYFPLVLTNQNCKLKDGVIRFPRVFQGFTVKAIFSSQPDAVFKQARIIPHGGEICIELVYEIPEVEEKENNGRYAAIDIGVDNLAALAWNTGERPVLLKGTPLKSVNQYYNKQMAKRRSICERMNGRHSSKRIARLTAKRNRKVEDYLHKASRKVIDLCTGQDVSVLVIGKNKGWKQEANLGRKVNQSFVQLPFARFIQMLQYKAESIGMKVVLTEESYTSGTSFLDDEAPVKACYDRSRRVHRGLFRTSDGRKINADVNGAYQIMRKVFPNVNADGIEGVALRPAVVTLSMSARRGSGCA

SEQ ID NO: 2428 - protein, 399 aa, unidentified
MLRSFKTELRLTESQKDKIRRSLGICRFLANQYIARNIWLYRLYQRGVLDEKQRHFVTANNFDKYVNHVLKKKFPWIDQCGSKARKKVLVNAEQAFKRFFKGQVHFPRFKRKNQQNVKLYFPKNNKGDWTIWRHRIQIPTIGKVRLKEFGYLPQGVTIKNGYVSCEADRYYVSVTAEIEETSRYNNDLEASYHPQTDGIGVDLGVKSLAIVSDGRIFENINMSSRARRLEKRLRREQRRLSRKYEMRKKKGGSTATASANIEKKKLSVQRLHQRLANLRRNHENQVIHALVEQKPRFITVEDLNVTGMMKNRHLSKAVSEQRFYSFREKLRRKAEIIGIEFRIADRFYPSSKTCHACGHVHSGLKLKDRTYVCPACGYKEDRDLNAALNLRDTKDYRIA

SEQ ID NO: 2429 - protein, 418 aa, unidentified
MMKRVEHHRLKPSSPFYAMLREFCHRSKNLYNHGNFLIRQAFLNDSKWLRYGEVDRLLKADTEYPDYREMPTAQTAQQTLRILDKNWTSFFAAIKDWKAHPEKYKGRPKLPKYKPKDGYFPLVLTNQNCKLKDGIIRFPRTFQGFTVKAVFVSQPDAIFKQTRIIPHGGEICIELVYEISEVEEKADNGKYAAIDIGVDNLAALAWNTGKRPVLFKGTPLKSVNQYYNKQMAKRRSICERMNGRHSSKRIARLTVKRNRKVEDYLHKASRKVIDLCAGQDVSVLVIGKNKGWKQEANLGRKLNQSFVQLPFARFIQMLQYKAESIGMKVVLTEESYTSGTSFLDDEAPVKACYDKSRRVHRGLFRTSDGRKINADVNGAYQIMRKVFPNVNADGIEGVALRPAVVTLSMSARRCSVCA

SEQ ID NO: 2430 - protein, 385 aa, unidentified
MRTLTRCYKYRLQPTPAQVETLVQWAGSRRFVWNWALHCKQSHYQATGQRLSYQRLAAMLVDLKRQPKMAFLRDCHSQPLQQALMDLETAFSNFFAKRAKYPRFKARKITPHSLRFPQGATVIDECTISVPKIGLMRAIIHRPVMGVTKSTTIKQDATGAWWVVFVCHIDRPDVQPTADRPVGIDVGLESFTTLSTGEKTAPPKFYRRSQKNLARAQRKLSRAQKGSNNRLKAKKRVARLHKKISNQRADWLHKHVLGIVRQFDVVCIEDLNIKGLAKTKLAKSFSDAALSTFMQILMDKTEWHGRRVVKVGRFYASSKTCHHCKTKTTLTLADRVWTCPTCGMTHDRDVNAAINIVHEGIRLLAVGTTESQNAAGDGVNPAKCW

SEQ ID NO: 2431 - protein, 416 aa, unidentified
MAIEATRTYVGSIQNYRQVHDGLDSLGDSASKIWNVARWTADRIWNATGEIPDEGTLKAYMKNRECWKDLNAQSSQKVIEELSDAFQSWFDLRHKDDEANPPGYRKHGDTRPKSTITFKADGFKHDPENNRVRLSKGSNLKDHFSDFLLCEYQTRPDVDLSEVNSVQNIRAVWNGDEWELHFVCKVELETLDSAGDGVAGIDLGITNIATVAFPDEYVLYPGNSLKQDKHYFTRAEYDTEGENGPSEKSMWARRKLADRETHFYHTLTDTIITECVQRGVGTLAVSWPEDVRESDWGKTGNKKLHSWAFDRIYQYLEYKGEIRGVEVLKENEWDTSKTCSRCGDDTKSNRVERGLYVCSSCELVANADCNGAENMRQKITPSPHGEDRSNGCVAQPSTHLFDRESGTFNTREQVVL

SEQ ID NO: 2432 - protein, 391 aa, unidentified
MLKATKVRIYPTTEQAEFLNRQFGAVRFCYNTGLRIMSHRYKRHGQSLSAKHDIKKLLPVAKKSRKYGWLKEADSMALQQSCINLDHAFQRFFDPKQKAGYPRFKSKRGKQSSYHCVGVKAGDNWIKVPKLGPIKAKVHRPVDGKLKSITLSRTVTGKHYASLLFDTDQATPVPTMDVDTSRVVGLDMGLSHLAIDSNGRKVANPRFLKQAQKNLKRKQQALSRTKKGSARRAKARLLVAKAYERVANARNDFQHKLSRQIVDDNQAVIVETLKVRNMMKNTCLAKHIGDASWHALMTKLDYKAREQGKHLVKIDPWFASSKTCHVCQHKMDAMPLNVRSWECPACHTQHDRDINAALNIKHQGIIELKAEGLSVSAHGGLRKSGTSSAAA

SEQ ID NO: 2433 - protein, 374 aa, unidentified
MPVHKAYKFRMYPNKKQEVLINKTFGCSRFVFNHFLVRWNDTYKKTGKGLSYQACSSQLTKLKKEYTWLKEVDSIALQTSLKHLSDAFTRFFQKQNDKPRFKSKKNKVQSYTTKYTKGNIAIVGNKIKLPKLGFVRFAKSREVEGRMLSVTIRRNPSGKYFVSILVKTDVQPLPKTHTAVGIDMGLKNFVILSDGTTYANPKFLRKLEKKLVKAQRILSRRKIGSSNWHKQRIKVARIHEKITNSRNDYLHKISTEIVKNHDIIGMEDLSVASMLKNNKLSKAICEASWETFKAMIAYKAKWYGKQLVVVAKNFPSSQLCSHCGYQNKDVKHLTLREWQCPNCHTRHDRDVNASINIKNEAVRLLTAGTAGLAY

SEQ ID NO: 2434 - protein, 386 aa, unidentified
MITTKTYKFRLDPTRQQEQEFLRFAGCRRFVWNWALARKQAVYKETGKTLGYNALASELVALKKQPETAFFKECHSQALQQTLRDWDKAFVCFFEKRTKFPRFKSRKRTAHALRIPQNVTVVEDRVSVPKVGLGKARLHRQMQGTIKSATIKQEPNGHWYVCFISHIELPDVEPVWDAPVGIDVGLESFFTLDNGEKVKPPKFYRKAERKLKRLQRAVSRSQKTSRRRCKRKKVLAVYHARVRNQRNDWLHKISSKLISRYDTLCIEDWNLKGLVKTKLAKSFTDASLGAFVRMLVDKAEWNRCRIVKVDRFFPSSQTCHPCNHRQHLELSDRQWTCGGCGVIHDRDPNAAINLLLEGMRILAVGSPESQNDKGGNVRLAKVSSSR

SEQ ID NO: 2435 - protein, 389 aa, unidentified
MLKATKVRIYPTPEQAEYLNRQFGAVRFVYNKALHIISSQFKRHGLKLKAKKDLKPLLAIAKKSRKYHWLNDFDSIALQQACINLDKAFQNFFDPKLPSRYPKFKRKHAKQSSYHCMNVSAGDHWIKVPKMKPIKARVHRALDGKLKSITLSRTATGKYYASLLVEDNVAAPAPAQSVDTVLGLDMGLTHLAIDSEGNKTANPRFLKRAAANLRHKQKALSRCQKGSKGRMKARLKLAKAHERLANARADFQHKLSRQLIDENQAVVVETLKVKNLLKNRHLAKHIADASWFGLIQKLEYKAKAQGKHLVKIDQWFASSKTCSCGGHKVDTLPLSVRTWACPACSSQLDRDINAAINIRQQGVIKLRAEGLSVPANGGLRKSGHAPVAA

SEQ ID NO: 2436 - protein, 389 aa, unidentified
MLKATKVRIYPTPEQAEYLNRQFGAVRFVYNKALHIISSQYKRHGLKLKAKKDLKPLLAIAKKSRKYHWLNDFDSIALQQACINLDKAFQNFFDPKLPSRYPKFKRKHAKQSSYHCMNVSAGDHWIKVPKMKPIKARVHRALDGKLKSITLSRTATGKYYASLLVEDNVAAPAPAQSVDTVLGLDMGLTHLAIDSEGNKTANPRFLKRAAANLRHKQKALSRCQKGSKGRMKARLKLAKAHERLANARADFQHKLSRQLIDENQAVVVETLKVKNLLKNRHLAKHIADASWFGLIQKLEYKAKAQGKHLVKIDQWFASSKTCSCGGHKVDTLPLSVRTWACPACSSQLDRDINAAINIRQQGVIKLRAEGLSVPANGGLRKSGHAPVAA

SEQ ID NO: 2437 - protein, 376 aa, unidentified
MAVQHKAYQYRIFPNKQQQAFMVQSFGCSRFVFNHFLEKIKNREEENQKTLQVNAFKNELKSMKTDYVWLKLVDSISLQASIEHLNDAMVRFFKKQNKFPQFKSRKHPVKSYTTKSVNGNIKVTETYIKLPKVGWIRYANSRPIPDSAVIKRVVVRQNAAGKYFVSINVKEEVEKRDKTNQTIGLDMGLTHFVIDSNGNKINNERYFQSLEKKLAKAQRSLSRKQKFSNNWHKQKKKIAAIHEKVVNKRKDFQHKLSSELVQQYDVIAIESLSVSDMLKDKSYSKSIQDASWSEFATMLAYKCDWYGKELVKVGKHFPSTQICSSCKQKHSITKDTSIRVWTCPTCQTNHDRDINAAVNILEEGMHLSTVGATGIA

SEQ ID NO: 2438 - protein, 362 aa, unidentified
MQKAYKFRIYPNKKQIQQINKTFGCSRFVYNYFLDKRIKIYEENKETLSYGKCSSILTILKQEKEWLKEVDKFALQNSLKDLDRAYQKFFKEKTGFPKFKSKHNNRQSYRTNYTNNNIEINENKIKLPKLGWVKFAKSREVEGKILNVTISKNPSGKYFASFCCEVEIVQLPTSDNKIGLDLGIKDFVISSNGDKIDNPKHLIKSEQKLKNLQRSLSRKKKGSKNRNKVRIKLAKQHEKISNQRLDFLHKLSTKLISENQVIYLEDLKVKNMQQNERLAKNIADASWSKFRNILEYKAKWYGREVKILDRWFPSSKTCSCCGFKNEKLTLDIREWTCENCGENHDRDINAAVNILQQGLKLA

SEQ ID NO: 2439 - protein, 416 aa, unidentified
MAIEVTRTYIGSIQNHRQVCDGLDSLGDSASKIWNVARWTADRIWDEIGKIPDEGPLKSYMKNQSCWKDLNAQSSQKVIEELSDAFQSWFDLRQKDDKANPPGYRKHGDTRPRSTVTFKADGFKHDPQNNRVRLSKGSNLKEHFSDFILCEYQTRPDVDLSEVNKVQNVRAVWNDDEWELHFVCKVSLETNDSAGDEVAGIDLGIKNLATVAFPNEYVLYPGNSLKQDKHYFTRAEYDTEGENGPSEKSMWAREKLSERESHFYHVLSDTIITECVERGVGTLAVSWPEDVRESDWGKTGNKKLHTWAFDRIYQYLNYKGEIRGVEVLKENEWDTSKTCSKCGDDTKANRVERGLYVCSSCELVANADCNGAENMRQKITPSPHGEDRSNGCVAQPSTYLFDRESGMFHTRERVVS

SEQ ID NO: 2440 - protein, 284 aa, unidentified
MLKATKVRLYPTTEQAEFLNRQFGAVRFCYNTGLRIMSHRYKRHGQSLSAKHDIKKLLPVAKKSRKYGWLTEADAIALQQACLNLDHAFQRFFDPKQKAGYPRFKSKRGKQSSYHCVGVKAGDNWIKVPKLGPIKARMHRQVEGRLKSITLTRTVTGKHYASLLFDTEQAAPAPLKDVDAAKVVGLDMGLSHLAIDSTGRKIANPRFLKQAQQNLKRKQQALSRTKKGSANRAKARLLVAKAHERLANARNDFQHKLSRQIVDDNQAVIVETLKVSNMMKNTCL

SEQ ID NO: 2441 - protein, 316 aa, unidentified
MTRQVKRAFKYRFHPTDEQAAELSRTFGRVRLVCNKALEQRTRAWYSEQRRVSYVQSSAALTEWKKTEELAFLTEVSSVPLQQALRHLQTAFGNFFAKRAKYPRFKSRKKSRASAEYTRSAFTWRDGQLTLAKTAQPLDIRWSRPLPAGAEPTTAAVGIDAGITSLVTLSTGEKVANPKHERRDRARLARARRELSRKAKGSANPEKARRRVGRVHARIADRRRDFLHQLSTRLVRKLCGACGTVAAKMPLNVREWTCECGAVHDRDVNAARNILAAGLAASACGDGARPQRESSRTGRSSVKQEPQRATAGIPRL

SEQ ID NO: 2442 - protein, 367 aa, unidentified
MKKHKGFKFRIYPTEKQATLINKSIGCVRYVFNHFLAKRKEAYETEQRTLNYKACSTLLTKLKKEVTWLKEPDSTALQNALQDLDAAYQKFFNEKTGYPKFKSRKNRRQSYNTTNNNDAIRIEGTQIRLPKLGLVRFAKSREVEGRILSATVRRNPSGHYFVSVLCEVEMQPLPNVEQQVGVDLGIKQFAILSSGETFENPKYLRKYEGKLAYLQRMMSRRTKGGSNWNKARIKVARLHEKIANCRTDFLQKLSTKLIRENQTICVEDLQVSNMQKNHKLAKSISDASWSEFRRMLEYKVEWYGRTLSFVAKTFPSSQLCSACGYRNRDVKNLNLRTWGCPECHTHHDRDVNAAVNILKEGLRLLEV

SEQ ID NO: 2443 - protein, 410 aa, unidentified
MIFIIFVSKMRKINRTYKFRLYPNKEQAELLARHFGCSRFVYNYFLNQRKEQYRLTGKSDNYYAQAKFLTEMKKQEATAWLKEVNSQTLQFAIRSLEVAYTNFFQKRAKFPSFKSKHSKNSFTVPQFASIAGNRIFIPKFKEGIKCCVHREIVGKIGKVTISKTPSGKYFVSVFTEEEYITPIEKSGKSVGVDLGLKNLLITSEGETFKNNRYTKKYERRLAKAQQHLSRKKKGSRGFENQKLKVARLHEKINNSRADYLHKCSVSLVRRYDTICIEDLNVKGMERNHRLAKSVADASWSTFVSMLTYKAEWNGKKVVKIDRFFPSSQTCNVCGYINKQTKDLSVREWECPVCHTHHNRDVNAAINILRFGLNHTSAGTVDYTGGEEVRADLLESRSSVKPEAHKSLACV

SEQ ID NO: 2444 - protein, 401 aa, unidentified
MRKINRTYKFRLYPNKEQAELLARHFGCSRFVYNYFLNQRKEQYRLTGKSDNYYAQAKFLTEMKKQEATAWLKEVNSQTLQFAIRSLEVAYTNFLQKRAKFPSFKSKHSKNSFTVPQFASIAGNRIFIPKFKEGIKCCVHREIVGKIGKVTISKTPSGKYFVSVFTEEEYITPIEKSGKSVGVDLGLKNLLITSEGETFRNNRYTKKYERILAKAQQHLSRKKKGSRGFENQKLKVARLHEKISNSRADYLHKCSVSLVRRYDTICIEDLNVKGMERNHRLAKSVADASWGTFVSMLTYKAEWNGKKIVKIDRFFPSSQTCNVCGNINKQTKDLSVREWECPVCHTHHNRDVNAAINILRFGLNHTSAGTVDYTGGEEVRADLLESRSSVKPEAHKSLACG

SEQ ID NO: 2445 - protein, 373 aa, unidentified
MHKAFKFRIYPTKEQAELINKTFGCSRFVFNYFLAKWNETYEQTGKGLSYNVCAKQLTQLKKELSWLKEVDATALQNSLKHLDNAFKRFFEKQNNKPKFKSKRNPVQSYTSQCNYSSSRPSIEVIDNKIKLPKLGWVKFAKSREVEGKILSVTIRRNPTGKYFVSILCETEINSLPASEKAIGIDLGLKDFVILSTGEKISAPKYFRKYEKQLVKWQRILSRRKYGGSNWNKARLKVAKIHEKIVNARRDFLHKLSTKLIHENQVICLEDLQVENMMKNHHLAKSITDASWSEFVSMLEYKANWYGRTVVKIGKTFPSSQLCSECGYRNKEVKKLNLREWICPNCKTYHDRDVNAAVNILREGMRLFTVGQTG

SEQ ID NO: 2446 - protein, 377 aa, unidentified
MQHLDGFFKLRDQIDYRALPAQANQNVLHMLYRDWKSFFAALADYKAHPDKYEAVPHIPRYADKDGYKPLIFTNQICKLRKDKHGWYVKFPKAVLQAGCVRDRYDLGMMDLHEQKLKEVRLIPNGDTIKLEIVCEIEIMEPTIKIHEATRVAGIDIGVDNLTAIAFTSGHRPVLIKGNEIKAVKQFYNKQIAHYRSLLRTGKKDSKGIHQTKRMKRISEKRNRRVKDILHKASRKIIDLCVKEGIEVIVVGNHAGWKKRIHMGKKNNQTFVQIPFRTLIEMIKYKGESAGIRVVVCEESYTSKASSIDEDQIPVYGNDVTHTFTGKRIKRGLYRSKNGILMNADINGASNIIRKVYPCMPKRERWSRGTVNVPVTCI

SEQ ID NO: 2447 - protein, 416 aa, unidentified
MAIEVTRTYVGSIQNQQQVSDGLDSLGDSASKIWNIARWTVDRIWEVTGEIPDEGTLKSYMKNQACWKDLNAQSSQKVIEELSDAFQSWFDLRHKDDEANPPGYRKHGDTRPKSTVTFKADGFKHDPENNRVRLSKGSNLKENWSDFILCEYQTRPDVDLTEVNSVQNVRAVWNGDEWELHFVCKVELETNDSAGDGVAGIDLGIKNIATVAFPDEYVLYPGNSLKQDKHYFKRAEYDTEGENGPSEKSRWARRKLADRETHFYHVLTDTIITECVERGVGTLAVSWPKDVRESDWGKTGNKKLHSWAFDRIYQYLEYKGEIRGVEVLKENEWETSKTCSRCGDDTKSNRVERGLYVCSSCELVGNADCNGAENMRQKITPSPHGEDRSNGCVAQPSVHLFDRESGTFNTREQVVS

SEQ ID NO: 2448 - protein, 416 aa, unidentified
MAIEVTRTYVGSIQNHRQVCDGLGSLGDSASKIWNVARWTADRIWDETGEIPDEGVLKSYMKNQSCWKDLNAQSSQKVIEELSDAFQSWFDLRHKFDEANPPGYRKHSDTRPKSTVTFKADGFKHDPENNRVRLSKGSNLKEYWSDFILCEYQTRPDVDLTEVNKVQNVRAVWNGEKWELHFVCKVELETNDSAGDCVAGIDLGITNIATVAFPDEYVLYPGNSLKQDKHYFTRAEYDTEGENGPSEKSMWARRKLTERETHFYHTLTDTIITECVERGVGTLAVSWPEDVRETDWGKTGNKKLHTWAFDRIYQYLEYKGEIRGVEVLKENEWDTSKTCSACGDDTKSNRVERGLYVCSSCELVANADCNGAENMRQKITPSPHGEDRSNGCVAQPSVHLFDRESGTFNTREQAVS

SEQ ID NO: 2449 - protein, 272 aa, unidentified
MLKAIKIRLYPTPEQAALLACQFGAVRFVYNTGLRIMSHRYKRHGQSLSAKHDIKRLLPVAKKSRKYGWLKCADSIALQQSCINLDQAFQRFFDPKQKAGYPRFKSKRGRQSSYHCVGVKAGGNWIKVPKLGPIKAKVHRPVDGKLKSITLSRTVTGKHYASLLFETEQAAPAPLKDVDAANVVGLDMGLSHLAIDSTGCKIANPRFLKQAQQNLKRKQQALSRTKKGSANRAKARLLVAKAHERVANARNDFQHKLSRQIVDDNLCPWRLA

SEQ ID NO: 2450 - protein, 389 aa, unidentified
MIKATKVRIYPTPEQADFLNRQFGAVRFAYNKALHIISSQYKRHGLKLKAKQDLKPLLAVAKKSRKYHWLKDFDSIALQQACINLDKAFQNFFDPKRPARYPKFKRKHGKQSSYHCTSVSMGENWIKVPKMEPIKARIHRKVEGKLKSITLSRTVTGKYYASLLIDNGLDTPAPMQTLDSVLGLDMGLTHLVIDSDGNKIENPRFLKKASANLRRKQKALSRCQKGSKGRAQARLQLAKAYERLKNARADFQHKLSRTIVDENQAVIVETLKVKNLLKNRTLAKYIADAGWFSLVQKLEYKAKEQGKHLVKIDQWFASSKTCACCGHKVDTLPLSVRYWTCPACTVALDRDINAAINIRQQGIIKLRAEGLSVPANGGLRQSGHAPVAA

SEQ ID NO: 2451 - protein, 389 aa, unidentified
MIKATKVRIYPTSEQADFLNRQFGAVRFAYNKALHIISLQYKRCGLKLKAKQDLKPLLAVAKKSRKYHWLKDFDSIALQQACINLDKAFQNFFDPKRPARYPKFKRKHGKQSSYHCTSVSMGENWIKVPKMKPIKARIHRELTGKLKSITLSRTVTGKYYASLLIDNGLDTPAPMQTLDTVLGLDMGLTYLVIDSNGHKMANPRFLKRAESNLRRKQKALSRCQKGSKGRAQARLQLAKAHERLKNARADFQHKLSRTIVDENQAVIVETLKVKNLLKNQKLSKHIADASWSGLIQKLEYKAKAQGKYLVKIAPWFASSKTCSCCGHKVDTLPLSVRKWMCPVCTVALDRDVNAAINIRQQGMIKLRAEGLSVPANGGLRQSGHAPVAA

SEQ ID NO: 2452 - protein, 389 aa, unidentified
MLRATKVRIYPTLEQAEFLNRQFGAVRFCYNKALHIISTQYKRYGLKLRAKKDLKPLLAVAKKSRKYHWLGEFDSIALQQACINLDKAFQNFFDPKLASRYPIFKRKHGKQSSYHCTSVKAGDNWIKVPKLEPIKARIHRELAGTLKSITLSRTATGKYYASLLVEDGTAALVPIQSVDTVLGIDMGLTHLVIDSSGNKTANPRFLNRSQANVRRKQKALSRCQRGSRGRAKARLKLARAHERLANARANFQHNLSRQLIDENQAVIVETLKVKNMLKNRKLAKHISDASWYSLIQKLEYKARMQGKHVVKIDQWFASSRTCSGCNHRVDTLPLSVRYWTCPVCSIGHDRDVNAAINIRQQGIIKLRAEGLSVPANGGLRKSGHAPVAA

SEQ ID NO: 2453 - protein, 389 aa, unidentified
MLRATKVRIYPTLEQAEFLNRQFGAVRFCYNKALHIISSRYKRHGLKLRAKKDLKPLLAVAKKSRKYHWLGDYDSIALQQACINLDKAFQNFFDPKLASRYPTFKRKHGMQSSYHCTSVKAGDKWIKVPKLEPIKARIHRELAGTLKSITLSRTATGKYYASLLVEDGIAAPTPMQTLDSVLGIDMGLTHLVIDSEGNKTANPRFLNRSQANVRRKQKALSRCNKGSRGRAKARLKLARAHERLANARADFQHNLSRQLIDENQAVVVETLKVKNMLKNRKLSKHISDASWYSLVQKLDYKARMQGKHVVKIDQWFASSKTCSGCNRRVDILPLSVRYWTCPACSVGHDRDVNAAINIRQQGIMKLRAEGLSVPANGGLRKSGHAPVAA

SEQ ID NO: 2454 - protein, 389 aa, unidentified
MLRATKVRIYPTLEQAEFLNRQFGAVRFCYNKALHIISSQYKRHGLKLRAKKDLKPLLAVAKKSRKYHWLGAYDSIALQQACINLDKAFQNFFDPKLASRYPTFKRKHGKQSSYHCISVKAGDNWIKVPKLEPIKARIHRELVGTLKSITLSRTATGKYYASLLVEDGIAALGLIQSIDNVLGIDMGLTHLVIDSEGNKTANPRFLNRSQANVRRKQKALSRCNKGSRGRAKARLKLARAHERLANARADFQHNLSRQLIDENQAVIVETLKVKNMLKNRKLAKHIVDASWYSLVQKLDYKARMQGKHVVKIDQWFASSKTCSGCNHRVDTLPLSVRYWTCPACSIEHDRDVNAAINIRQQGIIKLRAEGLSVPANGGLRKSCQVPVAA

SEQ ID NO: 2455 - protein, 416 aa, unidentified
MAIEVTRTYVGFIQNQRQVWDGLDSLGDSASKIWNVARWTADRIWNAIGVIPDEGTLKAYMKNKSCWKDLNAQSSQKVIEELSDAFQSWFDLRHKDDEANPPGYRKHGDTRPKSTVTFKADGFKHDPENNRVRLSKGSNLKENWSDFILCEYQTRPDVDLSEVTRVQNVRAVWNGDEWELHFVCKVELETNDSAGDGVAGIDLGITNIATVAFPDEYVLYPGNSLKEDKHYFTRAEYETEGENGPSEKSMWARRKLADRETHFYHVLTDTIITECVERDIGTLAVSWPENVRESDWGKTGNKKLHSWAFDRLYQYLEYKGEIRGVEVLKENEWNTSETCSRCGDDTTSNRVERGLYVCSSCELVANADCNGAENMRQKITPSPHGEDRSNGCVAQPSVYLFDHESGAFTTREQVVS

SEQ ID NO: 2456 - protein, 416 aa, unidentified
MAIEVTRTYVGSIQNHRQVCDGLDSLGDAASKIWNVARWTADRIWDATGEIPDEGVLKSHMKNQSCWKDLNAQSSQKVIEELSDAFQSWFDLRHKFDEANPPGYRKHGDERPRSTVTFKEDGFKHDPENNRVRLSKGKNLKEYWSDFLLCEYQIRPDVDLSEVNSVQNVRAVWNGDEWELHFVCKVSLETNDSAGEGVAGIDLGIKNIATAAFPDEYVLYPGNSLKEDKHYFKRAEYDTEGENGPSEKSMWARRKLADRETHFYHTLTDTIITECVERGVGTLAVSWPEDVRESDWGKTGNKKLHSWAFDRIYQYLEYKGEIRGVEVLKENEWDTSKTCSRCGDDTKSNRVERGLYVCSSCGLVGNADCNGAENMRQKITPSPHGEDRSNGCVAQPSTYLFDRESGMFRTREQVVS

SEQ ID NO: 2457 - protein, 416 aa, unidentified
MAIEVTRTYVGSIQNQRQVCDGLDSLGDAASKIWNVARWTIDRIWDVIGEIPDEGTLKAYMKNQPCWKDLNAQSSQKVIEELSDAFQSWFDLRQNDAKANPPGYRKHGDKRPKSTVTFKADGFKHDPENNRVRLSKGSNLKETWADFLLCEYQTRPDVDLTEVNTVQNVRAVWNGDEWELHFVCKVELETNDSAGDGVAGIDLGITNISTVAFPDEYVLFPGNSLKQDKHYFTRAEYDTEGDNGPSEKSMWARRKLTERETHFYHVLTDTIISECVERGVGTLAVSWPEDVRESDWGKTANKKLHSWAFDRIYQYLAYKGERRGVEVLKENEWDTSKTCSRCGDDTRSNRVERGLYVCSSCALVANADCNGAENMRQKITPSPHGEDRSNGCVAQPSTYLFDRESGMFRTREQVVS

SEQ ID NO: 2458 - protein, 384 aa, unidentified
MLVNKAYKFRIYPNKEQEILIAKTFGCSRFVFNHFLAKWNETYQETGKGLTYNACSSQLTQLKKEFTWLKEVDSIALQSSLKHLDDAYDRFFKKQNDKPRFKSKKNPVQSYTTKYTNGNIAVLDKHIKLPKLGLVRFAKSREVEGRILSATIRRNPSGKYFVSILVETDVQALPKTGSAVGIDVGLKEFAVLSDGTKYVNPKWLHKLEEQLAKAQRILSRRKKGGSNWNKQRIKVARLHEKMTNARHDYLHKISTEIVKNHDIIGMEDLSVSHMLKNHNLAKAIQEVSWSMFKAMIEYKARWYGKQVVTVAKNFPSSQLCSCCGYQNKDVKHLALREWECPVCHTHHDRDVNASINIKNEAIRLLNRRNCGDRLLNNRKNFRCS

SEQ ID NO: 2459 - protein, 391 aa, unidentified
MLKATKIRIYPTFEQVAFLNRQFGAARFVYNTGLRIMSHRYKRHGQSLSAKHDVKKLLPVAKKSRKYGWLKEADSMTLQQSCINLDQAFQRFFDPKQKTGYPRFKSKRGKQSSYHCVGVKAGDDWIKVPKLGPIKAKVHRKVEGRLKSITLTRTVTGKHYASLLYETQQVAPALLKEVDAAGVVGLDMGLSHLAIDSTGRKIGNPRFLKQAQKNLKRKQQALSRKKKGSARRAKARLLVAKAHERVANARHDFQHKLSRQIVDDSQAVIVETLKVKNMMKNAKLAKHIGDASWHALTAKLDYKAKEQGKHLVKIDPWFASSKTCHVCQHKMDAMPLSLRSWECPDCHAQHDRDINAALNIKHQGIVKLKAEGLSVSAHGGSRKSGMSPAAA

SEQ ID NO: 2460 - protein, 416 aa, unidentified
MAIEVTRTYVGSIQNQQQVRDDLDSLGDSASKIWNSARWTADRIWNATGEIPDEGTLKAYMKNQPCWKDLNAQSSQKVIEELSDAFQSWFDLRQTDDEANPPGYRKHGDTRPKSTVTFKADGFKHDPENNRVRLSKGSNLKEHWSDFILCEYQTRPDVDLSEVNKVQNVRAVWNGDEWELHFVCKVVLETNDAAGDGVAGIDLGITNIATVAFPDEYVLYPGNLLKQDKHYFTRAAYETEGENGPSEKSMWARRKLAERETHFYHVLTDTIITECVERDVGTLAVSWPEDVRKSDWGKTGNKKLHSWAFDRLYQYLEYKGEIRGVEVLKENEWNTSKTCSRCGDDTTSNRVERGLYVCSSCELVANADCNGAENMRQKITPSPHGEDRSNGCVAQPSVHLFDRESGMFQSREQVVS

SEQ ID NO: 2461 - protein, 436 aa, unidentified
MAIEVTHTYVGSIQNHRQVCDGLDSLGDSASKIWNVARWTADRIWDETGEIPDEGVLKSYMKNQSCWKDLNAQSSQKVIEELSDAFQSWFDLRQKDDEANPPGYRKHGDTRPKSTVTFKADGFEHDPENNRVRLSKGSNLKEYWSDFILCEYQTRPDVDLSEVTKVQNVRAVWNGDEWELHFVCKVELETSDSAGDGVAGIDLGIKNIATVAFPDEYVLYPGNSIKQDKHYFKRAEYDTAGENGPSEKSMWARRKLADRETHFYHTLTDTIITECVERGVGTLAVSWPEDVRNSDWGKSGNKKLHTWAFDRIYQYLEYKGEIRGIEVLKENEWNTSKTCSACGDDTKSNRKHRGLYVCSSCELVANADCNGAENMRQKITPSPHGEDRSNGCVVVRETGGPSSSRKAHSAFRTTQPSVHLFDRESGTFQSREQVVS

SEQ ID NO: 2462 - protein, 390 aa, unidentified
MVKHKAYKFRIYPTKEQEILIAKTIGCSRFVFNHFLAKWDEMYKTTGKGLSYGSCSKEIPLLKQEFDWLKEVDSTSVQISVKHLADAFDRFFKKQNERPRFKSKRHPVQSYKTNIQGKSQLPEVSIVCNQLKLPKLKWVRFAYSKQITGRILSATIRRNASGKYFVSLLVEQEINELPKTGSSIGIDVGLKNFAILSDGTIYKSDRYFRSLEKKLAREQRKLSRRQRIALNKKVTLSEARNYQKQKRKVARIHEEIANKRTDFLHKVSTEIVQNHDVIGIETLQVKNMQKNRKWSKAISDVSWSEFFRMLEYKADWYGKTVVKVGKTFASSQLCSSCGHQHKDVKHLSLREWTCPSCGIHHDRDVNAGLNLKQEAERILASSTVGTTGLA

SEQ ID NO: 2463 - protein, 390 aa, unidentified
MLKHKAYKFRIYPTKEQEILIAKTIGCSRFVFNHFLAKWDEMYKTTGKGLSYGSCSKEIPLLKRQFDWLKEVDSTSVQISVKHLADAFDRFFKKQNERPRFKSKRHPVQSYKTNIQGKNQLPEVSIGCNKLKLPKLKWVRFAHSKQVTGRILNATIRRNASGKYFVSLLVEQEINELPKTGSSVGVDVGLKNFAILSDGTVYKNDRYFRSLEKKLVREQRKLSRRQRIALNKKVKLSEARNYQKQKRKVARIHEKIANKRTDFLHKVSTEIVKNHDVIGIETLQVKNMQKNRKLSKAISDVSWSEFFCMLEYKAEWYGKTVVKVGKTFASSQLCSSCGHQHKDVKHLGLREWTCPSCGIHHDRDGNAGLNLKQEAERILASSTVGTTGVA

SEQ ID NO: 2464 - protein, 416 aa, unidentified
MTVEATRTYVGSIQNQQQVCDGLDSLGDSASKIWNVARWTADRIWDEAGEIPDEGTLKAYMKNQSCWKDLNAQSSQKVIEELSDAFQSWFDLRHKFDEANPPGYRKHGDTRPKSTVTFKADGFKHDPEHDRVRLSKGKNLKEHWSDFLLCEYQIRPDVDLSEVNKVQNVRAVWNGDEWELHFVCKVELETNDSAGNEVAGIDLGIKNIATVAFPDEYILYPGNSLKQDKHYFTRAEYDTEGENGPSEKSMRARRKLTDRETHFYHTLTDTIITECVERGVGTLAVSWPEDVRESDWGKTGNKKLHSWAFDRIYQYLAYKGEIRGVEVLKENEWDTSKTCSRCGDATKSNRVERGLYVCESCELVANADCNGAENMRQKITPSLHGEDRSNGCVAQPSVHLFDRESGTFQTREQVVS

SEQ ID NO: 2465 - protein, 464 aa, unidentified
MGQVILNQSVIYSLLADQTTKKKPEQEEALREASERIIQYPDLQELIQRMKEQKARVDNNYVLQTTIRQVIKDYKSFLASLAEYRVNPGKYKERPQPPKPKKLGKLTQVTAEFNNNVFEVEGNTLFLRLRMNGKKRIKIKLPRDVEGVSSVRLVYHLSDVWVDVIYEKELKEPEAGLIHLAGIDMGMDNLISLISTNPDVKSLIISGREIKSFNCWFNKKKAAVQSAMDTLSNKIDQEEDEPRKNAMSKELLKLKFYLHNLYNYRDRWIESHFHKVARVLADFLYETGHKAVYLGKGATESKDGIDLGKVTNQNFVSIPFRKLINILKYKLEELGMKAEEKEESYTSKASSLSDGILEIQRRYDEAKEKQGEIKIKCSGKRIERGLYRDNVLKKVFNADLNGALNILKVGAKLRRLTLSLKVLLCKLCNPLRLNLYNFIYRFKSKAESPPGIGDSRLATAGLTR

SEQ ID NO: 2466 - protein, 389 aa, unidentified
MLKATKVRIYPTPEQAEFLNRQFGATRFVYNKALHIISSQYKRHGLKLKAKKDLKPLLAVAKKSRKYHWLKDFDSIALQQACINLDKAFQNFFDPKLAARYPKFKRKHGKQSSYHCMSVSAGENWIKVPKMKPIKARVHRELDGKLKSITLSRTVTGKYYASLLVEGDLEIPAPLHTVDTVLGVDMGLTHLAIDSEGNKTANPRFLKRAQSNLRRKQKALSRCQKGSKGRAQARLKFAKAHERLANARADFQHNLSRQLIDENQAVVVETLKVKNLLKNRKLAKHIADASWFSLIQKLEYKAKEQGKHLVKIDQWFASSKTCSCCGHKVDTLPLSVRNWSCPACTVELDRDVNAAINIRQQGVIKLRAEGLSVPANGGLRKSSHALVAA

SEQ ID NO: 2467 - protein, 480 aa, unidentified
MSTDNFDVKLLEFKLYPTSSQQEQLENWLRAQQQIWNIGLSLLLEFETFAAYNKIDKGIAPCCPLPWDYIWRPITSNQDWRSPHILESLPNKDPLRKKYIPVPIAKVGTKRRPNSSCPLPRQYKKPQLDQDSEYSLVKWCGYQKLPKQNPPNGAYIDVALITSCPQKHMTGTLKILATAWKEYKKGKRKRPRFKGHRNPMQSTTNYQSGDAKLVGGDYLKLPKLGTVKAKGLEHRWAKSTSNVRNYIIKKEPSGWYIFLCGRFPKEAIKTSNISAGLDAGVKHLLTDDVGNHIENPEPLKKNLIKLKRLQQKASRQFHMNNGKTQNWEKTQAKIKKLHEKIRRQRKAYAHKISTFATEKFGEIYVEDLQHQNMRKRSKPIERKDGKGYEHNKQSQKKGLNRALSDTGMGQLITMIEEKAAAKGRVFKRIDPKYTSQTCSQCGHVDAKNRKSQSDFTCVKCGHSENADVNAAKNIKQKGKL

SEQ ID NO: 2468 - protein, 391 aa, unidentified
MLKATKVRIYPTTEQAEFLNRQFGAVRFCYNTGLRIMTHRYKRHGQSLSAKHDIKKLLPVAKKSRKYGWLKEADSMALQQSCINLDHAFQRFFDPKQKAGYPRFKSKRGKQSSYHCVGVKAGDNWIKVPKLGPIKAKVHRPVDGKLKSITLSRTVTGKHYASLLFDTDQATPVPTMDVDTSRVVGLDMGLSHLAIDSNGRKVANPRFLKQAQKNLKRKQQALSRTKKGSARRAKARLLVAKAYERVANARNDFQHKLSRQIVDDNQAVIVETLKVRNMMKNTCLAKHIGDASWHALMTKLDYKAREQGKHLVKIDPWFASSKTCHVCQHKMDAMPLNVRSWECPACHTQHDRDINAALNIKHQGIIELKAEGLSVSAHGGLRKSGTSSAAA

SEQ ID NO: 2469 - protein, 391 aa, unidentified
MLKATKVRIYPTTEQAEFLNRQFGAVRFCYNTGLRIMSHRYKRHGQSLSAKHDIKKLLPVAKKSRKYGWLKEADSMALQQSCINLDHAFQRFFDPKQKAGYPRFKSKRGKQSSYHCVGVKAGDNWIKVPKLGSIKAKVHRPVDGKLKSITLSRTVTGKHYASLLFDTDQATPVPTMDVDTSRVVGLDMGLSHLAIDSNGRKVANPRFLKQAQKNLKRKQQALSRTKKGSARRAKARLLVAKAYERVANARNDFQHKLSRQIVDDNQAVIVETLKVRNMMKNTCLAKHIGDASWHALMTKLDYKAREQGKHLVKIDPWFASSKTCHVCQHKMDAMPLNVRSWECPACHTQHDRDINAALNIKHQGIIELKAEGLSVSAHGGLRKSGTSSAAA

SEQ ID NO: 2470 - protein, 398 aa, unidentified
MSKFRKVYRFRMKPTKAQAHALNRMAGARRWVWNWGLARKREHYKEFGKTLAYHALAAELTVLKTKPETAWLKEADSQAMQQTLKDLDRSFVNFFDRRSRFPTFKNRKRDRARFRIPQRVKVVDGKVVIPKIGPVRIYQSQPVDEPTKSATFRRSADGKWYVSLTAEFEMPDLPLVPPCPERTVGIDLGLIDFATLSDGSEPIPAPKFFRKAQKKLRKAQRTVSRRKPGSKRKTKARIQVARIHRKTANQRNDFLHKLSTELIGKHDGLCIEDLSVKGLAKTKLAKSVNDAAWGEFRRQLEYKCLWNRKHLVVIDRWFPSSKMCNACSALNVRLTLSDREWDCDCGAHHKRDLLAACNIRDEGLRMLAAGQAESQNARRTSVRPHFEAVGVEPRIPRL

SEQ ID NO: 2471 - protein, 372 aa, unidentified
MVVVEKAYKFRMYPNKKQQELINKTFGCCRFVYNKYLAKRIDVYKNNKETFTYKQCSSDLTNLKKELNWLKEPDKFSLQNALKDLDNAYKKFFKEKAGFPKFKSKKINRFSYKTNFTNGNIMYCGQHIKLPKLGMVKIRDKQVPQGRILNATISKEPSGRYYVSLCCTDVDIEAFENTNNHIGLDLGIKEFCISSCGEFIENPKYLKKSLNKLAKLQRELSRKTIGSLNRNKARLKVARLQEHIANQRNDFLQKLSTKLIKENDIICIEDLQVKNMIKNHKLSRLISDVSWSEFIRQLEYKANWHGRQIVKVGKFFASSQICNKCGYKNEEVKNLNIREWICPSCNETHDRDINASINILKEGLRLITIQNK

SEQ ID NO: 2472 - protein, 402 aa, unidentified
MKRLQAFKFQLRLGDQQECEMRRFAGACRFVFNRALALQNENHEAGNKYIPYGKMASWLVEWKNATETQWLKDSPSQPLQQSLKDLERAYKNFFRKRAAFPRFKKRGQNDAFRYPQGVKLDQENSRIFLPKLGWMRYRNSRQVTGVVKNVTVSQSCGKWYISIQTESEVSTPVHPSASMVGLDAGVAKLATLSDGTVFEPVNSFQKNQKTLARLQRQLSRKVKFSNNWQKQKRKIQRLHSRIANIRRDYLHKVTTTVSKNHAMIVIEDLKVSNMSKSAAGTVSQPGRNVRAKSGLNRSILDQGWYEMRRQLEYKQLWSGGQVLAVPPAYTSQRCACCGHTAKENRLSQSKFRCQVCGYTANADVNGARNILAAGHAVLACGEMVQSGRSLKQEPTEMIQATA

SEQ ID NO: 2473 - protein, 416 aa, unidentified
MAIRVTRTYVGSIQNHRQVCDGLDSLGDSASKIWNVARWTADRIWDATGEIPDEGTLKAYMKNRECWKDLNAQSSQKVIEELSDAFQSWFDLRHKYGEANPPGYRKHGDTRPRSTVTFKVDGFKHDPENNRVRLSKGSNLKESWSDFILCEYQTRPDVDLSEVNKVQNVRAVWNGDEWELHFVCKVELETTDSAGDEVAGIDLGIKNIATVVFPDEYVLYPGNSLKEDKHYFTQAEYDTEGENGPSQKSMWARRKLAERETHFYHTLTDSIITECVKRGVGTLAVSWPEDVRKSDWGKTGNKKLHTWAFDRIYQYLAYKGELRGVEVLKENEWNTSKTCSACGDDTKSNRKHRGLYVCSSCGLVGNADCNGAENIRQKITPSPHSEDRSNGCVAQPSVHLFDSESGVFAPREQVVS

SEQ ID NO: 2474 - protein, 381 aa, unidentified
MLKATKVRIYPTPEQAAFLNAQFGAVRFVYNKALHIIRSQYKRHGTKLRAKKDLKPLLAVAKKSRQYHWLKGFDSMALQQACINLDRAFQNFFDPKLPARYPRFKRKHGKQSSYHCTGIKVGEGEIKIPKLGPIKARLHREITGTLKSITLTRTTTGHYYASVLVDDGEEAPKPLQTVDTVLGVDMGLTHLAIDSEGNKTTNPRFLKRARTNLRRKQKALSRCQKGSKGRAKARLKLAKAHERLANARADFQHKLSRQLIDDNQAVVVETLKVKNMLKNRKLAKHIADASWYSLIQKLAYKADAQGKHLVKIDQWFASSKTCAGCGHKVADMPLKVRTWDCSGCGTQGIDRDINAALNIRQQGILKLKAEGLSVSAQWRPA

SEQ ID NO: 2475 - protein, 369 aa, unidentified
MEKAYKFRMYPNKKQQELINKTFGCCRFVYNKYLAKRIEVYKNDKETFTYKQCSSDLTNLKKELNWLKEPDKFSLQNALKDLENAYEKFFKEKAGFPKFKSKKTNRFSYKTNFTNGNIMYCGQHIKLPKLGMVKIRDKQVPKGRILNATISKEPSGRYYVSLCCTDVDIEAFENTNNQIGLDLGIKEFCISSCGEFIENPKYLKKSLNKLAKLQRELSRKTIGSLNRNKARLKVARLQEHIANQRNDFLQKLSTKLIKENDIICIEDLQVKNMIRNHKLSRLISDVSWSEFIRQLEYKANWYGRQIVKVGKFFASSQICNKCGYKNEEVKDLNIRDWICPSCNETHDRDINASINILKEGLRLITIQNK

SEQ ID NO: 2476 - protein, 389 aa, unidentified
MLKAIKVRIYPTPEQAEFLNRQFGATRFVYNKALHIISSQYRRHGRKLRAKQDLKPLLAVAKKSRKYHWLRDFDSIALQQACINLDKAFQNFFDPKHPAHYPKFKRKHGKQSSYHCTSVSAGENWIKVPKMEPIKARIHRELTGNLKSITLSRTVTGKYYASLLFEDGVEAPSPLKTVDAVLGVDMGLTHLLIDSEGNKIANPRFLKRAAANLRRKQKALSRCQKGSKGRAQARLKLAKAYERLANARADFQHKLSRQLIDENQAVVVETLKVKNLLKNKKLAKNIADASWFSLIQKLEYKAKAQGKYLVKIDQWFASSKTCSCCAHKVDSLPLKVRNWSCPVCHTEHDRDINAAINIRQQGVIKLRAEGLSVPANGGLRKPGHAPAAA

SEQ ID NO: 2477 - protein, 372 aa, unidentified
MIAVKKAYKFRMYPNKKQQELINKTFGCCRFVYNKYLAKRIDVYKNNKETFTYKQCSSDLTNLKKELKWLKEPDKFSLQNALKDLDNAYKKFFKEKAGFPKFKSKKINRFSYKTNFTNGNIMYCGQHIKLPKLGMVKVRDKQVPQGRILNATISKEPSGRYYVSLCCTDVDIEAFENTNNHIGLDLGIKEFCISSCGEFIENPKYLKKSLNKLAKLQRELSRKTIGSLNRNKARLKVARLQEHIANQRNDFLQKLSTKLIKENDIICIEDLQVKNMIRNRKLSRLISDVSWSEFIRQLEYKANWHGRQIVKVGKFFASSQICNKCGYKNEEVKDLNIREWICPSCNETHDRDINASINILKEGLRLITIQNK

SEQ ID NO: 2478 - protein, 372 aa, unidentified
MAVVEKAYKFRMYPNKKQQELINKTFGCCRFVYNKYLAKRIEVYKNDKETFTYKQCSSDLTNLKKELKWLKEPDKFSLQNALKDLDNAYKKFFKEKAGFPKFKSKKINRFSYKTNFTNGNIMYCGQHIKLPKLGMIKVRDKQVPKGRILNATISKEPSGRYYVSLCCTDVDIKAFENTNNQIGLDLGIKEFCISSCGDFIENPKYLKKSLSKLAKLQRELSRKTIGSLNRNKARLKVARLQEHIANQRNDFLQKLSTKLIKENDIICIEDLQVKNMIRNRKLSRLISDVSWSEFIRQLEYKANWYGRQIVKVGKFFASSQICNKCGYKNEEVKNLNIREWICPSCNETHDRDINASINILKEGLRLITIQNK

SEQ ID NO: 2479 - protein, 374 aa, unidentified
MIVYKAYRFRIYPNQKQKILINKTFGCARFVFNHFLAKWNNAYKETGKGLSYQSCSAQLTKLKKEYTWLKEVDSIALQTSLKHLSDAYTRFFQKQNDRPRFKSKKNKVQSYTTKYTNGNIAIVGNKIKLPKLGFVRFAKSREVEGRILSTTIRRNPSGKYFVSILAETDVQPLPKTHTTVGIDMGLKHFAILSDGTKYANPIFFRKLEEKLAKAQRILSRRQRGSSNWHKQRMKVARIHESIVNARNDYLHKISTEIVKNHDIIGMEDLSVSNMLKNDKLAKAISEASWATFEAMIAYKAKWYGKQLIVVAKNFPSSQLCSCCGYQNKDVKHLALREWECPSCHTHHDRDVNASINIKNEAVRLLTAGTAGLAY

SEQ ID NO: 2480 - protein, 372 aa, unidentified
MIAVKKAYKFRMYPNKKQQELINKTFGCCRFVYNKYLAKRIDVYKNNKETFTYKQCSSDLTNLKKELKWLKEPDKFSLQNALKDLDNAYKKFFKEKAGFPKFKSKKINRFSYKTNFTNGNIMYFSQHIKLPKLGMVKIRDKQVPKGRILNATISKEPSGRYYVSLCCTDVDIEVFENTNNHIGLDLGIKEFCISSCGEFIENPKYLKKSLNKLAKLQRELSRKTIGSLNRNKARLKVARLQEHIANQRNDFLQKLSTKLIKENDIICIEDLQVKNMIRNRKLSRLISDVSWSEFIRQLEYKANWHGRQIVKVGKFFASSQICNKCGYKNEEVKDLNIREWICPSCNEIHDRDINASINILKEGLRLITIQNK

SEQ ID NO: 2481 - protein, 372 aa, unidentified
MVVVEKAYKFRMYPNKKQQELIKKTFGCCRFVYNKYLAKRIEVYKNDKETFTYKQCSSDLTNLKKELKWLKEPDKFSLQNALKDLDNAYEKFFKKKAGFPKFKSKKINRFSYKTNFTNGNIMYFSQHIKLPKLGMVKIRDKQVPQGRILNATISKEPSGRYYVSLCCTDVDIEAFENTNNQIGLDLGIKEFCISSCGDFIENPKYLKKSLNKLAKLQRELSRKTIGSLNRNKARLKVARLQEHIANQRNDFLQKLSTKLIKENDIICIEDLQVKNMIRNRKLSRLISDVSWSEFIRQLEYKANWYGRQIVKVGKFFASSQICNKCGYKNEEVKNLNIREWICPSCNETHDRDINASINILKEGLRLITIQNK

SEQ ID NO: 2482 - protein, 372 aa, unidentified
MIAVKKAYKFRMYPNKKQQELINKTFGCCRFVYNKYLAKRIDVYKNNKETFTYKQCSSDLTNLKKELKWLKEPDKFSLQNALKDLDNAYEKFFKKKAGFPKFKSKKINRFSYKTNFTNGNIMYFSQHIKLPKLGMVKIRDKQVPKGRILNATISKEPSGRYYVSLCCTDVDIEAFENTNNHIGLDLGIKEFCISSCGEFIENPKYLKKSLNKLAKLQRELSRKTIGSLNRNKARLKVARLQEHIANQRNDFLQKLSTKLIKENDIICIEDLQVKNMIRNRKLSRLISDVSWSEFIRQLEYKANWYGRQIVKVGKFFASSQICNKCGYKNEEVKDLNIREWICPSCNETHDRDINASINILKEGLRLITIQNK

SEQ ID NO: 2483 - protein, 372 aa, unidentified
MVVVEKAYKFRMYPNKKQQELINKTFGCCRFVYNKYLAKRIEVYKNDKETFTYKQCSSDLTNLKKELKWLKEPDKFSLQNALKDLDNAYKKFFKEKAGFPKFKSKKINRFSYKTNFTNGNIMYCGQHIKLPKLGMVKIRDKQVPKGRILNATISKEPSGRYYVSLCCTDVDIEAFENTNNHIGLDLGIKEFCISSCGEFIENPKYLKKSLNKLAKLQRELSRKTIGSLNRNKARLKVARLQEHIANQRNDFLQKLSTKLIKENDIICIEDLQVKNMIRNRKLSRSISDVSWSEFIRQLEYKSNWYGRKIVKVGKFFASSQICNKCGYKNEEVKDLNIREWICPSCNETHDRDINASINILKEGLRLITIQNK

SEQ ID NO: 2484 - protein, 372 aa, unidentified
MIAVKKAYKFRMYPNKKQQELINKTFGCCRFVYNKYLAKRIDVYKNDKETFTYKQCSSDLTNLKKELKWLKEPDKFSLQNALKDLDNAYKKFFKEKAGFPKFKSKKINRFSYKTNFTNGNIMYFSQHIKLPKLGMVKIRDKQVPKGRILNATISKEPSGRYYVSLCCTDVDIEVFENTNNHIGLDLGIKEFCISSCGEFIENPKYLKKSLNKLAKLQRELSRKTIGSLNRNKARLKVARLQEHIANQRNDFLQKLSTKLIKENDIICIEDLQVKNMIRNRKLSRLISDVSWSEFIRQLEYKANWHGRQIVKVGKFFASSQICNKCGYKNEEVKDLNIREWICPSCNETHDRDINASINILKEGLRLITIQNK

SEQ ID NO: 2485 - protein, 372 aa, unidentified
MVVVEKAYKFRMYPNKKQQELINKTFGCCRFVYNKYLAKRIDVYKNDKETFTYKQCSSDLTNLKKELKWLKEPDKFSLQNALKDLDNAYKKFFKEKAGFPKFKSKKINRFSYKTNFTNGNIMYCGQHIKLPKLGMVKIRDKQVPQGRILNATISKEPSGRYYVSLCCTDVDIEAFENTNNHIGLDLGIKEFCISSCGEFIENPKYLKKSLNKLAKLQRELSRKTIGSLNRNKARLKVARLQEHIANQRNDFLQKLSTKLIKENDIICIEDLQVKNMIKNHKLSRLISDVSWSEFIRQLEYKANWHGRQIVKVGKFFASSQICNKCGYKNEEVKNLNIREWICPSCNETHDRDINASINILKEGLRLITTQNK

SEQ ID NO: 2486 - protein, 372 aa, unidentified
MIVVEKAYKFRMYPNKKQQELINKTFGCCRFVYNKYLAKRIEVYKNDKETFTYKQCSSDLTNLKKELKWLKEPDKFSLQNALKDLDNAYKKFFKEKAGFPKFKSKKINRFSYKTNFTNGNIMYCGQHIKLPKLGMVKVRDKQVPKGRILNATISKEPSGRYYVSLCCTDVDIEAFENTNNQIGLDLGIKEFCISSCGEFIENPKYLKKSLSKLAKLQRELSRKTIGSLNRNKARLKVARLQEHIANQRNDFLQKLSTKLIKENDIICIEDLQVKNMIRNRKLSRLISDVSWSEFIRQLKYKANWHGRQIVKVGKFFASSQICNKCGYKNEEVKDLNIREWICPSCNETHDRDINASINILKEGLRLITIQNK

SEQ ID NO: 2487 - protein, 372 aa, unidentified
MIVVEKAYKFRMYPNKKQQELINKTFGCCRFVYNKYLAKRIDVYKNDKETFTYKQCSSDLTNLKKELKWLKEPDKFSLQNALKDLDNAYKKFFKEKARFPKFKSKKINRFSYKTNFTNGNIMYCGQHIKLPKLGMVKIRDKQVPKGRILNATISKEPSGRYYVSLCCTDVDIKAFENTNNQIGLDLGIKEFCISSCGDFIENPKYLKKSLSKLAKLQRELSRKTIGSLNRNKARLKVARLQEHIANQRNDFLQKLSTKLIKENDIICIEDLQVKNMIRNRKLSRLISDVSWSEFIRQLEYKANWYGRQIVKVGKFFASSQICNKCGYKNEEVKNLNIREWICPSCNETHDRDINASINILKEGLRLITIQNK

SEQ ID NO: 2488 - protein, 372 aa, unidentified
MIVVEKAYKFRMYPNKKQQELINKTFGCCRFVYNKYLAKRIDVYKNDKETFTYKQCSSDLTNLKKELKWLKEPDKFSLQNALKDLDNAYKKFFKEKARFPKFKSKKINRFSYKTNFTNGNIMYCGQHIKLPKLGMVKIRDKQVPKGRILNATISKEPSGRYYVSLCCTDVDIKAFENTNNQIGLDLGIKEFCISSCGDFIENPKYLKKSLSKLAKLQRELSRKTIGSLNRNKARLKVARLQEHIANQRNDFLQKLSTKLIKENDIICIEDLQVKNMIRNRKLSRLISDVSWSEFIRQLEYKANWYGRQIVKVGKFFASSQICNKCGYKNEEVKDLNIREWICPSCNETHDRDINASINILKEGLRLITIQNK

SEQ ID NO: 2489 - protein, 372 aa, unidentified
MIVVEKAYKFRMYPNKKQQELINKTFGCCRFVYNKYLAKRIEVYKNDKETFTYKQCSSDLTNLKKELKWLKEPDKFSLQNALKDLDNAYKKFFKEKAGFPKFKSKKINRFSYKTNFTNGNIMYFSQHIKLPKLGMVKIRDKQVPKGRILNATISKEPSGRYYVSLCCTDVDIEVFENTNNHIGLDLGIKEFCISSCGEFIENPKYLKKSLNKLAKLQRELSRKTIGSLNRNKARLKVARLQEHIANQRNDFLQKLSTKLIKENDIICIEDLQVKNMIRNRKLSRLISDVSWSEFIRQLEYKANWHGRQIVKVGKFFASSQICNKCGYKNEEVKDLNIREWICPSCNETHDRDINASINILKEGLRLITIQNK

SEQ ID NO: 2490 - protein, 372 aa, unidentified
MIAVKKAYKFRMYPNKKQQELINKTFGCCRFVYNKYLAKRIDVYKNDKETFTYKQCSSDLTNLKKELKWLKEPDKFSLQNALKDLDNAYKKFFKEKAGFPKFKSKKINRFSYKTNFTNGNIMYCGQHIKLPKLGMVKIRDKQVPQGRILNATISKEPSGRYYVSLCCTDVDIEAFENTNNHIGLDLGIKEFCISSCGEFIENPKYLKKSLNKLAKLQRELSRKTIGSLNRNKARLKVARLQEHIANQRNDFLQKLSTKLIKENDIICIEDLQVKNMIRNRKLSRLISDVSWSEFIRQLEYKANWHGRQIVKVGKFFASSQICNKCRYKNEEVKNLNIREWICPSCNETHDRDINASINILKEGLRLITIQNK

SEQ ID NO: 2491 - protein, 314 aa, unidentified
MRTAYKVRIYPTPEQAAVLNRTFGCVRLVWNIVLAWRQARYHAEGATTSYARTDRYLTELKRDGGHGFLYEVSSVPLQQALRHQHTAFANFFAGRARSPRYKSRHGRQSATYTRSAFRWRDGRLWLAKMNDPIAFAWFWPEVDPATINPTTVTVSRDSDGRWYASLAVETATGPEPVPATGGQVGIDLGVTHFAVLSTGDKISNPRHLERKARNLARYQRRMARKQRGSSWYPSSKTCSACGHLLAALSLSTRHWTCPGCGTRHDRDVNAAKNILAAGRAVSACGADVSPQGPSLRRSAVKQETKPVRDGLPRP

SEQ ID NO: 2492 - protein, 504 aa, unidentified
MKVKRTLRIRISAKRRPRVKRFVLDLAQFRNLFLIFQDRYHKLFGQFILNESVIYSLLADKTKNKSPEQEEALREVSVRVMEDPELKALVGRMKEQKAKLDNNYVLQTAIRQVIKDYRGFLNSITEYRTSPAKFKEQPRPPRPKKLKTIAQVTAEFNSNAFEATSRALVLRLRVKGDEKIKIKLPAGIENVSSVRLTYHLSDAWVDVVYERELEAPEGELCYLAGIDLGLDNLVSLISTNPRVRSLIVSGKEIKSFNRWFNKKAAELRSAIDTLNNKVAEEKDEARKKSMLEELSELRLYFHNLCNYRRRWIETQFHRIARILADFLYETGHKKVYIGSGATTSKDGINLGRVTNQNLMGIPFRRFISILKYKLEELGVQAEEKDEPYTSKASSLSDDILEIQKKYAEAKEKQENVTIKCSGKRIERGLYRDDALNKVFNADLNGALNILKVGAQLREVPLNFKVLLYKLSTPLKFTLYEFIYGFKSKAESLLGIGNSRLATAG

SEQ ID NO: 2493 - protein, 402 aa, unidentified
MRNLLKAFKTELRLTERQKDKVRRSLGICRFLANQYIARNIWLYRLYQRGVLDEKQRRFVTANDFDKYVNHILKKKFPWIDQCGSKARKKVLVNAEQAFRRFFKGQAHFPRFKRKNQQNVKLYFPKNNKGDWTIWRHKIQIPTIGKVRLKEFGYLPQSVTIKNGHVSYEAGRYYVSVTAEIEETSRYNNDLEASYRPQSDGIGVDLGVKSLAIVSDGRIFENINTSSRARRLEKRLRREQRRLSRKYEMRKKKGGSTATASANIEKKRLSVQRLHQRLANLRRNHENRVIHALVEQKPRFITVEDLNVTGMMKNRHLSKVVAQQRFYSLREKLRRKAEVIGIEFRIADRFYPSSKTCHACGQVHSGLKLKDRVYVCPSCGYTEDRDLNAALNLRDTKNYRIT

SEQ ID NO: 2494 - protein, 402 aa, unidentified
MKRLLRSFKTELRLTESQKDKIRRSLGICRFLANQYIARNIWLYRLYQRGVLDEKQRHFVTANNFDKYVNHVLKKKFPWIDQCGSKARKKVLVNAEQAFKRFFKGQAHFPRFKRKNQQNVKLYFPKNNKGDWTIWRHKIQVPTIGKVRLKELGYLPQGVTIKNGHVSYEAGRYYVSVTAEIEETSRYNNDLEASYHPQTDGIGVDLGVKSLAIVSDGRIFENINMSSRARRLEKRLRREQRRLSCKYEMRKKKGGSTATASANIEKKKLSVQRLHQRLANLRRNHENQVIHALVEQKPRFITVEDLNVTGMMKNRHLSKAVSEQRFYSFREKLRRKAEIIGIEFRIADRFYPSSKTCHACGHVHSGLKLKDRTYVCPACGYKEDRDLNAALNLRDTKDYRIA

SEQ ID NO: 2495 - protein, 416 aa, unidentified
MAVEATRTYVGSIQNQQQVCDGLDSLGDSASKIWNVARWTADRIWDEVGEIPDEGTLKAYMKNQSCWKDLNAQSSQKVIEELSDAFQSWFDLRHKFDEANPPGYRKHGDTRPKSTVTFKADGFKHDPEHDRVRLSKGKNLKEHWSDFLLCEYQTRPDVDLSEVNKVQNVRAVWNGDEWELHFVCKVELETNDSAGNEVAGIDLGIKNIATVAFPDEYILHPGNSLKQDKHYFTRAEYDTEGENGPSEKSMRARRKLTDRETHFYHTLTDTIITECVERGVGTLAVSWPEDVRESDWGKTGNKKLHSWAFDRIYQYLAYKGEMRGVEVLKENEWDTSKTCSRCGDDTRSNRVERGLYVCSSCGLVGNADCNGAENMRQKITPSPHGENRSNGCVAQPSVHLFDRESGTFRTREQVVS

SEQ ID NO: 2496 - protein, 402 aa, unidentified
MRNLLKAFKTELRLTERQKDKVRRSLGICRFLANQYIARNIWLYRLYQRGVLDEKQRRFVTANDFDKYVNHVLKKKFPWIDQCGSKARKKILINAEQAFRRFFKGQAHFPRFKRKNQQNVKLYFPKNNKGDWTIWRHKIQIPTIGKVRLKEFGYLPQSVTIKNGHVSYEAGRYYVSVTAEIEETSRYNNDLEASYHPQSDGIGVDLGVKSLAIVSDGRIFENINTSSRARRLEKRLRREQRRLSRKYEMRKRKGGSTATASANIEKKKLSVQKLHKRLVNLRRNHENQVIHALVEQKPRFITVEYLNVTGMMKNRHLSKAVAQQRFYSFREKLRRKAEIIGIEVRIADRFYPSSKTCHACGHVHSGLKLKDRTYVCPACGYKKDRDFNAALNLRDTKNYRIA

SEQ ID NO: 2497 - protein, 379 aa, unidentified
MFVHKAYKFRIYPTKEQEILITKTFGCARFVFNYFLAEWERAYRTTGKGLTYKVCSSQLTSLKKQFVWLKEVDSIALQTSLKHLSDAYTRFFQKQNNKPRFKSKKNKVQSYTTKYTNGNIAVVGNRIKLPKLGLVRFAKSREVEGRILSATIRRNASGKYFVSILVETEVQPLPKTNRAVGIDLGVKHFAILSDGTTYANPTYLRKLEEKLAKAQRILSRRQIGSSNWHKQRIKFARLHEKMTNSRNDYLHKLSTEIVKNHDIIGIEDLQVSNMMKNHNLAKAIADVSWSTFTNMLMYKAKWYGKQVVVVAKNFPSSQLCSHCGYKNKDVKHLYLREWECPSCGTHHDRDVNASINLKNEAIRLLTAGTAGLACSFSLH

SEQ ID NO: 2498 - protein, 379 aa, unidentified
MFVHKAYKFRIYPTKEQEILIAKTFGCARFVFNHFLAEWERAYRTTGKGLTYKVCSSQLTNLKKQFVWLKEVDSIALQTSLKHLSDAYTRFFQKQNNKPRFKSKKNKVQSYTTKYTNGNIAIVGHRIKLPKLGFVRFAKSREVEGRILSATIRRNASGKYFVSILVETEVQPLPKTNRAVGIDLGVKHFAILSDGTTYANPTYLRKLEEKLAKAQRILSRRQIGSSNWHKQRIKVARLHEKVTNSRNDYLHKLSTEIVKNHDIIGIEDLQVSNMMKNHNLAKAIADVSWSTFTDMLMYKATWYGKQVVVVAKNFPSSQLCSHCGYKNKDVKHLHLREWECPSCGTHHDRDVNASINLKNEAIRLLTAGTAGLACSFSLH

SEQ ID NO: 2499 - protein, 312 aa, unidentified
MATHVKRAYRYRFYPTGAQAVELSRTFGCVRKVYNMALAARTEAWTLRQERVSYNATSAMLTAWRKTGELAFLNDVSSVPLQQALRHLRAAFTAFFAQRSKYPLFTSRKRSRKSAEYTSSAFRFREGKLTLAKMDQPLDVARVYARIADRRRDHLHKLTTRLVRENQTLVIEDLAVRNMLSNGKLSRAISDAAWSQFRSMPEYKAAWYGREVIAVDRWFPSSKLCSVCGTLQGKMPLGVRTWTCDCGTTHDRDVNAARNPLAAGLAVSACGAGVRPQRESSRTGQSVTKQEALRREPQESPSFRLREGGSQR

SEQ ID NO: 2500 - protein, 389 aa, unidentified
MLRATKVRIYPTPEQAEFLNRQFGATRFVYNKTLHVISAQYKRHGLKLKAKKDIKPLLAVAKKSRKYHWLKEFDSIALQQACINLDKAFQNFFDPKHSARYPKFKRKHGKQSSYHCTSISAGDNWIKVPKMEPINARVHRALKGKLKSITLSRTVTGKYYASLLLDDGVETPAPMKTVDTVLGLDMGLTHLAIDSEGRKIANPRFLKRAAANLRRKQKALSRCQKGSKGRAQAHLKLAKAHEHLANARADYQHNLSRQLIDENQAVAVETLKVKNLLKNRKLAKHIADASWFSLIQKLEYKAKAQGKHLVKIDQWFASTKTCSGCGHKMASLSLSVRHWTCPACKAELDRDVNAALNIRQQGIIKLRAEGLSVPANGGLRKSSHAPVAA

SEQ ID NO: 2501 - protein, 389 aa, unidentified
MLRATKVRIYPTPEQAEFLNRQFGATRFVYNKALHVISVQYKRHGLKLKAKKDIKPLLAVAKKSRKYHWLKEFDSIALQQACINLDKAFQNFFDPKHSARYPKFKRKHGKQSSYHCTSISAEDNWIKVPKMEPIKARVHRALEGKLKSITLSRTVTGKYYASLLLDDGVETPAPMKTVDTVLGLDMGLTHLAIDSEGRKIANPCFLKRTAANLRRKQKALSRCQKGSKGRAQARLKLAKAHEHLANARADYQHNLSRQLIDENQAVAVETLKVKNLLKNRKLAKHIADASWFSLIQKLEYKAKAQGKHLVRIDQWFASTKTCSGCGHKMASLSLSVRHWTCPACKAVLDRDVNAAINIRQQGIIKLRAEGLSVPANGGLRKSSHAPVAA

SEQ ID NO: 2502 - protein, 387 aa, unidentified
MLSATKVRIYPTPEQAEFLNRQFGATRFVYNKALHVISAQHKRHGLKLKAKKDIKPLLAVAKKSRKYHWLKEFDSIALQQACINLDKAFQNFFDPKHSACYPKFKRKHGKQSSYHCTSISAGDSWIKVPKMEPIKARVHRALEGKLKSITLSRTVTGKYHASLLLDDGVETPAPMKTVDTVLGLDMGLTHLAIDSEGRKIANPCFLKRAAANLRRKQKALSRCQKSSKGRAQARLKLAKAHEHLANARADYQHNLSRQLIDENQAVAVETLKVKNLLKNRKLAKHIADASWCSLIQKLEYKAQGKHLVKIDQWFASSKTCSGCDHKMASLSLSVRHWTCPACKAELDRDVNAAINIRQQGIIKLRAEGLSVPANGGLRKSSHAPVAA

SEQ ID NO: 2503 - protein, 403 aa, unidentified
MQKAFKVTLTPNHSQEVLINKSIGCARFVYNHFLALRQQLYLTEQKTLNYNACSQQLTLLKKEVEWLQEVDKFALQNSLRNLETAYKNFFADLKKAKGKRNVGFPKFKKKHGCKQSYKTNLTNGNIQVIQNGLKLPKMGWVKFHKSQDITGTIINVTVTRTNRGKYIASILCETEIEKYPQVAQNIGLDLGIKSYLVASNGEVVDNPKYYRTQKRKLRKAHKKLSRTVKGSSNRVKAKIKLALTYERITNLRDDFLHKLSTRLIRENSIICLEDLRVANMVRNHKLALSISDASWTKFITMLEYKSVWHDRVVQKVGTFYPSSQTCNHCGFINPLVKDLKLREWSCPSCNSYNLRDKNAALNILGEGLRLLTAVGTPEVIKNACGEFVSPEVIQAEIVEAGIA

SEQ ID NO: 2504 - protein, 389 aa, unidentified
MSYVQKAFKVTLIPTHNQEVLINKTIGCARFVYNRFLALRKNLYSTEKKALNYNACSQHLTLLKKEIEWLKEVDKFALQNSLKNLETAYKNFFADLKKVEGKKSVGFPKFKKKYGCKQSYKTNFTNGNIQVIENRLKLPKLGWVKFYKSQSITGKLINVTVTRTTSGKYIASILCETEIEKHPRVTQNIGLDLGIKSYLVTSDGEVVDNPKYYRTQKRKLRKAHKKLSRSVKGSSNRVKAKIKLARTYERITNLRDDFLHKLSTRLIKENSIICIEDLRVANMVKNHKLALSISDASWSKFVAMLEYKALWHDRMVQKVGTFYPSSQTCNHCGFINPLLKDLKLREWSCPNCSSDNLRDNNAALNILGEGLRLMSQCGGRVPQNKAPIA

SEQ ID NO: 2505 - protein, 373 aa, unidentified
MIVNKAYKFRIYPNKQQEVLINKTFGCCRFVFNHFLAKWNDAYKETGKGLSYNTCSSQLTQLKKEFTWLKEVDSIAIQTSLKHLADAFTRFFKGQNKSPRFKTKKNPIQSYTTKYTNGNIKIENNRIKLPKLGWIRFAKSREVEGRIINVTIRRNASGKYFISVLTETEIKPLSKTDSAIGIDVGLKHFAILSNGEVFENPKWLRKLERKLIREQRKLSRRKIGGSNWNKQRIKVARIHEKIVNARKDYLHKLSTYIVKNHDIIGVEDLSVKNMLKNHKLAKSISEVSWSEFISMLEYKCKWYGKQLVKVAKNFPSSQLCSSCGYQNKNVKNLNLREWVCPNCGTHHDRDLNASINLRNEALRLTAGTAGIAY

SEQ ID NO: 2506 - protein, 373 aa, unidentified
MMVNKAYKFRIYPNKEQEILINKTFGCCRFVFNHFLAKWNDAYKETGKGLTYNACSSQLTQIKKELVWLKEVDSIAIQSSLKNLADAYSRFFKKQNDAPRFKSKKNKVQSYTTKYTNGNIAIIDNKIKLPKLGLVKFAKSREVEGRILSATVRRNPTGKYFVSILTETEVQELPKTDSAVGIDVGLKDFAILSDGITYTNPKWFRKLEDKLAKAQRILSRRKKGGSNWNKQRIKVARIHEKITNTRNDYLHKISTEIIKNHDAIGIEDLQVSNMLKNHKLAKAISEVSWSQFRTMLEYKAKWYGKQVVTVAKNFASSQLCSCCGYQNKDVKNLALREWECPNCHTHHDRDINASINIKNEAIRLLTVGTTGIA

SEQ ID NO: 2507 - protein, 384 aa, unidentified
MMVNKAYKFRIYPNKEQEILINKTFGCSRFVFNHFLVKWNNAYKETGKGLTYNSCSSQLTQLKKELTWLKEVDSIAIQSSLKNLADAYSRFFKKQNDRPRFKSKKNPVQSYTTKYTNDNIAIDDNKIKLPKLGWIRFAKSREVEGRILNATIRRNPSGKYFVSILVETEVQELPKTDSAVGIDVGLKEFAILSDGTIYSNPKFFRRLEEKLAKAQRILSRRKKGGSNWNKQRIKVARIHEKITNARNDYLHKISTGIVKNHDIIGMEDLSVSHMLKNHNLAKVIQEVSWSTFKAMIEYKARWYGKQVVTVAKNFPSSQLCSCCGYQNKDVKHLALREWECPVCHTHHDRDVNASINIKNEAIRLLNRRNCGDRLLNNRKNFRCS

SEQ ID NO: 2508 - protein, 416 aa, unidentified
MAIKATRTYVGSIQNHQQVCDGLDSLGDSASKIWNVARWTADRIWDATGEIPNGSVLKSYMKNQSCWKDLNAQSSQKVIEELSDAFQSWFDLRHNSSEANPPGYRKHGDTRPKSTVTFKEDGFKHDPENNRVRLSKGSNLKEHFSDFLLCEYQTRPDVNLSEVNSVQNIRAVWTGESWELHFVCKVELETADAAGDDVAGIDLGITNIATVAFPDEYVLYPGNSLKEDKQYFTRAEYDTEGENGPSEKSMWARRKLSERETHFYHTLTDAIITECVERGVGTLAVSWPEDVRASDWGKTGNKKLHSWAFDRIYQYLEYKGEMRGVEVLKENEWNTSKTCSRCGDDTKSNRVERGLYVCSSCELVANADCNGAENMRQKITPSPHGEDRSNGCVAQPSTHLFDRESGTFHTREQVVS

SEQ ID NO: 2509 - protein, 416 aa, unidentified
MAIKATRTYIGSIQNHQQVCDGLDSLGDSASKIWNVARWTADRIWDATGEIPDSGALKSYMKNQPCWKDLNAQSSQKVIEELSDAFQSWFDLRHKFEEANPPGYRKHGDTRPRSTVTFKEDGFKHDPDNNRVRLSKGSNLKEHFSDFLLCEYQARPDVDLSEVNSVQNVRAVWTGERWELHFVCNVELESADTAGDGVAGIDLGITNIATIAFPDEYVLYPGNSLKEDKHYFTRAEYDTKGEDGPSEQSMWARRKLSERETHFYHTLADAIITECVERGVGTLAVSWSKDVRESDWGKTGNKKLHSWAFDRIYQYLEYKGEMHGVEVLKENEWNTSKTCSRCGDDTKSNRVERGLYVCSSCELVANADCNGAENMRQKITPSPHGEDRSNGCVAQPSTYLFDRESGTFKTREQVVS

SEQ ID NO: 2510 - protein, 416 aa, unidentified
MAIKAIRTYVGSIQNHQQVCDGLDSLGDSASKIWNVARWTADRIWDATGEIPNGSVLKSYMKNQSCWKDLNAQSSQKVIEELSDAFQSWFDLRHNSSEANPPGYRKHGDSRPRSTVTFKEDGFKHDPENNRVRLSKGSNLKEHFSDFLLCEYQTRPDVDLSEVNRVQNVRAVRNGDEWKLHFVCKIELETAESTGDGVAGIDLGITNLATVAFPDEYVLYPGNSLKEDKHYFTRAEYDTEGENGPSAQSMWARRKLSERETHFYHTLTDAIITECVERGVGTLAVSWPEDVRESDWGKTGNKKLHSWAFDRIYQYLEYKGEMRGVAVLKENEWNTSKTCSRCGDDTKSNRVERGLYVCSSCELVANADCNGAENMRQKITPSPHGEDRSNGCVAQPSTHLFDRESGTFHTREQVVS

SEQ ID NO: 2511 - protein, 416 aa, unidentified
MAIKATRTYVGSIQNHQQVCDGLDSLGDSASKLWNVARWTADRIWDATGEIPNGSVLKSYMKNQSCWKDLNAQSSQKVIEELSDAFQSWFDLRHNSSEANPPGYRKHGDTRPKSTVTFKEDGFKHDSENNRVRLSKGSNLKEHFSDFLLCEYQTRPDVNLSEVNSVQNIRAVWTGESWELHFVCKVELETADAAGDDVAGIDLGITNIATVAFPDEYVLYPGNSLKEDKQYFTRAEYDTEGENGPSEKSMWARRKLSDRETHYYHTLTDAIITECVDRGVGTLAVSWPEDVRESDWGKTGNKKLHTWPFDRIYQYLEYKGEMRGVEVLKENEWNTSKTCSRCGDDTKSNRVERGLYVCSSCELVANADCNGAENMRQKITPSPHGEDRSNGCVAQPSTHLFDRESGTFHTREQVVS

SEQ ID NO: 2512 - protein, 361 aa, unidentified
MHRAYKFRLYPNKEQATLINKTIGCTRFVFNHFLAKRKDAYEQEKKTLNYNDCSAMLTQLKKEMKWLKEVDSTALQSTLKDLDSSYKKFFKEKKGYPKFKSKKNPKQSYACKMNIKVEGDRIKLPKLGWVTFAKSREVEGRILSATVRKNPSGKYFVSVLCETEIQPLLQTEKTVGVDLGIKDFAILSTGEKIANPKALRYYEKKLATWQQKLSRRKKGGQNREKSRKQVARLHERISNTRNDFLHKLSTQLIRENQTICLEDLRVENMIKNHKLAKSIADASWSAFRTMLEYKAAWYGRTISVVGKQFPSSQLCSGCGYQNKEVKNLNLRNWTCPNCGVQHDRDKNAAINIEQEGLRLLA

SEQ ID NO: 2513 - protein, 361 aa, unidentified
MHRAYKFRLYPNREQATLINKTIGCTRFVFNHFLAKRKDAYEQEQKTLNYNDCSALLTQLKKEIEWLKEVDSTALQSTLKDLDSSYKKFFKEKKGYPKFKSKKNPKQSYTCKMNIKVEGDRIKLPKLGWVTFAKSREVEGRILSATVRKNPSGTYFVSVLCETEIQPLLQAEKTVGVDLGIKDFAILSTGEKIANPKVLRYYEKKLATWQQKLSRRKKGGQNREKSRKQVARLHERISNTRNDFLHKLSTQLIRENQTICLEDLRVENMIKNHKLAKSIADASWSAFRTMLEYKAAWYGRTISIVGKQFPSSQLCSGCGYQNKEVKNLNLRNWTCPNCGVQHDRDKNAAINIEQEGLRLLA

SEQ ID NO: 2514 - protein, 589 aa, unidentified
MLHEKKGPGSDFLGWVDWPIRYDKDEFARIKQAAEKIRNHSDALVVIGIGGSYLGARAAVEALSHAFHNQMNDMTQIYFAGQNISSTYLSHLLDVLEGKDLSINVISKSGTTTEPAIAFRIFRDYMEKKYGKEEARKRIYVTTDRAKGALKKLADQEGYETFVIPDDIGGRYSVLTAVGLLPIAVAGLNIDRMMEGAASAYYKYNHPDLSTNESYQYAAVRNILYRKGKAIELLVNYEPSLHYVSEWWKQLFGESEGKDQKGLFPASVDFTTDLHSMGQYVQEGRRILIETVLQVKKPRIELTIQEDPENIDGLNFLAGKTLDEVNKKAFQGTLFAHVDGGVPNLIVELDEMNEYTFGEMVYFFEKACGISGHLLGVNPFDQPGVEAYKNNIRVAIDPGEIHTIAAVCENGENLIITGRKIRSIHRLRNKKLKELQKLMSRCKKGSKQWKKYNRAKQYVLSKSEAQLKDALHKTTRQFVRWCLENQVKEVVIGDVEGVQRNTKKKRNKKTNQKLSNWSFGKLFDYLKYKLNAEGIEMEKKDESYTSQTCPVCGKRSMGSTLCPPPRDENLASVLHFHGKDPWAMVCPPL

SEQ ID NO: 2515 - protein, 389 aa, unidentified
MLKATKVRIYPTPKQAEFLNRQFGAVRFTYNKALHIISSQYKRHGLKLKAKKDLKPLLAVAKKSRKYHWLGDFDSIALQQACINLDKAFQAFFDPKLPARYPKFKRKHGKQSSYHCMSVSAGDNWIKVPKMKPIKARVHRELDGKLKSITLSRTVTGKYYASLLIEDGVEAPVPMQTVDTVLGVDMGLTHLAIDSEGNKIANPRFLKRAAANLRRKQKALSRCQKGSKGRAKARLKLAKAHERLANARADFQHNLSRQLIDENQAVVVETLKVKNLLKNRKLAKHIADASWFGLIQKLEYKAKAQGKYLVKIDQWFASSKTCSCCGHKVDSLPLSVRNWTCPACAAELDRDINAAINIRQQGIIKLRAEGLSAPANGGLRKSGHAPVAA

SEQ ID NO: 2516 - protein, 416 aa, unidentified
MAIKATRTYVGSIQNHQQVCDGLDSLGDSASKIWNVARWTADRIWDATGEIPNGSVLKSYMKNQSCWKDLNAQSSQKVIEELSDAFQSWFDLRQKDQKVNPPGYRKHGDTRPRSTVTFKEDGFKHDPDNNRVRLSKGSNLKEHFSDFLLCEYQTRPDVDLSEVNSVQNVRAVWNGDEWELHFVCKVELETVDSAGDGIAGIDLGITNIATVAFPDEYVLYPGNSLKEDKHYFTRAEYDTEGESGPSEQSRWARRKLSERETHYYHTLTDAIITECVERGVGTLAVSWPEDVRESDWGKTGNKKLHSWPFDRIYQYLEYKGEMRGVEVLKENEWNTSKTCSRCGDDTKSNRVERGLYVCSSCELVANADCNGAENMRQKITPSPHGEDRSNGCVAQPSTHLFDRESGTFHTREQVVS

SEQ ID NO: 2517 - protein, 493 aa, unidentified
MDKIKRILSIRISGKQRRERISNLLYSLAQFRNLLIIFNKRYQENYGKRILNESYLYSLISDKPYNPRKPKEDDENYQEKLKKNEEKIKNNYIIQTLIRQLIKDYKSFFKSIQRYKQNPSSFNAVPRPSKAKKLKDIPSFTAERNVNTFKIIEEKKGKYILITLTNDKKEKQYIKVKLPKNFNYDIKSAGIKFIASNVYIDIVYEKPLINEKKEKTHLAGIDLGLDNLITLFSTNKGLKTVIISGKEIKSINQWYNKEKAKLQSQIDNIQNQINELKKENLDITTLEQEKRMLIKKQKELSAYRNRWITDTFHKITRKVADFLNETGHKEVYIGKGATESKNGINLSTKTNQNFVNIPFRKLINQLKYKLEEYGIKPTEITEEFTSKTSPFADLNKLKEKLKQLYKGIRIKRGLYKDYVTNKVFNADAVGSYNILRKEAKPLIDEKTLMDKLARPIKVKLNQLFKVTCESLVEIAGRRTNRVHDRRTLVNNVL

SEQ ID NO: 2518 - protein, 436 aa, unidentified
MAIEVTRTYVGSIQNQRQVCDGLDSLGDSASKIWNVARWTADRIWDATGKIPDEGALKSYMKNRTCWKDLNAQSSQKVIEELSDAFQSWFDLRHKDPKANPPGYRKHGDTRPRSTVTFKADGFKHDPENNRVRLSKGSNLKESWSDFILCEYQTRPDVDLSEVNRAQNVRAVWNGNEWELHFVCKVKLETTDSAGDELAGIDLGIKNIATIAFPAEYVLFPGNSLKQDKHYFTRSEYDTEGENGPSEKSMWARQKLADRETHFYHVLTDTIITECVERGVGTLAVSWPEDVRESDWGKTGNKKLHSWAFNRIYQYLEYKGEICGVEVLKENEWDTSKTCSRCGDDTKSNRVERGLYVCSSCELVGNADCNGAENMRQKITPSPHGEDRSNGCVVVRETGGLSSSRKAQSAFRTTQPSTYLFDRESGTFHTREQVVS

SEQ ID NO: 2519 - protein, 361 aa, unidentified
MHRAYKFRLYPNREQATLINKTIGCTRFVFNHFLAKRKDAYEQEQKTLNYNDCSALLTQLKKEIEWLKEVDSTALQSTLKDLDSSYKKFYKEKKGYPKFKSKKNPKQSYTCKMNIKVEGDRIKLPKLGWVIFAKSREVEGRILSATVRKNPSGTYFVSVLCETEIQPLLQAEKTVGVDLGIKDFAILSTGEKIANPKVLRYYEKKLATWQQKLSRRKKGGQNREKSRKQVARLHERISNTRNDFLHKLSTQLIRENQTICLEDLRVENMIKNHKLAKSIADASWSAFRTMLEYKAAWYGRTISVVGKQFPSSQLCSGCGYQNKEVKNLNLRNWTCPNCGVQHDRDKNAAINIEQEGLRLLA

SEQ ID NO: 2520 - protein, 361 aa, unidentified
MHRAYKFRLYPNKEQATLINKTIGCTRFVFNHFLAKRKDAYEQEQKTLNYNDCSALLTQLKKEIEWLKEVDSTALQSTLKDLDSSYKKFYKEKKGYPKFKSKKNPKQSYTCKMNIKVEGDRIKLPKLGWVTFAKSREVEGRILSATVRKNPSGTYFVSVLCETEIQPLLQAEKTVGVDLGIKDFAILSTGEKIANPKVLRYYEKKLATWQQKLSRRKKGGQNREKSRKQVARLHERISNTRNDFLHKLSTQLIRENQTICLEDLRVENMIKNHKLAKSIADASWSAFRTMLEYKAAWYGRTISIMGKQFPSSQLCSGCGYQNKEVKNLNLRNWTCPNCGVQHDRDKNAAINIEQEGLRLLA

SEQ ID NO: 2521 - protein, 361 aa, unidentified
MHRAYKFRLYPNREQATLINKTIGCTRFVFNHFLAKRKDAYEQEQKTLNYNDCSALLTQLKKEIEWLKEVDSTALQSTLKDLDSSYKKFYKEKKGYPKFKSKKNPKQSYTCKMNIKVEGDRIKLPKLGWVTFAKSREVEGRILSATVRKNPSGKYFVSVLCETEIQPLLQAEKTVGVDLGIKDFAILSTGEKIANPKALRYYEKKLATWQQKLSRRKKGGQNREKSRKQVARLHERISNTRNDFLHKLSTQLIRENQTICLEDLRVENMIKNHKLAKSIADASWSAFRTMLEYKAAWYGRTISVVGKQFPSSQLCSGCGYQNKEVKNLNLRNWTCPNCGVQHDRDKNAAINIEQEGLRLLA

SEQ ID NO: 2522 - protein, 361 aa, unidentified
MHRAYKFRLYPNKEQATLINKTIGCTRFVFNHFLAKRKDAYEQEQKTLNYNDCSALLTQLKKEIEWLKEVDSTALQSTLKDLDSSYKKFYKEKKGYPKFKSKKNPKQSYTCKMNIKVEGDRIKLPKLGWVTFAKSREVEGRILSATVRKNPSGTYFVSVLCETEIQPLLQAEKTVGVDLGIKDFAILSTGEKIANPKVLRYYEKKLATWQQKLSRRKKGGQNREKSRKQVARLHERISNTRNDFLHKLSTQLIRENQTICLEDLRVENMIKNHKLAKSIADASWSAFRTMLEYKAAWYGRTISIVGKQFPSSQLCSGCGYQNKEVKNLNLRNWTCPNCGVQHDRDKNAAINIEQEGLRLLA

SEQ ID NO: 2523 - protein, 361 aa, unidentified
MHRAYKFRLYPNKEQATLINKTIGCTRFVFNHFLAKRKDAYEQEKKTLNYNDCSAMLTQLKKEMEWLKEVDSTALQSTLKDLDSSYKKFFKEKKGYPKFKSKKNPKQSYACKMNIKVEGDRIKLPKLGWVTFAKSREVEGRILSATVRKNPSGKYFVSVLCETEIQPLLQAEKTVGVDLGIKDFAILSTGEKIANPKVLRYYEKKLATWQQKLSRRKKGGQNREKSRKQVARLHERISNTRNDFLHKLSTQLIRENQTICLEDLRVENMIKNHKLAKSIADASWSAFRTMLEYKAAWYGRTISIVGKQFPSSQLCSGCGYQNKEVKNLNLRNWTCPNCGVQHDRDKNAAINIEQEGLRLLA

SEQ ID NO: 2524 - protein, 361 aa, unidentified
MHRAYKFRLYPNKEQATLINKTIGCTRFVFNHFLAKRKDAYEQEKKTLNYNDCSAMLTQLKKEMEWLKEVDSTALQSTLKDLDSSYKKFFKEKKGYPKFKSKKNPKQSYTCKMNIKVEGDRIKLPKLGGVTFAKSREVEGRILSATVRKNPSGTYFVSVLCETEIQPLLQAEKTVGVDLGIKDFAILSTGEKIANPKVLRYYEKKLATWQQKLSRRKKGGQNREKSRKQVARLHERISNTRNDFLHKLSTQLIRENQTICLEDLRVENMIKNHKLAKSIADASWSAFRTMLEYKAAWYGRTISIVGKQFPSSQLCSGCGYQNKEVKNLNLRNWTCPNCGVQHDRDKNAAINIEQEGLRLLA

SEQ ID NO: 2525 - protein, 389 aa, unidentified
MLKATKVRIYPTPEQAEFLNRQFGAMRFVYNKALHIISSQYKRHGLKLKAKKDLKPLLAVAKKSRKYHWLKDFDSIALQQACINLDEAFQNFFDPKLPARYPKFKRKHGKQSSYHCMSVSAGENWIKVPKMKPIKARVHRELDRKLKSVTLSRTVTGKYYASLLLEDGLQTPAPLHSVDTVLGVDMGLTHLAIDSEGNKTANPRFLKRAQSNLRRKQKALSRCRKGSKGRTKARLKLAKAHERLANARADFQHNLSRQLIDENQAVVVETLKVKNLLKNRKLAKHIADASWFGLIQKLEYKAKEQGKHLVKIDQWFASSRTCSCCGHKVDTLPLSVRNWSCPACKAELDRDINAAVNIRQQGIIKLRAEGLSVPANGGLRKSGHAPVAA

SEQ ID NO: 2526 - protein, 389 aa, unidentified
MLKATKVRIYPTPEQAEFLNRQFGATRFVYNKALHIISSQYKRHGLKLKAKKDLKPLLAVAKKSRKYHWLKDFDSIALQQACINLDEAFQNFFDPKLPARYPKFKRKHGKQSSYHCMSVSAGENWIKVPKMKPIKARVHRELDGKLKSVTLSRTVTGKYYASLLLEDGLETPAPLHSVDTVLGVDMGLTHLAIDSEGNKTANPRFLKRAQSNLRRKQKALSRCRKGSKGRTKARLKLAKAHERLANARADFQHNLSRQLIDENQAVVVETLKVKNLLKSRKLSKHIADASWFGLIQKLEYKAKEQGKHLVKIDQWFASSRTCSCCGHKVDTLPLSVRNWSCPACKAELDRDINAAVNIRQQGIIKLRAEGLSVPANGGLRKSGHAPVAA

SEQ ID NO: 2527 - protein, 503 aa, unidentified
MRTVEFKLNLNRYQQAKVDSWLAIQRWIWNQGLHLVEEFNSFSTWDKVSQTWVPCCPIPWTYYRNSVGQLIAFTRIAKKKPYRMSCPIPQVYRKPVLESPTFFGLLYYFAQKNHSDKPWFCDVPCRFVAGTLKSLADAWTAYKSGKRQRPCYKQYKDKFRTLINNNAKPIKISGKRITLPKLGKVTVKTLDRRWLKSVPIVTLKIVKEPSGYYLQLSGCFPVNKVKPTNKAVGVSLGYSHLTTDGEKVVEPPNFYHKMEKQLAQLQRQLSRQQKTCPISTYNPSSGEHFLSCPINPGKGANRAKTQRKISRLHEKIRRSRRATNHKISTYLVREYDAIAIVKPEIKRIARKPIAIVNKLGEFEHNGANHKAEFNKGLLNNSLGQLSGLIEQKASVQGRKLISVSPKDIPDELKQCAEKRREQIQWSRAVYSTNFSRRYRAWAWELTPGESTETLNQEPPQGGLFCDAGTTSNFISESIGFCGVGDIPEIIPLLQNQSEANSSY

SEQ ID NO: 2528 - protein, 393 aa, unidentified
MSAEMLKATKVRVYPTPEQAAFLNRQFGATRFVYNKALHIIRSQYRRHGTKLRAKKDLKPLLAVAKKSRKYHWLKDFDSIALQQACINLDKAFQNFFDPKLPARYPTFKRKHGKQSSYHCMSVSAGDNWIKVPKLKPIKARIHRELAGTLKSITLSRTITGKYYASLLVEDGIETPAPLQTVNTVLGVDLGLTHLAIDSEGNKTANPRFLKRAQANLRRKQKALSRCQKGSKGRAQARLKLAKAHERLANTRADFQHNLSRQLIDKNQAVVVETLKVKNLLKNRKLSKHIADASWFSLIHKLEYKAKAQGKHLVKIDQWFASSKTCSGCNHKLESMPLSVRNWTCPACLVQHDRDVNAAINIRQQGIIKLRAEGLSVPANGGLRKSGHAPVAA

SEQ ID NO: 2529 - protein, 416 aa, unidentified
MAIGVTGTYIGSIQNHRQVCDGLNSLGDSASKVWNVARWTADRIWGVTGEIPDESVLRSYMKNQACWKDLNAQSSQKVIEELSDAFQSWFDVRHEFDEANPPGYRKHGDKRPRSTVTFKEDGFKHDLENNRVRLSKGKNLKEHLSDFILCEYQTRPDVALSEVNRVQNIRAVWNGNEWELHFVCKVELETNDSTGDGVAGIDLGIKNTATVAFSDEYVLYPGNSLKQDKHYFTRAEYNTEGENGPSEKSMWARQKLADRETHFYHTLTDAIITECVERGVGTLAVSWPEDVRESDWGKTGNKKLHSWAFDRIYQYLDYKGGERGVEVLKENEWNTSKTCSRCGDDTKSNRVERGLYVCSSCELVANADCNGAENMRQKITPSPHGEDRSNGCVAQPSTYLFDRESGTFRTGEQVVS

SEQ ID NO: 2530 - protein, 416 aa, unidentified
MAIQVTRTYVGSIQNQQQVSDGLELLGDSASKIWNVARWTVDRIWNATGEIPDEGSLKSYMKNCECWNDLNAQSSQKVIEELSHAFQSWFDLRHKDDEANPPGYRKHGDTRPKSTVTFKTDGFKHDPENNRVQLSKGSNLKEHRSDFLLCEYQTRPDVDLSEVNRVQNVRAVWNGDEWELHFVCKVSLETTDSTGDGVAGIDLGITNIATVAFPDEYVLYPGNSLKQDKHYFKRAEYDTEGENGPSEKSMWARRKLAERETHFYHVLSDAIITECVERGVGTLAVSWPEDVRDSDWGKTGNKKLHTWAFDRIYQYLEYKGEERGVEVLKENEWNTSKTCSRCGDARKSNRVERGLYVCSSCELVANADCNGAENMRRKITPSPRGEDRSNGCVAQPSVHLFDRESGTFRTREQVVS

SEQ ID NO: 2531 - protein, 373 aa, unidentified
MIVNKAYKFRLYPNKEQQILINKTFGCSRFVFNHFLAKWDNAYKETGKGLTYNSCSAQLTQLKKELTWLKEVDSIAIQSSLKNLADAYSRFFKKQNDRPRFKSKKNKVQSYTTKYTNGNIAINDNKIKLPKLGWIRFVKSREVEGRILNVTIRRNPSGKYFVSILVETEVQELSKTNSAIGIDVGLKDFAILSNGTTYANPKFFRKLEEKLAKAQRILSRRTKGSSNWNKQRIKVACIHEKITNARNDYLHKISTEIIKNHDIIGIEDLQVSNMLRNHNLAKAISEVSWSQFRTMLEYKAKWYGKQVVTVAKNFPSSQLCSCCGYQNKDVKNPGLREWECPKCHTHHDRDINASLNLKNEAIRLLTVGTTGIA

SEQ ID NO: 2532 - protein, 373 aa, unidentified
MIVNKAYKFRLYPNKEQQILINKTFGCSRFVFNHFLAKWDNAYKETGKGLTYNSCSAQLTQLKKELTWLKEVDSIAIQSSLKNLADAYSRFFKKQNDRPRFKSKKNKVQSYTTKYTNGNIAINDNKIKLPKLGWIRFAKSREVEGRILNVTIRRNPSGKYFVSILVETEVQELSKTNSAIGIDVGLKDFAILSNGTTYANPKFFRKLEEKLAKAQRILSRRTKGSSNWNKQRIKVARIHEKITNARNDYLHKISTEIIKNHDIIGIEDLQVSNMLRNHNLAKAISEVSWSQFRTMLEYKAKWYGKQVVTVAKKFPSSQLCSCCGYQNKDVKNPGLREWECPKCHTHHDRDINASLNLKNEAIRLLTVGTTGIA

SEQ ID NO: 2533 - protein, 391 aa, unidentified
MLKASKVRIYPMTEQAAFLNRQFGAVRFCYNTGLRIMSHRYKRHGHSLSARHDIKKLLPVAKKSRKYGWLKEADAMALQQSCINLDQAFQRFFDPRQKVGYPRFKSKRGKQSSTHCVGVKAGDSWIKVPKLGPIKAKVHRPVDGKLKSITLSRTVTGKHYASLLYETEQAAPAPLKEVDADGVVGLDVGLSHLAIDSTGRKIANPRFLKQAQKNLKRKQQALSRTKKGSANRAKARLLVAKAHERAANARKDFQHKLSRQIIDDNQAVIVETLKVKNMMKNAKLAKHIGDASWYALTAKLDYKAKEQGKHLVKIDPWFASSKTCHVCHYKMSAMPLSVRSWACPACHTQHDRDINAALNIKHQGIVKLKAEGLSVSAHGGLRKSGMAPAAA

SEQ ID NO: 2534 - protein, 391 aa, unidentified
MLKAIKIRIYPTTEQADFLNRQFGAVRFCYNTGLRVMSHRYRRHGQSLSAKHDLKKLLPVAKKSRKYGWLKEADSMALQQACLNLDHAFQRFFDPKQKGGYPRFKSKRGKQSSYHCVGVRAGDNWIKVPKLGPIRARVHRKVEGRLKSITLTRTVTGKHYASLLFETEQAAPAPLKDIDAAKVVGLDMGLSHLAIDSAGRKFANPRFLKQAQKNLKRKQQALSRTKKGSANRSKARLLVAKAHERVANARNDLQHKLSRQIVDDNQAVIVETLKVKNMMKNDKLAKHIGDASWHALIAKLEYKAKEQGKHLVKIDQWFASSKTCHACQHKRGAMPLNVRSWECPACHTQHDRDINAARNIKQQGIIQLKAEGLSVSAHGGLRKSGTSPAAA

SEQ ID NO: 2535 - protein, 400 aa, unidentified
MAVHRKVYRFRMEPTQAQAEALLRMAGARRFVWNWGLARRKEAYAATGKGLTYNQQAAELTALKKRPEMAWLKEADSQMLQQALKDLDNAFKAFFERRAGFPQFKSKKRDRPSFRIPQRVRVEEGKVYLPKVGWVKIRQSQPIDCAIKGATFKRDTQGHWYVTLTAEFTMPDIPLPPANPERVVGIDLGLKDFAVLSDGTRIAPPKFYRKAERKLRRAQRELSRKQKGSKNREKARHRLNRVHAKVRNQRQDWLHKLTTGLVQKYDGLCIENLNLKGMAKTKLSKSVLDAAPGEFRRQLEYKAVWYRKHLVVIDRYFPSSKLCRECGTIHTALTLSDRVWTCGCGAVHDRDLNAALNIRAEGIRAIPVAVGHTETQNAWGVSVRPAHGRQETTNQESHVL

SEQ ID NO: 2536 - protein, 358 aa, unidentified
MRTAYRCRAYPTPEQAEVLNRTFGCVRLVWNKTLSERNHRYRIAGARTSYRKTDAALTEWKRSEELAFLSEVSCVPLQQTLRHQHAAFQNFLSGRSHYRRFKSRTGRQSAHYTRSAFRMRNGTVTLAKTDAPLRFTWSFGDIAAATLDPTMVIVSREPDGRWYVTFAVDVDTPAPVAPARHAVGVDLGLTDFLVTSDEVRVANPRHLTRKARNLARYQRRLARCRPGSNNRRKAKVKVAGAHRKARNARQDFLHRTSATLVRAADVIVIDRWYPSSKTCSTCGHLLAELQLSTRHWTCPGCRTRHDRDLNAAKNILAAGRAVARGDSGDACGADVRRQGPSLPQSAVKQEIRAARSSA

SEQ ID NO: 2537 - protein, 400 aa, unidentified
MRTAYKVRIYPTPEQAAVLNRTFGCVRLVWNRVLAWRHARYQADRTRTSYAQTDRYLTELKRDPEFAFLFEVSSVPLQQTLRQQYAAFMNFFAGRARYPRFKSRHGRQSATYTRSAFRWRDGRLHLAKMDAPVAFVWSWPEVDPATLNPTTVTVSRDPDGRWYASFAVETAGEPEHAPATDSSAGVDLGVKDFAVLSTGEKIANPRHLARRAKNLARYQRRMARKQRGSANRAKAKAKVARAHTKVGDARADFLHKTSTRLVTGHDVIVIEDLAVKNMVRNRSLARAISDCGWGEFRRQLEYKTAKYGRHLIVIDRWYPSSKTCSSCGHLLAGLSLGTRTWQCPSCGTRHDRDVNAAKNILAAGRAVSACGADVRQAGTSRVQLATKQETSPARVGIPLL

SEQ ID NO: 2538 - protein, 416 aa, unidentified
MAIKATRTYVGSIQNHRQVCDGLDSLGDSASKIWNVARWTTDRVWDAIGAIPDEGVLKSYMKNQACWKDLNAQSSQKVIEELSDAFQSWFDLRHKFDEANPPGYRKHGDNRPRSTVTFKEDGFKHDPKNNRVRLSKGSNLKEYWSDFLLCEYQTRPDVDLSKVKSVQNVRAVWNGDEWELHFVCKVSLETNDPAGDEVAGIDLGIKNVATVAFPDEYVLYPGNSVKQDKHYFKRAEYDTEGENGPSEKSMWARRKLTERETHFYHTLTDAIITECVERNVGTLAVSWPEDVRKSDWGTTGNKKLHSWAFDRIYQYLAYKGEIRGVEVLKENEWSTSQTCSACGDDTKSNRKHRGLYVCSSCGLVGNADCNGAENMRQKITPSPHGEDRSNGCVAQPSVHLFDSDSGVFAPREQVVS

SEQ ID NO: 2539 - protein, 390 aa, unidentified
MLKHKAYKFRIHPTKEQEILIAKTIGCSRFVFNHFLAKWEELYKTTGKGLSYGSCSKGLPLLKQEFDWLKEVDSTSVQISVKHLADAFDRFFNKQNKRPRFKSKRNPVQSYKTNIQGKNQLPEVSIVGNKLKLPKLKWVRFAHSKQITGRILNATIRRNASGKYFVSLLVEQEIHELPKTGSSVGVDVGLKNFAILSDGTIYKNDRYFRSLEKKLVREQRKLSRRQRIALNKKVKLSESRNYQKQKRKVARIHEKIANKRTDFLHKVSTEIVQNHDIIGIETLQVKNMQKNRKWSKSISDVSWSEFFRMLEYKADWYGKIVVKVSKTFASSQLCSSCGHQHKDVKHLGLREWTCPKCGIHHDRDVNAGLNLKREAERIFASSTVGTTGLA

SEQ ID NO: 2540 - protein, 416 aa, unidentified
MAIQVTRTYVGSIQNQQQVCDGLDSLGDSASKIWNVARWTADRIWDETGEIPNEGPLKSYMKNQSCWKDLNAQSSQKVIEELSDAFQSWFDLRHKDNKANPPGYRKHGDKRPRSTVTFKADGFKHDPENNRVRLSKGSNLKEHFSDFLLCEYQTRPDVDLSKINKVQNVRTVWNGEEWELHFVCKVNLETNDSAGDDVAGIDLGIKNIATVAFPDEYVLYPGNSIKQDKHYFKRAEYDTEGENGPSEKSGWARRKLADRETHFYHTLTDTIITECVERGVGTLAVSWPEDVRESDWGKTGNKKLHTWAFDRIYQYLEYKGEIRGVEVLKENERNTSKTCSKCGDDTKSNRVERGLYVCQSCGLVGNADCNGAENMRQKITPSPHGEDRSNGCVAQPSAYLFDRESGTFHTREQVVS

SEQ ID NO: 2541 - protein, 416 aa, unidentified
MAIKATRTYVGSIQNHQQVCDGLDSLGDSASKIWNVARWTADRIWDATGEIPNGSVLKSYMKNQSCWKDLNAQSSQKVIEELSDAFQSWFDLRHSSSEANPPGYRKHGDSRPRSTVTFKEDGFKHDPDNNRVRLSKGSNLKEHFSDFLLCEYQTRPDVDLSEVNSVQNVRAVWNGDEWELHFVCNVEFESADTAGDGVAGIDLGIKNIATVAFPDEYVLYPGNSLKEDKHYFTRAEYDTEGEDGPSEKSMWAGRKLSERETHYYHTLTDAIITECVERGVGTLAVSWPEGVRESDWGKTGNKKLHSWAFDRIYQHLEYKGEIRGVEVLKENEWNTSKTCSACGDDTKSNRVERGLYVCSSCELVANADCNGAENMRQKITPSPHGEDRSNGCVAQPSTYLFDRESGTFHTREQAVS

SEQ ID NO: 2542 - protein, 383 aa, unidentified
MELTDYTYKFRLYPTPEQEIKLVKHFGCVRWCYNRFLDQRVKFYMTAKEQDLKKKCLNYNDDAKILTETKKEFEWLNEVNSQSLQHALKHLDGSFNRFYKKLGGFPKFKKKHSKQSFRVPQHVKVENNKLYIVKFREGIAIKLHRPLEGEIRNATISRNKAGQYFVCIGVQKHIKKLKKTKKMVGIDLGVKDLATCSDGVVFPNINPYRTLEATRRIRAKALSRTQKDSKGREKARLALAKLDNKIANIRSNHLHQISYQIVNENQVIMMEDLNVSGMLKNRKLSKSIQDCSLSELVRQIAYKARWYKREFIQISRWFPSSKTCGNCNYVNDGLTLKDREWECPRCKKLHDRDLNAARNILRQGKNLTVGNTELADCPGVRLA

SEQ ID NO: 2543 - protein, 416 aa, unidentified
MAIQVTRTYVGSIQNHQQVCDGLDSLGDSASKIWNVARWTADRVWDEVGKIPNEGSLKSYMKNQACWKDLNAQSSQKVIEELSDAFQSWFDLRHKDSKSNPPGYRKHGDKRPRSTVTFKADGFKHDPENNRVRLSKGSNLKEYWSDFLLCEYQTRPDVDLSEVNSVQNVRAVWNGDEWELHFVCKVSLETNDSAGDKVAGIDLGTKNIATVAFPNEYALYPGNSLKQDKHYFTRAEYDTEGENGPSEKSMWARQKLADRESHFYHTLTDTIITECVERGVGTLAVSWSENVRESDWGKTGNKKLHTWAFDRIYQYLEYKGEIRGVEVLKENEWNTSKTCSACGDDTKGNRTHRGLYVCSSCGLVANADCNGAENMRQKITPSPHGEDRSNGCVAQPSTYLFDRESGTFNTREQVVS

SEQ ID NO: 2544 - protein, 379 aa, unidentified
MLVHKAYKFRIYPTKEQEILIAKTFGCARFVFNYFLAEWERAYRTTGKGLTYKVCSSQLTSLKKQFVWLKEVDSIALQTSLKHLSDAYTRFFQKQNNKPRFKSKKNKVQSYTTKYTNGNIAVVGNRIKLPKLGLVRVAKSREVEGRILSATIRRNASGKYFVSILAEVDVQPLPKTNRAVGIDLGVKHFAILSDGTTYANPKFLRKLEEKLAKAQRILSRRQIGSSNWHKQRIKVARLHEKMTNSRNDYLHKLSTEIVKNHDIIGVEDLQVANMMKNHNLAKAIADVSWSTFTNMLMYKATWYGKQVVVVAKNFPSSQLCSHCGYKNKDVKHLHLREWECPSCGTHHDRDVNASMNLKNEAIRLLTAGTAGLACSFSLR

SEQ ID NO: 2545 - protein, 393 aa, unidentified
MLKAFKTEIAPTKEQRDKIIRSIGVARFLYNQYISYNRRLYKMYRRGMLDERQKYFVTAVDFDKYVNHKLKQELPWIDQCGSKARKKALVNAEQAFRRFFAGISRFPTFKKKTNQDVKLYFPRNNKGDWKIWRHKLMIPTLKQVKLKEYGYLPVGMTATSGTVSYVAGRFYVSVVVDIDAKSKYNKDLDSCYAIQTEGIGIDLGVKDLAVVSDGRVFENINKSSKVKRLEKRLRREQRRLSRKYVGKVDTVSANIEKQKLKVQKLHQRITRIREDYENKTVHEIVKQKPRFITVEDLNVKGMMKNRHLAKAVAAQRFNHLLSKLKRKAKIIGIELREVDRFYPSSKTCHACGHVHRGLKLKDRVYICPECGYRMDRDYNASLNLRDAKEYRVV

SEQ ID NO: 2546 - protein, 372 aa, unidentified
MIVVEKAYKFRMYPNKKQQELINKTFGCCRFVYNKYLAKRIEVYKNDKETFTYKQCSSDLTNLKKELKWLKEPDKFSLQNALKDLDNAYKKFFKEKAGFPKFKSKKINRFSYKTNFTNGNIMYCGQHIKLPKLGMVKIRDKQVPKGRILNATISKEPSGRYYVSLCCTDVDIEAFKNTNNQIGLDLGIKEFCISSCGDFIENPKYLKKSLSKLAKLQRELSRKTIGSLNRNKARLKVARLQEHIANQRNDFLQKLSTKLIKENDIICIEDLQVKNMIKNHKLSRSISDVSWSEFIRQLEYKANWYGRQIVKVGKFFASSQICNKCGYKNEEVKDLNIREWICSSCNETHDRDINASINILKEGLRLITIQNK

SEQ ID NO: 2547 - protein, 372 aa, unidentified
MIAVKKAYKFRMYPNKKQQELINKTFGCCRFVYNKYLAKRIDVYKNDKETFTYKQCSSDLTNLKKELKWLKEPDKFSLQNALKDLDNAYKKFFKEKAGFPKFKSKKINRFSYKTNFTNGNIMYFSQHIKLPKLGMVKVRDKQVPKGRILNATISKEPSGRYYVSLCCTDVDIEAFENTNNHIGLDLGIKEFCISSCGEFIENPKYLKKSLNKLAKLQRELSRKTIGSLNRNKARLKVARLQEHIANQRNDFLQKLSTKLIKENDIICIEDLQVKNMIRNRKLSRLISDVSWSEFIRQLEYKANWHGRQIVKVGKFFASSQICNKCGYKNEEVKDLNIREWICPSCNETHDRDINASRNILKEGLRLITIQNK

SEQ ID NO: 2548 - protein, 401 aa, unidentified
MAVYRKVYRFRMEPTQAQGDALLRMAGARRFVWNWGLKRRKEAYAATGKGLTYCQQAAELTALKKQPETAWLKDVDAQLLQQALRDLDRAYQAFFSKRARFPRFKSKKRDEPRFRIPQRVRVEESKVYIPKVGWVRIRQSQPIDWRIKGATFKQDAEGQWYVTLTAEFEVPDVPLPPANPERVVGIDLGLSHFAVLSDGSPPIDPPRFYRKGLAKLRRAQRALSRKQKGSKNHEKARKQLARVHARIRNQRQDWLHKLTTALVRQYDGLCIEDLNLKGMARTKLSRSVQDAALGEFRRQLEYKALWHRKHLAVIDRYFPSSKLCRECGSINPTLSLSERVWTCGCGAVHDRDLNAARNIRAEGIRTIPVAVGHTETLNAWGEGVRPAHSRQSSLNQESHAL

SEQ ID NO: 2549 - protein, 293 aa, unidentified
MAVHRKVDSLRDAASPGGGRRVHRKVYRFRMEPTREQGEALERMAGARRWVWNWGLARRKEAYAATGKGLTYNQQAALLTALKQQPETAWLKEADSQLLQQALKDLDRAFKAFFEKRAGFPQFKSKKRDTPRFRIPQRVKVEGSKVYIPKVGRVKIRQSQPIDCPVKGATFKRDTQGHWYVTLTAEFEMPEVPLPPANPERVVGIDLGLKDFAVLSDGTRIAPPEFYRKAERRLRKAHKELSRKQKGGKNRDKARERLNRVHAKVRNQRQDWLHKLTTGLVQKYSTTGCASRT

SEQ ID NO: 2550 - protein, 414 aa, unidentified
MAVYRKVYRFRIEPTQAQSEALLGMAGARRFVWNWGLARRKEVYAATGKGLTYNQQAAELTALKKQLETAWLKDVDSQLLQQALKDLDRAYQAFFSKQAGFPRFKSKKRDAPRFRIPQRVRVKESEVYIPKVGWIRIRQSQPVDCSIKGATFKRDAEGQWYVSLTAEFEMPDVPLPPANPERVVGIDLGLKDFAVMSDGTRIAPPKFYRRGLSKLRRVQRQLSRKQKGSKNRDKARKRLSRVHAKVRNQRQDFLHKLTTGLVQKYDGLCIEDLNLRGMAKTKLSKSVLDAALGEFRRQLEYKTIWHCKHLAVIDRYFPSSRLCRECGSINANLTLSDRVWICECGAVHDRDLNAACNIKAEGMRHIPLVYGPSPSREGIVPVAAGHTETQNAWGEGVRPAHSRQSSLNQESHVL

SEQ ID NO: 2551 - protein, 414 aa, unidentified
MTHRKVYRFRMEPTQVQGEALERMAGARRWVWNWGLARRKEVYEATKQSLPMAQLGAELTALKKQPETAWLKAVDSQLLQQALKDLDRAYQAFFGKRARFPRFKSRKKDEPRFRIPQRVKVEDSRVYVPKVGWVRIRQNQPIDCTIKGATFKRDAEGHWYVTLTAEFEMPDVALPPANPEKVVGIDLGLKDFAVLSDGTRIAPPKFYRAGECRLKKASKALSRKQKGSKNCEKARRRLSRVHAKVRNQRQDWLHKLTTNLVTRYDGLCIEDLSLKGMARTKLSRSVMDAALGEFRRQVEYKTVWHRKHLAVIDRYFPSSRLCRECGSINANLTLSDKVWTCGCGAVHDRDLNAARNIRAEGIRTIPLVYGQSPSREGIVPVVVGHTNTQNACGEPVRPRQQLRHGSVKQESHVL

SEQ ID NO: 2552 - protein, 361 aa, unidentified
MHRAYKFRLYPNKEQATLINKTIGCTRFVFNHFLAKRKDAYEQEKKTLNYNDCSAMLTQLKKEMEWLKEVDSTALQSTLKDLDSSYKKFFKEKKGYPKFKSKKNPKQSYACKMNIKVEGDRIKLPKLGWVTFAKSREVEGRILSATVRKNPSGKYFVSVLCETEIQPLLQTEKTVGVDLGIKDFAILSTGEKIANPKALRYYEKKLATWQQKLSRRKKGGQNREKSRKQVARLHERISNTRNDFLHKLSTQLIRENQTICLEDLRVENMIKNHKLAKSIADASWSAFRTMLEYKAAWYGRTISVVGKQFPSSQLCCGCGYQNKEVKNLNLRNWTCPYCGVQHDRDKDAAINIEQEGLRLLA

SEQ ID NO: 2553 - protein, 361 aa, unidentified
MHRAYKFRLYPNKEQATLINKTIGCTRFVFNHFLAKRKDAYEQEKRTLNYNDCSAMLTQLKKEMEWLKEVDSTALQSTLKDLDSSYKKFFKEKKGYPKFKSKKNPKQSYACKMNIKVEGDRIKLPKLGWVTFAKSREVEGRILSATVRKNPSGKYFVSVLCETEIQPLLHTEKTVGVDLGIKDFAILSTGEKIANPKVLRYYEKKLASWQQKLSRRKKGGQNREKSRKQVARLHERISNTRNDFLHKLSTQLIRENQTICLEDLRVENMIKNHKLAKSIADASWSAFRTMLEYKAAWYGRTISVVGKQFPSSQLCCGCGYQNKEVKNLNLRNWTCPNCGVQHDRDKNAAINIEQEGLRLLA

SEQ ID NO: 2554 - protein, 361 aa, unidentified
MHRAYKFRLYPNREQATLINKTIGCTRFVFNHFLAKRKDAYEQEQKTLNYNDCSALLTQLKKEIEWLKEVDSTALQSTLKDLDSSYKKFFKEKKGYPKFKSKKNPKQSYTCKMNIKVEGDRIKLPKLGWVTFAKSREVEGRILSATVRKNPSGTYFVSVLCETEIQPLLQAEKTVGVDLGIKDFAILSTGEKIANPKVLRYYEKKLATWQQKLSRRKKGGQNREKSRKQVARLHERISNTRNDFLHKLSTQLIRENQTICLEDLRVENMIKNHKLAKSIADASWSAFRTMLEYKAAWYGRTISIVGKQFPSSQLCSGCGYQNKEVKNLNLRNWTCPNCGIQHDRDKNAAINIEQEGLRLLA

SEQ ID NO: 2555 - protein, 390 aa, unidentified
MLKHKAYKFRIYPTKEQEILIAKTIGCSRFIFNHFLAKWDEMYKTTGRGLSYGSCSKEIPMLKQEFDWLKEVDSTSVQISVKHLADAFDRFFKKQNERPRFKSKRNPVQSYKTNIQGKNQLPEVSIECNKLKLPKLKWVRFAHSKQVTGRILNATIRRNTSGKYFVSLLVEQEIHELPKTGSSVGVDVGLKNFAILSDGTMYKNDCYFRTLEKKLAREQRKLSRRQRIALNKKVKLSESKNYQKQKRKVARIHEKIVNKRTDFLHKVSTEIVQNHDVIGIETLQVKNMQKNRKLSKAISDVSWSEFFRMLEYKAEWYGKTVVKVGKTFASSQLCSSCGHQHKDVKHLGLREWTCPSCGIHHDRDVNAGLNLKQEAERILASSTVGTTGLA

SEQ ID NO: 2556 - protein, 390 aa, unidentified
MLKHKAYKFRIYPTKEQEILIAKTIGCSRFVFNHFLAKWDEMYKTTGKGLSYGSCSKEIPLLKQEFDWLKEVDSTSVQISVKHLADAFDRFFKKQNERPRFKSKRNPVQSYKTNIQGKSQLPEASIIGNKLKLPKLKWVRFSYSKQVTGRILNATIRRNASGKYFVSLLVEQEIHELPKTGSSIGVDVGLKNFTILSDGTVYKNDRYFRTLEKKLAREQRKLSRRQRMALNKKVKLSEARNYEKQKRKVARIHEKIANKRNDFLHNVSTEIVKNHDIIGIETLQVKNMQKNRKLSKSISDVSWSEFFRMLEYKAEWYGKTIVKVGKTFASSQLCSSCGHQHKDVKDLGLREWTCPSCGIHHDRDVNAGLNLKQEAERILASSTVGTTGLA

SEQ ID NO: 2557 - protein, 390 aa, unidentified
MLKHKAYKFRIYPTKEQEILIAKTIGCSRFIFNHFLAKWDELYKTTGKGLSYGSCSKEIPVLKQEFDWLKEVDSTSVQISVKHLADAFDRFFKKQNERPRFKSKRHPVQSYKTNIQGKSQLPEVSIVCNQLKLPKLKWVRFAHSRQVTGRILNATIRRNASGKYFVSLLVEQEIHELPKTGSSVGVDVGLKNFAILSDGTVYKNDRYFRTLEKKLAREQRKLSRRQRIALNKKVTLSEARNYQKQKRKVARIHEKIANKRTDFLQKVSTEIVQNHDVIGIETLQVKNMQKNRKLSKSISDVSWSEFFRMLEYKADWYGKIVVKVGKTFASSQLCSSCGHQHKDVKHLGLREWTCPSCGIHHDRDVNAGLNLKQEAERILASSTVGTTGLA

SEQ ID NO: 2558 - protein, 390 aa, unidentified
MLKHKAYKFRIYPTKEQEILIAKTIGCSRFVFNHFLAKWDELYKTTGKGLSYGSCSKEIPLLKQEFDWLKEVDSTSVQISVKHLADAFDRFFKKQNERPRFKSKRHPVQSYKTNIQGKSQLPEISIVGNHLKLPKLKWVRFAHSKQVTGRILNATIRRNSSGKYFVSLLVEQEIKELPKTGSSVGVDVGLKNFAILSDGTVYKNDRYFRTLEKKLARDQRKLSRRQRIALNKKVKLSEARNYQKQKRKVARIHEKIANKRTDFLQKVSTEIVKNHDVIGIETLQVKNMQRNRKLSKAISDVSWSEFFRMLEYKADWYGKTVVKVGKTFASSQLCSSCGHQHKDVKHLGLREWICPSCGIHHDRDVNAGLNLKQEAERILTSLTVGTTGLA

SEQ ID NO: 2559 - protein, 390 aa, unidentified
MLKHKAYKFRIYPTKEQEILIAKTIGCSRFIFNHFLAKWDELYKTTGKGLSYGSCSKEIPVLKQEFDWLKEVDSTSVQISVKHLADAFDRFFKKQNEYPRFKSKRNPVQSYKTNIQGKNQLPEVSIGCNQLKLPKLKWVRFAHSKQITGRILNATIRRNASGKYFVSLLVEQEINERPKTGSSVGVDVGLKNFAILSDGTVYKNDRYFRKLEKKLAREQRKLSRRQRIALNKKVTLSEARNYQKQKRKVARIHEKIANKRTDFLHKVSTEIVQNHDVIGIETLQVKNMQKNRKLSKAISDVSWSEFFRMLEYKANWYGKTVVKVGKTFASSQLCSSCGHQHKDVKHLGLREWTCPSCGIHHDRDVNAGLNLKQEAERILASSTVGTTGLA

SEQ ID NO: 2560 - protein, 507 aa, unidentified
MKVKRAIRIRVSSKRKRGARELAYDLAQFRNLLLIFQSRYYALFGQVILNQSVIYSLLADQTMKKKPEQEEALREASERIIQHPDLQELIQRMKEQKARVDNNYVLQTTIRQVIKDYKSFLASLAGYRVNPGKYKERPQPPKPKKLGKLTQVTAEFNSNVFEVEGNTLFLRLRMNGKKRIKIKLPRDVEGVSSVRLVYHLSDVWVDVIYEKELKEPEAGLIHLAGIDMGMDNLISLISTSPDVKSLIISGREVKSFNCWFNKKKAAVQSAMDTLGNKIAQEEDESRKNAMSKELLKLKFYLHNLYNYRDRWIESHFHKVARVLADFLYETGHKAVYLGKGATESKDGIDLGKVTNQNFVSIPFRKLINILKYKLEELGMKAEEKEESYTSKASSLSDDILEIQRRYDEAKEKQGEIKIKCSGKRIERGLYRDNVLNKVFNADLNGALNILKVGAKLRRLTLSLKVLLCKLCNPLRLNLYDFIYRFKSKAESPPGIGDSKLATAGLTR

SEQ ID NO: 2561 - protein, 525 aa, unidentified
MSSGKRVLSIRVSGRERKRRVRTLLLDLAHFRNMLIILIREYYLLHREHLLNQSLLYGLVAKNYSCKYREELEKVLRNIEDSRELKEFLERLKAQKEKIDNPHYVQYVIRQVIKDFRSFFKSLECFRANPEKLREMPRLSKPKKLRYLINFSVEGNANTFKQEEDRLVIRLRNGKYLKVKLPKDFPYRVSSVRLKLFGDDLYVDVVYEQEVKGIEPKGDYRAGIDIGLDEMLSVVSENPEIKSFIVSGKEIKAFNQWFNKERAKLRSQMDYLKNEIRSGDYEDVSPLKKKLRELEIKEKVLSAQRKRWMENNLYKIARKLVDLLYKTGHKIIYIGKNAIESKNGIDLGKKTNREFVSIPFRRLVELIKYKAEELRMEVVEVDESYTSKTSPFADILKVQELGSQKFEEEDETKRKELEKEISELRKGSRSGNVFKDKVLGKVFHADLVGALNILRAGAKLLRLSFYENLRVLFTKLCNPVRFKLVDFLYLQVSPESLLGIGGSKQGVLIPAGWMEKQGYLDRFEI

SEQ ID NO: 2562 - protein, 363 aa, unidentified
MHRAYKFRLYPNKEQVMLINKTIGCTRFVFNHFLAKRKNVYEQEKKTLNYHECPAMLTQLKKEIEWLKEVDSTALQSTLKDLDSSYKKFFKEKKGYPKFKSKKNPKQSYTCKMNIKVEGNRIKLPKLGWVEFAKSREVEGRIRSATIRRNPSGKYFVSVLCETDIQPHPQIEQTVGVDLGIKDFAILSTGEKVANPKYYRKYEKQLAKWQRIQSRRQKGGKNRNKARIKVARLHEKIANTRNDFLHKLTTKLINENQVICLEDLQVENMVKNHKLAKSIADASWSMFRTMLEYKAEWYGRTISIVGKQYPSSQLCSTPNCGYRNKDVKNLNLREWTCPKCGTKHDRDENAAINIEQEGLRLLA

SEQ ID NO: 2563 - protein, 363 aa, unidentified
MHRAYKFRLYPSREQATLINKIIGCTRFVFNHFLVKRKEAYEQEKKTLNYNDCSALLTQLKKEIEWLREVDSTALQSTLKDLDSSYNKFFKEKKGYPKFKSKKNPKQSYTCKMNIKVEGNRIKLPKLGWVSFAKSREVEGRILSATIKRHPSGKYFVSVLCETEIQPLPEIEQTVGVDLGIKDFTILSTGEKVDNPKYYRKYEKQLAKWQRVHSRRQKGSKNRDKARIKVSRLHEKITNTRNDFLHKLSTKLVNENQVICLEDLQVENMVKNHKLAKSIADASWSMFRTMLEYKAQWYGRTISIVGKHFPSSQLCSTPNCGYRNKDVKNLNLRQWTCPNCGVQHDRDQNAAFNIEQEGLRLLA

SEQ ID NO: 2564 - protein, 416 aa, unidentified
MAIKATRTYVGSIENPQQVYDGLDSLGDSASKIWNVARWTADRIWDATDKIPTGSVLKSYMKNQPCWKDLNAQSSQKVIEELSDAFQSWFDLRQRFSEANPPGYRKHGDTRPRSTVTFKEDGFKHDPENNRVRLSKGSNLKEHFSDFLLCEYQTRPDVDLSAVNAVQNVRAVWNGDEWELHFVCKVELETEDSAGDGVAGIDLGITNIATVAFPDEYVLYPGNSLKEDKHYFTRAEYDTEGENGPSAQSRWARRKLSERETHFYHTLADAIITECVERGVGTLAVSWPEDVRESDWGKTGNKKLHSWAFDRIYQYLEYKGEMCGVEVLKENEWNTSKTCSRCGDDTKSNRVERGLYVCSSCELVANADCNGAENMRQKITPSPHGEDRSNGCVAQPSTHLFDRESGTFHTREQVVS

SEQ ID NO: 2565 - protein, 416 aa, unidentified
MAIELTRAYVGSIQNQRQVRDGLDSLGDFASKIWNVARWTADRIWNATGEIPDEGTLKAYMKNRECWKDLNAQSSQKVIEELSDAFQSWFELRHKDDTANPPGYRKHGDTRPKSTVTFKTDGFKHDPENNRVRLSKGKNLKDHRSDFLLCEYQTRPDVDLSEVTKVQNVRAVWNGGEWELHFVCKVELETTGSAGNGVAGIDLGIKNIATVAFPNEYVLYPGNSLKQDKHYFTRAEYDTEGENGPSEKSMWARRKLTERETHFYHTLTDAIITECVERGVGTLAVSWPEKVRESDWGKTGNKKLHSWAFDRIYQYLDYKGEIRGVEVLKENEWDTSKTCSQCGDDTKSNRVERGLYVCSSCELVANADCNGAENMRQKITPSPHGEDRSNGCVAQPSTHLFDRESGTFTTREQVVS

SEQ ID NO: 2566 - protein, 393 aa, unidentified
MEQKKAYKYRVYPTNEQKQILARTFGCARFVSNWALRCKTDAFYQEQKRLYYKDLSEMLTALKKQGEYVWLNDVSSVPLQQALRHLDKAFVNFFEGRAAYPRFKHKRQKQAATYTSNAFTWRDGQLTLAKMKEPLSIVWSRPLPKDAVPSSVTVSKDSTDRYFVSILVEENIAQLPVTPKTVGADLGLKSYVILSTGETIGNPRFFHTDEKKLAKAQRRHAKKKKGSKNKEKARLKVAKIHARIADRRRDFQHKLSIRLIRENQTICVESLAVKNMVKNQSLSKAISDVGWSEFVSQLEYKATWYGRTLVKIDKWYPSSKRCFDCGHILDSLALEVRHWTCPKCGVHHDRDLNASKNIHAAGLTVREACGEAVRPGAVKTKPGTSQRSRKPRS

SEQ ID NO: 2567 - protein, 389 aa, unidentified
MLKATKVRIYPTPEQAEFLNRQFGAMRFVYNKALHIISSQYKRHGLKLKAKKDLKPLLAVAKKSRKYHWLKDFDSIALQQACINLDKAFQNFFDPKLPARYPKFKRKHGKQSSYHCTSVSAGENWIKVPKMKPIKAQVHRELDGKLKSVTLSRTVTGKYYASLLVEDGLQTPAPLHSVDTVLGVDMGLTHLAIDSEGNKTTNPRFLKCAQSNLRRKQKALSRCRKGSKGRTKARLKLAKAHERLANARADFQHNLSRQLIDDNQAVVVETLKVKNLLKNRKLAKHIADASWFGLIQKLEYKAKEQGKHLVKIDQWLASSRICSCCGHKVDTLPLSVRNWSCPACKAELDRDINAAVNIRQQGIIKLRAEGLSVPANGGLRKSGHAPVAA

SEQ ID NO: 2568 - protein, 389 aa, unidentified
MLKATKVRIYPTPEQAEFLNRQFGAMRFVYNKALHIISSQYKRHGLKLKAKKDLKPLLAVAKKSRKYHWLKDFDSIALQQACINLDKAFQNFFDPKLPARYPKFKRKHGKQSSYHCTSVSAGENWIKVPKMKPIKAQVHRELDGKLKSVTLSRTVTGKYYASLLVEDGLQTPAPLHSVDTVLGVDMGLTHLAIDSEGNKTTNPRFLKRAQSNLRRKQKALSRCRKGSKGRTKARLKLAKAHERLANARADFQHNLSRQLIDDNQAVVVETLKVKNLLKNRKLAKHIADASWFGLIQKLEYKAKEQGKHLVKIDQWLASSRICSCCGHKVDTLPLSVRNWSCPACKAELDRDINAAVNIRQQGIIKLRAEGLSVPANGGLRKSGHAPVAA

SEQ ID NO: 2569 - protein, 373 aa, unidentified
MLVNKAYKFRIYPNKEQEKLINKTFGCVRFVFNHFLAKWNDTYKETGKGLTYNACSSQLTQLKDELTWLKEVDSIALQSSLKNLADAYNRFFKKQNDKPRFKSKKNPVQSYTTKYTNGNIAIDGNKIKLPKLGWIRFAKSREVEGRIINATIRRNPSGKYFVSILVETEVQELPKTNSAVGIDIGLKDFAILSDGTVYPNPKFFRRLEEKLAKAQRVLSRRKKGSSNWNKQRIKVARIHEKITNARHDYLHKISTEIVKNHDIIGIEDLQVSNMLKNHNLAKAISEVSWSLFRTMLEYKAKWYGKQVVTVAKNFASSQLCSCCGYKNKDVKNLALREWVCPNCHTHHDRDINASINLRKEALRLTVGTTGIAY

SEQ ID NO: 2570 - protein, 416 aa, unidentified
MAIKATRTYVGSIQNHQQVCDGLDSLGDSASKIWNIARWTADRIWDATGEIPNGGVLKSYMKNQSCWKDLNAQSSQKVIEELSDAFQSWFDLRHNSSEANPPGYRKHGDTRPKSTVTFKEDGFKHDPENNRVRLSKGSNLKEHFSDFLLCEYQTRPDVDLSAVNSVQNVRAVWTGEKWELHFVCKVELETADSAGDGVAGIDLGITNIATVAFPDEYVLYPGNSLKEDKHYFTRTEYDTEGESGPSEQSMWARRKLSERETHYYHTLTDAIITECVKRGVGTLAVSWPEDVRESDWGKTGNKKLHSWAFDRLYQYLEYKGEMRGVEVLKENEWNTSKTCSKCGDDTKSNRVERGLYVCSSCGLVANADCNGAENMRQKITPSPHGEDRSNGCVAQPSTHLFDRESGTFHTREQVVS

SEQ ID NO: 2571 - protein, 416 aa, unidentified
MAIQVTRTYVGSIQNQRQVCDALDLLGDAASKIWNVARWTADRIWDEIGEVPDEGALKAYMKNQACWKDLNAQSSQKVIEELSDAFQSWFDLRQNDETANPPGYRKHGGERPRSTVTFKADGFKHDPENNRIRLSKGSNLKENWSDFILCEYQTRPDVNLSEVARVQNVRAVWNGDEWELHFVCKVDLETSDSAGDGVAGIDLGITNIATVAFPDEYVLYPGNSLKQDKHYFTRAEYDTEGENGPSEKSMWARRKLADRETHFYHVLTDTIITECVERGVGTLAVSWPEDVRESDWGKTGNKKLHSWAFDRIYQYLAYKGEIRGVEVLKENEWETSKTCSHCGDATKSNRVERGLYVCESCELVANADCNGAENMRQKITPSPHGEDRSNGCVAQPSVHLFDRESGTFRTREQVVS

SEQ ID NO: 2572 - protein, 416 aa, unidentified
MAVEATRTYVGSIQNQQQVCDGLDSLGDSASKIWNVARWTADRIWDEAGEIPDEGTLKAYMKTQSCWKDLNAQSSQKVIEELSDAFQSWFDLRHKFDEANPPGYRKHGDTRPKSTVTFKADGFKHDPEHDRVRLSKGKNLKEHWSDFLLCEYQTRPDVDLSEVNKVQNVRAVWNGDEWELHFVCKVELETNDSAGNEVAGIDLGIKNITTVAFPDEYILYPGNSLKQDKHYFTRAEYDTEGENGPSEKSMRARRKLTDRETHFYHTLTDTIITECVERGVGTLAVSWPEDVRESDWGKTGNKKLHSWAFDRIYQYLAYKGEIRGVEVLKENEWDTSKTCSRCGDDTRSNRVERGLYVCSSCGLVGNADCNGAENMRQKITLSPHGEDRSNGCVAQPSVHLFDRESGTFKTREQVVS

SEQ ID NO: 2573 - protein, 416 aa, unidentified
MTVEATRTYVGSIQNQQQVCDGLDSLGDSASKIWNVARWTADRIWDEAGEIPDEGTLKAYMKNQSCWKDLNAQSSQKVIEELSDAFQSWFDLRHKFDEANPPGYRKHGDTRPKSTVTFKADGFKHDPEHNRVRLSKGKNLKEHWSDFLLCEYQIRPDVDLSEVNKVQNVRAVWNGDEWELHFVCKVELETNDSAGNEVAGIDLGIKNIATVAFPDEYILYPGNSLKQDKHYFTRAEYDTEGENGPSEKSMRARRKLTDRETHFYHTLTDTIITECVERGVGTLAVSWPEDVRESDWGKTGNKKLHSWAFDRIYQYLAYKGEIRGVEVLKENEWDTSKTCSRCGDATKSNRVERGLYVCESCELVANADCNGAENMRQKITPSLHGEDRSNGCVAQPSVHLFDRESGTFQTREQVVS

SEQ ID NO: 2574 - protein, 416 aa, unidentified
MAIEATRTYVGSIQNQQQVCEGLNSLGDSASKIWNVARWTADRIWEETGEIPDEGTLKAYMKTQSCWKDLNAQSSQKVIEELSDAFQSWFDLRHKFDEANPPGYRKHGDTRPKSTVTFKADGFKHDPEHDRVRLSKGKNLKEHWSDFLLCEYQTRPDVDLSEVNKVQNVRAVWNGDEWELHFVCKVELETNDSAGNEVAGIDLGIKNIATVAFPDEYILYPGNSLKQDKHYFTRAEYDTEGENGPSEKSMRARRKLTDRETHFYHTLTDTLITECVERGVGTLAVSWPEDVRESDWGKTGNKKLHSWAFDRIYQYLAYKGEIRGVEVLKENEWDTSKTCSRCGDDTKSNRVERGLYVCSSCGLVGNADCNGAENMRQKITPSPHGEDRSNGCVAQPSVHLFDRKSGTFRTREQVVS

SEQ ID NO: 2575 - protein, 369 aa, unidentified
MEKAYKFRMYPNKKQQELINKTFGCCRFVYNKYLAKRIEVYKNDKETFTYKQCSSDLTNLKKELNWLKEPDKFSLQNALKDLENAYEKFFKEKAGFPKFKSKKTNRFSYKTNFTNGNIMYCGQHIKLPKLGMVKIRDKQVPKGRILNATISKEPSGRYYVSLCCTDVDIEAFENTNNQIGLDLGIKEFCISSCGDFIENPKYLKKSLNKLAKLQRELSRKTIGSLNRNKARLKVARLQEHIANQRKDFLQKLSTKLIKENDIICIEDLQVKNMIRNRKLSRLISDVSWSEFIRQLEYKANWHGRQIVKVSKFFASSQICNKCGYKNEEVKNLNIREWICPSCNETHDRDINASINILKEGLRLITIQNK

SEQ ID NO: 2576 - protein, 372 aa, unidentified
MVVVEKAYKFRMYPNKKQQELINKTFGCCRFVYNKYLAKRIDVYKNNKETFTYKQCSSDLTNLKKELKWLKEPDKFSLQNALKDLDNAYKKFFKEKAGFPKFKSKKINRFSYKTNFTNGNIMYCGQHIKLPKLGMVKIRDKQVPQGRILNATISKEPSGRYYVSLCCTDVDIEVFENTNNHIGLDLGIKEFCISSCGEFIENPKYLKKSLNKLAKLQRELSRKTIGSLNRNKARLKVARLQEHIANQRNDFLQKLSTKLIKENDIICIEDLQVKNMIRNRKLSRLISDVSWSEFIRQLEYKANWHGRQIVKVGKFFASSQICNKCGYKNEEVKDLNIREWICPSCNETHDRDINASINILKEGLRLITIQNK

SEQ ID NO: 2577 - protein, 296 aa, unidentified
MIVVEKAYKFRMYPNKKQQELINKTFGCCRFVYNKYLAKRIDVYKNDKETFTYKQCSSDLTNLKKELKWLKEPDKFSLQNALKDLDNAYKKFFKEKAGFPKFKSKKINRFSYKTNFTNGNIMYCGQHIKLPKLGMVKVRDKQVPKGRILNATISKEPSGRYYVSLCCTDVDIKAFENTNNQIGLDLGIKEFCISSCGDFIENPKYLKKSLSKLAKLQRELSRKTIGSLNRNKARLKVARLQEHIANQRNDFLQKLSTKLIKENDIICIEDLQVKNMIRNRKLSRLISDVSWSEFIR

SEQ ID NO: 2578 - protein, 372 aa, unidentified
MIVVEKAYKFRMYPNKKQQELINKTFGCCRFVYNKYLAKRIEVYKNDKETFTYKQCSSDLTNLKKELKWLKEPDKFSLQNALKDLDNAYKKFFKEKAGFPKFKSKKINRFSYKTNFTNGNIMYCGQHIKLPKLGMVKIRDKQVPKGRILNATISKEPSGRYYVSLCCTDVDIEAFENTNNQIGLDLGIKEFCISSCGDFIENPKYLKKSLNKLAKLQRELSRKTIGSLNRNKARLKVARLQEHIANQRKDFLQKLSTKLIKENDIICIEDLQVKNMIRNRKLSRLISDVSWSEFIRQLEYKANWYGRQIVKVGKFFASSQICNKCGYKNEEVKDLNIREWICPSCNETHDRDINASINILKEGLRLITIQNK

SEQ ID NO: 2579 - protein, 372 aa, unidentified
MIAVKKAYKFRMYPNKKQQELINKTFGCCRFVYNKYLAKRIDVYKNDKETFTYKQCSSDLTNLKKELKWLKEPDKFSLQNALKDLDNAYKKFFKEKAGFPKFKSKKINRFSYKTNFTNGNIMYFSQHIKLPKLGMVKIRDKQVPKGRILNATISKEPSGRYYVSLCCTDVDIEVFENTNNHIGLDLGIKEFCISSCGEFIENPKYLKKSLNKLAKLQRELSRKTIGSLNRNKARLKVARLQEHIANQRNDFLQKLSTKLIKENDIICIEDLQVKNMIRNRKLSRLISDVSWSEFIRQLEYKANWHGRQIVKVGKFFASSQICNKCGYKNEEVKDLNIREWICPSCNEIHDRDINASRNILKEGLRLITIQNK

SEQ ID NO: 2580 - protein, 372 aa, unidentified
MVVVEKAYKFRMYPNKKQQELINKTFGCCRFVYNKYLAKRIEVYKNDKETFTYKQCSSDLTNLKKELKWLKEPDKFSLQNALKDLDNAYEKFFKEKAGFPKFKSKKINRFSYKTNFTNGNIMYCGQHIKLPKLGMVKIRDKQVPKGRILNATISKEPSGRYYVSLCCTDVDIEAFENTNNQIGLDLGIKEFCISSCGDFIENPKYLKKSLSKLAKLQRELSRKTIGSLNRNKARLKVARLQEHIANQRKDFLQKLSTKLIKENDIICIEDLQVKNMIRNRKLSRLISDVSWSEFIRQLEYKANWYGRQIVKVGKFFASSQICNKCGYKNEEVKDLNIREWICPSCNETHDRDINASINILKEGLRLITIQNK

SEQ ID NO: 2581 - protein, 379 aa, unidentified
MLVHKAYKFRIYPTKEQEILIAKTFGCARFVFNYFLAEWERAYRTTGKGLTYKVCSSQLTSLKKQFVWLKEVDSIALQTSLKHLSDAYTRFFQKQNNKPRFKSKKNKVKSYTTKYTNGNIAVVGNRIKLPKLGLVRVAKSREVEGRILSATIRRNASGKYFVSILAEVDVQPLPKTNRAVGIDLGVKHFAILSDGTTYANPKFLRKLEEKLAKAQRILSRRQIGSSNWHKQRIKVARLHEKMTNSRNDYLHKLSTEIVKNHDIIGVEDLQVANMMKNHNLAKAIADVSWSTFTNMLMYKATWYGKQVVVVAKNFPSSQLCSHCGYKNKDVKHLHLREWECPSCGTHHDRDVNASMNLKNEAIRLLTAGTAGLACSFSLR

SEQ ID NO: 2582 - protein, 416 aa, unidentified
MAIHVTRTYVGSIKNQQQVCDGLDSLGYSASKIWNVARWTADRVWDEIGKIPDEGSLKSYMKNQSCWKDLNAQSSQKVIEELSDAFQSWFDLRQKDDTANPPGYRKHGDTRPRSTVTFKEDGFKHDPENNRVRLSKGSNLKEYWSDFLLCEYQTRPDVDLSEVNSVQNVRAVWNGDEWELHFVCKVELEPNDSAGDEVAGIDLGIKNIATVAFPDEYVLYPGNSLKEDKHYFRRAEYDTEGENGPSEKSMWARRKLADRETHFYHVLSDAIITECVERDVGTLAVSWPEDVRESDWGKTGNKKLHTWAFDRIYQYLAYKGEIRGVEVLKENEWNTSKTCSKCGDDTKSNRKHRGLYVCSSCELVGNADCNGAENMRQKITPSPHGEDRSNGCVAQPSVHLFDSESGMFAPREQVVS

SEQ ID NO: 2583 - protein, 384 aa, unidentified
MLKATKVRLYPTTEQAEFLNRQFGAVRFVYNTGLRIISHRHKRHGQSLSAKHDIKKLLPVAKKSRKYGWLKEADSVALQQACLNLDHAFQRFFDPAQKAGYPRFKSKRGKQSSYHCVGVKAGDDWIKVPKLGPIKARMHRQVEGRLKSITLTRTVTGKHYASLLYETEQAAPAPLKAVDAAKVLGLDMGLSHLAIDSTGRKIANPRFLKQAQQNLKRKQQALSRTKKGSANRAKARLLVAKAHERLANARHDFQHKFSRQIVDDNQAVIVETLKVRNMMKNARLAKHIGDASWHALVTKLDYKAKEQGKHLVKIDPWFASSKTCHVCQHKMDAMPLNIRSWECPACHTQHDRDINAALNIKHQGIIELKAEGLSVSAHDYRLQK

SEQ ID NO: 2584 - protein, 416 aa, unidentified
MAIKATRTYVGSIQNHQQVCDGLDSLGDSASKIWNVARWTADRIWDATGEIPDAGTLKSYMKNQPCWKDLNAQSSQKVIEELSDAFQSWFDLRHKSSEANPPGYRKHGDSRPRSTVTFKEDGFKHDPDNNRVRLSKGSNLKEHFSDFLLCEYQTRPDVDLSEVNSVQNVRAVWNGDEWELHFVCNVELESADTADDGVAGIDLGITNISTVAFPDEYVLYPGNSLKQDKHFFTRAEYDTEGVDGPSEQSMWARRKLSDRETHYYHTLTDAIIAECVERGVGTLAVSWPEDVRESDWGKTGNKKLHSWAFDRLYQYLEYKGEMRGVEVLKENEWNTSKTCSRCGDDTRSNRVERGLYVCSSCELVANADCNGAENMRQKITPSPHGEDRSNGCVAQPSTYLFDRESGTFHTREQVVS

SEQ ID NO: 2585 - protein, 372 aa, unidentified
MIAVEKAYKFRMYPNKKQQELINKTFGCCRFVYNKYLAKRIEVYKNDKETFTYKQCSSDLTNLKKELNWLKEPDKFSLQNALKDLENAYEKFFKEKAGFPKFKSKKTNRFSYKTNFTNGNIMYCGQHIKLPKLGMVKIRDKQVPKGRILNATISKEPSGRYYVSLCCTDVDIEAFENTNNQIGLDLGIKEFCISSCGDFIENPKYLKKSLNKLAKLQRELSRKTIGSLNRNKARLKVARLQEHIANQRKDFLQKLSTKLIKENDIICIEDLQVKNMIRNRKLSRLISDVSWSEFIRQLEYKANWHGRQIVKVSKFFASSQICNKCGYKNEEVKNLNIREWICPSCNETHDRDINASINILKEGLRLITIQNK

SEQ ID NO: 2586 - protein, 416 aa, unidentified
MAIEATRTYVGSIQNHRQVCDGLDSLGDSASKIWNVARWTADRIWNATGEIPDEGVLKSYMKNQSCWKDLNAQSSQKVIEELSDAFQSWFDLRHKFDEANPPGYRKHGDSRPRATVTFKTDGFNHDPENNRVRLSKGKNLKEYWSDFLLCEYQTRPDVDLSEVESVQNVRAVWNGDEWELHFVCKVRLETNDLAGDEVAGIDLGIKNIATVAFPNQYVLYPGNSLKEDKHYFKRAEYDTEGENGPSERSMWARRKLADRETHFYHTLTDTIITECVERGVGTLAVSWPEDVRESDWGKTGNKKLHTWAFDRIYQYLEYKGEIRGVEVLKENEWDTSKTCSKCGDDTKSNRAERGLYVCSSCGLVGNADCNGAENMRQKITPSPHGEDRSNGCVAQPSTYLFDRESGMFRTREQVVS

SEQ ID NO: 2587 - protein, 416 aa, unidentified
MAIQVTRSYVGSIQNQRQVCDALDLLGDAASKIWNVARWTADRIWDEIGEVPDEGTLKAYMKNQTCWKDLNAQSSQKVIEELSDAFQSWFDLRQNDETANPPGYRKHGDERPRSTVTFKADGFKHDPENNRVRLSKGSNLKENWSDFILCEYQTRPDVNLSEVARVQNVRAVWNGDEWELHFVCKVDLETNDSAGGGVAGIDLGITNIATVAFPNEYVLYPGNSLKQDKHYFTRAEYDTEGENGPSEKSMWARRKLADRETHFYHVLTDTIITECVERGVGTLAVSWPEDVRESDWGKTGNKKLHSWAFDRIYQYLAYKGEIRDVEVLKENEWDTSKTCSRCGDATKSNRVERGLYVCESCELVANADCNGAENMRQKITPSPHGEDRSNGCVAQPSVHLFDRESGTFQTREQVVS

SEQ ID NO: 2588 - protein, 416 aa, unidentified
MTVEATRTYVGSIQNQQQVCDGLDSLGDSASKIWNVARWTADRIWDEVGEIPDEGTLKAYMKNQSCWKDLNAQSSQKVIEELSDAFQSWFDLRHKFDEANPPGYRKHGDTRPKSTVTFKADGFKHDPEHDRVRLSKGKNLKEHWSDFLLCEYQIRPDVDLSEVNKVQNVRAVWNGDEWELHFVCKVELETNDSAGNEVAGIDLGIKNIATVAFPDEYILYPGNSLKQDKHYFTRAEYDTEGENGPSEKSMRARRKLTDRETHFYHTLTDTIITECVERGVGTLAVSWPEDVRESDWGKTGNKKLHSWAFDRIYQYLAYKGEIRGVEVLKENEWDTSKTCSRCGDATKSNRVERGLYVCESCELVANADCNGAENMRQKITPSLHGEDRSNGCVAQPSVHLFDRESGTFQTREQVVS

SEQ ID NO: 2589 - protein, 416 aa, unidentified
MAIQVTRTYVGSIQNQRQVCDDLDSLGDSVSKLWNVARWTADRIWDETGEIPDEGSLKAYMKNQPCWKDLNAQSSQKVIEELSDAFQSWFDLRQKDNEANPPGYRKHGDERPRSTVTFKADGFKHDSENNRVRLSKGSNLKEHWSDFILCEYQTRPDVDLSEVTRVQNVRAVWNGDEWELHFVCKVALETSDSADDGVAGIDLGITNIATIAFPDEYVLYPGNSLKQDKHYFTRAEYDTEGENGPSEKSMWARRKLTERETHFYHALTDTIITECVERGVGTLAVSWPEGVRKSDWGKTGNKKLHSWAFDRIYQYLAYKGQIRGVEVLKENEWVTSKTCSACGDVTKSNRVERGLYVCSSCELVANADCNGAENMRQKITPSPHGEDRSNGCVAQPSVHLFDRESGTFKTREQVVS

SEQ ID NO: 2590 - protein, 361 aa, unidentified
MHRAYKFRLYPNKEQAILINKTIGCTRFVFNHFLAKRKDAYEQEQKTLNYNDCSSLLTQLKKEIEWLKEVDSTALQSTLKDLDSSYKKFFKEKKGYPKFKSKKNPKQSYTCKMNIKVEGDRIKLPKLGWVTFAKSREVEGRILSATVRKNPSGKYFVSVLCETEIQPLLQAGKTVGVDLGIKDFAILSTGDKIANPKILRQYEKKLAIWQQKLSRRKKGGQNREKSRKQVARLHERISNTRNDFLHKLSTQLIRENQTICLEDLRVENMIKNHKLAKSITDASWSAFRTMLEYKATWYGRTISIVGKQFPSSQLCSGCGYQNKEVKNLNLRNWTCPNCGAQHDRDKNAAINIEKEGLRLLA

SEQ ID NO: 2591 - protein, 372 aa, unidentified
MVVVEKAYKFRMYPNKKQQELINKTFGCCRFVYNKYLAKRIDVYKNDKETFTYKQCSSDLTNLKKELKWLKEPDKFSLQNALKDLDNAYKKFFKEKAGFPKFKSKKINRFSYKTNFTNGNIMYCGQHIKLPKLGMVKIRDKQVPQGRILNATISKEPSGRYYVSLCCTDVDIEAFENTNNHIGLDLGIKEFCISSCGEFIENPKYLKKSLNKLAKLQRELSRKTIGSLNRNKARLKVARLQEHIANQRNDFLQKLSTKLIKENDIICIEDLQVKNMIRNRKLSRLISDVSWSEFIRQLEYKANWHGRQIVKVGKFFASSQICNKCGYKNEEVKNLNIREWICPSCNETHDRDINASRNILKEGLRLITIQNK

SEQ ID NO: 2592 - protein, 348 aa, unidentified
MLYRDWKSFFAALADYKAHPDKYEAIPHIPRYADKDGYKPLIFTNQICKLRKDKHGWYVKFPKAVLQAGCVRDRYDLGKMDLHEQKLKEVRLIPNGDTINLEIVCEIEIKEPTITIHEATRVAGIDIGVDNLMAIAFTSGHHPVLIKGNEIKAVNQFYNKQIAHYRSLLRTGKKDSKGIHQTKRMKRISEKRNRRVKDILHKASRKIIDLCVEEGIEVIVVGNHAGWKKRIHMGKKNNQTFVQIPFRTLIEMIKYKGEAAGIRVVVCEEAIQSKASSIDEDQIPVYGNDVAHTFTGKRIKRGLYRSKNGILMNADINGASNIIRKVYPCMPKRERWSRGTVNVPVTCI

SEQ ID NO: 2593 - protein, 390 aa, unidentified
MHQWRAMLKATKVRIYPTTEQAEFLNRQFGAVRFCYNTGLRIMSHRYKRHGQSLSAKHDIKKLLPVAKKSRKYGWLKEADSMALQQSCINLDHAFQRFFDPKQKAGYPRFKSKRGKQSSYHCVGVKAGDNWIKVPKLGPIKAKVHRPVDGKLKSITLSRTVTGKHYASLLFDTDQATPVPTMDVDTSRVVGLDMGLSHLAIDSNGRKVANPRFLKQAQKNLKRKQQALSRTKKGSARRAKARLLVAKAYERVANARNDFQHKLSRQIVDDNQAVIVETLKVRNMMKNTCLAKHIGDASWHALMTKLDYKAREQGKHLVKIDPWFASSKTCHVCQHKMDAMPLNVRSWECPACHTQHDRDINAALNIKHQGIIELKAEGLSVSAHDYRLQK

SEQ ID NO: 2594 - protein, 416 aa, unidentified
MAIKATRTYVGSIQNHQQVCDGLDSLGDSASKIWNVARWTADRIWDATGEIPNESVLKPYMKNQPCWKDLNAQSSQKVIEELSDAFQSWFDLRHKFDEANPPGYRKHGDIRPRSTVTFKEDGFKHDPENNRVRLSKGSNLKDHFSDFLLCEYQTRPDVDLSEVNSVQNVRAVWNGERWELHFVCKVELATADSAGDGVAGIDLGITNIATVAFPDEYILYPGNSLKEDKHYFTRAEYDTEGESGPSERSIWARRKLSERETHFYHTLTDAIITECVERGVGTLAVSWPEDVRESNWGKTGNKKLHSWAFDRIYQYLDYNGEMRGVEVLKENEWNTSKTCSRCGDDTKSNRVERGLYVCSSCELVANADCNGAENMRQKITPSPHGEDRSNGCVAQPSTYLFDRESGTFHTREQVVS

SEQ ID NO: 2595 - protein, 361 aa, unidentified
MHKAYKFRLYPNKEQATLINKTIGCTRFVFNHFLAKRKDAYEQEQKTLNYNDCSSLLTQLKKEIEWLKEVDSTALQSTLKDLDSSYKKFFKEKKGYPKFKSKKNPKQSYTCKMNIKMEGDRIKLPKLGWVTFAKSREVEGRILSATVRKNPSGKYFVSVLCETEIQPLLQAEKTVGVDLGIKDFAILSTGEKIANPKVLRYYEKKLATWQQKLSRRKKGGQNREKSRKQVARLHERISNTRNDFLHKLSTQLIRENQTICLEDLRVENMIKNHKLAKSIADASWSAFRTMLEYKAAWYGRTISIVGKQFPSSQLCSGCGYQNKEVKNLNLRNWTCPNCGAQHDRDKNAAINIEQEGLRLLA

SEQ ID NO: 2596 - protein, 391 aa, unidentified
MLKATKVRLYPTTEQAEFLNRQFGAVRFVYNTGLRIISHRHKRHGQSLSAKHDIKKLLPVAKKSRKYGWLKEADSIALQQACLNLDHAFQRFFDPAQKAGYPRFKSKRGKQSSYHCVGVKAGDDWIKVPKLGPIKARMHRQVEGRLKSITLTRTVTGKHYASLLYETEQVAPAPLKDVDAAKVVGLDMGLSHLAIDSRGRKIANPRFLRQAAANLRRKQQALSRCQKGSRRRAKARLLVAKAHERLANARNDFQHKLSRQLVDDNQAVIVEALKVRNMMKNARLAKHIGDASWHALVTKLDYKAKEQGKHLVKIDPWFASSKTCHICHHKVDAMPLSVRSWECPSCHTHHDRDINAALNIKHQGIVKLKAEGLSVSAHGGLRKSGTSPVAA

SEQ ID NO: 2597 - protein, 393 aa, unidentified
MNVIRQKHHSTPFHIIDHEHRFVSMQHLDGFFKLRDQIDYRALPAQANQNVLHMLYRDWKSFFAALADYKAHPDKYEAVPHIPRYADKGGYKPLIFTNQICKLRKDKHGWYVKFPKAVLQAGCVRDRYDLGKMDLHEQKLKEVRLIPNGDNIKLEIVCEIEIKEPTITIHEATRVAGIDIGVDNLTAIAFTSGHHPVLIKGNEIKAVNQFYNKQIAHYRSLLRIGKKDSKGIHQTKRMKRISEKRNRRVKDILHKASRKIIDLCEKEGIEVIVVGNNAGWKKRIHMGKKNNQTFVQIPFRTLIEMIKYKGEAAGIRVVVCEESYTSKASSIDEDQIPVYGKDVTHTFTGKRIKRGLYRSKNGILMNADVNGASNIIRKVYPCMPKRERFVEVL

SEQ ID NO: 2598 - protein, 348 aa, unidentified
MLYRDWKSFFAALADYKAHPDKYEAIPHIPRYADKDGCKPLIFTNQICKLRKDKHGWYVKFPKAVLQAGCVRDRYDLGKMDLHEQKLKEVRLIPNGDTIKLEIVCEIEIKEPTITIHEATRVAGIDIGVDNLTAIAFTSGHHPVLIKGNEIKAVNQFYNKQIAHYRSLLRTGKKDSKGIHQTKRMKRISEKRNRRVKDILHKASRKIIDLCVEEGIEVIVVGNNAGWKKRIHMGKKNHQTFIQIPFHTLIEMIKYKGEAAGIRVVVCEEAIQSKASSIDEDQIPVYGNDVAHTFTGKRINRGLYRSKNGILMNADINGASNIIRKVYPCMPKRERWSRGTVNVPVTCI

SEQ ID NO: 2599 - protein, 416 aa, unidentified
MAIQVTRTYVGSIQNQQQVCDDLDSLGDSASKIWNVARWTADRIWDGTSEIPDEGALKAYMKKQACWKDLNAQSSQKVIEELSDAFQSWFDLRQKDDEANPPGYRKHGDERPRSTVTFKADGFKHDSDNNRVRLSKGSNLKENWSDFILCEYQTRPDVDLSAVNKVQNVRAVWNGDDWELHFICKVELETQDFAGDGVAGIDLGITNIATVAFPDQYVLYPGNSLKQDKHYFTRAEYDTGGETGPSEKSMWARRKLAEREAHFYHVLTDTIITECVERGVGTLAVSWPEDVRKSDWGKTGNKKLHSWAFDRIYQYLAYKGEIRGVEVLKENEWDTSKTCSACGDDTKSNRVERGLYVCSSCELVANADCNGAENMRQKITPSPHGEDRSNGCVAQPSTHLFDRESGTFRTREQVVS

SEQ ID NO: 2600 - protein, 436 aa, unidentified
MAIEVTRTYVGSIQNHRQVCDGLDSLGDSASKIWNIARWTADRIWGATGEIPDEGTLKAYMKNQSCWKDLNAQSSQKVIEELSDAFQSWFDLRQKDPEANPPGYRKHGDTRPKSTVTFKTDGFKHDPENNRVRLSKGSNLKEYWSDFILCEYQTRPDVDLSEVNRVQNVRAVWNGEEWELHFICKVELETNDSAGDGVAGIDLGIKNIATVAFPDEYVLYPGNSLKQDKHYFTRAEYDTAGKNGPSEKSMWARRKLADRETHFYHVLTDSIITECVERNVGTLAVSWPEDVRESDWGKTGNKKLHSWAFDRIYQYLEYKGEIRGVEVLKENEWDTSKTCSRCGGDTKSNRVERGLYVCSSCELVANADCNGAENMRQKITPSPHGEDRSNGCVVVRETFGLSSSRKALCAFRTTQPSTYLFDRESGTFNTREQVVS

SEQ ID NO: 2601 - protein, 390 aa, unidentified
MNVKKTFKFRIYPNHEQTELINKTFGCSRFIYNYFVGKQKNKDAYWSIVNEMVQNGQLSQNNWKGEFFNKNQSIKAVRELKKTYSFLKEVDSIALQKSVEIVHDSYTRYYKKQNRLPRFKSKKNPVQSYTTKFVNGNIQVKDKHIKLPKLGLVRFAKSREVEGRIMNATIRRNPSGKFFVSILAESEVQHYKKTGTSVGIDVGLKDFATLSDGTTHKNPRFFRRLEKKIMNAQRILSRRQLGSSNWTKQKKKVARLHEKIANARKDLLDKISTEIVKNHDIIGIEDLSVKNMLKNKDLSKGISEVSWAQFRSMLEYKSLWYGKQVIAAAKNFPSSQLCSVCNYKYKAVKDLALREWTCPNCKSSHQRDLNASINLRNEALRLTAGTAGIA

SEQ ID NO: 2602 - protein, 372 aa, unidentified
MIAVKKAYKFRMYPNKKQQELINKTFGCCRFVYNKYLAKRIDVYKNDKETFTYKQCSSDLTNLKKELKWLKEPDKFSLQNALKDLDNAYKKFFKEKSGFPKFKSKKINRFSYKTNFTNGNIMYFSQHIKLPKLGMVKIRDKQVPQGRILNATISKEPSGRYYVSLCCTDVDIEAFENTNNHIGLDLGIKEFCISSCGEFIENPKYLKKSLNKLAKLQRELSRKTIGSLNRNKARLKVARLQEHIANQRNDFLQKLSTKLIKENDIICIEDLQVKNMIRNRKLSRLISDVSWSEFIRQLEYKANWHGRQIVKVGKFFASSQICNKCGYKNEEVKNLNIREWICPSCNETHDRDINASINILKEGLRLITIQNK

SEQ ID NO: 2603 - protein, 416 aa, unidentified
MAIKATRTYVGSIKNHQQVCEGLDSLGDSASKIWNVARWTGDRIWDATSEIPNGSVLKSYMKSQPCWKDLNAQSSQKVIEELSDAFQSWFDLRQKDQKANPPGYRKHGDTRPRSTVTFKEDGFKHDPDNNRVRLSKGSNLKEHFSDFLLCEYQTRPDVDLSEVNSVQNVRAVWNGDEWELHFVCKVELETVDSAGDGVAGIDLGITNIATVAFPDEYVLYPGNSLKEDKHYFTRAEYDTEGENGPSEQSRWARRKLSERETHFYHTLTDAIITECVERGVGTLAVSWPEDVRESDWGKTGNKKLHSWAFDRIYQYLKYKGEMRSVEVLKENEWDTSKTCSRCGDDTKSNRVERGLYVCSSCELVANADCNGAENMRQKITPSPHGEDRSNGCVAQPSTHLFDRESGMFHTREQVVS

SEQ ID NO: 2604 - protein, 391 aa, unidentified
MLNATKIRIYPTTEQVAFLNRQFGAVRFCYNTGLRIMSHRYKRHGHSLSAKHDIKKLLPVAKKSRQYGWLKEADSMALQQSCINLDQAFQRFFDPHQKTGYPRFKSKRGKQSSYHCVGVNAGDSWIKVPKLGPIKAKVHRKVEGRLKSITLTRTVTGKHYASLLYETEQVAPALLKDVDAAGVVGLDMGLSHLAIDSTGRKIANPRFLKQAQKNLKRKQQALARTKKGSAHRARARLLVAKAHERVANARNDFQHKLSRQIVDDNQAVIVETLKVKNMMKNARLAKHIGDASWHALTAKLDYKAKEQGKHLVKIDPWFASSQTCHVCQHKMHAMPLSLRSWECPACHTQHDRDINAALNIKHQGIVKLKAEGLSVTAHGGLRKSGMSPAAA

SEQ ID NO: 2605 - protein, 391 aa, unidentified
MLKATKIRIYPTTEQVAFLNRQFGAVRFCYNTGLRIMSHRYKRHGQSLSAKHDIKKLLPVAKKSRQYGWLKEADSMALQQSCINLDQAFQRFFDPHQKTGYPRFKSKRGKQSSYHCVGVNAGDSWIKVPKLGPIKAKVHRKVEGRLKSITLTRTVTGKHYASLLYETEQVAPALLKDVDAAGVVGLDMGLSHLAIDSTGRKIANPRFLKQAQKNLKRKQQALARTKKGSAHRARARLLVAKAHERVANARNDFQHKLSRQIVDDNQAVIVETLKVKNMMKNAKLAKHIGDASWHALTAKLDYKAKEQGKHLVKIDPWFASSKTCHVCQHKMDAMPLSLRSWECPACHTQHDRDINAALNIKHQGIVKLKAEGLSVSAHGGLRKSGMSPAAA

SEQ ID NO: 2606 - protein, 416 aa, unidentified
MAIQVTRTYVGSIQNQRQVCDDLDLLGDSASKIWNVARWTADRIWDEIGEIPDEGTLKAYMKNQACWKDLNAQSSQKVIEELSDAFQSWFDLRHKFDEANPPGYRKHGDTRPKSTVTFKADGFKHDPENNRVRLSKGKNLKENWSDFILCEYQTRPDVDLTEVNSVQNVRTVWNGDEWELHLVCKVELETNDSAGDEVAGIDLGIKNIATVAFPGEYVLYPGNSLKQDKHYFTRVEYDTEGENGPSEKSMWARRKLADRETHFYHTLTDAIITECVERGVGTLAVSWPEDVRESDWGKTGNKKIHTWAFDRIYQYLEYKGEIRGVEVLKENEWDTSKMCSRCGDDTKSNRVERGLYVCSSCELVANADCNGAENMRQKITPSPHGEDRSNGCVAQPSVHLFDRESGTFHTREQVVS

SEQ ID NO: 2607 - protein, 416 aa, unidentified
MAIQVTRTYVGSIQNRRQVCDDLDLLGDSASKIWNVARWTADRIWDATGEIPDEGTLKAYMKNQACWKDLNAQSSQKVIEELSDAFQSWFDLRQKDGKANPPGYRKHGDTRPKSTITFKADGFKHDPENNRVRLSKGSNLKENWSDFILCEYQTRPDVDLSEVNKVQNVRTVWNGDEWELHFVCKVDLETADSAGDGVAGIDLGITNIATVAFPNEYVLYPGNSLKQDKHYFTRAEYDTEGENGPSEKSMWARRKLADRETQFYHVLTDAIITECVERGVGTLAVSWPEDVRKYDWGKTGNKKLHSWAFDRIYQYLEYKGEIRGVEVLKENEWDTSKTCSHCGDDTKSNRVERGLYVCSSCELVANADCNGAENMRQKITPSPHGEDRSNGCVAQPSVHLFDRESGTFHTREQVVS

SEQ ID NO: 2608 - protein, 416 aa, unidentified
MAIEVTRAYVGSIQNQRQVRDGLDSLGDFASKIWNVARWTADRIWNATGEIPDEGTLKAYMKNRECWKDLNAQSSQKVIEELSDAFQSWFDLRHKDDTANPPGYRKHGDTRPKSTVTFKTDGFKHDPENNRVRLSKGKNLKDHRSDFLLCEYQTRPDVDLSEVTKVQNVRAVWNGGEWELHFVCKVELETTGSAGNGVAGIDLGIKNIATVAFPNEYVLYPGNSLKQDKHYFTRAEYDTEGENGPSEKSMWARRKLTERETHFYHTLTDAIITECVERGVGTLAVSWPEKVRESDWGKTGNKKLHSWAFDRIYQYLDYKGEIRGVEVLKENEWDTSKTCSQCGDDTKSNRVERGLYVCSSCELVANADCNGAENMRQKITPSPHGEDRSNGCVAQPSTHLFDRESGTFTTREQVVS

SEQ ID NO: 2609 - protein, 348 aa, unidentified
MLYRDWKSFFAALAGYKAHPDKYEAIPHIPRYADKNGYKPLIFTNQICKLRKDKHGWYVKFPKAMLQAGCVRDRYDLGKMDLHEQKLKEVRLIPNGDTIKLEIVCEIEIKEPTITIHEATRVAGIDIGVDNLTAIAFTSGHHPVLIKGNEIKAVNQFYNKQIAHYRSLLRTGKKDSKGIHQTKRMKRISEKRNRRVKDILHKASRKIIDLCVEEGIEVIVVGNNAGWKKRIHMGKKNNQTFVQIPFHTLIEMIKYKGEAAGIRVVVCEEAIQSKASSIDEDQIPVYGNDVTHTFTGKRIKRGLYRSKNGILMNADINGASNIIRKVYPCMPKRERWSRGTVNVPVTCI

SEQ ID NO: 2610 - protein, 290 aa, unidentified
VKFPKAVLQAGCVRDRYDLGKMDLHEQKLKEVRLIPNGDTINLEIVCEIEIKEPTITIHEATRVAGIDIGVDNLMAIAFTSGHHPVLIKGNEIKAVNQFYNKQIAHYRSLLRTGKKDSKGIHQTKRMKRISEKRNRRVKDILHKASRKIIDLCVEEGIEVIVVGNHAGWKKRIHMGKKNNQTFVQIPFRTLIEMIKYKGEAAGIRVVVCEEAIQSKASSIDEDQIPVYGNDVAHTFTGKRIKRGLYRSKNGILMNADINGASNIIRKVYPCMPKRERWSRGTVNVPVTCI

SEQ ID NO: 2611 - protein, 368 aa, unidentified
MKTIHKTYRFAIMPNQEQQILLSKHFGCVRWAYNHFLNERKEQYELSKKSDNYYAQAKTLTEIKKKEETIWLKEVNSQTLQFALRCLDTAYLNFFRGNAKFPRFKSRRDKNTFTVPQFVTVEKDLLYIPKFKDGIKVNLHREIKGEVKHCTISKTPTGNYFVSILCETQYEPKQKTGKEVGIDLGLKDFVITSDGIKFKNNRYTKHHERALAKAQKHLSRKTKGSNRYENQRLKVAMLHEKTANSRLDNLHKVSSQIISDNDVICLEDLHIKGMIKNHKLAKHIADASWGNFVRLLEYKAEWNDKQIVKINRFFPSSKTCNSCGWINQNLNLSEREWTCKCGVIHDRDDNAAINILKEGENNRGGTLR

SEQ ID NO: 2612 - protein, 348 aa, unidentified
MLYRDWKSFFAALADYKAHPDKYEAIPHIPRYADKDGYKPLIFTNQICKLRKDKHGWYVKFPKAVLQAGCVRDRYDLGKMDLHEQKLKEVRLIPNGDTIKLEIVCEIEIKEPTITIHEATRVAGIDIGVDNLMAIAFTSGHHPVLIKGNEIKAVNQFYNKQIAHYRSLLRTGKKDSKGIHQTKRMKRISEKRNRRVKDILHKASRKIIDLCVEEGIEVIVVGNHAGWKKRIHMGKKNNQTFVQIPFRTLIEMIKYKGEAAGIRVVVCEEAIQSKASSIDEDQIPVYGNDVAHTFTGKRIKRGLYRSKNGILMNADINGASNIIRKVYPCMPKRERWSRGTVNVPVTCI

SEQ ID NO: 2613 - protein, 348 aa, unidentified
MLYRDWKSFFAALADYKAHPDKYEAIPHIPRYADKDGYKPLIFTNQICKLRKDKHGWYVKFPKAVLQAGCVRDRYDLGKMDLHEQKLKEVRLIPNGDTIKLEIVCEIEIKEPTITIHEATRVTGIDIGVDNLMAIAFTSGHHPVLIKGNEIKAVNQFYNKQIAHYRSLLRTGKKDSKGIHQTKRMKRISEKRNRRVKDILHKASRKIIDLCVEEGIEVIVVGNNAGWKKRIHMGKKNNQTFVQIPFRTLIEMIKYKGEAAGIRVVVCEEAIQSKASSIDEDQIPVYGNDVTHAFSGKRIKRGLYRSKNGILMNADINGASNIIRKVYPCMPERERWSRGTVNVPVTCI

SEQ ID NO: 2614 - protein, 401 aa, unidentified
MNVIRQKHHSTPFHIIDHDHRFVSMQHLDGFFKLRDQIDYRALPAQANQIVLHMLYRDWKSFFATLADYKAHPDKYEAVPHIPRYADKDGYKPLIFTNQICKLRKDKHGWYVKFPKAVLQAGCVRDRYDLGKMDLHEQKLKEVRLIPNGDTIKLEIVCEIEIMEPTITIHEATRVAGIDIGVDNLMAIAFTSGHHPVLIKGNEIKAVNQFYNKQIAHYRSLLRIGKKDSKGIHQTKRMKRISEKRNRRVKDILHKASRKIIDLCVEEGIEVIVVGNNAGWKKRIHMGKKNNQTFVQIPFRTLIEMIKYKGEAAGIRVVVCEESYTSKASSIDEDQIPVYGNDVTHTFTGKRIKRGLYRSKNGILMNADINGASNIIRKVYPCMPKRERWSRGTVNVPVTCI

SEQ ID NO: 2615 - protein, 416 aa, unidentified
MAIKVTRTYVGSVQNQRQVSDGLDSLGDSASKIWNVARWTADRIWNATGEIPDEGTLKAYMKNQSCWKDLNAQSSQKVIEELSDAFQSWFDLRQTDDEANPPGYRKHGDDRPRSTVTFKADGFKHDPENNRIRLSKGSNLKENWSDFILCEYQTRPDVDLSEVNRVQNVRAVWSGDEWELHFVCKVELETTDSTDDGVAGIDLGITNIATVAFPDEYVLYPGNSLKEDKHYFTRSEYDTEGENGPSEKSMWARRKLAERETHFYHVLTDTIITECVERGVGTLAVSWPEDVRQSDWGKTGNKKLHSWAFDRIYQYLEYKGEIRGVEVLKENEWNTSKTCSRCGDDTKSNRVERGLYVCSSCELVGNADCNGAENMRQKITSSPHGEDRSNGCVAQPSVHLFDRESGTFTTREQAVS

SEQ ID NO: 2616 - protein, 416 aa, unidentified
MAIKATRTYVGSIQNHQQVCDGLDSLGDSASKIWNVARWTADRIWDATGEIPNGSVLKSYMKNQSCWKDLNAQSSQKVIEELSDAFQSWFDLRHNSSEANPPGYRKHGDTRPKSTVTFKEDGFKHDSENNRVRLSKGSNLKEHFSDFLLCEYQTRPDVNLSEVNSVQNIRAVWTGESWELHFVCKVELETADAAGDDVAGIDLGITNIATVAFPDEYVLYPGNSLKEDKQYFTRAEYDTEGENGPSEKSMWARRKLSDRETHYYHTLTDAIITECVDRGVGTLAVSWPEDVRESDWGKTGNKKLHTWPFDRIYQYLEYKGEMRGVEVLKENEWNTSKTCSRCGDDTKSNRVERGLYVCSSCELVANADCNGAENMRQKITPSPHGEDRSNGCVAQPSTHLFDRESGTFHTREQVVS

SEQ ID NO: 2617 - protein, 378 aa, unidentified
SMQHLDGFFKLRDQIDYRALPAQANQNVLHMLYRDWKSFFAALADYKAHPDKYEAIPHIPRYADKDGYKPLIFTNQICKLRKDKHGWYVKFPKAVLQAGCVRDRYDLGKMDLHEQKLKEVRLIPNGDTIKLEIVCEIEIMEPTITIHEATRVAGIDIGVDNLTAIAFTSGHRPVLIKGNEIKAVNQFYNKQIAHYRSLLRTGKKDSKGIHQTKRMKRISEKRNRRVKDILHKASRKIIDLCVEEGIEVIVVGNNAGWKKRIHMGKKNNQTFVQIPFRTLIEMIKYKGEAAGIRVVVCEEAIQSKASSIDEDQIPVYGNDVTHTFTGKRIKRGLYRSKNGILINADINGASNIIRKVYPCMPKRERWSRGTVNVPVTCI

SEQ ID NO: 2618 - protein, 571 aa, unidentified
MNVIRQKHHSTPIHIIDHEHRFVSMQHLDGFFKLRDQIDYRALPAQANQNVLHMLYRDWKSFFAALADYKAHPDKYEAIPHIPRYADKDGYKPLIFTNQICKLRKDKHGWYVKFPKAVLQAGCVRDRYDLGKMDLHEQKLKEVRLIPNGDTIKLEIVCEIEIMEPTITIHEATRVAGIDIGVDNLTAIAFTSGHRPVLIKGNEIKAVNQFYNKQIAHYRSLLRTGKKDSKGIHQTKRMKRISEKRNRRVKDILHXYKAHPDKYEAVPHIPRYADKDGYKPLIFTNQICKLRKDKYGWYVKFPKAVLQAGCVRNRYDLGKMDLHEQKLKEVRLIPNGDTIKLEIVCEIEIKEPTITIHEATRVAGIDIGVDNLTAIAFTSGHRPVLIKGNEIKAVNQFYNKQIAHYRSLLRTGKKDSKGIHQTKRMKRISEKRNRRVKDILHKASRKIIDLCVKEGIEVIVVGNHAGWKKRIHMGKKNNQTFVQIPFHTLIEMIKYKGEAAGIRVVVCEEAIQSKASSIDEDQIPVYGNDVTHTFTGKRIKRGLYRSKNGILMNADINGASNIIRKVYPCMP

SEQ ID NO: 2619 - protein, 416 aa, unidentified
MAIEVTRTYVGSIQNHRQVSDGLDSLGDSASKIWNVARWTVDRIWDETGKIPDEGTLKAYMKNHPCWKDLNAQSSQKVIEELSDAFQSWFDLRHKDEKANPPGYRKHGDTRPKSTVTFKADGFKHDPENNRVRLSKGSNLKEYWSDFVLCEYQTRPDVDLSEVNRVQNVRAVWNGNEWELHFVCKVELETLDSAGDEVAGIDLGITNIATVAFPDGYVLYPGNSLKEDKHYFNRAEYDTEGENGPSKKSMWARQKLAERETHFYHTLTDTIITECVERGVGTLAVSWPEDVRESDWGKTGNKKLHTWAFDRIYQYLEYKGEIRGVEVLKENEWNTSKTCSRCGDDTKSNRVERGLYVCSSCELVGNADCNGAENMRQKITPSPHGEDRSNGCVAQPSTYLFDRESGTFTTREQIVS

SEQ ID NO: 2620 - protein, 532 aa, unidentified
MFSNRVLSIRISGKDRKEKVRKLLFDLAHFKNFWIILIRKYKELYGYYPTDQSILYGLIADREYSSKKEEKLTKFKEVRENILKDEELTKLLLALKEQKKKVDNNYLLQQVIRSVVKSFNDYRKAYREYQRNPKKFKGTPKPPKPKKLKFLMNFSVELNVNTFERLEDSVLIRLRINNKEFLKVKLPKEFHHEVKSIRLKLFGTDVYADVVYKVETLELRTTGEYTAGIDLGLNNLIALVSTNSNLKSIIVSGKEIKAFNQWFNKEKAKLQSEIDTIRNKLLKVEEDEKAQNLKRLLTEKFIILKELSAYRKRRIGNDFHKISRKVVDILKATDHKKLYIGKGAAESKDGINIGKKNNQHFVSIPFRKLIELIKYKAEELGIEVEEIGEAFTSKTSPFADIFEVRKIGKKYLKAKEKEDKTLLRKILNQLKSLRKAVRRFRGLLKDKVSGAFFNADLVGAYNIVRVGESSLRLIENQRVLITKLCNPIKFRLIEFLYKVSPESLLRGIGSSSSLRAGLSLFDYQLCNNLTTF

SEQ ID NO: 2621 - protein, 384 aa, unidentified
MLKATKVRIYPTTEQAEFLNRQFGAVRFCYNTGLRIMSHRYKRHGQSLSAKHDIKKLLPVAKKSRKYGWLKEADSMALQQSCINLDHAFQRFFDPKQKAGYPRFKSKRGKQSSYHCVGVKAGDNWIKVPKLGPIKAKVHRPVDGKLKSITLSRTVTGKHYASLLFDTDQATPVPTMDVDTSRVVGLDMGLSHLAIDSNGRKVANPRFLKQAQKNLKRKQQALSRTKKGSARRAKARLLVAKAYERVANARNDFQHKLSRQIVDDNQAVIVETLKVRNMMKNTCLSKHIGDASWHALMTKLDYKAREQGKHLVKIDPWFASSKTCHVCQHKVDAMPLNIRSWECPACHTLHDRDINAALNIKHQGIVKLKAEGLSVSAHDYRLQK

SEQ ID NO: 2622 - protein, 384 aa, unidentified
MLKATKVRLYPTTEQAEFLNRQFGAVRFCYNTGLRIMSHRYKRHGQSLSAKHDIKKLLPVAKKSRKYGWLTEADAIALQQACLNLDHAFQRFFDPKQKAGYPRFKSKRGKQSSYHCVGVKAGDNWIKVPKLGPIKARMHRQVEGRLKSITLTRTVTGKHYASLLFDTEQAAPAPLKDVDAAKVVGLDMGLSHLAIDSTGRKIANPRFLKQAQQNLKRKQQALSRTKKGSANRAKARLLVAKAHERLANARNDFQHKLSRQIVDDNQAVIVETLKVSNMMKNTCLAKHIGDASWHALMTKLDYKAREQGKHLVKIDPWFASSKTCHVCQHKMDAMPLNVRSWECPACHTQHDRDINAALNIKHQGIIELKAEGLSVSAHDYRLQK

SEQ ID NO: 2623 - protein, 393 aa, unidentified
MSTEILKATKVRIYPTPEQTEFLNRQFGAVRFTYNKALHIISSQYKRHGLKLKAKKDLKPLLAVAKKSRKYHWLGDFDSIALQQACINLDKAFQAFFDPKLPARYPTFKRKHGKQSSYHCMSVSAGDNWIKVPKMKPIKARVHRELDGKLKSITLSRTVTGKYYASLLIEDGVEAPVPMQTVDTVLGVDMGLTHLAIDSEGNKIANPRFLKRAAANLRRKQKALSRCQKGSKGRAKARLKLAKAHERLANARADFQHNLSRQLIDENQAVVVETLKVKNLLKNRKLAKHIADASWFGLIQKLAYKAKAQGKYLVKIDQWFASSKACSCCGHQVDSLPLSVRNWTCPACAAELDRDINAAINIRQQGIIKLRAEGLSAPANGGLRKSGHAPVAA

SEQ ID NO: 2624 - protein, 389 aa, unidentified
MLKATKVRIYPTPKQAEFLNRQFGATRFVYNKALHIISSQYKRHGLRLKAKKDLKPLLAVAKKSRKYHWLGDFDSIALQQACINLDKAFQAFFDPKLPARYPTFKRKHGKQSSYHCMSVSAGDNWIKVPKMKPIKARVHRELDGKLKSITLSRTVTGKYYASLLIDDGVEAPVPMQTVDTVLGVDMGLTHLAIDSEGNKIANPRFLKRAAANLRRKQKALSRCQKGSKGRAKARLKLAKAHERLANARADFQHNLSRQLIDENQAVVVETLKVKNLLKNRKLAKHIADASWFGLIQKLAYKAKAQGKYLVKIDQWFASSKACSCCGHQVDSLPLSVRNWTCPACAAELDRDINAAINIRQQGIIKLRAEGLSAPANGGLRKSGHAPVAA

SEQ ID NO: 2625 - protein, 389 aa, unidentified
MLKATKVRIYPTPKQAEFLNRQFGAVRFTYNKALHIISSQYKRHGLRLKAKKDLKPLLAVAKKSRKYHWLGDFDSIALQQACINLDKAFQAFFDPKLPARYPTFKRKHGKQSSYHCMSVSAGDNWIKVPKMKPIKARVHRELDGKLKSITLSRTVTGKYYASLLIEDGVEAPVPMQTVDTVLGVDMGLTHLAIDSEGNKIANPRFLKRAAANLRRKQKALSRCQKGSKGRAKARLKLAKAHERLANARADFQHNLSRQLIDENQAVVVETLKVKNLLKNRKLAKHIADASWFGLIQKLEYKAKAQGKYLVKIDQWFASSKTCSCCGHKVDSLPLSVRNWTCPACAAELDRDINAAINIRQQGIIKLRAGGLSAPANGGLRKSGHAPVAA

SEQ ID NO: 2626 - protein, 507 aa, unidentified
MKVKRAIRIRISSKRKRGARELACDLAQFRNLLLIFQSRYYALFGQVILNQSVIYSLLADQTMKKKPEQEEALREASERIIQHPDLQELIQRMKEQKARVDNNYVLQTTIRQVIKDYKSFLASLAEYRVNPGKYKERPQPPKPKKLGKLTQVTAEFNSNVFEVEGNTLFLRLRMNGKKRIKIKLPRDVESVSSVRLVYHLSDVWVDVIYEKELKEPEAGLIHLAGIDMGMDNLISLISTSPDVKSLIISGREIKSFNCWFNKKKAAVQSAMDTLSNKIAQEEDEPRKNAMSKELLKLKFYLHNLYNYRDRWIESHFHKVARVLADFLYETGHKAVYLGKGATESKDGIDLGKVTNQNFVSIPFRKLINILKYKLEELGMKAEEKEESYTSKASSLSDDILEIQRKYAEVKEKQGEIKVKCSGKRIERGLYRDNVLNKVFNADLNGALNILKVGAKLRRLTLSLKVLLCKLCNPLRLNLYDFIYRFKSKAESPPGIGDSRLATAGLTR

SEQ ID NO: 2627 - protein, 507 aa, unidentified
MKVKRAIRIRISSKRKRRARELACDLAQFRNLLLIFQSRYYALFGQVILNQSVIYSLLADQTTKKKPEQEEALREASERIIQHPDLQELIQRMKEQKARVDNNYVLQTTIRQVIKDYKSFLASLAEYRVNPGKYKERPQPPKPKKLGKLTQVTAEFNSNVFEVEGNTLFLRLRMNGKKRIKIKLPRDVEGVSSVRLVYHLSDVWVDVIYEKELKEPEAGLIHLAGIDMGMDNLISLISTSPDVKSLIISGREIKSFNCWFNKKKAAVQSAMDTLSNKIAQEEDEPRKNAMSKELFELKLYLHNLYNYRDRWIESHFHKVARVLADFLYETGHKAVYLGKGVTESKDGIDLGKVTNQNFVSIPFRKLINILKYKLEELGMKAEEKEESYTSKASSLSDDILEIQRKYAEAKEKQGEIKVKCSGKRIERGLYRDNVLKKVFNADLNGALNILKVGAKLRRLTLSLKVLLCKLCNPLRLNLYDFIYRFKSKAESPPGIGDSRLATAGLTR

SEQ ID NO: 2628 - protein, 507 aa, unidentified
MKVKRAIRIRISSKRKRRARELAYDLAQFRNLLLIFQSRYYVLFGQVILNQSVIYSLLADQTTKKKPEQEEALREASERIIQHPDLQELIQRMKEQKARVDNNYVLQTTIRQVIKDYKSFLASLAEYRVNPGKYKERPQPPKPKKLGKLTQVTAEFNSNVFEVEGNTLFLHLRMNGKKRIKIKLPRDVESVSSVRLVYHLSDVWVDVIYEKELKEPEAGLIHLAGIDMGMDNLISLISTNPDVKSLIISGREIKSFNCWFNKKKAAVQSAMDTLSNKIAQEEDEPRKNAMSKELLKLKFYLHNLYNYRDRWIESHFHKVARVLADFLYETGHKAVYLGKGATESKDGIDLGKVTNQNFVSIPFRKLINILKYKLEELGMKAEEKEESYTSKASSLSDDILEIQRKYAEVKEKQGEIKVKCSGKRIERGLYRDNVLKKVFNADLNGALNILKVGAKLRRLTLSLKVLLCKLCNPLRLNLYDFIYRFKSKAESPPGIGDSRLAAAGLTR

SEQ ID NO: 2629 - protein, 507 aa, unidentified
MKVKRAIRIRVSSKRKRGARELAYDLAQFRNLLLIFQSRYYALFGQVILNQSVIYSLLADQTTKKKPEQEEALREASERIIQHPDLQELIQRMKEQKARVDNNYVLQTTIRQVIKDYKSFLASLAEYRVNPGKYKERPQPPKPKKLGKLTQVTAEFNSNVFEVEGNTLFLRLRMNGKKRIKIKLPRDVESVSSVRLVYHLSDVWVDVIYEKELKEPEAGLIHLAGIDMGMDNLISLISTNPDVKSLIISGREIKSFNCWFNKKKAAVQSAMDTLSNKIAQEEDEPRKNAMSKELLKLKFYLHNLYNYRDRWIESHFHKVARVLADFLYETGHKAVYLGKGATESKDGIDLGKVTNQNFVSIPFRKLINILKYKLEELGMKAEEKEESYTSKASSLSDDILEIQRKYADVKEKQGEIKVKCSGKRIERGLYRDNVLNKVFNADLNGALNILKVGAKLRRLTLSLKVLLCKLCNPLRLNLYDFIYRFKSKAESPPGIGDSRLAAAGLTR

SEQ ID NO: 2630 - protein, 357 aa, unidentified
MLKATKVRIYPTTEQAEFLNRQFGAVRFCYNTGLRIMSHRYKRHGQSLSAKHDIKKLLPVAKKSRKYGWLKEADSMALQQSCINLDHAFQRFFDPKQKAGYPRFKSKRGKQSSYHCVGVKAGDNWIKVPKLGPIKAKVHRPVDGKLKSITLSRTVTGKHYASLLFDTDQATPVPTMDVDTSRVVGLDMGLSHLAIDSNGRKVANPRFLKQAQKNLKRKQQALSRTKKGSARRAKARLLVAKAYERVANARNDFQHKLSRQIVDDNQAVIVETLKVRNMMKNTCLAKHIGDASWHALMTKLDYKAREQGKHLVKIDPWFASSKTCHVCQHKMDAMPLNVRSWSAPPATHSTTGTSTRR

SEQ ID NO: 2631 - protein, 401 aa, unidentified
MNVIRQKHHSTPIHIIDHDHRFVSMQHLDGFFKLRDQIDYRALPAQANQNVLHMLYRDWKSFFAALADYKAHPDKYEAIPHIPRYADKDGYKPLIFTNQICKLRKDKHGWYVKFPKAVLQAGCVRDRYDLGKMDLHEQKLKEVRLIPNGDTINLEIVCEIEIKEPTITIHEATRVAGIDIGVDNLMAIAFTSGHHPVLIKGNEIKAVNQFYNKQIAHYRSLLRTGKKDSKGIHQTKRMKRISEKRNRRVKDILHKASRKIIDLCVEEGIEVIVVGNHAGWKKRIHMGKKNNQTFVQIPFRTLIEMIKYKGEAAGIRVVVCEEAIQSKASSIDEDQIPVYGNDVAHTFTGKRIKRGLYRSKNGILMNADINGASNIIRKVYPCMPKRERWSRGTVNVPVTCI

SEQ ID NO: 2632 - protein, 361 aa, unidentified
MHRAYKFRLYPNKEQATLINKTIGCTRFVFNHFLAKRKDAYEQEKKTLNYNDCSAMLTQLKKEMEWLKEVDSTALQSTLKDLDSSYKKFFKEKKGYPKFKSKKNPKQSYACKMNIKVEGDRIKLPKLGWVTFAKSREVEGRILSATVRKNPSGKYFVSVLCETEIQPLLQAEKTVGVDLGIKDFAILSTGEKIANPKALRYYEKKLATWQQKLSRRKKGGQNREKSRKQVARLHERISNTRNDFLHKLSTQLIRENQTICLEDLRVENMIKNHKLAKSIADASWSAFRTMLEYKAAWYGRTISVVGKQFPSSQLCSGCGYQNKEVKNLNLRNWTCPNCGVQHDRDKNAAINIEQEGLRLLA

SEQ ID NO: 2633 - protein, 391 aa, unidentified
MLKATKIRIYPTTEQAVFLNRQFGAVRFVYNTGLRIMSHRYQRHGQSLSAKHDIKKLLPVAKTSRKYGWLKEADSIALQQACMNLDHAFQRFFDPKQKSGYPRFKSKRGKQTSYHCVGVKAGDDWIKVPKLGPIKARMHRKVEGRLKSITLTRTVTGKHYASLLFDTEQAAPALLKDVDTTKVVGLDMGLSHLAIDSTGRKIANPRFLKQAQKNLKRKQQALSRTKKGSANRAEARLLVAKAHERVANARHDFQHKLSRQIVDDNQAVIVETLKVGNMMKNRRLAKHIGDASWYALITKLDYKAKEQGKHLVKIDPWFASSKTCHVCQHKRDAMPLNVRSWECPACHTQHDRDINAALNIKQQGIIQLKAEGLSVSAHGGLRKSGTSPAAA

SEQ ID NO: 2634 - protein, 372 aa, unidentified
MIVVEKAYKFRMYPNKKQQELINKTFGCCRFVYNKYLAKRIEVYKNDKETFTYKQCSSDLTNLKKELKWLKEPDKFSLQNALKDLDNAYKKFFKEKAGFPKFKSKKINRFSYKTNFTNGNIMYCGQHIKLPKLGMVKIRDKQVPKGRILNATISKEPSGRYYVSLCCTDVDIEAFENTNNHIGLDLGIKEFCISSCGDFIENPKYLKKSLNKLAKLQRELSRKTIGSLNRNKARLKVARLQEHIANQRNDFLQKLSTKLIKENDIICIEDLQVKNMIRNRKLSRLISDVSWSEFIRQLEYKANWYGRQIVKVGKFFASSQICNKCGYKNEEVKNLNIREWICPSCNETHDRDINASINILKEGLRLITIQNK

SEQ ID NO: 2635 - protein, 372 aa, unidentified
MVVVEKAYKFRMYPNKKQQELINKTFGCCRFVYNKYLAKRIEVYKNDKETFTYKQCSSDLTNLKKELKWLKEPDKFSLQNALKDLDNAYKKFFKEKAGFPKFKSKKINRFSYKTNFTNGNIMYCGQHIKLPKLGMVKIRDKQVPKGRILNATISKEPSGRYYVSLCCTDVDIEAFENTNNHIGLDLGIKEFCISSCGDFIENPKYLKKSLNKLAKLQRELSRKTIGSLNRNKARLKVARLQEHIANQRNDFLQKLSTKLIKENDIICIEDLQVKNMIRNRKLSRLISDVSWSEFIRQLEYKANWYGRQIVKVGKFFASSQICNKCGYKNEEVKNLNIREWICPSCNETHDRDINASINILKEGLRLITIQNK

SEQ ID NO: 2636 - protein, 514 aa, unidentified
MKTLEFKIYPSTTQAQTIDLWLEQLKWVWNRGLEIRLEAQQRRWKEKVNRPLPDSLKLKWKNGKLVGCGVRKTKAGHKYCEIRTCRNIENPQKFAQCEFFRSDNIPNWLRDVPAKFRSSVNDALDKAWKAYTNPKHPGRRPKFKGKYDKLKSLLNRNAGGKAKELKPEKISGSDNGYVCFPKLGKLYIKGLFKRFSANCNYGAARILKEPSGYYLQVCVSSTDIQLPPNNKAVGIDPGVSAVIATDKGRLVPNPRLLDKKSKRLRFLQRKLARQHKDSNSAKKTKKLIALCHEKIRRTRNAFYHKLSTKLVREYGAIAFEDTKLQNMTRRPKAVLREDGNGYEQNGAKRKAGLNRSLLDVGIGDLRAKIEAKAASWGREFERTHAPYSSQNCHCCGIKGDRCNQSEFICINPECKAYGLIQQADTNASQNHLLNSSFLISGKYRSWEWELMPLKGGETPSMQVEAVQTAPEAEYASRSRGLGQSQASLTSQKRSQTSCIQLTLWDWAAQMDAGG

SEQ ID NO: 2637 - protein, 506 aa, unidentified
MSIVTLELKIYPTVAQAQTIDLWLEQLKWVWNRGLELRLEAQQRRWREKLDRPLPDSLKLKWKNGKLVSCGVRKTKAGHKYCEVRTCRDIDSPKKFVQCEFFRSDNIPQWLQDVPTKFKSGVNDALDKAWKAYSDPKHPGRRPRFKGKHDKLKSLLNRNAGGKCKELKPERIPGGDNGYVRFPKLGKLYVKGLFKRFLSDEYGSARILKEPSGYYLQVCVNAPDVVLPVSYRAVGIDPGLKSVITTDAGREVAPPKIYRNQLHKLRRLQRKASRQAKGSSNQKKTYHLIARLHEKIRRSRNAFNHKLSTKIVREYGSIAMEDLQIKNLTRKPKAKPQENGLGYEQNGAKRKAGLNKSFADSALGDLISKIESKSKVAGREFVKVPAHYSTINCSQCGEKIKKSLSVRTHRCTCGYVAGRDENAAQNILLKGCELFKQTYRSWEWKRGASPKPVSASEIEGQQEAGKPAPSPEYGDRSRGSGDVNSPFAPLIPSQALNPPKGRNKKK

SEQ ID NO: 2638 - protein, 416 aa, unidentified
MAIQVTRTYVGSIQNQQQVCDGLDSLGDSASKIWNVARWTADRIWDATGEIPDEDVLKSYMKNQSCWKDLNAQSSQKVIEELSDAFQSWFDLRHKFDEANPPGYRKHGDTRPHSTVTFKADGFKHDPENNRVRLSKGSNLKEYWSDFLLCEYQTRPDVDLSEVNSVQNVRAVWNGDEWELHFVCKVELETNDSAGDRVAGIDLGIKNIATVAFPDEYVLYPGNSLKQDKHYFKRAEYDTEGENGPSEKSMWARRKLADRETHFYHVLSDAIITECVERGVGTLAVSWPEKVRESDWGKTGNKKLHSWAFDRIYQYLEYKGEIRGVKVLKENEWDTSKTCSACGDYTKSNRKHRGLYVCSSCELVANADCNGAENMRQKITPSPHGEDRSNGCVAQPSTYLFDRESGTFRTREQVVS

SEQ ID NO: 2639 - protein, 372 aa, unidentified
MIAVKKAYKFRMYPNKKQQELINKTFGCCRFVYNKYLAKRIEVYKNNKETFTYKQCSSDLTNLKKELNWLKEPDKFSLQNALKDLENAYEKFFKEKTGFPKFKSKKTNRFSYKTNFTNGNIMYCGQHIKLPKLGMVKISDKQVPKGRILNATISKEPSGRYYVSLCCTDVDIEAFENTNNQIGLDLGIKEFCISSCGDFIENPKYLKKSLNKLAKLQRELSRKTIGSLNRNKARLKVARLQEHIANQRKDFLQKLSTKLIKENDIICIEDLQVKNMIRNHKLSRLISDVSWSEFIRQLEYKANWYGRQIVKVGKFFASSQICNKCGYKNEEVKDLNIREWICPSCNETHDRDINASINILKEGLRLITIQNK

SEQ ID NO: 2640 - protein, 416 aa, unidentified
MVIQATRTFVGSIQNHRQVCDGLDSLGDSASKIWNVARWTVDRIWDEIGKIPDEGPLKSYMKDQACWKDLNAQSSQKVIEELSDAFQSWFDLRHKDDKANPPGYRKHGDTRPRSTVTFKADGFKHDPGNNRVRLSKGKNLKEHFSDFILCEYQTHPDVDLSEVNKVQNVRAVWNGDEWELHFVCKVSLETNDSAGDEVAGIDLGITNIATVAFPDEYVLYPGNSLKQDKHCFKRAEYDTEGENGPSEKSMWARRKLTDRETHFYHTLADTIITECVERSVGTLAVSWPENIRESDWGKTGNKKLHTWAFDRIYQYLEYKGEKRGVEVSKENEWDTSKTCSKCGDDTKSNRKHRGLYVCSSCGLVGNADCNGAENMRQKITPSPHGEDRSNGCVAQPSVHLFDRESGMFHTREQAVS

SEQ ID NO: 2641 - protein, 238 aa, unidentified
MLKNHKLAKAISEVSWSQFRTMLEYKAKWYGKQIIVVSKTFASSQLCSCCGYQNKDVKNLKLRKWDCPSCRTHHDRDINASINLKNEANTSTDIVPMGQVHGWYSLRWQIEILFKTWKSFFQIHHCKKIKPERLECHLYGQLIAILLCSSIMFQMRQLLLMKKKRELSEYKAIYMIKDYFLLLFQSIQKNTQELSKVLLRLFNLLQQNGRKSHRYEKKTVFDILGVVYNCTLSDNQAA

SEQ ID NO: 2642 - protein, 373 aa, unidentified
MIVNKAYKFRIYPNKEQEILINKTFGCSRFVFNHFLAKWDNAYKETGKGLTYNSCSAQLTQLKKELTWLKEVDSIAIQSSLKNLADAYSRFFKKQNNKPRFKSKKNPVQSYTTKHTNGNIAIDGNKIKLPKLGWIRFAKSREVEGRILNATIRRNPTGKYFISILVETEVQELPKTNSAVGIDVGLKDFAILSDGTKYENPKWLRKLEKKLAKAQRILSRRKKGGSNWNKQRIKVARIHEKITDARNDYLHKISTEIVKNHDIIGIEDLQVSNMLKNHKLAKAISEVSWSQFRTMLEYKAKWYGKEVVTVAKNFPSSQLCSCCGYKNKDVKNLGLREWECPNCHTRHDRDINASINIKNEAIRLLTVGTTGIA

SEQ ID NO: 2643 - protein, 408 aa, unidentified
MQKAFKVTLIPTHNQEVLINKTIGCARYVYNRFLALRQELYATEQKTLNYNTCSQQLTLLKKEIEWLNVVDKFALQNSLKNLETAYKNFFAGLKKSKNKKGVGFPKFKKKHGCKQSYKTNLTNGNIQVIDNRLKLPKCGWVKFHKSQDITGKLINVTITRTSSGKYIASILCETEIEKYPQVTQNIGLDLGIKSYLVTSDGEVVDNPKYYRIQKRKLRSYHKKLSRTVKGSSNRVKAKIKLARTYSRITNLRDDFLHKLSTRLIKYYSIICIEDLRVANMVKNHKLALSISDASWSKFITMLEYKALWHDRIVQKVGMFYPSSQTCNCCGFINPLVNNLNLREWSCPSCNSYNLRDKNAALNILSEGLRLLTAVGTPEVIKSACGELVSPGAIQAEIVEAGITRLQVV

SEQ ID NO: 2644 - protein, 276 aa, unidentified
FPKAVLQAGCVRDRYDLGKMDLHEQKLKEVRLIPNGDTIKLEIVCEIEIKEPTITIHEATRVTGIDIGVDNLMAIAFTSGHHPVLIKGNEIKAVNQYYNKQIAHYRSLLRTGKKDSKGIHQTKRMKRISEKRNRRVKDILHKASRKIINLCVEEGIEVIVVGNNAGWKKRIHMGKKNNQTFVQIPFRTLIEMIKYKGEAAGIRVVVCEEAIQSKASSIDEDQIPVYGNDVAHTFTGKRIKRGLYRSKWHSNECRYQWSKQYHTKSISMYARARAME

SEQ ID NO: 2645 - protein, 396 aa, unidentified
MRLLLKAFKTEIAPTKEQRDKIIRSIGVARFLYNQYISYNRRLYKMYRRGMLDERQKYFVTAVDFDKYVNHKLKQELPWIDQCGSKARKKALVNAEQAFRRFFAGISRFPTFKKKTNQDVKLYFPRNNKGDWKIWRHKLMIPTLKQVKLKEYGYLPVGMTATSGTVSYVAGRFYVSVVVDIDAKSKYNKDLDSCYAIQTEGIGIDLGVKDLAVVSDGRVFENINKSSKVKRLEKRLRREQRRLSRKYVGKVDTVSANIEKQKLKVQKLHQRITRIREDYENKTVHEIVKQKPRFITVEDLNVKGMMKNRHLAKAVAAQRFNHLLSKLKRKAKIIGIELREVDRFYPSSKTCHACGHVHRGLKLKDRVYICPECGYRMDRDYNASLNLRDAKEYRVV

SEQ ID NO: 2646 - protein, 374 aa, unidentified
MPVHKAYKFRMYPNKKQEVLINKTFGCSRFVFNHFLVRWNDTYKKTGKGLSYQACSSQLTKLKKEYTWLKEVDSIALQTSLKHLSDAFTRFFQKQNDKPRFKSKKNKVQSYTTKYTKGNIAIVGNKIKLPKLGFVRFAKSREVEGRMLSVTIRRNPSGKYFVSILVKTDVQPLPKTHTAVGIDMGLKNFVILSDGTTYANPKFLRKLEKKLVKAQRILSRRKIGSSNWHKQRIKVARIHEKITNSRNDYLHKISTEIVKNHDIIGMEDLSVASMLKNNKLSKAICEASWATFKAMIAYKAKWYGKQLVVVAKNFPSSQLCSHCGYQNKDVKHLTLREWQCPNCHTRHDRDVNASINIKNEAVRLLTAGTAGLAY

SEQ ID NO: 2647 - protein, 390 aa, unidentified
MLKHKAYKFRIYPTKEQEILIAKTIGCSRFVFNHFLAKWEKMYKTTGKGLSYGSCSKEIPLLKQEFDWLKEVDSTSVQISVKHLADAFDRFFKKQNKRPRFKSKRHPVQSYKTNIQGKNQLPEVSIGCNKLKLPKLKWVRFAHSKQVTGRILNATIRGNASGKHFVSLLVEQEINELPKTGSSVGVDVGLKNFAILSDGTIYKNDRYFRKLEKKLAREQRKLSRRQRIALNKKVTLSEARNYQKQKRKVARIHEKIANKRTDFLHKVSNEIVKNHDVIGIETLQVKNMQKNRKLSKAISDVSWSAFFRMLEYKAEWYGKTVVKVGKTFASSQLCSSCGHQHKDVQHLGLREWTCPSCGIHHDRDVNAGLNLKQEAERILASSTVGTTGLA

SEQ ID NO: 2648 - protein, 416 aa, unidentified
MAIKVTRTYVGSIQNHRQVSDDLNSLGDAASKIWNVARWTADRVWDATGEIPDEGPLKSYMKNQPCWKDLNAQSSQNVIEELSDAFHSWFDLRHKDETANPPGYRKHGDTRPKSTVTFKEDGFKHDPENNRVRLSKGSNLKEYWSDFILCEYRTRPDVDLSDVNSVQNVRAVWNGGEWELHFVCKVSLETTDSTGDEAAGIDLGIKNIATVAFPDEYVLYPGNSLKQDKHYFTRAEYDTEGENGPSAKSMRARRKLADRETHFYHTLTDTIITECVERGVGTLAVGWPEDVRNSDWGKTGNKKLHTWAFDRIYQYLAYKGEIRGVEVLKENEWDTSKTCSACGDNTKSNRVERGLYVCSSCGLVGNADCNGAENMRQKMTPSPHGEDRSNGCVAQPSVHLFDRESGAFAPREQVVS

SEQ ID NO: 2649 - protein, 416 aa, unidentified
MAIQVTRTYVGSIQNHRQVCDGLDSLGDSASKIWNVARWTADRIWDETGDIPDEGVLKSYMKNQSCWKDLNAQSSQKVIEELSDAFQSWFDLRHKFDEANPPGYRKHGDTRPKSTVTFKADGFKHDSENNRVRLSKGSNLKEYWSDFLLCEYQTRPDVDLAEVNKVQNVRAVWNGDEWELHFVCKIELDTTDSAGDEVAGIDLGIKNIATVAFPDEYVLYPGNSLKQDKHYFKRAEYDTEGENGPSAKSMWARRKLADRETHFYHTLTDTIITECVERGVGTLAVSWPEDVRDSDWGKTGNKKLHSWAFDRIYQYLEYKGEIRGVEVLKENEWNTSKTCSRCGDDTKSNRVERGLYVCSSCGLVGNADCNGAENMRQKITPSPHGEDRSNGCVAQPSTYLFDRESGLFHTREQVVS

SEQ ID NO: 2650 - protein, 365 aa, unidentified
MQKAYRFRLYPNQKQQTLIHKTFGCCRFVFNHFLAKRKEVYEAERKTLGYNACSSMLTQLKKELEWLKEPDATALQTALRHLDDAFKRFFREKKGYPQFKSRKNPVQSYTSKNNNGSIAIAGNRIRLPKLGWVKFAKSREVEGRILSATIRKNPSGKYFVSVLVETEIQPLPVCDSKVGVDLGVKDFATLSTGEVIPNPKYLRRYEQKLIRWQRKLSRRKKGGSNWHKARLKVARLHEKVVNCRKDFLHKLSTRLIHENQVICLEDLSVQNMQKNHRLAKSIADVSWSTFCTMLAYKAKWYGRTVIRVDKTFPSSQICSACSYRHKEVKNLGLREWTCPSCGTHHDRDINAAKNILQEGLRLLSS

SEQ ID NO: 2651 - protein, 391 aa, unidentified
MTTHRKVYRYRIEPTSVQESKLCMLAGSRRFVFNWALARRREHYAETGKTLGYNAQAGELTALKNQQETSWLKESDSQLLQQALKDVERAFVNFFEKRARFPRFKSRKTDSPRFRIPQRVQIEGSRVYIPKVGWVKLRKSQDIDGATKSATFKREADGHWYVSLVSEFEMPDVPLPPIPESEVVGIDLGLKDFYVLSDGGRKKAPRFARRGQRKLRRAARRHSKCTKGSNRKAKAKRKLARVHRQIANQRKDFVHKATSGLVRQYQGFCIENLSIKGMAKTKLSKSVLDAALGEFRRQLTYKAQWHRKWLAVIDRWFPSSKLCGDCGSINTNLTLSDREWTCECGAIHDRDLNAARNIKREGLSQIVVAGHAETLNARGEGVRPATAGSPQ

SEQ ID NO: 2652 - protein, 400 aa, unidentified
MRTAYKVRIYPTSEQTAVLNRTFGCVRLVWNKVLAWRHARYHTQGVKTSYAETDRYLTALKREPEHGFLFEVSSVPLQQALRHQYTAFVNFFAGRARYPRYKSRHGKQSATYTRSAFRWRDGRLHLGKMDGPLMFVWSWPDIDVTTLNPTTVTISRDPDGRWYASLAVEIDAEPEPLPATGRAVGVDLGVKDFAVNSDGERIRNPRHLERKVRNLARYQRRMARKQRGSNNRAKAKAKVARTHAKVRDARQDFLHKASTRLVRDHDVIAIEDLNVRGMVRNRSLARAISDCGWGEFRRLLEYKCERYGRRLVVIDRWHPTSKTCSACGHLLAELSLSTRHWTCPTCRTRHDRDINAAKNILAAGQAVSACGADVRHSGSSRVRSAVKQEAQSARTGIPRL

SEQ ID NO: 2653 - protein, 382 aa, unidentified
MHKAFKFRIYPTKEQEILINKTFGCCRFVFNHFLEKWNEAYEQTGKGLTYHTCANQLTQLKKEWEWLNEADSTALQNALKHLDDSFQRFFKKQNDPPRFKSKKNPVQSYTSQCNYPKKGKPTVEVVGNQIKLPKLGWVTFAKSREVEGKILSATIRRNPTGKYFVSIVCEPEIEPLPTSKKAVGVDLGLKDFAILSTGEKINTPKYFRKYEKKLVRWQRILSRRQKGGSNWNKARLKVARIHEKIVNARRDFLHKLSTKLIDENQVICLEDLQVKNMVKNHHLAKSITDASWSEFVDMLEYKAKWYGRTIVKVGKQFPSSQRCSDCGYQNKEVKNLKLRVWTCPNCGAHHDRDVNAAINILQEGIRLFTAGPAGGAWSISLR

SEQ ID NO: 2654 - protein, 560 aa, unidentified
MKTLEFKAHPTQAQILVLESWLATQKWVWNRSVGLIKDFNQFNVYHKPDKRTYPASPIVVEHRWLWQPRTLWADEAGIESPLLTREVVTKGDKELESYRVGGVEVKPWQSGEYPCCPIGWRVADGQNIEPTGKKGDLIHPVRMADGGHPAVSLSALGMAYAFAQKLNPGLKDCPANFNRGTVAAAAKSWDAFKKDKTGTRRPPKFKRKYDRVDTLIHNDSKGIRIEGNRIQVPVLGWLRVQGLSKRWPQGVPFCPLKICRKASGWYVQLTGEVGDRPPVKFTGKVAGLDAGATQVYTDDAGRSLEPPRYLKASAQKLARLQRKYARSFQQNAETVAGRKRWGADGPTKNAQKIQKRIARLHEKIARSRRAFNHWQSTKLVRQFDAIAVEDLNLRGMTRAPKAKARDDGKGFAQNGAKRKAGLNKVLLDNAIGQLFQLTETKATAAGKAFMRVPPHWTSRRCPKCGSEKPENRPRPGAPFRCVDCGHYDSDGDRNAAINIKAMMTGDRPKPEDKPKATKARKGKAKPKDTPVENAPIEIVGDVGDRDSQGAVQFGDQLSLF

SEQ ID NO: 2655 - protein, 402 aa, unidentified
MQRAFKVTLIPNHNQEVLINKSIGCARFVYNHFLALKQELYQSEQKTLSYNDCSQRLTLLKKEIEWLKEVDKFALQNSLKNLEIAYKNFFADLKKVKSKTGVGFPKFKKKHGCKQSYKTNLTNGNIQVIENRLKLPKLGWVKFHKSQEVTGKLINVTITRTSSGKYVASILCETEIEKHPQVSQNIGIDLGIKSYLVTSNGEVVENPKYYRVQKRKLLKAHKKLSRSVKGSTNRVKAKIKLARTYERITNLRDDFLHKLSTRLIKENSIICIEDLRVANMVKNHNLALSISDASWSKFVAMLEYKALWHDRIVQKVGTFYPSSQTCNYCGFINPLVKDLKLREWACPGCSGYNLRDNNAALNILGEGLRLIAAVGIPEALNACGELVSPGAIQADIVEAGIT

SEQ ID NO: 2656 - protein, 402 aa, unidentified
MQKAFKVTLIPNHNQEVLINKSIGCARFVYNHFLALNQELYQTEQKTLNYNACSQRLTLLKKEVEWLQEVDKFALQNSLRNLETAYKNFFADLKKIKGRKNVGFPKFKKKHGGKQSYKTNITNGNIQVIENRLKLPKLGWVKFHKSQEITGKLVNVTITRTSRGKYIASILCETEVEKYPQVTQNIGLDLGIKSYLVTSVGEVVNNPKYYRTQTRKLRSCHKKLSRSIKGSNNRVKAKIKLARTYERITNLRDDFLHKLSTWLIKENSVICIEDLRVANMVKNHKLALSISDASWSKFVTMLEYKALWHDRIVQKVATLYPSSQTCNCCGFVNPLVKDLKLREWFCPQCSIYNLRDNNAALNILSEGLRLIAAVGIPEALNACEELVSPELLQAESVEAGIA

SEQ ID NO: 2657 - protein, 361 aa, unidentified
MHRAYKFRLYPNREQATLINKTIGCTRFVFNHFLAKRKDAYEQEQNTLNYNDCSALLTQLKKEIEWLKEVDSTALQSTLKDLDSSYKKFFKEKKGYPKFKSKKNPKQSYTCKMNIKVEGDRIKLPKLGWVTFAKSREVEGRILSATVRKNPSGKYFVSVLCEIEIQPLIQAEKTVGVDLGIKDFAILSTGEKIANPKVLRYYEKKLATWQQKLSRRKKGGQNREKSRKQVARLHERISNTRNDFLHKLSTQLIRENQTICLEDLRVENMIKNHKLAKSIADASWSAFRTMLEYKAAWYGRTISVVGKQFPSSQLCSGCGYQNKEVKNLNLRNWTCPNCGVQHDRDKNAAINIEQEGLRLLA

SEQ ID NO: 2658 - protein, 361 aa, unidentified
MHRAYKFRLYPNKEQATLINKTIGCTRFVFNHFLAKRKDAYEQEQKTLNYNDCSAMLTQLKKEIEWLKEVDSTALQSTLKDLDSSYKKFFKEKKGYPKFKSKKNPKQSYTCKMSIKVEGDRIKLPKLGWVTFAKSREVEGRILSATVRKNPSGKYFVSVLCETEIQPLLQAEKTVGVDLGIKDFAILSTGEKIANPKVLRYYEKKLATWQQKLSRRKKGGQNREKSRKQVARLHERISNTRNDFLHKLSTQLIRENQTICLEDLRVENMIKNHKLAKSIADASWSAFRTMLEYKAAWYGRTISVVGKQFPSSQLCSGCGYQNKEVKNLNLRNWTCPNCGVQHDRDKNAAINIEQEGLRLLA

SEQ ID NO: 2659 - protein, 361 aa, unidentified
MHRAYKFRLYPNREQATLINKTIGCTRFVFNHFLAKRKDAYEQEQNTLNYNDCSALLTQLKKEIEWLKEVDSTALQSTLKDLDSSYKKFFKEKKGYPKFKSKKNPKQSYTCKMNIKVEGDRIKLPKLGWVTFAKSREIEGRILSATVRKNPSGKYFVSVLCEIEIQPLLQAEKTVGVDLGIKDFAILSTGEKIANPKVLRYYEKKLATWQQKLSRRKKGGQNREKSRKQVARLHERISNTRNDFLHKLSTQLIRENQTICLEDLRVENMIKNHKLAKSIADASWSAFRTMLEYKAAWYGRTISVVGKQFPYSQLCSGCGYQNKEVKNLNLRNWTCPNCGVQHDRDKNAAINIEQEGLRLLA

SEQ ID NO: 2660 - protein, 416 aa, unidentified
MVIQATRTYVGSIQNHRQVCDGLDSLGDSASKIWNVARWTADRIWDATGEIPNGSVLKSYMKNQSCWKDLNAQSSQKVIEELSDAFQSWFDLRHKDEKANPPGYRKRGDTRPRSTVTFKEDGFKHDPENNRVRLSKGSNLKDHFSDFLLCEYQTRPDVDLSEVNRVQNVRTVWNGDEWEVHFVCKVELETADSAGDGVAGIDLGITNIATVAFPDEYVLYPGNSLKEDEHYFTRAEYDTEGENGLSEQSMWARRKLSERETHFYHTLTDAIVTECVERGVGTLAVSWPEDVRESDWGKTGNKKLHSWAFDRIYQYLEYKGEMRGVEVLKENEWNTSKTCSRCGDDTKSNRVERGLYVCSSCELVANADCNGAENMRQKITPSPHGEDRSNGCVAQPSTHLFDRESGTFHTREQVVS

SEQ ID NO: 2661 - protein, 403 aa, unidentified
MQKAFKVTLIPNHNQQVLINKTIGCARFVYNHFLALKQELYTTEQKTLNYNACSQQLTLFKKEIEWLKEVDKFALQNSLKNLEAAYKNFFADLKKSKNKKGVGFPKFKKKNGCKQSYKTNLTNGNIQIIQNRLKLPKLGWVKFHKSQDIAGKLVNVTINRTASGKYIASILCETEIEKYPQVTQNIGLDLGVKSYLVTSNSEVVDNPKYYRTQKRKLRKAHKKLSRTVKGSSNRVKAKVKLARTYERITNLRDDFLHKLSTRLIKENSIICIEDLRVANMVKNHKLALSISDASWSKFITMLEYKALWHDRVVQKVDTFYPSSQTCNHCGFINPLVKDLKLREWSCPSCNNYNLRDKNAALNILSEGLRLLTAVGTPEVIKNACGELVSPELFQAEIFEAGIA

SEQ ID NO: 2662 - protein, 391 aa, unidentified
MLKATKIRLYPTPEQVAFLNRQFGAVRFVYNTGLRIMSHRYQRHGQSLSAKHDIKKLLPVAKKSRKYGWLKDADSIALQQACLNLDHAFQRFFDPKQKAGYPRFKSKRGKQSSYHCIGVKAGDDWIKVPKLGPIKARMHRQVEGRLKSITLARTVTGKHYASLLYDTEQVAPAPLKDVDAAGVIGLDMGLSHLVIDSTGRKIANPRFLKQAQQNLKRKQQALSRTKKGSANRAKARSLVAKAHERVANTRNDFQHKLSRQIVDDNQAVIVETLKVRNMMKNARLAKHIGDASWHALMTKLDYKAREQGKHLVKIDPWFASSKTCHVCRHKMDAMPLSLRSWECPACHTQHDRDINAALNIKHQGIIQLKAEGLSVSAHGGLRKSGTSSAAA

SEQ ID NO: 2663 - protein, 402 aa, unidentified
MRRLLKAFKTEIVPTEEQKGKIVCSIGVARFLYNQYIACNRRLYKMYQCGLLDAGQKHFVTANEFDKHVNHKLKKELPWINLCGSKARKKALVNAEQAFKRFFAGTSGFPNFKKKTNQDVKLYFPRNNKGDWKIWRHKLMIPTLKQVRLKEYGYLPIGMAAVSGTVSYAAGRFYVSVVVDIDEKSRYNNDLESCYARQTEGIGIDLGVKNLAILSDGRVFKNINKGSKVKRLEKRLRREQRRLSRKYEFRKKKGGKTAAASANIEKQKLKVQKLHQRIARIREDYENKVIHEIVKQKPRFITMEDLNVKGMMKNRHLSKAVAAQRFNHLLAKLKRKAEIIGIEFREVDRFYPSSKTCHACGHIHKGLKLKDRVYVCPECGYTADRDYNASLNLRDAKEYRVA

SEQ ID NO: 2664 - protein, 400 aa, unidentified
MRTAYKVRVYPTSHQAAVLNRTFGCVRLAWNKVLAWRHARYHTQGVKTSYAETDRYLTALKREPEHGFLSEVSSVPLQQALRHQYTAFVNFFAGRTRYPRYKSRHGKQSATYTRSAFRWRDGRLHLGKMDGPLMFVWSWPDIDVTTLNPTTVTISRDPDGRWYASLAVETNAEPEPLPATGRAVGVDLGVKDFAVTSDGERIRNPRHLERKARNLARYQRRMARKQRGSNNRAKAKAKVARTHAKVRDARRDFLHKAGTRLVRDHDVIAIEDLNVRGMVRNRSLARAISECGWGEFRRLLEYKCERYGRRLVVIDRWHPTSKTCSACGHLLAGLSLSTRHWTCPTCRTRHDRDINAAKNILAAGQAVSACGADVRHSGSSRVRSAVKQEAQSARTGIPRL

SEQ ID NO: 2665 - protein, 369 aa, unidentified
MEKAYKFRMYPNKKQQELINKTFGCCRFVYNKYLAKRIEVYKNDKETFTYKQCSSDLTNLKKELNWLKEPDKFSLQNALKDLENAYEKFFKEKAGFPKFKSKKTNRFSYKTNFTNGNIMYCGQHIKLPKLGMVKIRDKQVPKGRILNATISKEPSGRYYVSLCCTDVDIEAFENTNNQIGLDLGIKEFCISSCGEFIENPKYLKKSLNKLAKLQRELSRKTIGSLNRNKARLKVARLQEHIANQRNDFLQKLSTKLIKENDIICIEDLQVKNMIRNHKLSRLISDVSWSEFIRQLEYKANWYGRKIVKVGKFFASSQICNKCGYKNEEVKDLNIRDWICPSCNETHDRDINASINILKEGLRLITIQNK

SEQ ID NO: 2666 - protein, 401 aa, unidentified
MRKINRTYKFRLYPNKEQAELLARHFGCSRFVYNYFLNQRKEQYRLTGKSDNYYAQAKFLTEMKKQEATAWLKEVNSQTLQFAIRSLEVAYTNFFQKRAKFPSFKSKHSKNSFTVPQFASIAGNRIFIPKFKEGIKCCVHREIVGKIGKVTISKTPSGKYFVSVFTEEEYITPIEKSGKSVGVDLGLKNLLITSEGETFKNNRYTKKYERRLAKAQQHLSRKKKGSRGFENQKLKVARLHEKINNSRADYLHKCSVSLVRRYDTICIEDLNVKGMERNHRLAKSVADASWSTFVSMLTYKAEWNGKKVVKIDRFFPSSQTCNVCGYINKQTKDLSVREWECPVCHTHHNRDVNAAINILRFGLNHTSAGTVDYTGGEEVRADLLESRSSVKPEAHKSLACV

SEQ ID NO: 2667 - protein, 361 aa, unidentified
MHRAYKFRLYPNREQATLINKTIGCTRFVFNHFLAKRKDAYEQEQKTLNYNDCSALLTQLKKEIEWLKEVDSTALQSTLKDLDSSYKKFFKEKKGYPKFKSKKNPKQSYTCKMNIKVEGDRIKLPKLGWVTFAKSREVEGRILSATVRKNSSGTYFVSVLCETEIQPLLQAEKTVGVDLGIKEFAILSTGEKIANPKVLRYYEKKLATWQQKLSRRKKGGQNREKSRKQVARLHERISNTRNDFLHKLSTQLIRENQTICLEDLRVENMIKNHKLAKSIADASWSAFRTMLEYKAAWYGRTISIVGKQFPSSQLCSGCGYQNKEVKNLNLRNWTCPNCGVQHDRDKNAAINIEQEGLRLLA

SEQ ID NO: 2668 - protein, 402 aa, unidentified
MSLLLKAFKTEIAPTKEQEIKIIRSIGVARFLYNQYIAYNRRLYKMYQRGMLDEKQKYFVTANDFDKYVNHKLKIELPWIDQCGSKARKKALRNADQAFRRFFSGISGYPNFKKKANQDVKLYFPKNNKGDWTIWRHKLMIPTLKQVRLKEFGYLPVGAKVTNGTVSYVAGRFYVSVVVDIDEKSKHNKDLEASYHTVTAGVGIDLGVKDLAIVSDGKVFKNINKSSKVKRLEKRLRREQRCLSRKYEFRKKKGGKTATASANIEKQKLKVQKLHQRITRIREDYENKTVHEIVKQKPRFITVEDLNVKGMMKNRHLAKAVAAQRFNHLLAKLKRKAEIIGIEFREVDRYYPSSKTCHSCGHIHKGLKLKDRVYVCPECGYMADRDYNASLNLRDAKEYRGA

SEQ ID NO: 2669 - protein, 393 aa, unidentified
MKQKRAFKYRVYPTAQQQQILAQTFGCCRFIYNWALRKKTDAYYNEQRRLYYKDLSLLLTELKQQEETHWLNEVSSVPLQQALRHLDKAFLNFFEGRAKYPVFHKKRNTQSATYTANAFTWRNGCLTLAKMSEPLAIRWSRPLPDRAAPSSVTITKDCANRYFISILVEDGIEHVPSVETSIGADLGLTSFVVLSTGEVVGNPRFFHKDEKNLAKAQRRHARKKKGSKNRDKARLKVARIHARIADRRRDFLHKLSTRLIRENQTICVESLQVKNMVKHPTLSKAISDVGWSEFVAQLEYKADWYGRDLVKIDKWYPSSKRCFECGHLLDSLALDVRQWTCPACAVQHDRDINAAKNIRSVGLTVLNACGEAVRPGRVLSRSGKTPRSRKPSR

SEQ ID NO: 2670 - protein, 393 aa, unidentified
MSAEMLKATKVRIYPTPEQAEFLNRQFGAMRFVYNKALHIISSQYKRHGLKLKAKKDLKPLLAVAKKSRKYHWLKDFDSIALQQACINLDKAFQNFFDPKLPARYPKFKRKHGKQSSYHCTSVSAGENWIKVPKMKPIKAQVHRELDGKLKSVTLSRTVTGKYYASLLVEDGLQTPAPLHSVDTVLGVDMGLTHLAIDSEGNKTTNPRFLKCAQSNLRRKQKALSRCRKGSKGRTKARLKLAKAHERLANARADFQHNLSRQLIDDNQAVVVETLKVKNLLKNRKLAKHIADASWFGLIQKLEYKAKEQGKHLVKIDQWLASSRICSCCGHKVDTLPLSVRNWSCPACKAELDRDINAAVNIRQQGIIKLRAEGLSVPANGGLRKSGHAPVAA

SEQ ID NO: 2671 - protein, 393 aa, unidentified
MSAEMLKATKVRIYPTPEQAEFLNRQFGAMRFVYNKALHIISSQYKRHGLKLKAKKDLKPLLAVAKKSRKYHWLKDFDSIALQQACINLDKAFQNFFDPKLPARYPKFKRKHGKQSSYHCTSVSAGENWIKVPKMKPIKAQVHRELDGKLKSVTLSRTVTGKYYASLLVEDGLQTPAPLHSVDTVLGVDMGLTHLAIDSEGNKTTNPRFLKRAQSNLRRKQKALSRCRKGSKGRTKARLKLAKAHERLANARADFQHNLSRQLIDDNQAVVVETLKVKNLLKNRKLAKHIADASWFGLIQKLEYKAKEQGKHLVKIDQWLASSRICSCCGHKVDTLPLSVRNWSCPACKAELDRDINAAVNIRQQGIIKLRAEGLSVPANGGLRKSGHAPVAA

SEQ ID NO: 2672 - protein, 363 aa, unidentified
MLQKAYKFRIYPNKKQIQQINKTFGCSRFVYNYFLDKRIKIYEENKETLSYGKCSSILTILKQEKEWLKEVDKFALQNSLKDLDRAYQKFFKEKTGFPKFKSKHNNRQSYRTNYTNNNIEINENKIKLPKLGWVKFAKSREVEGKILNVTISKNPSGKYFASFCCEVEIVQLPTSDNKIGLDLGIKDFVISSNGDKIDNPKHLIKSEQKLKNLQRSLSRKKKGSKNRNKVRIKLAKQHEKISNQRLDFLHKLSTKLISENQVIYLEDLKVKNMQQNERLAKNIADASWSKFRNILEYKAKWYGREVKILDRWFPSSKTCSCCGFKNEKLTLDIREWTCENCGENHDRDINAAVNILQQGLKLA

SEQ ID NO: 2673 - protein, 372 aa, unidentified
MIVVEKAYKFRMYPNKKQQELINKTFGCCRFVYNKYLAKRIEVYKNDKETFTYKQCSSDLTNLKKELKWLKEPDKFSLQNALKDLDNAYKKFFKEKAGFPKFKSKKTNRFSYKTNFTNGNIMYCGQHIKLPKLGMVKIRDKQVPKGRILNATISKEPSGRYYVSLCCTDVDIEAFENTNNQIGLDLGIKEFCISSCGDFIENPKYLKKSLNKLAKLQRELSRKTIGSLNRNKARLKVARLQEHIANQRNDFLQKLSTKLIKENDIICIEDLQVKNMIKNRKLSRLISDVSWSEFIRQLKYKANWHGRQIVKVGKFFASSQICNKCGYKNEEVKDLSIREWICPSCNETHDRDINASINILKEGLRLITIQNK

SEQ ID NO: 2674 - protein, 400 aa, unidentified
MRTAYKVRVYPTAEQAAVLNRTFGCVRLVWNTVLAWRQARYRAEGVTTSYAQTDRYLTELKRDGGHDFLYEVSSVPFQQALRHQHTAFVNFFSGRARYPRFKSRHGRQSATYTRSAFRWRNGRLHLAKMDDPIAFAWSWPKVDPATINPATVTVSRDPDGRWYASIAVETETGPQPLPGTGGQVGVDLGVTDFAVLSTGEKIPNPRHLERKAKNLARYQRRMSRKQCGSNNRAKARTKVARAHAKIADARADFLHRTSTRLVRDHDLIVIEDLNVKGMVRNRRLARVISDCGWGEFRRQLEYKTARYGRRLVVIDRWYPSSKTCSACGHLLPALSLSARHWSCPGCGTRHDRDVNAAKNILAAGRAVSACGADVSPQGSSLRRSAVKQEAQPARAGIPRP

SEQ ID NO: 2675 - protein, 404 aa, unidentified
MKRLQAFKFQLRPGGQQERQMRLFAGACRFVFNRALALQNENYEAGNKYIPYTKMASWLVEWKKDTETEWLKDSPSQPLQQSLKDLERAYKNFFQKRAAFPRFKKRGQNDAFRYPQGVKLDQENSRIFLPKLGWVRYRNSRQVTGIVKNVTVSQSCGKWYISIQTESEVSTPVHPSASMVGLDAGVARLATLSDGTVFEPVNSFQKNQKKLARLQRQLSRKVRFSNNWQKQKRKIQQLHSRIANIRRDYLHKVTTIISKNHAMIVIEDLKVKHMSKSAAGTISQPGRNVRAKSGLNRSILDQGWYEMRRQLEYKQLWRGGQVLAVPPAYTSQRCACCGHTAKENRLSQSQFRCQVCGYTANADVNGARNILAAGHAVLACGGMVQSGRPLKQEPTEMIQATALT

SEQ ID NO: 2676 - protein, 385 aa, unidentified
MRTLTRCFKYRLYPTTDQQTTLVQWAGCRRFVWNWALHCKQTHYQATGQRLSYQRLAAMLVDLKRQPKTAFLRDCHSQPLQQALMDLETSFTHFFAKRAKYPRFKSRKITPHSLRFPQGVAVVDERTISVPKIGHMQAIIHRPLMGIAKGATIKQDATGAWWVIFVCHIDLPDVQPTADRLVGIDVGLESFTTLSTGEKTAPPKFYRRNQKNLARAQRKLSRAQKGSNNRLKAKKRVARLHKKISNQRADWLHKHALRIVRQFDVVCIEDLNIKGLARTKLAKSFSDAALSTFMQMLHDKAEWHGRRVVKVGRFYASSKTCHFCHSKNALKLADRVWTCPTCSMTHDRDINAAINILYEGIRLLAVGTTESQNAARDGVNPAKRW

SEQ ID NO: 2677 - protein, 385 aa, unidentified
MSTLTRCYKYRLYPTADQQTTLVQWAGCRRFVWNWALHCKQTHYQITGQRLSYQRLAAMLVDLKRQPKTAFLRDCHSQPLQQSLMDLETAFTNFFAKRAKYPRFKARKITPHSLRFPQGVIVVDERTISVPKIGLMQAIIHRPLMGTAKGATIKHDPTGAWWVVFVCHIERPDGQPTTDCPVGIDVGLESFTTLSTGEKTAPPKFYRRSQKKLACAQRKLFRAQKRSNNRLKARKRVAKIHQKISNQRADWLHKHALGIVQRFDVVCIEDLNIKGLVKTKLAKSFSDAALSTFMQMLIDKAAWHGRRVIKVGRFYASSKTCHHCKTKTALMLADRVWTCPTCGAIHDRDVNAAINMLHEGIRLLAVGTTESQNAAGDGVNPAKCW

SEQ ID NO: 2678 - protein, 284 aa, unidentified
MHRAYKFRLYPNREQATLINKTIGCTRFVFNHFLAKRKDAYEQEQKTLNYNDCSALLTQLKKEIEWLKEVDSTALQSTLKDLDSSYKKFYKEKKGYPKFKSKKNPKQSYTCKMNIKVEGDRIKLPKLGWVTFAKSREVEGRILSATVRKNPSGTYFVSVLCETEIQPLLQAEKTVGVDLGIKDFAILSTGEKIANPKVLRYYEKKLATWQQKLSRRKKGGQNREKLRKQVARLHERISNTRNDFLHKLSTQLIRENQTICLEDLRVENMIKNHKLAKSIADASW

SEQ ID NO: 2679 - protein, 588 aa, unidentified
MFNSDLAPKTIEFKLDLTKAQQQIVDSWLNSMRWVWNEGLSLLLEHQSLKYYEWLEKQLNLQRLPTEGIEKRRVSFSKKGFSATCQISSKKGDRFYPCCSLPLPPSPRLKGDGYKFLVGWLTRERYREQSALYGVPMKFVSGTLKHLADSWKAYKDKTQLQRHLPKFKSYKRGERITSLYCLQPENIKVKPNGVICPGVEVLGELKIVNKGLLKRWDFNIKPRTLQICKRPSGYYLQLMSNFPILKVKDSDRACGLDVGLQYIYSDDAGKQVDPPKYYRQSQKRLRRLQRKLARQVDNSSNQQKTKDAIARLHEKVAMRRRNFNHKLSTYVVRSFGGIAVEDLKISNLVRRPKPKKLADDEGYERNNAKAKSGLNKSFADAGLSQLLTMIEVKAKVADRELVKVNPAYSSQECPSCQNIIKKSLSQRTHQCLACGYLDPRDVASAIVIRSRADFVRSYRACTRNVKPVELSKVATEKQEPEKSGYVHVVNTTLSFSPLRPCGDAEEKLSSISTETNSSFSFEVIQPSLIPSAIGQLFDPKAFGPPKRNRKKWKKISQPNFETCAAQNDSGIQLSLSLWDSTGEIELME

SEQ ID NO: 2680 - protein, 373 aa, unidentified
MAELINKAYKVRLYPLPEQEVQFSKTFGCARWVYNHFLERHNEIYKVEKRYLSYSECSEMLTQIKAAPGTEWLAEVDKFALQNSLKDLDAAFVNYFEGRAGYPRFKSKRGSKQSYQTNYTNGNIRVDRERRLLRLPKVGWVRYAADGREIPGSIVNVTVTWTPSGKYFASVLCQVVVEPLQPADKETGIDMGIKKFAILSTGEVIENPKYYIKAQKKLARLQRALSKKKKGSKNREKERLKVARQQEKVANQRRDFQHKLSKRLVVENQVISMEDLRIKNMVKNRKLAKAISDAGWGEFQRMVEYKSAWYGRAFVKVDPFYPSSKLCEKCGTKNAMLTLSDREWQCPECGAIHDRDLNAARNILAEGKRILAG

SEQ ID NO: 2681 - protein, 416 aa, unidentified
MAIEVTRTYVGSIQNHRQVCDGLDSLGDSASKIWNVARWTADRIWDETGEIPDEGVLKSYMKNQKCWKDLNAQSSQKVIEELSDAFQSWFDLRHNFDEANPPGYRKYGDERPRSTVTFKEDGFKHDPENNRVRLSKGSNLKEYWSDFILCKYQTRPDVDLSEVNKVQNVRAVWNGDEWELHFVCKVELETNDSAGDEVAGIDLGIKNLATVAFPDEYVLYPGNSLKQDKHYFTRAEYETEGENGPSEKSMWARRKLAAREPHFYHVLTDTIITECVERGVGTLAVSWPEDVRASDWGKTGNKKLHTWAFDRIYQYLAYKGERRGVEVLKENEWNTSKTCSACGDDTKSNRTHRGLYVCSSCGLVGNADCNGAENMRQKITPSPHGEDRSNGCVAQPSIHLFDRESGTFRTREQVVS

SEQ ID NO: 2682 - protein, 416 aa, unidentified
MAIQATRTYVGSIQNQQQVCDGLDSLGDSASKIWNVARWAADRVWDEIGKIPDEGTLKSYMKNQSCWKDLNAQSSQKVIEELSDAFQSWFDLRHKFDEANPPGYRKHGDTRPRSTVTFKADGFKHDPENNRVRLSKGSNLKERWSDFILCEYQMRPDVDLSEVNKVQNVRAVWNGEEWELHFVCKVELETNDSVGDGVAGIDLGIKNIATVAFPDEYVLYPGNSLKQDKHYFKRAEYDTDGENGPSEKSMWARRKLADRETHFYHALTDAIITECVERGVGTLAVSWPEKVRDSDWGKTGNKKLHTWAFDRIYQYLNYKGEIRGVEVLKENEWNTSKTCSRCGDDTKSNRVERGLYVCSSCELVANADCNGAENMRQKITPSPHGEDRSNGCVAQPSAHLFDRESGTFHTREQVVS

SEQ ID NO: 2683 - protein, 363 aa, unidentified
MHRAYKFRLYPNKEQTILINKTIGCIRFVFNHFLAKRMEAYEQEKKTLTYNDCSAMLTRLKKEIEWLRKVDSTALQSTLKDLDSAYKKFFKEKKGYPQFKSKKNTKQSYTCKMNIKVKGNRIKLPKLGWVKFAKSREVEGRILSATIRRNPSGKYFVSVLSETEVQPQPEIEQTVGIDLGLKDFAILSTGERVENPRYYRKYEKQLAKWQHVQSRRQKGGKNREKARIKVARLHEKIANTRNDFLHKLSTKLINDNQVICLEDLQVENMAQNHKFAKSIADASWSMFRTMLEYKAEWYGRTISIVGKQFPSSQLCSTPTCGYRNKDVKNVSLRQWTCPKCGGKHDRDENAAINIEQEGLRLLA

SEQ ID NO: 2684 - protein, 416 aa, unidentified
MAIKATRTYVGSIQNHQQVCDGLDSLGDSASKIWNIARWTADRIWDATGEIPDSGTLKSYMKNQSCWKDLNAQSSQKVIEELSDAFQSWFDLRHKFSEANPPGYRKHGDSRPRSTVTFKEDGFKHDPENNRVRLSKGSNLKEHFSDFLLCEYQTRPDVDLSEVNSVQNVRAVWNGDEWELHFICKVELESADTAGDGVAGIDLGITNIATIAFPDEYVLYPGNSLKEDKHYFTRAEYDTEGENGPSEQSMWARRKLSERETQYYHTVTDAIITECVDRGVGTLAVSWPEDVRESDWGKTGNKKLHSWAFDRIYQYLAYKGEMRGVEVLKENEWNTSKTCSRCGDDTKSNRVERGLYVCSSCELVANADCNGAENMRQKITPSPHGEDRSNGCVAQPSTHLFDRESGTFHTREQVVS

SEQ ID NO: 2685 - protein, 391 aa, unidentified
MVLKHKAYKFRIYPTKEQEILIAKTIGCSRFIFNHFLAKWDETYKTTGKGLSYGSCSKEIPLLKQEFDWLKEVDSTSVQISVKHLADAFDRFFKKQNEHPRFKSKRHPVQSYKTNIQGKNQLPEVSIGCNQLKLPKLKWVRFAHSKQVTGRILNATIRRNASGKYFVSLLVEQEINELPKTGSSVGVDVGLKNFAILSDCTVYKNDRYFRLLEKKLVREQRKLSRRQRIALNKKVKLSEARNYQKQKRKVARIHEKIANKRTDFLHKVSTEIVKNHDVIGIETLQVKNMQKNRKLSKAISDVSWSEFFRMLEYKAEWYGKTVVKVGKTFASSQLCSSCGHQHKDVKHLGLREWTCPSCGIHHDRDVNAGLNLKQEAERILASSTVGTTGLA

SEQ ID NO: 2686 - protein, 391 aa, unidentified
MVSKHKAYKFRIYPTKEQEILIAKTIGCARFIFNYFLAKWDEMYKTTGKGLSYGSCSKEIPLLKQEFDWLKEVDSTSVQTSVKHLADAFDRFFNKQNKCPRFKSKRHPVQSYKTNVQGENQLPEVSIFGNKLKLPKLKWVRFAHSKQITGRILNATIRRNASGKYFVSLLVEQKIHELPKTGSSVGVDVGLKKFAILSDGTVYQNDRYFRSLEKKLAREQRKLSRRQRIALNKKVKLSEARNYQKQKQRVARIHEKIANKRTDFLHKVSTEIVKNHDIIGIETLQVKNMQKNRKWSKAISDVSWSEFFRMLEYKADWYGKTVVKVGKTFASSQLCSSCGHQHKDVKHLSLREWTCPSCGIHHDRDVNAGLNLKQEAERILASSTVGTTGLA

SEQ ID NO: 2687 - protein, 401 aa, unidentified
MRKINRTYKFRLYPNKAQTDLLARHFGCARFVYNYFLNQRKEQYRLTGKSDNYYAQAKTLTALKKQEATAWLKEVNSQTLQFAIRSLEVAYTNFFQKRTKFPNFKSKHSKNSFTVPQFASIADNRLFIPKFKEGIKCRVHREIKGKIGKITISKTPSGKYFVSVFTEEEYATPLEKTNKSVGVDMGLKDLLITSEGETFKNNRYTRKYEHKLARAQRNLSRKKKGSRGFENQKLKVARLHEKISNSRADYLHKCSISLVRRYDTICIEDLNVKGMERNHHLAKSITDASWSSFVTMLTYKADWNGKKVVKIDRDFPSSQTCNVCGYVNKQTKDLSVREWECPVCHTHHNRDVNAAINILRFGLNNISEGTVDYTDGEDVRANLLKGRSSVKSEVHESLAHG

SEQ ID NO: 2688 - protein, 401 aa, unidentified
MRKINRTYKFRLYPNKAQTDLLARHFGCARFVYNYFLNQRKEQYRLTGKSDNYYAQAKTLTALKKQEATAWLKEVNSQTLQFAIRSLEVAYTNFFQKRAKFPNFKSKHSKNSFTVPQFASIADNRLFIPKFKEGIKCRVHREIKGEIGKVTISKTPSGKYFVSVFTEEEYATPLEKTNKSVGVDMGLKDLLITSEGETFKNNRYTRKYERKLARAQRHLSRKKKGSRGFENQKLKVARLHEKISNSRADYLHKCSISLVRRYDTICIEDLNVKGMERNHHLAKSITDASWSSFVTMLTYKADWNGKKVVKIDRYFPSSQTCNVCGYVNKQTKDLSVREWECPVCHTQHNRDVNAAINILRFGLNNISAGTVDYKDGEDVRANLLKGRSSVKSEAHESLAHG

SEQ ID NO: 2689 - protein, 375 aa, unidentified
MVIKKAYKFRIYPNKVQQNIINQTFGCSRFLFNRALFDVKTTGSSFKKTHYMKEIPSLKKTFPWLKSVDSIALQASIEQLDDSFQRFFKKQNKFPRFKNKKNDIKSYTTKMVNNNIQMIGNKIKLPKIGWVRFAKSRVVEGTIKRVTVRKNASGKHFVSILVESENNYKRVSTNKSTGIDLGLTDFVVLSDGSKVKNPHHLKQLEHKLIRAQRTLSRRTIGSANWRKQKVKVANIHEKITNARKDFAHKLSRQLVEEYDLIGIEDLSVSNMLKNKNLAKSISDASWSEFVTMLTYKAEWYGSELVKVGKTFASSQLCSGCGHKNTIVKNLAVRKWVCPKCGSTHDRDINAAQNIKKEAESLYGSKPITVGTTGIA

SEQ ID NO: 2690 - protein, 401 aa, unidentified
MRKINRTYKFRLYPNKAQTDLLARHFGCARFVYNYFLNQRKEQYRLTGKSDNYYAQAKTLTALKKQEATAWLKEVNSQTLQFAIRSLEVAYTNFFQKRAKFPNFKSKHSKNSFTVPQFASIADNRLFIPKFKEGIKCRVHREIKGEIGKVTISKTPSGKYFVSVFTEEEYATPLEKTNKSVGVDMGLKDLLITSEGETFKNNRYTRKYERKLARAQRHLSRKKKGSRGFENQKLKVARLHEKISNSRADYLHKCSISLVRRYDTICIEDLNVKGMERNHHLAKSITDASWSSFVTMLTYKADWNGKKVVKIDRYFPSSQTCNVCGYVNKQTKDLSVREWECPVCHTHHNRDVNAAINILRFGLNNISAGTVDYKDGEDVRANLLKGRSSVKSEAHESLAHG

SEQ ID NO: 2691 - protein, 278 aa, unidentified
VKFPKAVLQAGCVRDRYDLGKMDLHEQKLKEVRLIPNGDTIKLEIVCEIEIKEPTITIHEATRVTGIDIGVDNLMAIAFTSGHHPVLIKGNEIKAVNQYYNKQIAHYRSLLRTGKKDSKGIHQTKRMKRISEKRNRRVKDILHKASRKIIDLCVEEGIEVIVVGNNAGWKKRIHMGKKNNQTFVQIPFRTLIEMIKYKGEAAGIRVVVCEEAIQSKASSIDEDQIPVYGNDVAHTFTGKRIKRGLYRSKWHSNECRYQWSKQYHTKSISMYARARAME

SEQ ID NO: 2692 - protein, 416 aa, unidentified
MAIKATRTYVGSIKNHQQVCDGLDSLGDSASKIWNVARWTADRIWDATAEIPNGSVLKSYMKNQSCWKDLNAQSSQKVIEELSDAFQSWFDLRHNSSEANPPGYRKRGDTRPRSTVTFKEDGFKHDPENNRVRLSKGSNLKEHFSDFLLCEYQTRPDVDLSEVNSVQNVRAVWNGDEWELHFVCNVEIESADPAGDGVAGIDLGITNIGTVAFPDEYVLYPGNSLKEDKHYFTRAEYDTEGENGPSEQSKWARRKLSERETHFYHTLTDAIITECVERGVGTLAVSWPEDVRESDWGKTGNKKLHTWAFDRIYQYLEYKGEMCGVEVLKENEWNTSKTCSRCGDDTKSNRVERGLYVCSSCELVANADCNGAENIRQKITPSPHGKDRSNGCVAQPSTHLFDRESGMFHTREQVVS

SEQ ID NO: 2693 - protein, 416 aa, unidentified
MAIQATRTYVGSIRNHRQVCDGLDSLGDSASKIWNVARWTADRIWDATGEIPNGSVLKSYMKTQSCWKDLNAQSSQKVIEELSDAFQSWFDLRHKDEKANPPGYRKRGDTRPRSTVTFKEDGFKHDPENNRVRLSKGSNLKEHFSDFLLCEYQTRPDVDLSEVNRVQNVRTVWNGDEWEVHFVCKVELETADSAGDGVAGIDLGITNIATVAFPDEYVLYPGNLLKEDKHYFTRAEYDTEGENGLSEQSKWARRKLSERETHFYHTLTDAIVTECVERGVGTLAVSWPEDVRESDWGKTGNKKLHSWAFDRIYQYLEYKGEMRGVEVLKENEWNTSKTCSRCGDDTKSNRVERGLYVCSSCELVANADCNGAENMRQKITPSPHGEDRSNGCVAQPSTHLFDRESGTFHTREQVVS

SEQ ID NO: 2694 - protein, 391 aa, unidentified
MVMKHKAYKFRIYPTKEQEILIAKTIGCSRFVFNHFLAKWDETYKMTGKGLSYGSCSKEIPMLKQAFDWLKEVDSTSVQASVKHLADAFDRFFKKQNERPRFKSKCNPVQSYKTNIQGKSQLPEVSIVGAKIKIPKLKWVRFANSRQVVGRILNATIRRNASGKYFVSLLVEQESNEMPKTGSSVGVDVGLKHFAILSDGTVYKNDRYFRSLEKKLAREQRKLSRRQRLALDKKLKLSEAKNYQKQKRKVARIHEKIANKRTDFLHKVSTEIVKNHDVIGIETLQVKNMQKNHKLSKSISEVSWSEFFHMLEYKAEWYGKTVVKVAKTFASSQLCSSCGHQHKDVKHLGLREWTCPSCGIHHDRDVNAGLNLKQEAERLLASSTVGTTGLA

SEQ ID NO: 2695 - protein, 390 aa, unidentified
MLTHKAYKFRIYPTKEQEILIAKTIGCSRFVFNHFLAKWDETYKATGKGLSYGSCSKELPVLKQAFDWLKEVDSTSVQMSVKHLADAFDRFFKKQNERPRFKSKRNPVQSYKTNIQGKSQLPEVSIIGNKLKLPKLKWVRFANSRQVVGRILNATIRRNASGKYFVSLLVEQESNEMPKTGSSVGVDVGLKHFAILSDGTVYKNDRYFRSLEKKLAREQRKLSRRQRLALDKKVTLSEAKNYQKQKRKVARIHEKIANKRTDFLHKVSTEIVKNHDVIGIETLQVKNMQKNRKLSKSISEVSWSEFFRMFGYKAEWYGKTVVKVGKTFASSQLCSRCGHQHKDVKHLGLREWTCPSCGIHHDRDVNAGLNLKQEAERILASSTVGTTGLA

SEQ ID NO: 2696 - protein, 505 aa, unidentified
MRSGKRVLTIRVSGKERKKKVRNLLLDLAHFRNMLLIFITKYKELCGKYPLHQSILYGLVAKTYTGKYRQEFEKVLENIESNSKLRELLEELKIQKEKVDNAPLIQYVIRQVIRDFTNFFKSFQSYRENPDKFKGIPKPPKPKKLRHLMNFSAEGNANTFKQEKDKLVIRLRNDKYLKVKLPKDFPYRVSSIRLKLFGDDLYVELVYEQEVEARNPAGVCSAGIDIGLDDLLSVVSENPEIKSFIVSGKEIKAFNQWFNKERAKLMSQMDYLRNEIKSGKYEDTKKLERKLRELEIKEKVLSAHRKRWLENNLHKISRKIVDLLYETGHKVIYIGKNAMESKNGIDLGRKTNQEFVSIPFRRLVELIKYKAQQYGIEVIEVDESYTSKTSPFADIFKVRETRDKRLCQGERKGNTFKDNVLNKVFHADLVGALNIMRVGAKLLKLGFYENLKSFFVKLCNPVRLKLIDFFYKVSPKSLWIGGSRREVLALAGWSEKLGCLNTFES

SEQ ID NO: 2697 - protein, 484 aa, unidentified
MLSSKRVLTIRVGGKERKRKVRTLLLDLVHFRNMLIILITKYKELYGMYPLHQSILYGLVAKTYTGKYRQEFEKVLKNIESNPKLGELLKKLKTQKERIDNPHYVQYVIRQVIRDFKSFFKAVENFRANPERFKEVPRTPKPKKLKYLMNFSAEGNANTFKQEGDKLIIKLRNGKYLKVKLPKDFPYRISSVRLKFFGDDPYVDVVYEYSLEAKQPKGKCSAGIDIGLNELLSVVSEHPELKSFIVSGKEIKAFNQWFNKEMSKLRSQIDNLRNEMKKELELKKKILSAHRKRWIDNNLHKIARKLVDLLYETGHKTIYIGKNALESKNGIDLGKKTNQEFVFIPFRRLAELIKYKAQELGMEVVEVDESYTSKTSPFADIFKVKETKNGELCQGKREGNLFKDKVLNKVFHADLVGALNILRVGAKLLRLSFYENLKVLFIKLCNPLRLKLIDFFYKVSSESLWIGGSRQGISVLAGWMEKLG

SEQ ID NO: 2698 - protein, 503 aa, unidentified
MRSGKRVLSIRVSGKERKKRIRTMLLDLAHFRNLLVILIRKYYLLYREHLLNQSILYGLIAKNYTGKYREEFEKTLKNIGEDTELKELLEKLKAQKEKVDNAPLVQYVIRQVIKDFTNFFKSFQSYRENRDKFKGIPKPPKPKKLRYLMNFSAEGNANTFRQEKDKLVIRLRNGKYLKVKLPKDFPYRVSSIRLKLFGDDLYVELVYEQEVEARNPAGVCSAGIDIGLDDLLSVVSENPEIKSFIVSGKEIKAFNQWFNKERAKLMSQMDYLRNEIKSGKYEDTKKLERKLRELEIKEKVLSAHRKRWLENNLHKISRKIVDLLYETGHKVIYIGKNAMESKNGIDLGRKTNQEFVSIPFRRLVELIKYKAQQYGIEVIEVDESYTSKTSPFADIFKVRETRDKRLCQGERKGNTFKDNVLNKVFHADLVGALNIMRVGAKLLKLGFYENLKSFFVKLCNPVRLKLTDFFYKVSPKSLWIGGSRREVLALAGWTEKLVNKFET

SEQ ID NO: 2699 - protein, 385 aa, unidentified
MRKINRTYKFRLYPNKVQIDLLARHFGCTRFVYNYFLGQRKEQYRLTGKSDNFYAQCKALTVLKNQEATAWLREVNSQSLQFAIRSLETAYTNFFQKRAKYPKFKSKRSKNSFTVPQYASVADNRLFVPKFKEGIKCRVHREIKGQIGKVTISKTPSGKYFVSVFTEEEYTTPLEKTNKSVGVDMGLKDLLITSEGETFKNNRYTRKYERKLARAQQHLSRKKKGSRGFESQRLKVARLHEKISNSRADYLHKCSISLVRRYDTICIEDLNVKGMERNHHLSKSITDASWSSFVTMLTYKAEWNGKKVAKIGRFFPSSQTCNVCGYVNKQTKDLSVREWECPVCHTHHNRDVNAAINILRFGLNNISAGTVDYTGGEDVRANLSR

SEQ ID NO: 2700 - protein, 401 aa, unidentified
MRKINRAYKFRLYPSREQAELLAKHFGCTRFVYNHFLNQRKEQYRLTGKSDNYYAQARSLTELKKQEATAWLKEINSQSLQFALRSLETAYTNFFQKRAKFPSFKSKHAKNSFTVPQSVFIADGRLFIPKFKEGIKCRVHREIKGKVGKATISKTPSGKYFVSVFTEEEYVTPIKKSGKAVGVDMGLKDLLITSDGETFKNNRYIKRYERKLAKAQQHLSRKKKGSKGFENQRLKVAKLHEKIANSRADYLHKCSISLVRRYDTICIEDLNVKGMERNHRLAKSVTNASWGAFVSMLTYKAEWNGKKVVKIDRFFPSSQTCNVCGYINKQTKDLSVREWECPVCHTHHNRDVNAAINILRFGLNHTSAGAVDYTGGEEVRADLLEGRSSAKPEAHKSLACG

SEQ ID NO: 2701 - protein, 363 aa, unidentified
NLLLYKMYQRGILDEKQKRFVTANDFDKYVNHKLKKELPWIAQCGSKARKKALVNAEQAFRRFFSGTSGFPNFKKKANQDVKLYFPKNNNGDWTIWRHKLMIPTLKQVRLKEFGYLPVGAKVTNGTVSYVAGRFYVSVVVDIDEKSKYNKDLEASYHTVTDGVGIDLGVKDLAIVSDGKAFKNINKGSKVKRLEKRLRREQRRLSRKYEFRKKKGGITATASANIDKQKLKIQKIHHHITTIREDYENKTVHEIVKQKPRFITVEDLNVKGMMKNRHLAKAIAAQRFNHLLAKLKRKAEIIGIELREVDRFYPSSKTCHTCGHIHKGLKLKDRMYACPKCGYTADRDYNASLNLRDAKEYRVS

SEQ ID NO: 2702 - protein, 373 aa, unidentified
MIVNKAYKFRLYPNKEQQILINKTFGCSRFVFNHFLAKWDNAYKETGKGLTYNSCSAQLTQLKKELTWLKEVDSIAIQSSLKNLADAYSRFFKKQNDRPRFKSKKNKVQSYTTKYTNGNIAINDNKIKLPKLGWIRFAKSREVEGRILNVTIRRNPSGKYFVSILVETEVQELSKTNSAIGIDVGLKDFAILSNGTTYANPKFFRKLEEKLAKAQRILSRRTKGSSNWNKQRSKVARIHEKITNARNDYLHKISTEIIKNHDIIGIEDLQVSNMLRNHNLAKAISEVSWSQFRTMLEYKAKWYGKQVVTVAKNFPSSQLCSCCGYQNKDVKNPGLREWECPKCHTHLDRDINASLNLKNEAIRLLTVGTTGIA

SEQ ID NO: 2703 - protein, 400 aa, unidentified
MRKINRTYRFRLYPNKAQTELLSKHFGCSRFVYNYFLNQRKEQYRVSGKSDNYYAQAKTLTTLKKQEETVWLNEVNSQTLQFAIKSLEAAYTNFFKKHAKFPKFKSKHSKNSFTVPQFASVAGGRLFIPKFKEGIKCRVHREVKGKIGKVTITKTPSGKYFVSVFTEEEYTTPIEKSGKPVGIDLGLKDLLITSEGETFKNNRYTKKYECRLAKAQRHLSRKVKGSRGFESQKLKVSRLHEKISNSRADYLHKCSIYLVHRYDTICIEDLNVKGMERNHRLAKSITDASWGTFINMLTYKAEWNSKKVVKIDRFYPSSQTCSVCGYVNKDTKDLSIREWECPVCHTHHDRDVNAAINILRIGLNNNISAGTVDYTGGEGVRADLLESHSSVKPEAQKSLD

SEQ ID NO: 2704 - protein, 401 aa, unidentified
MRKINRTYKFRLYPNKAQTDLLSRHFGCVRFVYNYFLNQRIEQYRLTGKIDNYYAQAKALTELKKQEEKEWLKEVNSQSLQFAIKCLEVAYTNFFKKRTKFPKFKSKHSKNSFTAPQFSSISDNKLFIPKFREGIKCRVHREIKGKIGNVTISKTPSGKYFASVFTEEECITPIEKSGKSVGVDLGLKDFLITSEGEIFKNNKYTRKYERKLSIAQKHLSRKKKDSKGFENQRLKVAKIHEKISNSRADYLHKCSISLVRRYDTICIEDLNVKGMMRNHRLAKSIADVSWSSFVNMLTYKADWNGKKVIKIDRYFPSSQTCNICGYVNKETKDLSIREWECPVCHTNHNRDVNAAINILRLGLNKNTSAGTVDYTDGEDVRANLLKGQSSMKSEAREETRG

SEQ ID NO: 2705 - protein, 400 aa, unidentified
MRKINRTYRFRLYPNKAQTELLSKHFGCSRFVYNYFLNQRKEQYRVSGKSDNYYAQAKTLTTLKKQEETVWLNEVNSQTLQFAIKSLEAPYTNFFKKHAKFPKFKSKHSKNSFTVPQFASVAGGRLFIPKFKEGIKCRVHREVKGKIGKVTITKTPSGKYFVSVFTEEEYTTPIEKSGKPVGIDLGLKDLLITSEGETFKNNRYTKKYECRLAKAQRHLSRKVKGSRGFESQKLKVSRLHEKISNSRADYLHKCSIYLVHRYDTICIEDLNVKGMERNHRLAKSITDASWGTFINMLTYKAEWNSKKVVKIDRFYPSSQTCSVCGYVNKDTKDLSXREWECPVCHTHHDRDVNAAINILRIGLNNNISAGTVDYTGGEGVRADLLESHSSVKPEAQKSLD

SEQ ID NO: 2706 - protein, 432 aa, unidentified
MSVLVIVIFFHAIDIGKSLMIYKIFYIFVSDMGKINRTYKFRLYPNKLQSDLLARHFGCTRFVYNYFLNQRKEQYRLTGKSDNYYAQAKTLTALKKQEATAWLKEVNSQTLQFAIRSLEVAYTNFFQKRAKFPNFKSKHSKNSFTVPQFASIVGGRLFIPKFTEGIKCRVHREIKGKIGKVTISKTPSGKYFVSVFTEEEYATPLEKTDKSIGVDMGLKDLLITSEGEIFKNNRYTRKYERKLARAQQHLSRKKKGSRGFENQKLKVARLHEKISNSRADYLHKCSISLVRRYDTICIEDLNVKGMERNHHLAKSVADASWGSFVSMLTYKADWNGKKVVKIDRFFPSSQTCNVCGYVNKQTKDLSVREWECPSCHTRHNRDVNAAINILRFGLNHTSAGTVDYTGGENVRANLLKGRSSVKPEAHESLVHG

SEQ ID NO: 2707 - protein, 375 aa, unidentified
MVIKKAYKFRIYPNKVQQNMINKTFGCSRFLFNRALFDVKTTGSSFKKTHYMKEIPSLKKTFPWLKSVDSIALQASIEQLDDSFQRFFKKQNKFPRFKNKKNDIKSYTTKMVNNNIQLDDNKIKLPKIGWVRFAKSRDVEGTIKRVTVRKNASGKYFVSILVEQANEYKRNHTNKSTGIDLGLTDFVVLSDGSKAKNPRHLKHLEHKLIRAQRTLSRRTIGSANWRKQKTKIARIHEKIANARKDFAHKLSRELVETYDLIGIEDLSVSNMLKNKNLAKSISDASWREFVTMLTYKAEWYGSELVQVDNKYPSSQLCSSCEYKNTNVKNLTVRKWVCPNCGSKHDRDINAAQNIKKEAKRLYGFNPITVGTTGIA

SEQ ID NO: 2708 - protein, 348 aa, unidentified
MLYRDWKSFFAALADYKAHPDKYEAIPHIPRYADKDGYKPLIFTNQICKLRKDKHGWYVKFPKAVLQAGCVRDRYDLGKMDLHEQKLKEVRLIPNGDTIKLEIVCEIEIKEPTITIHEATRVAGIDIGVDNLTAIAFTSGHHPVLIKGNEIKAVNQFYNKQIAHYRSLLRTGKKDSKGIHQTKRMKRISEKRNRRVKDILHKASRKIIDLCVEEGIEVIVVGNNAGWKKRIHMGKKNHQTFIQIPFHTLIEMIKYKGEAAGIRVVVCEEAIQSKASSIDEDQIPVYGNDVAHTFTGKRINRGLYRSKNGILMNADINGASNIIRKVYPCMPKRERWSRGTVNVPVTCI

SEQ ID NO: 2709 - protein, 402 aa, unidentified
MRKINRTYKFRLYPTKAQTELLAKHFGCARFVYNYFLNQRQEQYKLTGKSGNFYAECKSLTELKKHEETAWLKEVNSQTLQFAIKCLDVAYTNFFKKRADFPKFKSKRSKNSFTAPQAAYIAGGRLFIPKFKEGIKCRVHREIKGKIGKVTITKTPSGKYFASVHTEEEYVTPLEKTNKSVGVDMGLKDFLTTSDGEKFKKNRYTKKYERKLAHAQRHLSRKKKGSRGFENQRLKVARIYEKISNSREDYLHKCSISLVRRYDTICIEDLNVKAMVKNHRLAKSISDASWYSFVAMLTYKAEWNDKKVVKIDRFFPSSQTCSVCGHINKETKDLSVREWECPACHSHHDRDVNAAINILLVGLKQYTSAGTADYTGGEGVRADLLESHSSVKPEARKQKACE

SEQ ID NO: 2710 - protein, 414 aa, unidentified
MVIYIFLCIFAKDMRKINRTYKFRLYPNRKQTELLAKHFGCSRFVYNYFLNQRKEQYKLTGKSDNYYEQAKKLITLKKQEETAWLKEVNAQTLQFVLRSLDAAYTNFFKKRAKFPKFKSKHSKNSFTVPQSTSVAGGRLFIRKFKEGIKCRIHREIKGKIGKVTITKTPSGKYFVSVFTEEECITSLENTGKSIGVDMGLKDLLITSEGETFKNNRYTRRYEYKLAKAQQHLSRKKKGSRGFENQRLKVARLHEKITNSRADFLHKCSISLVRRYDTICIEDLNVKGMVKNHHLAKSITDASWCSFISMLTYKAEWNGKKVVKVDRYFPSSQTCSVCGYVNKQIKDLSVREWECPVCHAHHDRDVNAAINILRIGLNNISAGTVDYTGGEEVRANHLESHSSEKSETNEHLVQG

SEQ ID NO: 2711 - protein, 412 aa, unidentified
MCISGALYKKKIIFARDMRKINRTYKFRLYPTKAQTELLAKHFGCARFVYNYFLNQRQEQYRLTGKSDNYYAQAKILTELKKQEETAWLKEVNAQSLQFALKCLDVSYTNFFKKRAKFPKFKSKRSKNSFTAPQSALITNNRLFVPKFKEGIKCRVHREIKGKIGKVTITKTTSGKYFASVLAEEEYVTPFEKTNKSVGVDLGLKDLVVTSEGETFKNNRYTKKYERKLATAQRHLSRKKKGSRGYENQRLKVARIYEKISNCRMDYLHKCSISLIGRYDTICVEDLNVKGMVKNRHLAKAITDASWGTFLNMLTCKAEWNGKKVIKIDRFFPSSQTCNVCGSVNKDVKDLSIREWECTSCHTHHDRDVNAAINILRVGLKQYTSAGTADYTGGGEVRADLSESHSSAKPEA

SEQ ID NO: 2712 - protein, 402 aa, unidentified
MRKIHRTYKFRLYPTKAQTELLAKHFGCARFVYNYFLNQRQEQYRLTGKSDNYYEQKRTLTKLKKQEETAWLKEVNAQSLQFALKCLDVSYTNFFKKRAKFPNFKSKRSKNSFTAPQRATLSDNRLFIPKFREGIKCRVHREVKGKIGKVTITKTPSGKYFASVLTEEEYITPLGKTNKSVGLDLGLKDFLATSEGERFTNNHYTKKYERKLATAQRHLSRKVKGSRGYENQRLKVARLHEKISNSRADYLHXCSISLVKRYDRICIEDLNVKGLMKNRNLAKYIADASWGKFISMLTYKAEWNDKKVVKIDRYFPSSQTCSVCGSVNKDVKDLSIREWECPSCHSHHDRDVNAAINILRVGLKKYTSAGTADYTGGEEVRAVLSESHSSVKPEAHKQSACG

SEQ ID NO: 2713 - protein, 402 aa, unidentified
MGKIHRTYKFRLYPTKAQTELLAKHFGCARFVYNYFLNQRIEQYRLTGKSDGFYEQSKTLTELKKQEDTAWLKGVNAQSLQFALRCLETAYTNFFKKRSKFPNFKSKRSKNSFTIPQCASIAGDRLFIRKFNEGIKCRVHREIKGKIGKVTISKTPSGKYFASVHTEEEYATPFEKTNKSVGVDLGLKDLLVTSEGERFNNNRYTKKYERKLASAQRHLSRKVKGSRGFEKQRLKVARLHEKISNCRMDYLHKCSISLVRRYDTICIEDLNVKGMVKNHHLAKSISDASWGAFVSMLTYKAEWNDKKVVKIDRYFPSSQTCSVCGHINKETKNLSVREWECPSCHSRHDRDVNAAINILRVGLKQYTSAGYADYTGGEDVRVNLLKDQSSMKPEAYESLTLV

SEQ ID NO: 2714 - protein, 401 aa, unidentified
MRKIHRTYKFRLYPNKAQTEFLAKHFGCARFVYNYFLNQRIEQYKLTGKSDNFYAQAKTLAEMKKQEETAWLKEVNAQSLQFAVRCLEAAYTNFFKKRAKFPNFKSKRSKNSFTVPQFVSIANGRLFFPKFREGIVCRVHRKVVGKIGKVTISKTPTGKYFVSVSTEEEYETPFEKTSKEVGVDLGLKNLVVTSEGETFENNRYTRRCEHKLATAQKHLSRKKKGSCGFERQRLKVARVYEKVSNCRADYLHKCSISLVRRYDVICIEDLNVKGMVRNHRLAKSISDASWGTFLAMLTYKAEWNDKKVVKIDRFYPSSQICHVCGHKNGQTKDLSVREWECPSCHTRLDRDVNAAINILRVGLNHTSAGTVDYTGGEGVRAFLSESHSSEKPEAHLPEACG

SEQ ID NO: 2715 - protein, 401 aa, unidentified
MRKINRTFRFRLYPNQSQTELLSRHFGCSRFVYNYFLNQRKEQYRLTGKSDNYYAQAKALTTLKKQEETTWLKEVNAQTLQFAIRSLEAAYNNFFKKRTKFPKFKSKHSKNSFTVPQFASITDNRLFIPKFTEGIKCRVHREIKGKIGKVTITKTPSGKYFVSVFTEEYYINPLEKTGKSVGVDMGLKDLLVTSEGEIFKNNRYTKKYECRLTKAQRHLSRKKKGSRGFENQRLKVARLHEKISNSRVDYLHKCSISLVRRYDTICIEDLNVKGMTKNHHLAKSISDASWGTFINMLTYKAEWNGKKIVKVDRYFPSSQTCHICGHINKQIKDLSVREWECPNCHTRHDRDVNAAINILRIGLNNISAGTVDYTGGEEVRADLLESHSSVKPEANVLNVHG

SEQ ID NO: 2716 - protein, 402 aa, unidentified
MRKINRTYKFRLYPTKAQTELLAKHFGCARFVYNYFLNQRQEQYRLTGKSDNYVAQAKALTTLKKQEETAWLKEVNAQSLQFALRCLETSYTNFFKKRAKFPNFKSKHSKNSFTAPQFAYIAGNRLFIRKFKEGIKCRVHREIKGKIGKVTITKTPSGKYFASVHTEEEYITPFEKTNKSVGLDLGLKDFLTTSEEERFNNNHYTKKYERRLATAQKHLSRKKKGSRGYESQRLKVARLHEKISNSRADYLHKCSISLVRKYDIICVENLNVKGLMRNHHLAKSISDVSWGSFVAMLTYKAEWNDKKVVKVDRFFPSSQTCNVCGHINKETKDLSVREWECPSCHTHHDRDVNDAINILRVGLKQYTSAGTADYTDGEDVRVNLLKDQSSAKSEAHKQSACG

SEQ ID NO: 2717 - protein, 401 aa, unidentified
MGKINRTYKFRLYPNKLQSDLLARHFGCTRFVYNYFLNQRKEQYRLTGKSDNYYAQAKTLTALKKQEATAWLKEVNSQTLQFAIRSLEVAYTNFFQKRAKFPNFKSKHSKNSFTVPQFASIVGGRLFIPKFKEGIKCRVHREIKGKIGKVTISKTPSGKYFVSVFTEEEYATPLEKTDKSIGVDMGLKDLLITSEGEIFKNNRYTRKYERKLARAQQHLSRKKKGSRGFENQKLKVARLHEKISNSRADYLHKCSISLVRRYDTICIEDLNVKGMERNHHLAKSVADASWGSFVSMLTYKADWNGKKVVKIDRFFPSSQTCNVCGYVNKQTKDLSVREWECPSCHTRHNRDVNAAINILRFGLNHTSAGTVDYTGGENVRANLLKGRSSVKPEAHESLVHG

SEQ ID NO: 2718 - protein, 395 aa, unidentified
MGKINRTYKFRLYPTNAQTELLAKHFGCARFVYNYFLNQRQEQYRLTGKSDNYYDECKSLTKLKKQEETAWLKEVNSQTLQFALKCLDVAYTNFFKKRAKYPNFKSKRAKNSFTAPQFAYIEGGKLFIPKFKEGIKCRVHREVKGKIGKVTITKTSSGKYFVSVCTEEEHQTPFEKTDKSVGLDLGLKDFLTTSEGERFNNNRYTRKYERKLATAQRHLSRKKKGSRGYESQRLKVARIYEKISNSRADYLHKCSISLVKRYDTICIEDLNVKGMVRNHRLAKHVADASWGSFVAMLSYKAEWNDKKVVKIDRFYPSSQTCNVCGHINKETKDLSVREWECPSCHSHHDRDVNAAINILRVGLKQYTSAGTADYTGGEEVRAVLSESHSSVKPEA

SEQ ID NO: 2719 - protein, 418 aa, unidentified
MNKFAVCEVMIIFARDMRKINRTYKFRLYPTKTQTELLAKHFGCARFVYNYFLNQRIEQYSLTGKSDNYYAQNKALTELKKQEETAWLKEVNAQSLQFSLRCLETAYTNFYKKRAKYPKFKSKHSKNSFTAPQTSHIAGNRLFIRKFNEGIKCRVHRGIKGKIRMVTITKTPSGKYFASVQTEEEYATPFEKTNKSVGVDMGLKDFLVTSEGDVFSNNRYTKKYERRLATAQRHLSRKKKGSGGYENQRLKVARIYEKISNCRMDYLHKCSISLVRSYDIICVEDLNVKGMMKNRNLAKSIADASWGKFITMLVYKAEWNDKKVLKVDRYFPSSQTCSVCGYVNKEMKDLSVREWKCPACHTHHNRDVNAAINILRLGLKQYTSVGTADYTDGEDVRVNLLKDQSSVKPEAQERLAIG

SEQ ID NO: 2720 - protein, 401 aa, unidentified
MRKINRTYRFRLYPNKEQTELLAKHFGCTRFVYNYFLNQRKEQYRLTGKSDNFYAQEKALTELKKQEETAWLKEVNAQSLQFALRCLEAAYTNFFKKRAKFPKFKSKRSKNSFTVPQAVSIAGDRLFVPKFREGIVCRVHREIKGNIGKVTISKTPSGKYFASIHTEEEYNTSMQPTGKSVGVDMGLKNLLVTSDGEIFKNNRYTRKYEHKLATAQKHLSRKKKGSRGFENQRLKVARIYEKISNCRADYLHKCSILIIQRYDTICIEDLNINGMMENHHLASAISDASWGNLVTMLTYKAEWNDKRVVKIDRFCPSSQTCSVCGSKNGQTKDLSVREWECPSCHARHDRDVNAAINILRVGLNHTSAGTVDYTGGEEVRAFLSEGHSSEKPEACNHLDCV

SEQ ID NO: 2721 - protein, 400 aa, unidentified
MRKIHRTYRFRLYPNKAQAELLAKHFGCARFVYNYFLNQREEQYRLTGKSDNYFAQAKTLATLKKQEETAWLKEVNSQSLQFALRCLDTSYTNFFQKRTKFPTFKSKRSKNSFAIPQYAYIAEERLFVPKFKEGIVCRVHRTIKGKIGKVTISKTPTGKYFVSVSTEEEYFQIEKSGKSVGVDLGLKNLVVTSEGEVFENNRYTRKYELKLATAQKHLSRKKKGCSGFEKQRLKVARIYEKISNCRADYLHKCSISLVRRYDVICIEDLNVKGMVRNHHLSKSISDASWGSFIAMISYKAEWNDKKVVKIDRFYPSSQTCSGCGYINQQVKDLSVREWKCPDCHAHHDRDVNAAINILRVGLNNTSAGTVDYTGGEEVRAFLSESHSSVKPEAHLPLACE

SEQ ID NO: 2722 - protein, 425 aa, unidentified
MKRKIHRTYKFRLYPNNAQTELLAKHFGCTRFVYNYFLNQRKEQYSLTGKTGKSDNFYTQLKSLTELKKQEETAWLKEVNAQSLQFAVRCLEAAYANFFQKRTKFPSFKSKRSKNSFTVPQSATIAGGRLFVPKFKEGIKCRVHREIKGKIGKVTISKTPTGKYFVSVLTEEEYETPLEKTNKSVGVDLGLKNLLVTSEGETFENNRYTKRYERKLALAQRHLSRKKKGSRWFENQRLKVARIYEKIANCRADYLHKCSVSLVRRYDVICIEDLNVKGMVRNHQLAKSISDASWGTFIALLAYKAEWNDKKVVKIDRFYPSSQTCSSCGYVNGQTKDLSVREWKCPACHTRHDRDVNAAINILRVGLNNTSAGTVDYTGGEEVSANLPIGHPSVKPEAPKSLDGVWFTFAVKSERERVPQHLQQV

SEQ ID NO: 2723 - protein, 372 aa, unidentified
MIAVKKAYKFRMYPNKKQQELINKTFGCCRFVYNKYLAKRIEVYKNNKETFTYKQCSSDLTNLKKELNWLKEPDKFSLQNALKDLENAYEKFFKEKTGFPKFKSKKTNRFSYKTNFTNGNIMYCGQHIKLPKLGMVKISDKQVPKGRILNATISKEPSGRYYVSLCCTDVDIEAFENTNNQIGLDLGIKEFCISSCGDFIENPKYLKKSLNKLAKLQRELSRKTIGSLNRNKARLKVARLQEHIANQRKDFLQKLSTKLIKENDIICIEDLQVKNMIKNHKLSRLISDVSWSEFIRQLEYKANWYGRQIVNVGKFFASSQICNKCGYKNEEVKDLNIREWICPSCNETHDRDINASINILKEGLRLITIQNK

SEQ ID NO: 2724 - protein, 312 aa, unidentified
MATHVKRAYRYRFYPTGAQAVELSRTFGCVRKVYNMALAARTAAWTLRQERVSYNATSAMLTAWRKTGELAFLNDVSSVPLQQALRHLRAAFTAFFAQRSKYPLFTSRKRSRKSAEYTSSAFRFREGKLTLAKMDQPLDVARVYARIADRRRDHLHKLTTRLVRENQTLVIEDLAVRNMLSNGKLSRAISDAAWSQFRSMPEYKAAWYGREVIAVDRWFPSSKLCSVCGTLQGKMPLGVRTWTCDCGTTHDRDVNAARNPLAAGLAVSACGAGVRPQRESSRTGQSVTKQEALRREPQESPSFRLREGGSQR

SEQ ID NO: 2725 - protein, 391 aa, unidentified
MLKATKVRIYPTTEQAEFLNRQFGAVRFCYNTGLRIMSHRYKRHGQSLSAKHDIKKLLPVAKKSRKYGWLKEADSMALQQSCINLDQAFQRFFDPKQKAGYPRFKSKRGKQSSYHCVGVKAGDNWIKVPKLGPIKARMHRQVEGRLKSITLTRTVTGKHYASLLFDTEQAAPAPLKDVDAAKVVGLDMGLSHLAIDSTGRKVANPRFLKQAQKNLKRKQQALSRTKKGSARRAKARLLVAKAHERVANARNDFQHKLSRQLVDDNQAVIVETLKVRNMMKNARLAKHIGDASWHALMTKLGYKAREQGKHLVKIDPWFASSKTCHVCQHKMDAMPLNVRSWECPACHTQHDRDINAALNIKHQGIIELKAEGLSVSAHGGLRKSGTSSAAA

SEQ ID NO: 2726 - protein, 393 aa, unidentified
MSAEMLKATKVRIYPTPEQAEFLNRQFGATRFVYNKALHIISSQYKRHGLKLKAKKDLKPLLAVAKKSRKYHWLKDFDSIALQQACINLDKAFQNFFDPKLAARYPKFKRKHGKQSSYHCMSVSAGENWIKVPKMKPIKARVHRELDGKLKSITLSRTVTGKYYASLLVEGDLEIPAPLHTVDTVLGVDMGLTHLAIDSEGNKTANPRFLKRAQSNLRRKQKALSRCQKGSKGRAQARLKFAKAHERLANARADFQHNLSRQLIDENQAVVVETLKVKNLLKNRKLAKHIADASWFSLIQKLEYKAKEQGKHLVKIDQWFASSKTCSCCGHKVDTLPLSVRNWSCPACTVELDRDVNAAINIRQQGVIKLRAEGLSVPANGGLRKSSHALVAA

SEQ ID NO: 2727 - protein, 307 aa, unidentified
MAQLVKRAYKYRFHPTPEQAEQLVRTFGCVRLVYNKALEERTRAYTLEGRGVSYTESSAALTGWKKTPELAFLCEVSSVPLQQTLRHLQAAFANFFAKRAGYPTFKSRKRSRASAEYTRSGFRWRDGRLTLAKMDTPLDIVWSRPLPGGAEPSTVTVSRDAAGRWFVVLLVEEKIAPLPPVEQSTGLDAGLTALLTLSCGEQIANPRHERRERRSLTKAQRALARAISDAGWRELRRMLEYKTAWYGRTLVVVDRFFPSSKLCSVCGALQEEMPLSVREWVCACGAVHDREVNAAQNMLLAAGLAES

SEQ ID NO: 2728 - protein, 339 aa, unidentified
MQKAFKVRLQPNQKQQTQINKTMGCARFVYNRFLALRKELYETEKKTLNYNGCSQQLTLLKKELTWLGEVDKFALQNSLKNLETAYKNFFEGLKKTAKKIGFPKFKKKHGFKQSYKTNFTNNNIEIKEQYLKLPKLGWVKFNKSQEITGKLINVTVSHTKDGHYMASILCETEIDKHPDSTKELGLDLGLKSYVITHTGEEIENPKYYRKHLKKLKKAHKNLSKKQKGSSNRVKAKIKLARLSAQVTNLRDDFLHKLSTRLIKEYGIICIEDLRVQNMVKNHKLAQSIQDASWSKFVSMLEYKANWRSANNTESFSLFPFEPNLFMLWFCQFFGQGFKC

SEQ ID NO: 2729 - protein, 384 aa, unidentified
MLVNKAYKFRIYPNKEQEILIAKTFGCSRFVFNHFLAKWNETYQETGKGLTYNACSSQLTQLKKEFTWLKEVDSIALQSSLKHLDDAYDRFFKKQNDKPRFKSKKNPVQSYTTKYTNGNIAVLDKHIKLPKLGLVRFAKSREVEGRILSATIRRNPSGKYFVSILVETDVQALPKTGSAVGIDVGLKEFAILSDGTKYANPKWLHKLEEQLAKAQRILSRRKKGGSNWNKQRIKVARLHEKMTNARHDYLHKISTEIVKNHDIIGMEDLSVSHMLKNHNLAKAIQEVSWSMFKAMIEYKARWYGKQVVTVAKNFPSSQLCSCCGYQNKDVKHLALREWECPVCHTHHDRDVNASINIKNEAIRLLNRRNCGDRLLNNRKNFRCS

SEQ ID NO: 2730 - protein, 400 aa, unidentified
MSTHQKSYRYRLLPTPEQEGRFWQFAGARRWVYNWSLARRSAHYKATGKSLSVTELCAELAQLKHQPETAWLREMDSQSLQQAIRDLDKAFKAFFARRAKFPRFRSKKRETPTFRIPQRVTLVGDRLSVPKVGLVRLVLHRPMEGVVKSATFKRDATGAWYVTLVVHFELSDTPPPPPARERVVGVDVGLKDLAVLSDGRRVPAPKHYRRAERKLRRLQRHLSRCQRGSKNREKARVRVARQHRRVANQRADHLHKLSSRLVREHDGIVIEDLNVKGLAKTKLGKSVYDAGWSMLRFQLAYKARWQRKHLVVIGRFFPSSRLCAVCGSINSDLTLAEREWTCRCGVVHDRDLNAARNIRDEGLRLLLAEGCPESIINASRALVTPATRRLDATTEEAQRF

SEQ ID NO: 2731 - protein, 384 aa, unidentified
MTRTIQTTYRYRLNPTVAQEILLNQFAGARRFVWNWALDRKKTHYQQTGGTLGFAALSAELTALKQQPGTAWLREMDSQSLQQALRDLDSAYQHFFRRIKRGEKRKGFPRFKSRKTDTPRFRIPQRVELHAESVSVPKIGMIRAVVHRPLEGVTKGATFKREPSGHWFVSLVTEQQAAPRTERPVQTHVGIDVGLKSLAVYSTGETIANPRWYRTQRRKLRRAQQALSRKVRGSHNRDKARVVVARLHQKIRNQRNDFLHKLSTDLVRHYDLVSIEDLSIRGLAKTKLATSVLDAGWGMFRSMLEYKADRNDTHVVAIGRFFASSKMCGTCGWIHELTLAVREWDCLNPACGVHHDRDVNAARNIDREGKRLFDLRVAAGHAET

SEQ ID NO: 2732 - protein, 403 aa, unidentified
MTRTIQTTYRYRLNPTVAQENLLNQLAGARRFVWNWALDRKKSHYQQTGGTLGFAALSAELTRLKQQPETVWLREMHAQSLQQALRDLDSAYQQFFRRIKRGERHKGFPRFKSRKTDTPRFRMPQDVRLVDSFLSVPKIGMIRAVVHRPLEGVTKGATFKREPDGHWFVSLVTEQQAEARTERPVHTHVGVDVGLTSLAVFSNGETIPNPRWYRTQCRKLRRAQQALSRKVRGSHNRGKARVVVARLHQKIRNQRNDFLHKLSTDLVRHFDLVSLEDVSIRGLAKTKLAKSVLDAGWGMFRSMLEYKADRNDTHVVAIGRFFASSKTCGACGWKRDDLTLAMREWDCLNPACGVHHDRDLNAARNIDHEGKRLFDLRIAAGHAETQNACGDSVSPIVTVGAGR

SEQ ID NO: 2733 - protein, 416 aa, unidentified
MAIEATRTYVGSIQNHRQVCGGLDSLGDSASKIWNVARWTAERIWDATGEIPDEGVLKSYLKNQACWKDLNAQSSQKVIEELSDAFQSWFDLRQKDDTANPPGYRKHGDKRPRSTVTFKEDGFKYDAENNRVRLSKGSNLKDHFSDFLLCEYQMRPDVDLSEVNSVQNVRAVWNGDEWELHFVCKVELETNDSAGDGVAGIDLGITNIATVAFPDEYVLYPGNSLKQDKHYFKRSEYDTEGEDGPSEKSMWARRKLTERETHFYHTLTDAIITECVERGVGTLAVSWPENVRESDWGKTGNKKLHSWAFDRIYQYLEYKGEIRGVEVLKENEWGTSKTCSRCGSEQKSNRKHRGLYVCSSCELVGNADCNGAENMRQKITPSPHGEDRSNGCVAQPSTYLFDRESGTFRTREQAVS

SEQ ID NO: 2734 - protein, 404 aa, unidentified
MNDMRKINRTYKFRLYPNKEQAILLAKHFGCTRFVYNYFLNQRKEQYRLTGKSDNYYAQARTLTAMKKQEATAWLKEVNSQTLQFAIRSLEVAYTNFFQKRAKFPAFKSKHSKNSFTVPQFASIVDGRLFIPKFKEGIKCRVHREIKGEIGKVAISKTPSGKYFVSVFTEEAYATPLEKTGRAVGIDMGLKDLLVTSEGEIFKNNRYTRKYERKLARAQHHLSRKNKGSRGFENQRLKVARLHEKIANCRADYLQKCSHSLIQRYDTICIEDLNVKGMEKNHHLAKSITDASWGSFVAMLTYKAEWNGKNVVKIDRFFPSSQTCNVCGYVNKETKNLSVREWECPICHTHHNRDVNAAINILRIGLNQTSAGTVDYTGGEKVSTNLLEGRFSVKPEAHESLAHG

SEQ ID NO: 2735 - protein, 401 aa, unidentified
MRKINRTYKFRLYPNKEQAILLAKHFGCTRFVYNYFLNQRKEQYRLTGKSDNYYAQARTLTAMKKQEATAWLKEVNSQTLQFAIRSLEVAYTNFFQKRAKFPAFKSKHSKNSFTVPQFASIVDGRLFIPKFKEGIKCRVHREIKGEIGKVAISKTPSGKYFVSVFTEEAYATPLEKTGRAVGIDMGLKDLLVTSEGEIFKNNRYTRKYERKLARAQHHLSRKNKGSRGFENQRLKVARLHEKIANCRADYLQKCSHSLIQRYDTICIEDLNVKGMEKNHHLAKSITDASWGSFVAMLTYKAEWNGKNVVKIDRFFPSSQTCNVCGYVNKETKNLSVREWECPICHTHHNRDVNAAINILRIGLNQTSAGTVDYTGGEKVSTNLLEGRFSVKPEAHESLAHG

SEQ ID NO: 2736 - protein, 365 aa, unidentified
MQKAYRFRLYPNQKQQTLIHKTFGCCRFVFNHFLAKRKEVYETERKTLGYNACSSLLTQLKTELDWLKEPDATALQTELRHLDDAFKRFFREKKGYPRFKSRKNPVQSYTSKNNNGSIAIAGNRIRLPKLGWVKLAKSREVEGRILSATIRKNPSGKYFVSVLVETEIQPLPVCDSKVGVDLGVKDFATLSTGEVIPNPKYLRRYEQKLIRWQRKLSRRKKGGSNWHKARLKVARLHEKVVNCRKDFLHKLSTRLIHENQVICLEDLSVQNMQKNHRLAKSIADVSWSTFCTMLAYKAKWYGRTVIRVDKTFPSSQICSACSYRHKEVKNLGLREWTCPSCGTHHDRDINAAKNILQEGLRLLAS

SEQ ID NO: 2737 - protein, 393 aa, unidentified
MSAEMLKATKVRIYPTPEQAEFLNRQFGAMRFVYNKALHIISSQYKRHGLKLKAKKDLKPLLAVAKKSRKYHWLKDFDSIALQQACINLDEAFQNFFDPKLPARYPKFKRKHGKQSSYHCMSVSAGENWIKVPKMKPIKARVHRELDRKLKSVTLSRTVTGKYYASLLLEDGLQTPAPLHSVDTVLGVDMGLTHLAIDSEGNKTANPRFLKRAQSNLRRKQKALSRCRKGSKGRTKARLKLAKAHERLANARADFQHNLSRQLIDENQAVVVETLKVKNLLKNRKLAKHIADASWFGLIQKLEYKAKEQGKHLVKIDQWFASSRTCSCCGHKVDTLPLSVRNWSCPACKAELDRDINAAVNIRQQGIIKLRAEGLSVPANGGLRKSGHAPVAA

SEQ ID NO: 2738 - protein, 393 aa, unidentified
MSAEMLKATKVRIYPTPEQAEFLNRQFGATRFVYNKALHIISSQYKRHGLKLKAKKDLKPLLAVAKKSRKYHWLKDFDSIALQQACINLDEAFQNFFDPKLPARYPKFKRKHGKQSSYHCMSVSAGENWIKVPKMKPIKARVHRELDGKLKSVTLSRTVTGKYYASLLLEDGLETPAPLHSVDTVLGVDMGLTHLAIDSEGNKTANPRFLKRAQSNLRRKQKALSRCRKGSKGRTKARLKLAKAHERLANARADFQHNLSRQLIDENQAVVVETLKVKNLLKSRKLSKHIADASWFGLIQKLEYKAKEQGKHLVKIDQWFASSRTCSCCGHKVDTLPLSVRNWSCPACKAELDRDINAAVNIRQQGIIKLRAEGLSVPANGGLRKSGHAPVAA

SEQ ID NO: 2739 - protein, 362 aa, unidentified
MQKAFKVTLIPNHNQEVLINKTIGCVRFVYNRFLALRKELYSTEQKTLNYNGCSQQLTLLKKEIEWLKEVDKFALQNSLRNLETAYKNFFADFKKVKGRKNLGFPKFKKKYGCKQSYKTNLTNGNIQIIQNRLKLPKMGWVRFHKSQDIAGTIVNVTVTRTSSGKYIASILCQTEIEKHSQVAQNIGLDLGIKSYLVTSDGEVVDNPKYYRTQKRKLRKAHKKLSRTVKGSRNRAKVKIKLARTYERITNLRDDFLHKLSTRLIKENSIICIEDLRVANMVKNQKLALSISDANWSKFVAMLEYKALWHDRIVQRVGTFYPSSQTCNCCSFINPLVKDLRLREWSCPQCNSYNSRDKNAALN

SEQ ID NO: 2740 - protein, 377 aa, unidentified
MQTNFAYKYRIYPTKEQKQLLSKHFGCVRFVWNYFLNERKEHYLKNKEEIEAKRIKGNLNYYDNAKQLTLLKREKEWLRDCNSQSLQATLKHLDSAYRMFFRKTHAFPNFKDKNAKQSFTIPQHFKLEDNKIHFPKFNEGIKVEEHRKLQGKFVVATLSKSTTNKYYISIIVEKEIQTSSLIEKSIGIDLGIKDLIICSDGKKYHNIRSLSNLEDKLRYKQKQLSKKVKGSNNRKKAKHKVAIVHEKIKNTRSDYIHKITKAIINENQVIIAEDLHVKGMMRNHKLAKAISDVAWHEIHRQLEYKSKWNDRAYHIIDRFFPSSKMCSFCNFVNDQLTLKDRTWSCSSCGTQLDRDLNASINILNQGLNNLQAVGITV

SEQ ID NO: 2741 - protein, 416 aa, unidentified
MAIEVTRTYVGAIQNHRQVCDGLDSLGDSASNIWNVARWTADRIWDATGKIPDEGVLKAYMKNQPCWKDLNAQSSQKVIEELSDAFQSWFDLRHKDEEANPPGYRKHGDERPKSTVTFKADGFKHDPENNRVRLSKGLNLKESWSDFILCDYQTRPDVDLSEVNKVQNVRAVWNGDEWEIHFVCKVELETNDSAGDEVAGIDLGIKNIATVAFPDEYVLYPGNSLKQDKHYFTRAEYDTEGENGPSEKSMWARQKLADRETHFYHVLTDAIITECIERGVGTLAVSWPEDVRESDWGKTGNKKLHSWAFDRICQYLEYKGEIRGVEVLKENEWDTSKTCSRCGDDTRSNRVERGLHVCSSCKLVGNADCNGAENMRQKITPSPHGEDRGNGCVAQPSVHLFDRESGTFKMREQVVS

SEQ ID NO: 2742 - protein, 402 aa, unidentified
MKRLLKSFKTELRLNESQKDKIRRSLGICRFLSNQYIARNIWLYRLYRRGILDEKQRRFVTANDFDKYVNHTLKKKFPWIDQCGSKARKKVLVNAEQAFRRFFKGQAHFPRFKRKNQQNVKLYFPKNNKGDWTIWRHKIQVPTIGKVRLKEFGYLPQGVTIKNGHVSYEAGRYYVSVTAEIEETSRYNNDLEASYHPQTDGIGVDLGVKSLAIVSDGRIFENINTSSRARRLEKRLRREQRRLSRKYEMRKKKGGSTATASANIEKKKLSVQRLHQRLANLRRNHENQIIHALVEQKPRFITVEDLNVTGMMKNRHLSKAVSEQRFYSFREKLRRKAESIGIEFRIADRFYPSSKTCHACGHVHSSLKLKARIYVCPVCGYTEDRDLNAALNLRDTKNYRIA

SEQ ID NO: 2743 - protein, 402 aa, unidentified
MRNLLKAFKTELRLTERQKDKVRRSLGICRFLANQYIARSIWLYRLYQRGILDEKQPHFVTANDFDKYVNHTLKKKFPWIDQCGSKARKKILVNAEQAFRRFFKGQAHFPRFKRKNQQNVKLYFPKNNKGDWTIWRHKIQIPTIGKVRLKEFGYLPQGVTIKNGHVSYKAGRYYVSVTTEIEETSRYNNDLEASYHPQTDGIGVDLGVKSLAIVSDGRIFENINMSSRAKRLEKRLRREQRRLSRKYEMRKKKGGSAATVSANIEKKKLSVQRLHQRLTNLRRNHENQVIHALVEQKPRFITVEDLNVTGMMKNRHLSKAVAQQRFYSFREKLRCKAEVIGIEFRIADRFYPSSKTCHACGYMYSGLKLKNRVYVCPSCGYTEDRDLNAALNLRDTKNYRIA

SEQ ID NO: 2744 - protein, 372 aa, unidentified
MIVNKAYKFRLYPNKEQEILINKTFGCSRFVFNHFLTKWDNTYKETGKGLTYNSCSAQLTQLKKELTWLKEVDSIAIQSSLKNLADAYSRFFKKQNDKPRFKSKKNPVQSYTTKYTNDNIAIDDNKIKLPKLGWIRFAKSRDVEGRILNATIRRNPSGKYFVSILVETEVQPLEKTDSSVGIDVGLKDFAILSDGTIYSNPKFFRRLEEKLAKAQRILSRRKKGGSNWNKQRIKVTRIHEKITNARNDYLHKISTEIVKNHDIIGMEDLSVSNMLKNHHLAKAISEVSWSQFRMMLEYKAKWYGKQVVTVAKNFPSSQLCSCCGYKNKDVKNLGLREWECPNCHTHHDRDINASLNLRKEALRLTVGTTGIA

SEQ ID NO: 2745 - protein, 416 aa, unidentified
MAIEVTRTYVGSIQNHRQVRDGLDSLGDSASKIWNVARWTADRIWDVIGEIPDEGVLKSYMKNQSCWKDLNAQSSQKVIEELSDAFQSWFDLRQKDSKANPPGYRKQGDTRPKSTVTFKADGFKHDPKNNRVRLSKGSNLKEHFSDFLLCEYQTRPDVDLSEVNSVQNVRAVWNGDEWELHFVCKVTLETNESAGDDVAGIDLGITNLATVAFPDEYVLYPGNSLKQDKHYFTQAEYDTEGENGPSSKSMWARRKLVDRETHFFHVLTESIITECVERGVGTLAVSWPEDVRESDWGTTGNKKLHSWAFDRITQYLAYKGEMRGVEVLKKNEWDTSKTCSNCGDTTKSNRVERGLYVCSSCELVGNADCNGAENMRQKITPSPHGEDRSNGCVAQPSTYLFDRESGMFRTREQVVS

SEQ ID NO: 2746 - protein, 416 aa, unidentified
MAIEVTRTYVGSIQNHQQVCDGLDSLGDSASKIWNVARWTADRVWDEIGKIPDEGPLKSYMKNQSCWKDLNAQSSQKVIEELSDAFQSWFDLRHKDDKANPPGYRKHGDTRPRSTVTFKADGFKHDPENNRVRLSKGSNLKESWSDFILCEYQSRPDVDLTEVNKVQNVRVVWNGDEWKLHFVCKVSLETNDSAGDEVAGIDFGIKNIATVAFPNEYVLYPGNSLKQDKHYFTRAEYDTEGENGPSEKAKWARRKLVNRETHFYHTLADAIITECVERDVGTLAVSWPEDVRESDWGKTGNKKLHTWAFDRIYQYLAYKGEIRGVEVLKENEWDTSKTCSTCGDGTKSNRVERGLYVCSSCGLVGNADCNGAENMRQKITPSPHGEDRSNGCVAQPSVHLFDRESGTFRTREQVVS

SEQ ID NO: 2747 - protein, 411 aa, unidentified
MSSIQKAFKVTLIPTHNQEVLINKTIGCARYVYNRFLALRQELYTTEQKTLNYNACSQKLTILKKEIEWLKEVDKFALQNSLKNLETAYKNFFADLKKMKGKKGVGFPKFKKKHGCKQSYKTNLTNGNIQVIDNRLKLPKLGWVKFHKSQDVTGKLVNVTITRTSSGKYIASILCETEIEKYPEVVQNIGLDLGVKSYLVTSDGEVVDNPKYYRTQTRKLRKAHKKLSRSAKGSNNRVKAKIKLARTYERITNLRDDFLHKLSTRLIKENSIICVEDLRVANMVKNHKLALSISDASWSKFITMLEYKALWHDRLVQKIGTFYPSSQTCNCCGFINPQVLDLNLREWCCPSCNSYNLRDKNAALNILSEGLRLLTAVGTPEVIKNACGELVSPEVIPAEIIEAGITRLSVV

SEQ ID NO: 2748 - protein, 369 aa, unidentified
MLKATKVRIYPTTEQAEFLNRQFGAVRFCYNTGLRIMSHRYKRHGQSLSAKHDIKKLLPVAKKSRKYGWLKEADSMALQQSCINLDHAFQRFFDPKQKAGYPRFKSKRGKQSSYHCVGVKAGDNWIKVPKLGPIKAKVHRPVDGKLKSITLSRTVTGKHYASLLFDTDQATPVPTMDVDTSRVVGLDMGLSHLAIDSNGRKVANPRFLKQAQKNLKRKQQALSRTKKGSARRAKARLLVAKAYERVANARNDFQHKLSRQIVDDNQAVIVETLKVRNMMKNTCLAKHIGDASWHALMTKLDYKAREQGKHLVKIDPWFASSKTCHVCQHKMDAMPLNVRSWECPACHTQHDRDINAALNIKHQGIIELK

SEQ ID NO: 2749 - protein, 369 aa, unidentified
MLKATKVRLYPTTEQAEFLNRQFGAVRFVYNTGLRIISHRHKRHGQSLSAKHDIKKLLPVAKKSRKYGWLKEADSVALQQACLNLDHAFQRFFDPAQKAGYPRFKSKRGKQSSYHCVGVKAGDDWIKVPKLGPIKARMHRQVEGRLKSITLTRTVTGKHYASLLYETEQAAPAPLKAVDAAKVLGLDMGLSHLAIDSTGRKIANPRFLKQAQQNLKRKQQALSRTKKGSANRAKARLLVAKAHERLANARHDFQHKFSRQIVDDNQAVIVETLKARNMMKNARLAKHIGDASWHALVTKLDYKAKEQGKHLVKIDPWFASSKTCHVCQHKMDAMPLNIRSWECLACHTQHDRDINAALNIKHQGIIELK

SEQ ID NO: 2750 - protein, 415 aa, unidentified
MYPSNCKKLPTIQKAFKVTLIPTHNQEVLINKTIGCARYVYNRFLALRKELYSTEQKTLNYHACSQQLTALKKEIEWLQEVDKFALQNSLKNLETAYKNFFADLKKAKGKKSVGFPKFKKKYGCKQSYKTNLTNGNIQIIENRLKLPKLGWIKFHKSQDIQGKLVNVTITRTSSGKYIASILCETEIEKYPQVTKNIGLDLGIKSYLVTSSGGVVDNPKYYRTQTRKLRSCHKKLSRSIKGSNNRVKAKTKLARTYERITNLRDDFLHKLSTRLIKENSIICIEDLRVANMVKNHKLALSISDASWSKFVTMLEYKALWHDRIVQKVGTFYPSSQTCNCCGFVNPLVKDLKLREWCCPSCSNYNLRDVNASLNILGEGLRLIAAVGIPEALNACRELVSPELLQAEIVEAGITRL

SEQ ID NO: 2751 - protein, 407 aa, unidentified
MKHLNKEEYLILKELCHTAKNLYNQAVYNIRQHYFDEEKYLSYIENNKLLKSSENYKTLNSNMAQQILKEVDGAFKSFFRLLKLKSKGEYKEKVKLPNYLPKNSFTTLVVGFVRLNENSFILPYSQIYKKNHKPIKINIPPLLLDKNIKEIRIIPKFNARFFEIQYTYQVEREQRNLDKNNVLAIDLGVNNLATCVTNRGKSFIVDGKKLKSINQWFNKYNAKLQSIKDKQDYGKALTLKQKSIWNKRNNRVNDYLSKSARIIINYCLANSIGTLVCGYNNDFQRNSDIGKRNNQNFVNIPFSKLQSKLKYLCELYGIDFVLQEESYTSKGSFFDMDIIPEYKKGNTEEYSFSGRRVKRGIYKTSKGYVLNADVNGALNILRKSKVVDLEVLYSRGEVDTPVRIRVS

SEQ ID NO: 2752 - protein, 391 aa, unidentified
MLKATKVRIYPTTEQAEFLNRQFGAVRFCYNTGLRIMSHRYKRHGQSLSAKHDIKKLLPVAKKSRKYGWLKEADSMALQQSCINLDHAFQRFFDPKQKAGYPRFKSKRGKQSSYHCVGVKAGDNWIKVPKLGPIKAKVHRPVDGKLKSITLSRTVTGKHYASLLFDTDQATPVPTMDVDTSRVVGLDMGLSHLAIDSSGRKVANPRFLKQAQKNLKRKQQALSRTKKGSARRAKARLLVAKAYERVANARNDFQHKLSRQIVDDNQAVIVETLKVRNMMKNTCLAKHIGDASWHALMTKLDYKAREQGKHLVKIDPWFASSKTCHVCQHKMDAMPLNVRSWECPACHTQHDRDINAALNIKHQGIIELKAEGLSVSAHGGLRKSGTSSAAA

SEQ ID NO: 2753 - protein, 391 aa, unidentified
MLKATKVRLYPTTEQAEFLNRQFGAVRFVYNTGLRIISHRHKRHGQSLSAKHDIKKLLPVAKKSRKYGWLKEADSVALQQACLNLDHAFQRFFDPAQKAGYPRFKSKRGKQSSYHCVGVKAGDDWIKVPKLGPIKARMHRQVEGRLKSITLTRTVTGKHYASLLYETEQAAPAPLKAVDAAKVLGLDMGLSHLAIDSTGRKIANPRFLKQAQQNLKRKQQALSRTKKGSANRAKARLLVAKAHERLANARHDFQHKFSRQIVDDNQAVIVETLKVRNMMKNARLAKHIGDASWHALVTKLDYKAKEQGKHLVKIDPWFASSKTCHVCQHKMDAMPLNIRSWECPACHTQHDRDINAALNIKHQGIIELKAEGLSVSAHGGLRKSGTSSAAA

SEQ ID NO: 2754 - protein, 416 aa, unidentified
MAIEVTRTYVGSIQNHRQVCDGLDSLGDSASKIWNVARWTADRIWDETGEIPDEDVLKAYMKNQSCWKDLNAQSSQKVIEELSDAFHSWFDLRHKFDEANPPGYRKHGDTRPKSTVTFKEDGFKHDPEHNRVRLSKGSNLKEHFSDFLLCEYQTRPDVDLSEVNRVQNVRAVWNGDDWELHFVCKVELETNDSVGDGVAGIDLGITNIATVAFPDAYVLYPGNSLKEDKHYFTRAEYDTEGDNGPSEKSMWARQKLTERETHFYHTLTDTIITECVERDIGTLAVSWPEDVRESDWGKTGNKKLHSWAFDRIYQYLEYKGEIRGVEVLKENEWNTSKTCSRCGDDTKSNRVERGLYVCQSCGLVGNADCNGAENMRQKITPSPHGEDRSNGCVAQPSTQLFDRDSGTFKTREQAVS

SEQ ID NO: 2755 - protein, 416 aa, unidentified
MAIEVTRTYVGSIQNHQQVCDGLDSLGDSASKIWNVARWTADRIWDETGEIPDEGVLKAYMKNQSCWKDLNAQSSQNVIEELSDAFHSWFDLRHKFDEANPPGYRKHGDTRPKSTVTFKEDGFKHDPENNRVRLSKGSNLKEHFSDFLLCEYQTRPDVDLSEVNRVQNVRAVWNGDDWELHFVCKVELETTESAGDGVAGIDLGIANIATVAFPDEYVLYPGNSLKEDQHYFTQAEYDTEGDNGPSEQSMWARQKLTERETHFYHTLTDTIITECVERGVGTLAVSWPEDVRESDWGKTGNKKLHSWAFDRIYQYLEYKGEMRGVEVLKENEWDTSKTCSRCGDDTKSNRVERGLYVCQSCELVANADCNGAENMRQKITPSPHGEDRSNGCVAQPSTQLFDRGSGTFKPREQVVS

SEQ ID NO: 2756 - protein, 416 aa, unidentified
MAIEVTRTYVGSIQNHRQVCDGLDSLGDSASKIWNVARWTADRIWNATGEIPDEGPLKSYMKNQACWKDLNAQSSQKVIEELSDAFQSWFDLRHKFDEANPPGYRKHGDTRPRSTVTFKEDGFKHDPENNRVRLSKGSNLKDHFSDFLLCEYQTRPDVDLSEVNSVQNIRAVWNGDEWELHFVCKVELETNDSAGDEVAGVDLGIKNIATVAFPDEYVLYPGNSLKQDKHYLTRAEYDTEGENGPSEKSMWARRKLADRETHFYHTLTDAIITECVERGVGTLAVSWPEDVRESDWGKTGNKKLHSWAFDRLYQYLDYKGEIRGVEVLKENEWNTSKTCSRCGDDTKSNRKHRGLYVCSSCGLVGNADCNGAENMRQKITPSPHGEDRSNGCVAQPSTQLFDRDSGTFKPREQVVL

SEQ ID NO: 2757 - protein, 416 aa, unidentified
MAIQVTRTYVGSIQNHRQVCDGLDSLGDSASKIWNVARWTADRVWDEIGEIPDEGSLKSYMKNQSCWKDLNAQSSQKVIEELSDAFRSWFDLRHKFDEANPPGYRKHGDERPRSTVTFKADGFKHDPQNNRVRLSKGSNLKEHFSDFLLCEYQTRPDVDLSEVKSVQNVRAVWNGDKWELHFVCKVELETNDSTGDGVAGIDLGIKNIATLAFPDEYVLYPGNSLKQDKHYFNRVEYDTEGENGPSEKSMWARRKLADRETHFYHTLTDTIITECVERGVGTLAVSWPEEVRNSDWGKTGNKKLHTWAFDRIYQYLEYKGVIRGVEVLKENEWNTSKTCSACGDDTKSNRVERGLYVCSSCGLVGNADCNGAENLRQKITPSPHGEDRSNGCVAQPSTYLFDRESGMFHTREQAMS

SEQ ID NO: 2758 - protein, 393 aa, unidentified
MSTEMLKATKVRIYPTPKQAEFLNRQFGAVRFTYNKALHIISSQYKRHGLRLKAKKDLKPLLAVAKKSRKYHWLGDFDSIALQQACINLDKAFQAFFDPKLPARYPTFKRKHGKQSSYHCMSVSAGDNWIKVPKMKPIKARVHRELDGKLKSITLSRTVTGKYYASLLIEDGVEAPVPMQTVDTVLGVDMGLTHLAIDSEGNKIANPRFLKRAAANLRRKQKALSRCQKGSKGRAKARLKLAKAHERLANARADFQHNLSRQLIDENQAVVVETLKVKNLLKNRKLAKHIADASWFGLIQKLEYKAKAQGKYLVKIDQWFASSKTCSCCGHKVDSLPLSVRNWTCPACAAELDRDINAAINIRQQGIIKLRAGGLSAPANGGLRKSGHAPVAA

SEQ ID NO: 2759 - protein, 418 aa, unidentified
MMKRVEHHRLKPSSPFYAMLREFCHRSKNLYNHGNFRIRHTFIEDGKWLRYGEVDRLLKADAEYPDYREMPTAQTAQQTLRLLDKNWTSFFAAIKDWKAHPEKYKERPKLPKYKPKDGCFPLVLTNQNCRLKDGVIRFPRVFQGFTVKAIFASQPEAVFKQARIIPHGGEINLELVYELPEVKEKANNGKYAAIDIGVDNLAALAWNTDERPVLLKGTPLKSVNQYYNKQMAKRRSICELMNGRHSSKRIARLTAKRNRKVEDYLHKASRKVIDLCAEQDVSVLVIGKNKGWKQEVNLGRKVNQSFVQLPFARFIQMLQYKAESIGMKVVLTEESYTSGTSFLDGEVPTKDHYDKSRRIHRGLFQANDGRKINADINGAYQIMRKVFPNMNADGIEGVALRPAVVALSMSARRSSGCA

SEQ ID NO: 2760 - protein, 418 aa, unidentified
MMKRVEHHRLKPSSPFYAMLREFCHRSKNLYNHGNYLIRQTFIEDGKWLRYGEVDRLLKVDAEYPDYREMPTAQSAQQTLRILDKNWTSFFAAIKDWKAHPEKYKGRPKLPKYKPKDGCFPLVLTNQNCKLKDGVIRFPRVFQGFTVKAIFASQPDAVFKQARIIPHGGEIDLELVYELPKVEEKADNGKYAAIDIGVDNLAALAWNTDERPVLLKGTPLKSVNQYYNKQMAKRRSICELMNGRHSSKRIARLTAKRNRKVEDYLHKASRKVIDLCAEQDVSVLVIGKNKGWKQEAKLGRKVNQSFVQLPFARFIQMLQYKAESIGMKVVLTEESYTSGTSFLDDEAPVKECYDKSRRIHRGLFQANDGRKINADVNGAYQIMRKVFPNVNTDGIKGVALRPAVVALSMSARRGSGCA

SEQ ID NO: 2761 - protein, 421 aa, unidentified
MAYVQKAFQVTLIPSHSQKILINKTIGCTRFVYNHFLALRKELYSAEQKTLNYNACSQQLTLLKKEIEWLKVVDKFALQNSLKNLEAAYKNFFTDLKKAKNKKGVGFPKFKKKHRCKQSYKTNFTNGNIQVIENRLKLPKLGWVKFHKSQQISGKLVNVTVTLTNTGKYIATILCETEIEKHPQVTKNIGLDLGIKSYLVTSDGEVVNNPKYYRTQKRKLRKAHKKLSRSVKGSSNRVKARIKLAHTYERITNLRNDFLHKLSTRLIKENTIICIEDLRVGNMLKNHKLAMSISDSAALASLRASASWSKFVTMLEYKANWHDRVLQKVGTFYPSSQTCNCCGFINPLVKDLKLREWSCPSCSSYNLRDVNASLNILDEGLRILTAAVGIPDALNACGEIVSPGVIQAEIVEAGITRLEVV

SEQ ID NO: 2762 - protein, 379 aa, unidentified
MLKATKVRLYPTTEQAEFLNRQFGAVRFVYNTGLRIISHRHKRHGQSLSAKHDIKKLLPVAKKSRKYGWLKEADSVALQQACLNLDHAFQRFFDPAQKAGYPRFKSKRGKQSSYHCVGVKAGDDWIKVPKLGPIKARMHRQVEGRLKSITLTRTVTGKHYASLLYETEQAAPAPLKAVDAAKVLGLDMGLSHLAIDSTGRKIANPRFLKQAQQNLKRKQQALSRTKKGSANRAKARLLVAKAHERLANARHDFQHKFSRQIVDDNQAVIVETLKARNMMKNARLAKHIGDASWHALVTKLDYKAKEQGKHLVKIDPWFASSKTCHVCQHKMDAMPLNIRSWECPACHTQHDRDINAALNIKHQGIIELKAEGLSVSAHD

SEQ ID NO: 2763 - protein, 397 aa, unidentified
MHQWRAMLKATKVRLYPTTEQAEFLNRQFGAVRFVYNTGLRIMSHRHKRHGQSLSAKHDIKKLLPVAKKSRKYGWLKDADSIALQQACLNLDHAFQRFFDPVKKAGYPRFKSKRGKQSSYHCVGVKAGDDWIKVPKLGPIKARMHRQVEGRLKSITLTRTVTGKHYASLLFDTEQAAPAPLKDVDAAKVLGLDMGLSHLAIDSTGRKIANPRFLKQAQKNLKRKQQALSRTKKGSARRAKARLLVAKAHERVANARNDFQHKLSRQIVDDNQAVIVETLKVSNMMKNARLAKHIGDASWHALMSKLDYKAREQGKHLVKIDPWFASSKTCHICQHKMDAMPLNVRSWECPACHTQHDRDINAALNIKHQGIIELKAEGLSVSAHGGLRKSGTSPVAA

SEQ ID NO: 2764 - protein, 418 aa, unidentified
MMKRVEHHRLKPSSPFYAMLREFCHRSKNLYNHGNFLIRQAFLDDSKWLRYGEVDRLLKADVKYPDYREMPTAQTAQQTLRILDKNWASFFAAIKDWKAHPEKYKGRPKLPKYKPKDGYFPLVLTNQNCKLKDGVIRFPRVFQGFTVKAIFSSQPDAVFKQARIIPHGGEIDLELVYEIPEVEEKENNGKYAAIDIGVDNLAALAWNTGKRPVLFKGTPLKSVNQYYNKQMAKRRSICERMNGCHSSKRIARLTAKRNRKVEDYLHKASRKVIDLCAEQDVSVLVIGKNKGWKQEANLVHRVNQSFVQLPFARFIQMLQYKAESIGMKVVLTEESYTSGTSFLDDEAPVKACYDKSRRVHRGLFRTSDGRKINADVNGAYQIMRKVFPNVNADGIEGVALRPAVVTLSMSARRSSGCA

SEQ ID NO: 2765 - protein, 418 aa, unidentified
MMKRVEHHRLKPSSPFYAMLREFCHRSKNLYNHGNYLIRQTFIEDGKWLRYGEVDRLLKADTKYPDYREMPTAQSAQQTLRLLDKNWTSFFAAIKDWKTHPEKYRGRPKLPKYKPKDGYFPLVLTNQNCNLKDGVIRFPRTFQGFTVKAIFASQPEAVFKQARFIPHGDEIDLELVYELPEVEEKADNGKYAAIDIGVDNLAALVWNTGERPVLLKGTPLKSVNQYYNKQIAKRRSICELMNGRHSSKRIARLTAKRNRKVEDYLHKASRKVIDLCAEQDVSVLVIGKNKGWKQEAKLGRRVNQSFVQLPFTRFIQMLQYKAEAIGMKVVLTEESYTSGTSFLDGEAPTKGRYDKSRRVHRGLFQANDGRKINADVNGAYQIMRKVFPNVNANGIEGVALRPAVVALSMSARRSSGCA

SEQ ID NO: 2766 - protein, 422 aa, unidentified
MVCDVRLQQFIAYNAKLAGIHIRYVNPRLTSKRCPSCGHEHRFVSMQHLDGFFKLRDQIDYRALPAQANQNVLHMLYRDWKSFFAALADYKAHPDKYEAVPHIPRYADKDGYKPLIFTNQICKLRKDKHGWYVKFPKAVLQAGCVRDRYDLGMMDLHEQKLKEVRLIPNGDTIKLEIVCEIEIMEPTIKIHEATRVAGIDIGVDNLTAIAFTSGHRPVLIKGNEIKAVKQFYNKQIAHYRSLLRTGKKDSKGIHQTKRMKRISEKRNRRVKDILHKASRKIIDLCVKEGIEVIVVGNHAGWKKRIHMGKKNNQTFVQIPFRTLIEMIKYKGESAGIRVVVCEESYTSKASSIDEDQIPVYGNDVTHTFTGKRIKRGLYRSKNGILMNADINGASNIIRKVYPCMPKRERWSRGTVNVPVTCI

SEQ ID NO: 2767 - protein, 385 aa, unidentified
MSTEMLKATKVRIYPTPEQAEFLNRQFGATRFVYNKALHIISSQYRRHGSKLRAKKDLKPLLAVAKKSRKYHWLKDFDSIALQQACINLDKAFQNFFDPKLSARYPKFKRKHGKQSSYHCMSISAGESWIKARIHREITGAIKSITLSRTVTGKYYASLLVEDSMEAPAPLHTVDTVLGVDMGLTHLAIDSEGNKTDNPRFLKRAQSNLRRKQKALSRCQKGSKGRAQARLKLAKAHERLANTRANFQHNLSRQLIDENQAVIVETLKVKNLLKNRKLSKHIADASWFSLIQKLEYKAKEQGKYLIKINQWFASSKTCSCCGHKVESLPLSVRNWRCPACHAERDRDINAAINIRQQGIIKLRAEGLSVPANGGLLKSGHAPVAA

SEQ ID NO: 2768 - protein, 360 aa, unidentified
MYPTKEQEILIAKTIGCSRFVFNHFLAKWDEMYKTTGKGLSFGSCSKEIPLLKQEFDWLKEVDSTSVQISVKHLADAFDRFFKKQNERPRFKSKRHPVQSYKTNIQGKNQLPEVSIGCNKLKLPKLKWVRFAHSKQVTGRILNATIRRNASGKYFVSLLVEQEINELPKTGSSVGVDVGLKNFAILSDGKVYKNDRYFRLLEKKLVREQRKLSRRQLIALNKKVKLSEARNYQKQKRKVARIHEKIANKRTDFLHKVSTEIVKNHDVIGIETLQVKNMQKNRKLSKAISDVSWSEFFRMLEYKAEWYGKTVVKVGKTFASSQLCSSCGIHHDRDVNAGLNLKQEAERILASSTVGTTGLA

SEQ ID NO: 2769 - protein, 368 aa, unidentified
MRDQIDYRALPAQANQNVLHMLYRDWKSFFAALADYKAHPDKYEAIPHIPRYADKDGYKPLIFTNQICKLRKDKHGWYVKFPKAVLQAGCVRDRYDLGKMDLHEQKLKEVRLIPNGDTIKLEIVCEIEIKEPTITIHEATRVAGIDIGVDNLTAIAFTSGHHPVLIKGNEIKAVNQFYNKQIAHYRSLLRTGKKDSKGIHQTKRMKRISEKRNRRVKDILHKASRKIIDLCVEEGIEVIVVGNNAGWKKRIHMGKKNHQTFIQIPFHTLIEMIKYKGEAAGIRVVVCEEAIQSKASSIDEDQIPVYGNDVAHTFTGKRINRGLYRSKNGILMNADINGASNIIRKVYPCMPKRERWSRGTVNVPVTCI

SEQ ID NO: 2770 - protein, 374 aa, unidentified
MIVYKAYRFRIYPNQKQKILINKTFGCARFVFNHFLAKWNNAYKETGKGLSYQSCSAQLTKLKKEYTWLKEVDSIALQTSLKHLSDAYTRFFQKQNDRPRFKSKKNKVQSYTTKYTNGNIAIVGNKIKLPKLGFVRFAKSREVEGRILSTTIRRNPSGKYFVSILAETDVQPLPKTHTTVGIDMGLKHFAILSDGTKYANPIFFRKLEEKLAKAQRILSRRQMGSSNWHKQRMKVARIHENIVNARHDYLHKISTEIVKNHDIIGMEDLSVSNMLKNDKLAKAISEASWATFEAMIAYKAKWYGKQLIVVAKNFPSSQLCSCCGYQNKDVKHLALREWECPNCHTHHDRDVNASINIKNEAVRLLTAGTAGLAY

SEQ ID NO: 2771 - protein, 402 aa, unidentified
MQKAFKVTLIPNHNQEVLINKSIGCARFVYNHFLALKQELYQSEQKTLSYNACSQQLTVLKKEIEWLKEVDKFALQNSLKNLETAYKNFFADLKKVKGKKGVGFPKFKKKHSCKQSYKTNLTNGNIQVIENRLKLPKLGWVKFHKSQEITGKLVNVTVTRTSSGKYVASILCETEVEKYPQVTQNIGLDLGIKSYLVTSDGEVVDNPKYYRSQKRKLRKANKKLSRSLKGSNNRVKAKTKLARSYERITNLRDDFLHKLSTRLIKENSIICIEDLRVVNMVKNHKLALSISDASWSKFVAMLEYKALWHDRIVQKVGTFYPSSQTCNHCGFINPLVKDLKLREWACPGCSGYNLRDNNAALNILGEGLRLIAAVGAPDAQNACGELVSPGAIQAEIVEAGIA

SEQ ID NO: 2772 - protein, 416 aa, unidentified
MSAEMLKATKVRIYPTPEQAEFLNRQFGSTRFVYNKALHIISSQYKRHGLKLKAKKDLKPLLAVAKKSRKYHWLKDFDSIALQQACINLDKAFQNFFDPKLPARYPKFKRKHGKQSSYHCMSVSAGENWIKVPKMKPIKARVHRELDGKLKSITLSRTVTGKYYASLLVEDGLETPAPLHTVDTVLGVDMGLTHLAIDSEGNKTANPRFLKRAQSNLRRKQKALSRCQKGSKGRAQACLKLAKAHEHLANARADFQHNLSRQLIDENQAVVVETLKVKKLLKNRKLAKHIADASWFSLIQKLEYKAKEQGKHLVKIDQWFASSKTCSCCGHKVDTLPLSVRNWSCPACTVELDRDVNAAINIHQQGVIKLRAEGLSVPANGACVNPATRRLLPEKLEASPVRAGSSHPQILFSTEH

SEQ ID NO: 2773 - protein, 416 aa, unidentified
MAIEVTRTYVGSIQNHRQVCDGLDSLGDSASKIWNVARWTADRIWNETGEIPDEGVLKSYMKNQSCWKDLNAQSSQKVIEELSDAFQSWFDLRHKDEEANPPGYRKHGDERPRSTVTFKEDGFKHDPENNRVRLSKGKNLKEYWSDFLLCEYQTRPDVDLSKVNSVQNVRAVWNGDEWELHFVCNVSLETNDSAGEGVAGTDLGIKNIATVAFPDEYVLYPGNSLKEDKHYFKRAEYDTEGENGPSERSMWARRKLADRETHFYHTLTDTIITECVERGVGTLAVSWPEDVRESDWGKTGNKKLHSWAFDRIYQYLEYKGEIRGVEVLKENEWNTSKTCSRCGDDTKSNRVERGLYVCSSCELVGNADCNGAENMRQKITPSPHGEDRSNGCVAQPSTYLFDRESGMFRTREQVVS

SEQ ID NO: 2774 - protein, 391 aa, unidentified
MLKATKVRIYPTTEQAEFLNRQFGAVRFCYNTGLRIMSHRYKRHGQSLSAKHDIKKLLPVAKKSRKYGWLKEADSMALQQSCINLDQAFQRFFDPKQKAGYPRFKSKRGKQSSYHCVGVKAGDNWIKVPKLGPIKAKVHRPVDGKLKSITLSRTVTGKHYASLLFDTDQAAPAPTMDVDTSRVVGLDMGLSHLAIDSNGRKVANPRFLKKAQENLKRKHQALSRTKKGSAKRAKARMLVAKAHERVANARNDFQHKLSRQIVDDNQAVIVETLKVGNMMKNRRLAKHIGDASWHALMTKLDYKAREQGKHLVKIDPWFASSKTCHVCQHKMDAMPLSVRSWECPACHTQHDRDINAALNIKHQGIIQLKAEGLSVSAHGGLRKSGTSSAAA

SEQ ID NO: 2775 - protein, 411 aa, unidentified
MSSIQKAFKVTLIPTHNQEVLINKTIGCARYVYNRFLALRQELYATEQKTLNYNTCSQQLTLLKKEIEWLNVVDKFALQNSLKNLETAYKNFFAGLKKSKNKKGVGFPKFKKKHGCKQSYKTNLTNGNIQVIDNRLKLPKCGWVKFHKSQDITGKLINVTITRTSSGKYIASILCETEIEKYPQVTQNIGLDLGIKSYLVTSDGEVVDNPKYYRIQKRKLRSYHKKLSRTVKGSSNRVKAKIKLARTYSRITNLRDDFLHKLSTRLIKYYSIICIEDLRVANMVKNHKLALSISDASWSKFITMLEYKALWHDRIVQKVGMFYPSSQTCNCCGFINPLVNNLNLREWSCPSCNSYNLRDKNAALNILSEGLRLLTAVGTPEVIKSACGELVSPGAIQAEIVEAGITRLQVV

SEQ ID NO: 2776 - protein, 361 aa, unidentified
MHRAYKFRLYPNREQATRINKTIGCTRFVFNHFLAKRKDAYEQEQKTLNYNDCSALLTQLKKEIEWLKEVDSTALQSTLKDLDSSYKKFFKEKKGYPKFKSKKNPKQSYTCKMNIKVEGDRIKLPKLGWVTFAKSREVEGRILSATVRKNPSGTYFVSVLCETEIQPLLQAEKTVGVDLGIKDFAILSTGEKIANPKVLRYYEKKLATWQQKLSRRKKGGQNREKSRKQVARLHERISNTRNDFLHKLSTQLIRENQTICLEDLRVENMIKNHKLAKSIADASWSAFRTMLEYKAAWYGRTISIVGKQFPSSQLCSGCGYQNKEVKNLNLRNWTCPNCGVQHDRDKNAAINIEQEGLRLLA

SEQ ID NO: 2777 - protein, 361 aa, unidentified
MHRAYKFRLYPNREQATLINKTIGCTRFVFNHFLAKRKDAYEQEKKTLNYNDCSAMLTQLKKEMEWLKEVDSTALQSTLKDLDSSYKKFFKEKKGYPKFKSKKNPKQSYACKMNIKVEGDRIKLPKLGWVTFAKSREVEGRILSATVRKNPSGKYFVSVLCETEIQPLLQAEKTVGVDLGIKDFAILSTGEKIANPKALRYYEKKLATWQQKLSRRKKGGQNREKSRKQVARLHERISNTRNDFLHKLSTQLIRKNQTICLEDLRVENMIKNHKLAKSIADASWSAFRTMLEYKAAWYGRTISIVGKQFPSSQLCSGCGYQNKEVKNLNLRNWTCPNCGVQHDRDKNAAINIEQEGLRLLA

SEQ ID NO: 2778 - protein, 374 aa, unidentified
MLVNKAYKFRIYPSKEQEILIAKTIGCSRFVFNHFLAKWNDTYKATGKGLTYNSCSSQLTQLKKELVWLKEVDSIAIQSSLKNLADAYSRFFKKQNDAPRFKSKKNKVQSYTTKHTNGNIAIVDNKIKLPKLGLVRFAKSREVEGRILNVTVRRNPSGKYFVSILVETEVQELPKTGLEVGIDVGLKDFAILSDGTKYKNPKWFRKLEEKLANAQRILSRRTKGGSNWNKQRIKVARIHEKITSARTDYLQKVSTEIIKNHDVIGIEDLQVSNMLKNHKLAKSISEVSWYQFRTMLEYKAKWYGKQVVAVSKTFASSQLCSCCGYKNKDVKNLNLREWDCPSCGTHHDRDINAGQNIKNEALRLLTVGTAGIAY

SEQ ID NO: 2779 - protein, 401 aa, unidentified
MNVIRQKHHSTPIHIIDHEHRFVSMQHLDGFFKLRDQIDYRALPAQANQNVLHMLYRDWKSFFAALADYKAHPDKYEAIPHIPRYADKDGYKPLIFTNQICKLRKDKHGWYVKFPKAVLQAGCVRDRYDLGKMDLHEQKLKEVRLIPNGDTIKLEIVCEIEIMEPTITIHEATRVAGIDIGVDNLTAIAFTSGHRPVLIKGNEIKAVNQFYNKQIAHYRSLLRTGKKDSKGIHQTKRMKRISEKRNRRVKDILHKASRKIIDLCVEEGIEVIVVGNNAGWKKRIHMGKKNNQTFVQIPFRTLIEMIKYKGEAAGIRVVVCEEAIQSKASSIDEDQIPVYGNDVTHTFTGKRIKRGLYRSKNGILINADINGASNIIRKVYPCMPKRERWSRGTVNVPVTCI

SEQ ID NO: 2780 - protein, 266 aa, unidentified
MNVIRQKHHSTPIHIIDHEHRFVSMQHLDGFFKLRDQIDYRALPAQANQNVLHMLYRDWKSFFAALADYKAHPDKYEAIPHIPRYADKDGYKPLIFTNQICKLRKDKHGWYVKFPKAVLQAGCVRDRYDLGKMDLHEQKLKEVRLIPNGDTIKLEIVCEIEIMEPTITIHEATRVAGIDIGVDNLTAIAFTSGHRPVLIKGNEIKAVNQFYNKQIAHYRSLLRTGKKDSKGIHQTKRMKRISEKRNRRVKDILHXRLRLRVDTALY

SEQ ID NO: 2781 - protein, 317 aa, unidentified
MHRAYKFRLYPNKEQATLINKTIGCTRFVFNHFLAKRKDAYEQEKRTLNYNDCSAMLTQLKKEMEWLKEVDSTALQSTLKDLDSSYKKFFKEKKGYPKFKSKKNPKQSYACKMNIKVEGDRIKLPKLGWVTFAKSREVEGRILSATVRKNPSGKYFVSVLCETEIQPLLHTEKTVGVDLGIKDFAILSTGEKIANPKALRYYEKKLATWQQKLSRRKKGGQNREKSRKQVARLHERISNTRNDFLHKLSTQLIRENQTICLEDLRVENMIKNHKLAKWGVSKVSLLLSVVVNLDFNVLYRISYNSIIGVDCQLDFFL

SEQ ID NO: 2782 - protein, 390 aa, unidentified
MILKAFKFRLYPNPTQQQLIRQTVGSARFVFNFFLAQQERQVDQYWAITNEMVQNGQLTENKWGKHYFRANQTKKEIVLLKKHYPWLKEVDSISLQAAVEALDDSYSRFYSKQNERPRFKSKRNKVQSYTTKCVNQNIQLDGNCIKLPKLGWVRFAKSREVTGPIRKVTVRMNASGRFFISILTKIEVKALPPTSKEVGIDVGLKKFATLSNGDVVENPRFLQKWEKKLQDAQRILSRRTIGSTNWHKQKQKVARIHEKITNTRTDFLHKLTTNLIKKHDVLAIEDLQIQSLLKNHQNAKGISEVSWYEFRTMLEYKAAWYGRTVIAVGKTFASSQLCSTCGTKNKEVKQRNLRKWTCVSCHTHHDRDFNASLNILAEGKRLLLLGSSAS

SEQ ID NO: 2783 - protein, 401 aa, unidentified
MNVIRQKHHSTPFHIIDHDHRFVSMQHLDGFFKLRDQIDYRALPAQANQNVLHMLYRDWKSFFAALADYKAHPDKYEAIPHIPRYADKDGYKPLIFTNQICKLRKDKHGWYVKFPKAVLQAGCVRDRYDLGKMDLHEQKLKEVRLIPNGDTIKLEIVCEIEIKEPTITIQEATRVAGIDIGVDNLTAIAFTSGHRPVLIKGNEIKAVNQFYNKQIAHYRSLLRTGKKDSKGIHQTKRMKRISEKRNRRVKDILHKASRKIIDLCVEEGIEVIVVGNNAGWKKRIHIGKKNNQTFVQIPFHTLIEMIKYKGEAAGIGVVVCEEAIQSKASSIDEDQIPVYGNDVTHAFSGKRIKRGLYRSKNGILMNADINGASNIIRKVYPCMPERERWSRGTVNVPVTCI

SEQ ID NO: 2784 - protein, 256 aa, unidentified
IRQKHHSTPFHIIDHDHRFVSMQHLDGFFKLRDQIDYRALPAQANQNVLHMLYRDWKSFFAALADYKAHPDKYEAIPHIPRYADKDGYKPLIFTNQICKLRKDKHGWYVKFPKAVLQAGCVRDRYDLGKMDLHEQKLKEVRLIPNGDTIKLEIVCEIEIMEPTITIHEATRVAGIDIGVDNLTAIAFTSGHRPVLIKGNEIKAVNQFYNKQIAHYRSLLRTGKKDSKGIHQTKRMKRISEKRNRRVKDILHKASRK

SEQ ID NO: 2785 - protein, 370 aa, unidentified
FKLRDQIDYRALPAQANQNVLHMLYRDWKSFFAALADYKAHPDKYEAIPHIPRYADKDGYKPLIFTNQICKLRKDKHGWYVKFPKAVLQAGWVRDRYDLGKMDLHEQKLKEVRLIPNGDTIKLEIVCEIEIMEPTITIHEATRVAGIDIGVDNLTAIAFTSGHRPVLIKGNEIKAVNQFYNKQIAHYRSLLRTGKKDSKGIHQTKRMKRISEKRNRRVKDILHKASRKIIDLCVEEGIEVIVVGNNAGWKKRIHMGKKNNQTFVQIPFRTLIEMIKYKGEAAGIRVVVCEEAIQSKASSIDEDQIPVYGNDVTHTFTGKRIKRGLYRSKNGILINADINGASNIIRKVYPCMPKRERWSRGTVNVPVTCI

SEQ ID NO: 2786 - protein, 259 aa, unidentified
MNVIRQKHHSTPFHIIDHDHRFVSMQHLDGFFKLRDQIDYRALPAQANQNVLHMLYRDWKSFFAALADYKAHPDKYEAIPHIPRYADKDGYKPLIFTNQICKLRKDKHGWYVKFPKAVLQAGCVRDRYDLGKMDLHEQKLKEVRLIPNGDTIKLEIVCEIEIMEPTITIHEATRVAGIDIGVDNLTAIAFTSGHRPVLIKGNEIKAVNQFYNKQIAHYRSLLRTGKKDSKGIHQTKRMKRISEKRNRRVKDILHKASRK

SEQ ID NO: 2787 - protein, 402 aa, unidentified
MRNLLKAFKTELRLTERQKDKVRRSLGICRFLANQYIARNIWLYRLYQRGILDEKQPHFVTANDFDKYVNHTLKKKFPWIDQCGSKARKKILVNAEQAFRRFFKGQAHFPRFKRKNQQNVKLYFPKNNKGDWTIWRHKIQIPTIGKVRLKEFGYLPQGVTIKNGHVSYKAGRYYVSVTTEIEETSRYNNDLEASYHPQTDGIGVDLGVKSLAIVSDGRIFENINMSSRAKRLEKRLRREQRRLSRKYEMRKKKGGSAATVSANIEKKKLSVQRLHQRLTNLRRNHENQVIHVLVEQKPRFITVEDLNVTGMMKNRHLSKAVAQQRFYSFREKLRCKAEVIGIEFRIADRFYPSSKTCHACGYMHSGLKLKNRVYVCPSCGYTEDRDLNAALNLRDTKNYRIA

SEQ ID NO: 2788 - protein, 393 aa, unidentified
MSTEMLKATKVRIYPTPKQAEFLNRQFGAVRFTYNKALHIISSQYKRHGLKLKAKKDLKPLLAVAKKSRKYHWLGDFDSIALQQACINLDKAFQAFFDPKLPARYPKFKRKHGKQSSYHCMSVSAGDNWIKVPKMKPIKARVHRELDGKLKSITLSRTVTGKYYASLLIEDGVEAPVPMQTVDTVLGVDMGLTHLAIDSEGNKIANPRFLKRAAANLRRKQKALSRCQKGSKGRAKARLKLAKAHERLANARADFQHNLSRQLIDENQAVVVETLKVKNLLKNRKLAKHIADASWFGLIQKLEYKAKAQGKYLVKIDQWFASSKTCSCCGHKVDSLPLSVRNWTCPACAAELDRDINAAINIRQQGIIKLRAEGLSAPANGGLRKSGHAPVAA

SEQ ID NO: 2789 - protein, 443 aa, unidentified
MDTLVLRFHGGYGEQQDYRTVHCRPENEGLMTHRKVFRFRMEPTQEQGEALLRMAGARRWAWNWGLARRKEVYERTKKTLPIAQLSSELTALKKRPETAWLKDVDSQLLQQALKDLDRGYQAFFGKRARFPRFKSKKRDEPRFRIPQRVKVEDSKVYVPKIGWVKIRQSQPIDCTLKGATFKRDTDGHWYVALTAEFEMPDVPLPPANPEKVVGIDLGLKDFATLSDGTRSEAAPAARQCRYSIAQPKFYRKAERKLKRAAKALFRKQKGSRNREKARKRLNQVHTQIKNQRQDFLHKLTTELVQKYDGLCIEDLSLKGMARTKLSKSVLDAALGEFRRQLEYKAVWHRKHLWWLTATSPSSRLCSVCGAIHQALTLADRVWRCDCGAVHDRDLNAAHNIRAEGIRSIPVAVGHTETQNACGELVRPHQQSWHDSVKQESHGL

SEQ ID NO: 2790 - protein, 383 aa, unidentified
MKIIRSIGVARFLYNQYIAYNRHLYKMYQRGILDEKQKHFVTANDFDKYVNHKLKKELPWIDQCGSKARKKALVNAEQAFRRFFSGTSGFPNFKKKVNQDVKLYFPKNNKGDWTIWRQKLMVPTLKQVRLKEFGYLPVGAKVTNGTVSYVAGKFYVSVVVNIDKKSKYNKDLEASYHKVTEGVGIDLGVKDLAIVSDGKVFKNINKSSKVKRLEKRLRREQRCLSRKYEFRKKKGGKTATASANIEKQKLKVQILHQRITRIREDYENKTVHEIVKQKPRFITVEDLNVKGMMKNQHLAKAVAAQRFNHLLAKLKRKAEIIGIEFREVDIFYPSSKTCHSCGHIHKGLKLKDRVYVCPECGYTADRDYNASLNLRDAKEYRVA

SEQ ID NO: 2791 - protein, 482 aa, unidentified
MLLDLAHFRNLLIILIRKYKEFYGTYPLHQSILYGLIAKVYTGKYKQEFEEVLRNIHQKEGLRDLLESLKVQKERIDNSHYIQYLIRQVIKDFTSFFKSFKSYKESPHKFKETPKPPKPKKMRYLINLSVEGNINTFRQEKDKLVIRLKKGAYLKVKLPRNFSYRVSSIRLKLFGDDLYVDVVYEQEVKRIEPKGQYTAGIDIGLDEMLSVVSENPRLKSFIVSGKEIKAFNQWFNKERAKLRTQIDYLKNEIKSESYENTERLERKLKELEIKEKVLSAHRKRWLENNLHKLSRKLVDLLYETGHKVIYIGKNALESKNGINLGKKTNQNFVFIPFRRLAEIIKYKAKELGIEVVEVDESYTSKTSPFADIFKVRKTKDKTLCQGERKGNTFKDNVLNKVFHADLVGALNIMRVGAKLLKLGFYESLKIFFVKLCNPVRLKLIDFFYKVSSESMWIGGSKREVLALAGWMEKLGHLDAFSV

SEQ ID NO: 2792 - protein, 398 aa, unidentified
MEKTGIIYSMIKATKVRIYPTPEQADFLNRQFGAVRFAYNKALHIISSQYKRHGLKLKAKQDLKPLLAVAKKSRKYHWLKDFDSIALQQACINLDKAFQNFFDPKRPARYPKFKRKHGKQSSYHCTSVSMGENWIKVPKMEPIKARIHRKVEGKLKSITLSRTVTGKYYASLLIDNGLDTPAPMQTLDSVLGLDMGLTHLVIDSDGNKIENPRFLKKASANLRRKQKALSRCQKGSKGRAQARLQLAKAYERLKNARADFQHKLSRTIVDENQAVIVETLKVKNLLKNRTLAKYIADAGWFSLVQKLEYKAKEQGKHLVKIDQWFASSKTCACCGHKVDTLPLSVRYWTCPACTVALDRDINAAINIRQQGIIKLRAEGLSVPANGGLRQSGHAPVAA

SEQ ID NO: 2793 - protein, 416 aa, unidentified
MAIEVTRTYVGSIQNHQQVSDGLDSLGDSASKIWNVARWTADRIWEVTGEIPDDGTLKAYMKNQPCWKDLNAQSSQKVIEELSDAFQSWFDLRHKDDEANPPGYRKHGNTRPRSTVTFKADGFKHDPENNRVRLSKGSNLKENWSDFILCEYQTRPDVDLTEVNSVQNVRAVWNGDEWELHFVCKVELETNDSSGDGVAGIDLGIKNIATVAYPDEYVLYPGNSLKQDKHYFKRAEYDTEGENGPSEKSRWARRKLADRETHFYHVLTDTIITECVERGVGTLAVSWPEDVRESDWGKTGNKKLHSWAFDRIYQYLEYKGEIRGVEVLKENEWETSKTCSRCGDDTKSNRVERGLYVCSSCELVGNADCNGAENMRQKITPSPHGEDRSNGCVAQPSVHLFDRESGTFNTREQAVS

SEQ ID NO: 2794 - protein, 416 aa, unidentified
MAIEVTRTYVGSIQNHQQVSDGLDSLGDSASKIWNVARWTADRLWEVTGEIPDDGTLKAYMKNQPCWKDLNAQSSQKVTEELSDAFQSWFDLRHKDDEANPPGYRKHGDTRPRSTVTFKADGFKHDPENNRVRLSKGSNLKENWSDFILCEYLTRPDVDLTEVNSVQNVRAVWNGDEWELHFVCKVELETNDSSGDGVAGIDLGIKNIATVAFPDEYVLYPGNSLKQDKHYFKRAEYDTEGENGPSEKSRWARRKLADRETHFYHVLTDTIITECVERGVGTLAVSWPEDVRESDWGKTGNKKLHSWAFDRIYQYLEYKGEIRGVEVLKENEWETSKTCSRCGDDTKSNRVERGLYVCSSCELVGNADCNGAENMRQKITPSPHGEDRSNGCVAQPSVHLFDRESGTFKTREQAVS

SEQ ID NO: 2795 - protein, 416 aa, unidentified
MAIEVTRTYVGSIQNHQQVSDGLDSLGDSASKIWNVARWTADRIWEVTGEIPDDGTLKAYMKNQPCWKDLNAQSSQKVIEELSDAFQSWFDLRHKDDEANPPGYRKHGDTRPRSTVTFKADGFKHDPENNRVRLSKGSNLKENWSDFILCEYQTRPDVDLTEVNSVQNVRAVWNGDEWELHFVCKVELETNDSSGDGVAGIDLGIKNIATVAYPDEYVLYPGNSLKQDKHYFKRAEYDTEGENGPSEKSRWARRKLADRETHFYHVLTDTIITECVERGVGTLAVSWPEDVRESDWGKTGNKKLHSWAFDRIYQYLEYKGEIRGVEVLKENEWETSKTCSRCGDDTKSNRVERGLYVCSSCELVGNADCNGAENMRQKITPSPHGEDRSNGCVAQPSVHLFDRESGTFKTREQAVS

SEQ ID NO: 2796 - protein, 390 aa, unidentified
MLKHKAYKFRIYPTKAQEILIAKTIGCSRFIFNHFLAKWDDMYKTTGKGLSYGSCSKEIPLLKQEFDWLKEVDSTSVQISIKHLADAFDRFFKKQNERPRFKSKRNPVQSYKTNIQGKSQLPEVSIVCNQLKLPKLKWVRFAHSKQVEGRILNATIRRNASGKYFVSLLVEQEINELPKTGSSVGVDVGLKNFAILSDGTVYKNDRYFRTLEKKLVREQRKLSRRQRIARNKKVTLSEARNYQKQKRKVARIHEKIVNKRTDFLHKVSTEIVQNHDVIGIETLQVKNMQKNRKLSKAISDVSWSEFFRMLEYKAEWYGKTVMKVGKTFASSQLCSSCGHQHKDVKHLGLREWTCPSCGIHHDRDVNAGLNLKREAERILASSTVGTTGLA

SEQ ID NO: 2797 - protein, 390 aa, unidentified
MLKHKAYKFRIYPTKEQEILIAKTIGCSRFVFNHFLAKWDERYKTTGKGLSYGSCSKELPLLKQEFDWLKEVDSTSVQISVKHLADAFDRFFNKQNKRPRFKSKRNPVQSYKTNIQGKNQLPAVSIVGNKLKLPKLKWVRFAHSKQITGRILNATIRRNASGKYFVSLLVEQEINELPKTGSSVGVDVGLKNFATLSDGTIYKNDRYFRSLEKKLAREQRKLSRRQRIALNRKVKLSESKNYQKQKRKVARIHEKIANKRTDFLHKVSIEIVQNHDVISIETLQVKNMQKNRKWSKSISDVSWSEFFRMLEYKAGWYGKTVVKVGKTFASSQLCSSCGHQHKDVKHLGLREWTCPSCGIHHDRDVNAGLNLKQEAERLLASSTVGTTGLA

SEQ ID NO: 2798 - protein, 390 aa, unidentified
MLKHKAYKFRIYPTKEQEILIAKTIGCSRFIFNHFLAKWEETYKTTGKGLSYGSCSKEIPSLKQKFDWLKEVDSTSVQISVKHLADAFDRFFKKQNERPRFKSKRHPVQSYKTNIQGENQLPEVSIVCKKIKLPKLKWVRFAHSKQVTGRILNATIRRNASGKYFVSLLVEQEIHELPKTGSSVGVDVGLKNFAILSDGTVYQNDRYFRSLEKKLVREQRKLSRRQRIALAKKVKLSESKNYQKQKRKVARIHEKIANKRTDFLHKVSTEIVQNHDVIGIENLQVKNMQKNRKLSKAISDVSWSEFFRMLEYKAGWYGKTVVKVGKTFASSQLCSSCGHQHKDVKHLGLREWTCPSCGIHHDRDVNAGLNLKREAERILASSTVGTTGLA

SEQ ID NO: 2799 - protein, 391 aa, unidentified
MVLKHKAYKFRIYPTKEQKILIAKTIGCSRFVFNHFLAKWEETYKTTGKGLSYGSCSKEIPLLKQEFDWLKEVDSTSVQTSVKHLADAFDRFFKKQNEHPRFKSKRHPVQSYKTNIQGKSQLPEVSIGCNQLKLPKLKWVRFAHSKQVEGRILNATIRRNASGKYFVSLLVEQEIKELPKTGSSVGVDVGLKNFAILSDGTVYQNDRYFRSLEKKLAREQRKLSRRQRIALNKKVKLSEARNYQKQKLKVARIHEKIANKRTDFLHKISTEIVKNHDVIGIETLQVKNMQKNRKLSKAISDVSWSAFFRMLEYKAEWYGKTIVKVGKTFASSQLCSSCGHQHKDVKHLGLREWTCPNCGIHHDRDVNAGLNLKREAERILASSTVGTTGLA

SEQ ID NO: 2800 - protein, 393 aa, unidentified
MAMLKATKIRIYPTTEQAVFLNRQFGAVRFVYNTGLRIMSHRYQRHGQSLSAKHDIKKLLPVAKTSRKYGWLKEADSIALQQACMNLDHAFQRFFDPKQKSGYPRFKSKRGKQTSYHCVGVKAGDDWIKVPKLGPIKARMHRKVEGRLKSITLTRTVTGKHYASLLFDTEQAAPALLKDVDTTKVVGLDMGLSHLAIDSTGRKIANPRFLKQAQKNLKRKQQALSRTKKGSANRAEARLLVAKAHERVANARHDFQHKLSRQIVDDNQAVIVETLKVGNMMKNRRLAKHIGDASWYALITKLDYKAKEQGKHLVKIDPWFASSKTCHVCQHKRDAMPLNVRSWECPACHTQHDRDINAALNIKQQGIIQLKAEGLSVSAHGGLRKSGTSPAAA

SEQ ID NO: 2801 - protein, 391 aa, unidentified
MVLKHKSYKFRIYPTKEQEILIAKTIGCSRFVFNHFLAKWDETYKTTGKGLSYGSCSKEIPLLKQEFDWLKEVDSTSVQISVKHLADAFDRFFKKQNERPRFKSKRHPVQSYKTNIQGKNQLPEVSIGCNKLKLPKLKWVRFAHSKQVTGRILNATIRRNASGKYFVSLLVEQEINELPKTGSSVGVDVGLKNFAILSDGTVYKNDRYFRTLEKKLAREQRKLSRRQRIALNKKVTLSEARNYQKQKRKVARIHEKIANKRTDFLHKVSTEIVKNHDVIGIETLQVKNMQRNRKLSKAISDVSWSEFFRMLEYKADWYGKTVVKVGKTFASSQLCSSCGHQHKDVKHLGLREWTCPSCGIHHDRDVNAGLNLKQEAERILASSTVGTTGLA

SEQ ID NO: 2802 - protein, 391 aa, unidentified
MVLKHKAYKFRIYPTKEQEILIAKTIGCSRFIFNHFLAKWDELYKTTGKGLSYGSCSKEIPLLNQEFDWLKEVDSTSVQISVKHLADAFDRFFKKQNERPRFKSKRNPVQSYKTNIQGKNQLPEVSIGCNKLKLPKLKWVRFAHSKHITGRILNATIRRNASGKYFVSLLVEQEINELPKTGSSVGVDVGLKNFAILSDGTVYKNDRYFRSLEKKLAREQRKFSRRQRIALNKKITLSEARNYQKQKRKVARIHEKIANKRTDFLHKVSTEIVQNHDVIGIETLQVKNMQRNCKLSKAISDVSWSEFFRMLEYKADWYGKTVVKVGKTFASSQLCSSCGHQHKDVKHLGLREWTCPSCGIHHDRDVNAGLNLKQEAERILASSTVGTTGLA

SEQ ID NO: 2803 - protein, 391 aa, unidentified
MVLKHKAYKFRIYPTKEQEILIAKTIGCSRFIFNHFLAKWDETYKTTGKGLSYGSCSKEIPLLKQEFDWLKEVDSTSVQISVKHLADAFDRFFKKQNERPRFKSKRNPVQSYKTNIQGKNQLPEVSIECNQLKLPKLKWVRFAHSKQVTGRILNATIRRNASGKYFVSLLVEQEINEPPKTGSSVGVDVGLKHFAILSDGTMYKNDRYFRTLEKKLAREQRKLSRRQRIALNKKVKLSESKNYQKQKRKVARIHEKIANKRTDFLHKVSTEIVQNHDVIGIETLQVKNMQRNRKLSKAISDVSWSEFFRMLEYKADWYGKTVVKVGKTFASSQLCSSCGHQHKDVKHLGLREWTCPSCGIHHDRDVNAGLNLKQEAERILASSTVGTTGLA

SEQ ID NO: 2804 - protein, 391 aa, unidentified
MVLKHKAYKFRIYPTKEQEILIAKTIGCSRFIFNHFLAKWNELYKTTGKGLSYGSCSKEIPLLKQEFDWLKEVDSTSVQISVKHLADAFDRFFKKQNEHPRFKSKRNPVQSYKTNIQGKNQLPEVSIGCNKLKLPKLKWVRFAHSKQVTGRILNATIRRNASGKYFVSLLVEQEINERPKTGSSVGVDVGLKNFAILSDGTVYQNDRYFRSLEKKLAREQRKLSRRQRMALDKKVKLSEARNYQKQKRKVARIHEKIANKRTDFLHKVSTEIVKSHDVIGIETLQVKNMQKNRKLSKAISDVSWSEFFRMLEYKAEWYGKTIVKVGKTFASSQLCSSCGHQHKDVKHLGLREWTCPSCGIHHDRDVNAGLNLKQEAERILASSTVGTTGLA

SEQ ID NO: 2805 - protein, 391 aa, unidentified
MVLKHKAYKFRIYPTKEQEILIAKTIGCSRFIFNHFLAKWDEMYKTTGKGLSYGSCSKEIPLLKQEFDWLKEVDSTSVQISVKHLADAFDRFFKKQNERPRFKSKRHPVQSYTTNIQGKNQLPEVSIGCNKLKLPKLKWVRFAHSKHITGRILNATIRHNASGKYFVSLLVEQEIHELPKAGSSVGVDVGLKNFAILSDGTMYKNDRYFRSLEKKLAREQRKLSRRQRMALDKKVKLSEARNYQKQKRKVARIHEKIANKRTDFLHKVSTEIVQNHDVIGIETLQVKNMQKNRKLSKAISDVSWSEFFRMLEYKADWYGKTIVKVGKIFASSQLCSSCGHQHKDVKHLGLREWTCPSCGIHHDRDVNAGLNLKREAERILASSTVGTTGLA

SEQ ID NO: 2806 - protein, 391 aa, unidentified
MVLKHKAYKFRIYPTKEQEILIAKTIGCSRFIFNHFLAKWDEMYKTTGKGLSYGSCSKEIPLLKQEFDWLKEVDSTSVQISVKHLADAFDRFFKKQNERPRFKSKRNPVQSYKTNIQGKNQLPEVSIECNQLKLPKLKWVRFAHSKQVTGRILNATIRRNASGKYFVSLLVEQEINELPKTGSSVGVDVGLKNFAILSDGTVYKNDRYFRSLEKKLAREQRKLSRRQRMALNKKVKLSEARNYKKQKRKVARIHEKIANKRNDFLHKVSTEIVKNHDIIGIETLQMKNMQKNRKLSKAISDVSWSEFFRMLEYKAEWYGKTIVKVGKTFASSQLCSSCGHQHKDVKDLGLREWTCPSCGIHHDRDVNAGLNLKQEAERILASSTVGTTGLA

SEQ ID NO: 2807 - protein, 391 aa, unidentified
MVLKHKAYKFRIYPTKEQEILIAKTIGCSRFIFNHFLAKWNELYKTTGKGLSYGSCSKEIPLLKQEFDWLKEVDSTSVQISVKHLADAFDRFFKKQNEHPRFKSKRNPVQSYKTNIQGKNQLPEVSIGCNQLKLPKLKWVRFAHSKQVTGRILNATIRRNASGKYFVSLLVEQEINERPRTGSSVGVDVGLKNFAILSDGTVYQNDRYFRSLEKKLAREQRKLSRRQHIALNKKVKLSEAKNYQKQKRKVARIHEKIANKRTDFLHKVSTEIVQNHDVIGIETLQVKNMQKNRKLSKSISDVSWSEFFRMLEYKAEWYGKTVVKVGKTFASSQLCSSCGHQHKDVKHLGLREWTCPSCGIHHDRDVNAGLNLKQEAERILASSTVGTTGLA

SEQ ID NO: 2808 - protein, 391 aa, unidentified
MVLKHKAYKFRIYPTKEQEILIAKTIGCSRFVFNHFLAKWEKMYKTTGKGLSYGSCSKEIPLLKQEFDWLKEVDSTSVQISVKHLADAFDRFFKKQNKRPRFKSKRHPVQSYKTNIQGKNQLPEVSIGCNKLKLPKLKWVRFAHSKQVTGRILNATIRGNASGKHFVSLLVEQEINELPKTGSSVGVDVGLKNFAILSDGTIYKNDRYFRKLEKKLAREQRKLSRRQRIALNKKVTLSEARNYQKQKRKVARIHEKIANKRTDFLHKVSNEIVKNHDVIGIETLQVKNMQKNRKLSKAISDVSWSAFFHMLEYKAEWYGKTVVKVGKTFASSQLCSSCGHQHKDVKHLGLREWTCPNCGIHHDRDVNAGLNLKREAERILASSTVGTTGLA

SEQ ID NO: 2809 - protein, 389 aa, unidentified
MVLKHKSYKFRIYPTKEQETLIAKTIGCSRFIFNHFLAKWEETYKTTGKGLSYGSCSKEIPSLKQKFDWLKEVDSTSVQISVKHLADAFDRFFKKQNERPRFKSKRHPVQSYKTNIQGENQLPEVSIVCKKIKLPKLKWVRFAHSKQVTGRILNATIRRNASGKYFVSLLVEQEIHELPKTGSSVGVDVGLKNFAILSDGTVYQNDRYFRSLEKKLVREQRKLSRRQRIALAKKVKLSESKNYQKQKVARIHEKIANKRTDFLHKVSTEIVQNHDVIGIENLQVKNMQKNRKLSKAISDVSWSEFFRMLEYKAGWYGKTVVKVGKTFASSQLCSSCGHQHKDVKHLGLREWTCPSCGIHHDRDVNAGLNLKREAERILASSTVGTTGLA

SEQ ID NO: 2810 - protein, 391 aa, unidentified
MVLKHKAYKFRIYPTKEQEILIAKTIGCSRFVFNHFLAKWEKLYKTTGKGLSYGSCSKELPLLKQEFDWLKEVDSTSVQISVKHLADAFDRFFKKQNERPRFKSKRNPVQSFKTNIQGENQLPEVSIVGNKLKLPKLKWVRFAHSKQITGRILNATIRRNASGKYFVSLLVEQEIHELPKTGSSVGVDVGIKNFAILSDGTVYQNDRYFRSLEKKLAREQRKLSRRQRIALTKKVKLSEARNYQKQKRKVARIHEKIVNKRTDFLHKVSTEIVKNHDVIGIETLQVKIMQKNRKLSKAISDVSWSEFFRMLEYKADWYGKTVVKVGKTFASSQLCSSCGHQHKDVKHLGLREWTCPSCGIHHDRDVNAGLNLKREAERILASSTVGTTGLA

SEQ ID NO: 2811 - protein, 391 aa, unidentified
MVLKHKAYTFRIYPTKEQEILIAKTIGCSRFVFNHFLAKWNETYKATGKGLSYGSCSKELPSLKQAFDWLKEVDSTSVQTSVKHLADACDRFFKKQNKRPRFKSKSNPVQSYKTNIQGKSQLPEVSIVGNKLKLPKLKWVRFANSRQVVGRILNATIRRNASGKYFVSLLVEQESNEMPKTGSSVGVDVGLKHFAILSDGTVYKNDRYFRSLEKKLAREQRKLSRRQRLALDKKVKLSEAKNYQKQKRKVARIHEKIANKRTDFLHKVSTEIVKNHDVIGIETLQVKNMQKNRKLSKSISDVSWSEFFRMLGYKAEWYGKTVVKVGKTFASSQLCSSCGHQHKDVKHLGLREWTCPSCGILHDRDVNAGLNLKQEAERLLASSTVGTTGLA

SEQ ID NO: 2812 - protein, 391 aa, unidentified
MVLKHKAYKFRIYPTKEQEILIAKTIGCSRFIFNHFLAKWDETYKATGKGLSYGSCSKEIPILKQEFDWLKEVDSTSVQTSVKHLADAYDRFFKKQNERPRFKSKRNPVQSYKTNIQGKSQLPEVSIIGNKLKVPKLKWVRFANSKQVTGRILNATIRRTASRKYFVSLLVEQEINELPKTGSSVGVDVGLKNFAILSDGTAYKNDRYFRSLEKKLAREQRKLSRRQRIALNKKVTLSEARNYQKQKRKVARIHEKIANKRTNFLHKVSTEIVKNHDVIGIETLQVKNMQRNRKLSKAISDVSWSEFFRMLEYKAEWYGKTVVKVGKTFASSQLCSSCGHQHKDVKHLNLREWTCPSCGIHHDRDVNAGLNLKQEAERILASSTVGTTGLA

SEQ ID NO: 2813 - protein, 391 aa, unidentified
MVLKHKAYKFRIYPTKEQEILIAKTIGCSRFVFNHFLAKWEKMYKTTGKGLSYGSCSKEIPLLKQEFDWLKEVDSTSVQISVKHLADAFDRFFKKQNKRPRFKSKRHPVQSYKTNIQGKNQLPEVSIGCNKLKLPKLKWVRFAHSKQVTGRILNATIRGNASGKHFVSLLVEQEINELPKTGSSVGVDVGLKNFAILSDGTIYKNDRYFRKLEKKLAREQRKLSRRQRIALNKKVTLSEARNYQKQKRKVARIHEKIANKRTDFLHKVSNEIVKNHDVIGIETLQVKNMQKNRKLSKAISDVSWSAFFRMLEYKAEWYGKTVVKVGKTFASSQLCSSCGHQHKDVKHLGLREWTCPNCGIHHDRDVNAGLNLKREAERILASSTVGTTGLA

SEQ ID NO: 2814 - protein, 391 aa, unidentified
MVLKHKSYKFRIYPTKEQEILIVKTIGCSRFVFNHFLAKWEELYKTTGKGLSYGSCSKELPLLKQEFDWLKEVDSTSVQISVKHLADAFDRFFNKQNERPRFKSKRNPVQSYKTNIQGKNQLPEVSIVGNTLKLPKLKWVRFAHSKQITGRILNATIRRNASGKYFVSLLVEQEIHELPKTGSSVGVDVGLKNFAILSDGTIYQNDRYFRTLEKKLAREQRKLSRRQRIALNKKVKLSESRNYQKQKRKVARIHEKIVNKRTDFLHKVSTEIVQNHDVIGIETLQVKNMQKNRKLSKAISDVSWSEFFRMLEYKAGWYGKTVVKVGKTFASSQLCSSCDHQHKDVKHLSLREWTCPNCGIHHDRDVNAGLNLKREAERILASSTVGTTGLA

SEQ ID NO: 2815 - protein, 391 aa, unidentified
MVLKHKAYKFRIYPTKEQEILIAKTIGCSRFVFNHFLAKWEELYKTTGKGLSYGSCSKELPLLKQEFDWLKEVDSTSVQISVKHLADAFDRFFNKQNERPRFKSKRNPVQSFKTNIQGKNQLPEVSIVGNKIKLPKLKWVRFAHSKQVTGRILNATIRRNASGKYFVSLLVEQEIHELPKTGSSVGVDVGLKNFAILSDGTMYQNDRYFRSLEKKLAREQRKLSRRQRIALNKKVKLSEARNYQKQKRKVARIHEKIANKRTDFLHNVSTEIVQNHDVIGIETLQVKNMQKNRKLSKAISDVSWSEFFRMLEYKADWYGKIVVKVGKTFASSQLCSSCGHQHKDVKHLGLREWTCPNCGIHHDRDVNAGLNLKREAERIFASSTVGTTGLA

SEQ ID NO: 2816 - protein, 373 aa, unidentified
MIVNKAYKFCLYPNKEQQILINKTFGCSRFVFNHFLAKWDNAYKETGKGLTYNSCSAQLTQLKKELTWLKEVDSIAIQSSLKNLADAYSRFFKKQNDRPRFKSKKNKVQSYTTKYTNGNIAINDNKIKLPKLGWIRFAKSREVEGRILNVTIRRNPSGKYFVSILVETEVQELSKTNSAIGIDVGLKDFAILSNGTTYANPKFFRKLEEKLAKAQRILSRRTKGSSNWNKQRIKVARIHEKITNARNDYLHKISTEIIKNHDIIGIEDLQVSNMLRNHNLAKAISEVSWSQFRTMLEYKAKWYGKQVVTVAKNFPSSQLCSCCGYQNKDVKNPGLREWECPKCHTHHDRDINASLNLKNEAIRLLTVGTTGIA

SEQ ID NO: 2817 - protein, 390 aa, unidentified
MILKAFKFRLYPNPTQQQLIRQTFGSARFVFNFFLAQQERQVDQYWAIINEMVQNGQLTENKWGKHYFKANQTKKEIVLLKKHYPWLKEVDSISLQAAVEALDDSYSRFYSKQNERPRFKSKRNTVQSYTTKCVNQNIQLDGNRIKLPKLGWVRLAKSREVTGPIRKVTVRMNASGRFFISILTKIEVKALSPTSKEVGIDVGLKKFATLSNGDVVENPRFLRKWEKKLQDAQRILSRRTIGSANWRKQKQKVARIHEKITNTRTDFLHKLTTNLIKNHDVLAIEDLQIQSLLKNHQNAKRISEVSWYEFRTMLEYKVAWYGRTVIAVGKTFASSQLCSACGTKNKEVKQLNLRKWTCVSCHTHHDRDFNASLNILAEGKRLLLFGSSAS

SEQ ID NO: 2818 - protein, 416 aa, unidentified
MAIKATRTYVGSIQNHQQVCDGLDSLGDSASKIWNVARWTADRIWDATGEIPNGSVLKSYMKNQSCWKDLNAQSSQKVIEELSDAFQSWFDLRHNSKEANPPGYRKHGDNRPKSTVTFKEDGFKHDPENNRVRLSKGSNLKEHFSDFLLCEYQTRPDVDLSEVNSVQNVRTVWNGDEWEIHFVCNVELESADTADDGVAGIDLGITNISTVAFPDEYVLYPGNSLKEDKHYFTRAEYDTEGENGPSEKSMWARRKLSELETHFYHTLTDAIITECVERGVGTLAVSWPEDVRASDWGKTGNKKLHSWAFDRIYQYLEYKGEMRGVEVLKENEWNTSKTCSRCGDDTKSNRVERGLYVCSSCELVANADCNGAENMRQKITPSPHGEDRSNGCVAQPSTYLFDRESGTFHTREQVVS

SEQ ID NO: 2819 - protein, 364 aa, unidentified
MHKAFKFRLYPTKEQIVLINKTIGCTRYVYNHFLDARIKLFEAERKTLNFNSCCLELTQLKKQIEWLQEVDSMALQQTLKDLDKAYQKFFREKKGFPNFKSKKNPKQSYRTNANKSSIEVSDSKIKLTKLGWVSFAKSREVDGKIISATIRRNPSGTYFISILCEVEIQPLPRVDQAVGIDLGIKEFAITSDGEHYRNPKHYRKHERKLKRLQRKLSKKQKGSHNRDKARIKVAKAHETIRNCRQDFLHKLTTKLIRENQTICLEDLQVKNMIQNHNLAKSIADVSWSEFRSMLDYKARWYGRKLSIIGKTFPSSQQCFACGYRNKDVKNLNLREWICPICGMYHDRDENAAKNILREGLRLAG

SEQ ID NO: 2820 - protein, 384 aa, unidentified
MLKATKVRLYPTTEQAEFLNRQFGAVRFVYNTGLRIISHRHKRHGQSLSAKHDIKKLLPVAKKSRKYGWLKEADSVALQQACLNLDHAFQRFFDPAQKAGYPRFKSKRGKQSSYHCVGVKAGDDWIKVPKLGPIKARMHRQVEGRLKSITLTRTVTGKHYASLLYETEQAAPAPLKAVDAAKVLGLDMGLSHLAIDSTGRKIANPRFLKQAQQNLKRKQQALSRTKKGSANRAKARLLVAKAHERLANARHDFQHKFSRQIVDDNQAVIVETLKARNMMKNARLAKHIGDASWHALVTKLDYKAKEQGKHLVKIDPWFASSKTCHVCQHKMDAMPLNIRSWECPACHTQHDRDINAALNIKHQGIIELKAEGLSVSAHDYRLQK

SEQ ID NO: 2821 - protein, 416 aa, unidentified
MAIQVTRTYVGSIQNQRQVFDGLDSLGDSASKIWNVARWTADRIWDATGEIPDEASLKSYMKNQSCWKDLNAQSSQKVIEELSDAFQSWFDLRHKYDEANPPGYRKQGDKRPHSTVTFKEDGFKHDPENNRVRLSKGSNLKEYWSDFLLCEYQTRPDVDLSEVNSVQNVRAVWNGDEWELHFVCKVELETNDSVGDEVAGIDLGIKNIATVAFPDEYVLYPGNLLKQDKHYFKRAEYDTEGDNGPSEKSMWARGKLSDRETHFYHTLTDTIITECVERGVGTLAVSWPEDVRESDWGKTGNKKLHTWAFDRVYQYLEYKGKIRGVEVLKENEWDTSKTCSVCGDDTKSNRKHRGLYVCQSCGLVGNADCNGAENMRQKMTPSPHGEDRSNGCVAQPSTYLFNRESGTFQTREQVVS

SEQ ID NO: 2822 - protein, 374 aa, unidentified
MIINKAYKFRIYPNKEQEILIAKTIGCSRFVFNRFLARWNDTYQETGKGLTYNSCSAELTQIKKEFVWLKEVDSISLQSTLKNLADAFTRFFKKQTDAPRFKSKKNKVQSYTTKHTNGNIAIAGNKIKLPKLGFVRFAKSREVEGRILNATVRRNPSGKYFVSILVETEVQPLEKTGSSVGVDVGLKDFAILSTGEVFSNPKWFRKLEEKLAKAQRILSNRVNGSSNWNKQRIKVARIHERITSARTDYLQKISTEIVKNHDIIGIEDLQVSNMLKNHKLAKAISEVSWSQFRTMLEYKAKWYGKEVVTVSKTFASSQLCSCCGYKNKDVKNLNLREWECPSCGIHHNKDINAGQNLKNEAIRLLTVGTTGLAY

SEQ ID NO: 2823 - protein, 391 aa, unidentified
MLKATKIRLYPTTEQAAFLNRQFGAVRFCYNTGLRIMSHRYQRHGQSLSAKHDIKKLLPVAKTSRKYGWLKEADSMALQQACLNLDHAFQRFFDPKQKGGYPRFKSKRGKQSSYHCVGVKAGDDWIKVPKLGPIRARVHRKVEGRLKSITLTRTVTGKHYASLLFDTEQAAPAPLKDVDAAKVVGLDMGLSHLAIDSTGRKIANPRFLKRAQQNLKRKQQALSRTKKGSANHAKARLLVAKAHERIANARHDFQHKLSRQIVDDNQAVIVETLKVGNMMKSACLAKHIGDASWYALITKLDYKAREQGKHLVKIAPWFASSKTCHICHHKRDAMPLNVRSWECPACHTQHDRDINAALNLKQQGIIQLKAEGLSVSAHGGLRRSGTSPAAA

SEQ ID NO: 2824 - protein, 416 aa, unidentified
MAIQATRTYVGSIQNHRQVCDGLDSLGDSASKIWNVARWTADRVWDEIGKIPDEGSLKSYMKNQSCWKDLNAQSSQKVIEELSEAFQSWFDLRHKFDEANPPGYRKHGDTRPKSTVTFKADGFKHDPENNRVRLSKGSNLKKHWSDFILCEYQTRPDVDLSEVNSVQNVRAVWNGDEWELHFVCKVELDTNDSAGDGVAGIDLGIKNIATVAFPDEYVLYPGNSLKEDKHYFNRAEYDTEGKNGPSEKSMWARQKLADRETHFYHTLTDAIITECVERGVGTLAVSWPEDVRESNWGKTGNKKLHSWAFDRIYQYLDYKGEIRGVEVLKENEWNTSKTCSRCGDDTKSNRVERGLYVCSSCELVGNADCNGAENMRQKITPSPHGEDRSNGCVAQPSVHLFNRESGTFTTRERVVS

SEQ ID NO: 2825 - protein, 418 aa, unidentified
MMKRVEHHRLKPSSPFYAMLREFCHRSKNLYNHGNFLIRQTFIDDGKWLRYGEVDRLLKADTEYPDYREMPTAQTAQQTLRILDKNWTSFFAAIKDWKAHPEKYKGRPKLPKYKPKDGYFPLVLTNQNCKLKDGVIRFPRVFQGFTVKAIFSSQPDAVFKQARIIPHGGEIDLELVYEIPEVEEKENNGRYAAIDIGVDNLAALAWNTGERPVLLKGTPLKSVNQYYNKQMAKRRSICERMNGRHSSKRIARLTVKRNRKVEDYLHKASRKVIDLCAGQDVSVLVIGKNKGWKQEANLGRKVNQSFVQLPFARFIQMLQYKAESIGMKVVLTEESYTSGTSFLDGEAPIKACYDKSRRVHRGLFLANDGQRINADVNGAYQIMRKVFPNVNADGIEGVALRPAVVTLSMSTRRSSGCA

SEQ ID NO: 2826 - protein, 418 aa, unidentified
MMKRVEHHRLKPSSSFYAMLREFCHRSKNLYNHGNFLIRQTFIDDGKWLRYGEVDRLLKADTEYPDYREMPTAQTAQQTLRILDKNWTSFFAAIKDWKAHPEKYKGRPKLPKYKPKDGYFPLVLTNQNCKLKDGVIRFPRVFQGFTVKAIFASQPEAIFKQARIIPHGGEIDLELVYEIPEVEEKENNGRYAAIDIGVDNLAALAWNIGERPVLLKGTPLKSVNQYYNKQMAKRRSICELMNGRHSSKRIARLTAKRNRKVEDYLHKASRKVIDLCAGQDVSVLVIGKNKGWKQEVNLGRKVNQSFVQLPFARFIQMLQYKAESIGMKVVLTEESYTSGTSFLDDEAPVKACYDKSHRVHRGLFLANDGQRINADVNGAYQIMRKVFPNVNADGIEGVALRPAVVTLSMSTRRGSGCA

SEQ ID NO: 2827 - protein, 416 aa, unidentified
MAIQVTRTYVGSIQNHRQVYDGLDSLGNSASKIWNVARWTADRIWDETGEIPDESVLKSYMKNQSCWKDLNAQSSQKVIEELSDAFQSWFDLRHNDDEAHPPGYRKHGDDRPRSTVTFKADGFKHDPENNRVRLSKGKNLKEYWSDFLLCEYQTRPDVDLSEVNKVQNVRAVWNGDEWELHFVCKVELETNDSAGDEVAGIDLGIKNIATVAFPHEYVLYPGNSLKQDKHYFKRTEYDTEGENGPSEKSMWARRKLADRETHFYHVLTDAIITECVERGVGTLAVSWPEDVRDSDWGKTGNKKLHSWAFDRIYQYLEYKGEVRGVEVLKENEWNTSKTCSRCGDDTKSNRKHRGLYVCSSCGLVGNADCNGAENMRQKITPSPHGEDRSNGCVAQPSTHLFDLESGVFAPREQVVS

SEQ ID NO: 2828 - protein, 399 aa, unidentified
MTYVILFTTVYPKSESEVRVVLVHKAYKFRIYPTKEQEILIVKTFGCARFVFNHFLAEWERAYRTTGKGLTYKVCSSQLTNLKKQFVWLKEVDSIALQTSLKHLSDAYTRFFQKQNNKPRFKSKKNKVQSYTTKYTNGNIAVVGNRIKLPKLGLVRFAKSREVEGRILSATIRRNASGKYFVSILAEVDVQPLPKTNRAIGIDLGVKHFAILSDGTTYANPKFLRKLEEKLAKAQRILSRRQIGSSNWHKQRIKVARLHEKMTNFRNDYLHKLSTEIVKNHDIIGIEDLQVSNMMKNHNLAKAIAEVSWSTFTDMLMYKAIWYGKQVVVVAKNFPSSQLCSHCGYKNKDVKHLHLREWKCPSCGTHHDRDVNASMNLKNEAIRLLTAGTAGLACSFSLR

SEQ ID NO: 2829 - protein, 416 aa, unidentified
MAIQVTRTFVGSIQNHRQVCDGLDSLGDSASKIWNVARWTAQRVWDAIGTIPNEGSLKSYMKNRSCWKDLNAQSSQKVIEELSDAFQSWFDLRQKDDKANPPGYRKHGDERPRSTVTFKEDGFKHDSENNRVRLSKGSNLKKHFSDFLLCEYQTRPDVDLSEANSVQNVRAVWNGDEWELHFVCKVELETNDPAGDEVAGIDLGITNIATVAFPDEYVLYPGNSLKQDKHYFKRAEYDTEGENGPSEKSMWARQKLTDRETHFYHALSDAIITECVERGVGTLAVSWPETVRESDWGKTGNKKLHTWAFDRIFQYLEYKGEIRGVEVLKENEWDTSKTCSACGDDTKANRVERGLYVCQSCGLVGNADCNGAENMRQKITPNPHGEDRSNGCVAQPSTHLFDRESGTFHTREQVAS

SEQ ID NO: 2830 - protein, 361 aa, unidentified
MHRAYKFRLYPNREQATLINKTIGCTRFVFNHFLSKRKDAYEQEQKTLNYNDCSALLTQLKKEIEWLKEVDSTALQSTLKDLDSSYKKFYKEKKGYPKFKSKKNPKQSYTCKMNIKVEGDRIKLPKLGWVIFAKSREVEGRILSATVRKNPSGTYFVSVLCETEIQPLLQAEKTVGVDLGIKDFAILSTGEKIANPKVLRYYEKKLATWQQKLSRRKKGGQNREKSRKQVARLHERISNTRNDFLHKLSTQLIRENQTICLEDLRVENMIKNHKFAKSIADASWSAFRTMLEYKAAWYGRTISIVGKQFPSSQLCSGCGYQNKEVKNLNLRNWTCPNCGVQHDRDKNAAINIEQEGLRLLA

SEQ ID NO: 2831 - protein, 361 aa, unidentified
MHRAYKFRLYPNKEQATLINKTIGCTRFVFNHFLAKRKDAYEQEKKTLNYNDCSALLTQLKKEIEWLKEVDSTALQSTLKDLDSSYKKFFKEKKGYPKFKSKKNPKQSYTCKMNIKVEGDRIKLPKLGWVTFAKSREVEGRILSATVRKNPSGTYFVSVLCETEIQPLLQAEKTVGVDLGIKDFAILSTGEKIANPKVLRYYEKKLATWQQKLSRRKKGGQNREKSRKQVARLHERISNTRNDFLHKLSTQLIRENQTICLEDLRVENMIKNHKLAKSIADASWSAFRTMLEYKAAWYGRTISIVGKQFPSSQLCSGCGYQNKEVKNLNLRNWTCPNCGVQHDRDKNAAINIEQEGLRLLA

SEQ ID NO: 2832 - protein, 361 aa, unidentified
MHRAYKFRLYPNREQATLINKTIGCTRFVFNHFLAKRKDAYEQEQKTLNYNDCSALLTQLKKEIEWLKEVDSTALQSTLKDLDSSYKKFFKEKKGYPKFKSKKNPKQSYTCKMNIKVEGDRIKLPKLGWVTFAKSREVEGRILSATVRKNPSGTYFVSVLCETEIQPLLQAEKTVGVDLGIKDFAILSTGEKIANPKVLRYYEKKLATWQQKLSRRKKGGQNREKSRKQVARLHERISNTRNDFLHKLSTQLIRENKMICLEDLRVENMIKNHKLAKSIADASWSAFRTMLEYKAAWYGRTISIVGKQFPSSQLCSGCGYQNKEVKNLNLRNWTCPNCGVQHDRDKNAAINIEQEGLRLLA

SEQ ID NO: 2833 - protein, 361 aa, unidentified
MHRAYKFRLYPNKEQATLINKTIGCTRFVFNHFLAKRKDAYEQEKKTLNYNDCSAMLTQLKKEMEWLKEVDSTALQSTLKDLDSSYKKFFKEKKGYPKFKSKKNPKQSYACKMNIKVEGDRIKLPKLGWVTFAKSREVEGRILSATVRKNPSGKYFVSVLCETEIQPLLQTEKTVGVDLGIKDFAILSTGEKIANPKALRYYEKKLATWQQKLSRRKKGGQNREKSRKQVARLHERISNTRNDFLHKLSTQLIRENQTICLEDLRVENMIKNHKLAKSIADASWSAFRTMLEYKAAWYGRTISVVGKQFPSSQLCSGCGYQNKEVKNLNLRNWTCPNCGVQHDRDKNAAINIEQEGLRLLA

SEQ ID NO: 2834 - protein, 389 aa, unidentified
MLKTTKVRIYPTPEQAEFLNRQFGATRFVYNKALHVISSQYKRHGLKLKAKKDLKPLLAVAKKSRKYHWLKDFDSVALQQACINLDKAFQNFFDPKLPARYPKFKRKHGKQSSYHCMNVSAGANWIKVPKMNPIKARVHRELDGKLKSITLSRTVTGKYYASLLLDDGLKTPTLMHTVDTVLGVDMGLTHLAIDSEGNKTANPRFLKRAQSNLRRKQKALSRCQKGSTGRTKARLKLAKAYERLANVRADFQHNLSRQLIDENQAVVVETLKVKNMLKNRKLSKHIADASWFGLIQKLEYKAKAQGKHLVKVDQWFASSKTCSNCGHKVDALPLSVRNWTCPACTARLDRDINAAINIRQQGIIKLRAEGLSVPANGGLRKSGHAPVAA

SEQ ID NO: 2835 - protein, 319 aa, unidentified
PRYADKDGYKPLIFTNQICKLRKDKHGWYVKFPKAVLQAGCVRDRYDLGKMDLHEQKLKEVRLIPNGDTIKLEIVCEIEIKEPTITIHEATRVAGIDIGVDNLTAIAFTSGHHPVLIKGNEIKAVNQFYNKQIAHYRSLLRTGKKDSKGIHQTKRMKRISEKRNRRVKDILHKASRKIIDLCVEEGIEVIVVGNHAGWKKRIHMGKKNNQTFVQIPFHTLIEMIKYKGEAAGIRVVVCEEAIQSKASSIDEDQIPVYGNDVTHTFTGKRIKRGLYRSKNGILMNADINGASNIIRKVYSCMPKRERWSRGTVNVPVTCI

SEQ ID NO: 2836 - protein, 418 aa, unidentified
MMKRVEHHRLKSSSPFYAMLREFCHRSKNLYNHGNYLIRQTFIEDGKWLRYGEVDRLLKADKDYPDYREMPTAQTAQQTLRLLDKNWTSFFAAIKDWKAHPEKYKGRPKLPKYKPKDGYFPLVLTNQNCKLKDGVIRFPRTFQGFTVKAIFACQPEAVFKQARFIPHGGEIDLELVYEFPEVEEKADNGKYAAIDIGVDNLAALAWNTGERPVLLKGTPLKSFNQYYNKQMAKRRSICELMNGCHSSKRIARLTAKRNHKVEDYLHKASRKVIDLSAEQDVSVLVIGKNKGWKQEAKLGRRVNQSFVQLPFVRFIQMLQYKAEAIGMKVVLTEESYTSGTSFLDGEAPAKDRYDKSRRVHRGLFQANDGRKINADVNGAYQIMRKVFPNVNANGIEGVALRPAVVALSMSARRSFDCA

SEQ ID NO: 2837 - protein, 372 aa, unidentified
MVVVEKAYKFRMYPNKKQQELINKTFGCCRFVYNKYLAKRIEVYKNDKETFTYKQCSSDLTNLKKELKWLKEPDKFSLQNALKDLDNAYEKFFKEKAGFPKFKSKKTNRFSYKTNFTNGNIMYCGQHIKLPKLGMVKIRDKQVPQGRILNATISKEPSGRYYVSLCCTDVDIEAFENTNNQIGLDLGIKEFCISSYGDFIENPKYLKKSLNKLAKLQRELSRKTIGSLNRNKARLKVARLQEHIANQRKDFLQKLSTKLIKENDIICIEDLQVKNMIRNRKLSRLISDVSWSEFIRQLKYKANWHGRQIVKVGKFFASSQICNKCGYKNEEVKDLNIREWICPSCNETHDRDINASMNILKEGLRLITIQNK

SEQ ID NO: 2838 - protein, 372 aa, unidentified
MVVVEKAYKFRMYPNKKQQELINKTFGCCRFVYNKYLAKRIEVYKNDKETFTYKQCSSDLTNLKKELKWLKEPDKFSLQNALKDLDNAYEKFFKEKAGFPKFKSKKTNRFSYKTNFTNGNIMYCGQHIKLPKLGMVKIRDKQVPQGRILNATISKEPSGRYYVSLCCTDVDIEAFENTNNQIGLDLGIKEFCISSYGDFIENPKYLKKSLNKLAKLQRELSRKTIGSLNRNKARLKVARLQEHIANQRKDFLQKLSTKLIKENDIICIEDLQVKNMIRNSKLSRLISDVSWSEFIRQLKYKANWHGRQIVKVGKFFASSQICNKCGYKNEEVKDLNIREWICPSCNETHDRDINASMNILKEGLRLITIQNK

SEQ ID NO: 2839 - protein, 509 aa, unidentified
MKVKRAVRIRISNKRRKRASELAHDLAQFRNLLLIFQSRYYTYFGQIILNESVIYSLLADKTTKKKPEQEEALREASEKIAQYPDLQELIQRMKGQKARVDNNYVLQTTIRQVIKDYKSFLASLVEYRINPGKFKERPQPPKPKKLGKLTQVTAEFNSNVFEVEGNTLFLRLRMNGKKRIKIKLPRDVEGVSSVRLVYHLSDVWVDVIYEKELKEPEAGLIHLAGIDMGMDNLISLVSTNPDVRSLIISGREIKSFNRWFNKKKAAVQSAMDILTDKIAREKDESRKKAMSKELFELKLYFHNLYNYRDRWIESHFHKVARVLADYLYETGHKAVYVGKGVTESKDGIDLGKVTNRNFVSIPFRKLINILKYKLEELGVKAEEKEEPYTSKASSLSDDILEIQRKYAETEEKQEEVKIKCSGKRVERGLYRDNVLNKVFNADLNGALNILKVGAKLRRLTPSLKVLLCKLCNPLRFNLYDFIYRFRSKAESPPGIGDSKLATAGLTRQI

SEQ ID NO: 2840 - protein, 430 aa, unidentified
MTHIFKLVYLDRLCMAIKATRTYVGSIQNHRQVCDGLDSLGDSASKIWNVARWTADRIWNATGEIPDEGVLKAYMKTRECWKDLNAQSSQKVIEELSDAFQSWFDLRHKDPKANPPDYRKHGNERPRSTVTFKADGFKHDPENNRVRLSKGSNLKENWSDFILCEYQTRPDVDLSEVNRVQNVRAVWNGDEWELHFVCKIEHETNDSAGDEVTGIDLGITNIATVAFPDEYVLYPGNSLKQDKHYFKRAEYDTEGEDGPSEKSIWARRKLADRETHFYHTLTDAIITECVERDVGTLTVSWPENVRESDWGKTGNKKLHSWAFDRIYQYLEYKGEIRGVKVLKENEWNTSKTCSRCGDDTKSNRKHRGLYVCSSCGLVGNADCNGAENMRQKITPSPHGEDRSNGCVAQPSVHLFDSESGTFAPREQVVS

SEQ ID NO: 2841 - protein, 287 aa, unidentified
PKAVLQAGCVRDRYDLGKMDLHEQKLKEVRLIPNGDTINLEIVCEIEIKEPTITIHEATRVAGIDIGVDNLMAIAFTSGHHPVLIKGNEIKAVNQFYNKQIAHYRSLLRTGKKDSKGIHQTKRMKRISEKRNRRVKDILHKASRKIIDLCVEEGIEVIVVGNHAGWKKRIHMGKKNNQTFVQIPFRTLIEMIKYKGEAAGIRVVVCEEAIQSKASSIDEDQIPVYGNDVAHTFTGKRIKRGLYRSKNGILMNADINGASNIIRKVYPCMPKRERWSRGTVNVPVTCI

SEQ ID NO: 2842 - protein, 390 aa, unidentified
MLNATKVRIYPTPEQADFLNQQFGAVRFTYNKALHIISTQYKRHGTKLRAKKDLKPLLAVAKKSRQYHWLKDYDSIALQQACINLDRAFQNFFNPQLKARYPRFKRKHGKQSSYHCTSVKAGDDWIKVPKLPPIKARIHREITGTLKSITLTRTTTGKYFASLLVEDGVKSPTPLQTVDTVLGVDMGLTHLAIDSTGRKVANPRFLKRARANLRRKQKALSRCQKGSKGRATARLKLAKAHERLANARADFQHKLSRQLIDDNQAVVVETLNVKNMLKHRKLAKHIADASWYSLIQKLDYKAKQQGKHLVKIDQWFASSKTCAGCGHKVEQMPLKVRTWDCPRCGTKAIDRDINAAINIRQQGILKLKAEGLSASAHRGLCKTGHAPAAA

SEQ ID NO: 2843 - protein, 373 aa, unidentified
MRHKAYNFRIYPNKTQESLIAKTIGCARFVFNHFLSEWRNAYKETGKGLSYATCSKQLPNLKREFLWLKEVDSTAIQTSVKHLSDAYERFFKKQNQPPRFKSKKNKVQSYTTKCTNGNIAIQDRKIKLPKLGLVRFAKSREVKGRILSATVRRNPTGKYSVSILVQTDIRELPKSNAYVGLDLGLKDFAVLSNGTTYENPRYLRKTEKKLAKAQRILSRREKGSSNWHKQRIKVARLHEKIVNSRKDYLHKISTEIIKNHDVIGVENLQISNMLKNRKLSKSISDVSWSMFMSMLEYKATWYGKQLVTVSKVFASSQLCSKCGYQNREVKNLAVRTWDCPDCGCHHDRDLNASFNILKEIQRILTTVGATGLA

SEQ ID NO: 2844 - protein, 399 aa, unidentified
MLKAFKTEIAPTKEQACKIVCSMGICRFLYNQYIAYNKKLYQMYQRGLLDSHQKPFVSANDFDKYVNHTLKQELPWINECGSKARKKTLVNAEVAFKRFFDGLAGFPCFKKKSRYDVKLYFPRNNKSDWKIWRHKLMIPTLKHVRLKEYGYLPVGLAVISGTVSYEAGRFYVSVVVDIDEKSKYNNDLEAIYQPTGEGVGIDLGIKDLAIVSDGRTFKNINKSSKVRRLEKRLRRMQRQLSRKYEFKKKKGGITATASANIDKQKLKVQKLYQRLNHIREDHENKAIHEIVKQKPRFITVEDLNIKGMMKNRHLAKAVAAERFYSFLSKLKRKAEIIGIEMRVADRFYPSSKTCHACGYVHKGLKLKDRVYICPQCGYTADRDFNASLNLRDAKEYRIA

SEQ ID NO: 2845 - protein, 416 aa, unidentified
MAIKATRTYVGSIQNHRQVCDGLDSLGDSASKIWNVARWTADRIWNATGEIPDEGVLKAYMKTRECWKDLNAQSSQKVIEELSDAFQSWFDLRHKDPKANPPDYRKHGNERPRSTVTFKADGFKHDPENNRVRLSKGSNLKENWSDFILCEYQTRPDVDLSEVNRVQNVRAVWNGDEWELHFVCKIEHETNDSAGDEVTGIDLGITNIATVAFPDEYVLYPGNSLKQDKHYFKRAEYDTEGEDGPSEKSIWARRKLADRETHFYHTLTDAIITECVERDVGTLTVSWPENVRESDWGKTGNKKLHSWAFDRIYQYLEYKGEIRGVKVLKENEWNTSKTCSRCGDDTKSNRKHRGLYVCSSCGLVGNADCNGAENMRQKITPSPHGEDRSNGCVAQPSVHLFDSESGTFAPREQVVS

SEQ ID NO: 2846 - protein, 556 aa, unidentified
MKSYKRALSIRISGKQKKERISDLQYKLMQFRNLLIIFNQIYYKNYGYIVLNESYLFNLLSDKPYRPRDTKDENGNIKKSKEEKLQEYNDILQNIDKVQELKEFIVKLKQQKDSVKNVHVIQSVIRQYISDYNSYFKSLNEYTKKPNKFRGKPRPPKAKKLKDIISFTVELNSNSFEIIDGRYILVRLTFDDENSRYIKVKLPEYIDREKIKSIRIKTIGTDAYIDVVYTKKIKIPETEKQYIAGIDLGLNNLLTIFSNNPSLRTLIVGGKEIKSFNQWFNKEKAKIQSEIDLLQNQINKLSKDGLNIDNLKLQIKTLINKQKQLSAFRERYLNNIFHQITRKIADYLYETGHKKVIIGNGAMSSKDGIDLGNKTNQHFVSIPFRKIIDMLKYKLEEYGIEVEEISEEFTSKTSPFANLNEVLEIGEEYLKVKRELKNTDLSEEELNQLKEKEKELKEQLNTLYNGKRIKRGLFKDFITNKVFNADAVGSYNILRKVAMPLINNTKLLIDKLSRPVKLKLKDLLQVSRDFVVEILQITGSRQNRVLCKIVEGYNFL

SEQ ID NO: 2847 - protein, 556 aa, unidentified
MKSYKRALSIRISGKQRKDRILNLQYELAHFRNLLIIFNQIYYKTYGYIILNESYLFNLLSDKPYRPRDTKDENGNIKKSKEEKLKEYNGILQNIEKNQELKDFIVKLKQQKEKVKNVYAVQSVIRQYIKDYNSYFKSIKKYAKNPSKFRGKPKPPKAKKLKDIVSFTVELNANSFDIIDDRYLLVRLTFDDENSRYIKVKLPEYIDGEKIKSIKIKTIGTDAYIDVVYTKKIEIEKAEQKYIAGIDLGLNNLITIFSNNPSLRTLIISGKEIKSFNQWFNKEKAKIQSEIDLLQNQINKLSKDDLNTDGLKQKKGELINKQKQLSAFRERYLNNIFHQITKKIADYLYETGHKKVIIGNGATNSKDGIDLGNKTNQHFVSIPFRKIIDMLKYKLEEYGIETEEISEEFTSKTSPFANLNEVLEIGEEYLKVKRELNNTNLPEKELNQLKEKEKELREQLNTLYQGKRIKRGLFKDYITNKIFNADAVGSYNILRKVAMPLINNTKLLIDKLSRPIKLKIKDLLQVSREFVVEMLQITGSRQNRVLCKIVEGYNFL

SEQ ID NO: 2848 - protein, 416 aa, unidentified
MAIEVTRTYVGSIQNHRQVCGGLDSLGDSASKIWNVARWTADRIWDATGEIPDEGALKAYMKNQSCWKDLNAQSSQKVIEELSDAFQSWFDLRQKDPEANPPGYRKHGDTRPRSTVTFKADGFRHDPENNRVRLSKGSNLKENWSDFILCEYQTRPDVDLSEVNKVQNVRAVWNGDEWELHFVCKVELETNDSAGDEVAGIDLGIANIATVAFPDDYVLYPGNSLKEDKHYFTRAEYDTEGENGPSEKSMWARRKLAERETHFYHVLTDAIIAECVERGVGTLAVSWPEDVRESDWGKIGNKKLHSWAFDRIYQYLDYKGEIRGVEVLKENEWDTSKTCSRCGDDTKSNRVERGLYVCSSCELVGNADCNGAENMRQKITPSPHSEDRSNGCVAQPSVHLFDRESGTFRTREQAVS

SEQ ID NO: 2849 - protein, 452 aa, unidentified
MLITRKTPGFSALTHRAKNLYNIASFYIRNAYSASIKSNADRFPHEIQVLEELNGVVDELNVIRQKHHSTPIHIIDHEHRFVSMQHLDGFFKLRDQIDYRALPAQANQNVLHMLYRDWKSFFVALADYKAHPDKYEAIPHIPRYADKDGYKPLIFTNQICKLRKDKHGWYVKFPKAVLQAGCVRDRYDLGKLDLHEQKLKEVRLIPHGDNINLEIVCEIEIKEPTIAIHEATRVAGIDIGVDNLAAIAFTSGHRPVLIKGNEIKAVNQFYNKQIAHYRSQLRTGKKDSKGIHHTKRMNRISEKRNRRVKDILHKASRKIIDLCEKEGIEVIVVGNNAGWKKRIHMGKKNNQTFVQIPFRTLIEMIKYKGEAAGIRVVVCEESYTSKASSIDEDQIPVYGKDVTHTFTGKRIKRGLYRSKNGILMNADVNGASNIIRKVYPCMPKRERFVEVL

SEQ ID NO: 2850 - protein, 416 aa, unidentified
MAIEVTRTYVGSIRNHRQVCDGLDSLGDSASKIWNVARWTADRIWDATSEIPNEGVLKSYMKNHSCWKDLNAQSSQKVIEELSDAFQSWFDLRQRDPEANPPGYRKHGDQRPRSTVTFKEDGFKHDPENNRVRLSKGKNLKEYWSDFLLCEYQTRPDIDLSEVNSVQNVRAVWNGDEWELHFVCKVKLETNASAGDEVAGIDLGIKNIATVAFPDEYVLYPGNSLKQDKHYFKQAEYDTEGENGPSEKSMWARQKLADRETHFYHTLTDTIITECIERGVGTLAVSWPEDVRESDWGKTGNKKLHSWAFDRIYQYLEYKGEIRGVDVLKENEWNTSKTCSRCGDATKSNRVERGLYVCSSCGLVGNADCNGAENMRQKITPSPHGEDRSNGCVAQPSTHLFDRESGTFCTREQVVS

SEQ ID NO: 2851 - protein, 416 aa, unidentified
MAIEATRTYVGSIQNHRQVCGGLDSLGDSASKIWNVARWTADQIWNATGEIPDEGVLKSYMKNQACWKDLNAQSSQKVIEELSDAFQSWFGLRQKDDAANPPGYRKHGDKRPRSTVTFKEDGFKHDTENNRVRLSKGSNLKDHFSDFLLCEYQTRPDVDLSEVNSVQNVRAVWNGDEWELHFVCKVELETNDSPGDEVAGIDLGIKNIATVAFPDEYVLYPGNSLKQDKHYFKRAEYDTEGENGPSEKSMWARKKLTERERHFYHVLTDTIITECVERGVGTLAVSWPEDVRESDWGKTGNKKLHSWAFDRIYQYLAYKGEIRGVAVLKENEWDTSKTCSRCGDDTKSNRVERGLYVCSSCELVGNADCNGAENMRQKITPSPHGEDRSNGCVAQPSTQLFDRESGTFRTREQFMS

SEQ ID NO: 2852 - protein, 397 aa, unidentified
MKTIHRTYRFELRPTQDQKVLLDKHFGCVRYVYNHFLNERKEQYQANKKSDNYYAQAKTLTELKKEDETIWLKEVNSQTLQFALRSLETAYLNFFAGNAKFPRFKSRKRKNSFTVPQHTKLIDGKVHVPKFKEGIQCIVHREVKGDVGKMTFSKTPTGKYFVSILTEEQYQPKEKTGAVCGIDLGLKDFAITSDGIKFKNNRYTKKYESDLAKAQKHFSRKTKGSNSFERQKRKVARIHEKIANTRQDVLHKVSYQLVSEYDVIALENLPVKGMMSNRKLSKHIADASWGTFVRLLEYKADWNDKQVVKINRFYPSSKTCHVCGWKNQDLNLSVREWTCRNGHPLYRDENAAKNILNEGLKIISSGTGDYTGGDSNQTSFQKHRSVKPEAHLSIANG

SEQ ID NO: 2853 - protein, 385 aa, unidentified
MLVNKAYKFRIYPNKKQIELINKTFGCSRFVFNFFLSKQKNKDNYWYIVEEMVRNGQLPSNNWKGEYFNKNQSIKELPKLKKYYPFLKEVDSIALQKSVENLGNAFDRYYKKQGSYPCFKSKKNPVQSYTTKYTNDNIAIDGNKIKLPKLGWVRFAKSREVKGHILNATIRRNPSGKYFISIGVEAEVSELPKTNSAVGIDVGLKDFAVLSDGTTYSNPKFFRKLEEKLAKAQRMMSRRKIGSSNWHKAKIKVARIHEKITNARNDYLHKISTEIVKNHDIIGMEDLSVSNMLKNHHLAKAISEVSWSQFKTTIEYKAKWYGKQVVTVAKNFPSSQLCSCCGYQNKDVKNLGLREWECPKCHAKHDRDLNASINIKNESLKILTA

SEQ ID NO: 2854 - protein, 361 aa, unidentified
MHRAYKFRLYPNKEQATLINKTIGCTRFVFNHFLAKRKDAYEQEKKTLNYNDCSAMLTQLKKEMEWLKEVDSTALQSTLKDLDSSYKKFFKEKKGYPKFKSKKNPKQSYACKMNIKVEGDRIKLPKLGWVTFAKSREVEGRILSATVRKNPSGKYFVSVLCETEIQPLLQTEKTVGVDLGIKDFAILSTGEKIANPKALRYYEKKLATWQQKLSRRKKGGQNREKSRKQVARLHERISNTRNDFLHKLSTQLIRENQTICLEDLRVENMIKNHKLAKSIADASWSAFRTMLEYKAAWYGRTISIVGKQFPSSQLCSGCGYQNKEVKNLNLRNWTCPNCGVQHDRDKNAAINIEQEGLRLLA

SEQ ID NO: 2855 - protein, 361 aa, unidentified
MHRAYKFRLYPNKEQATLINKTIGCTRFVFNHFLAKRKDAYEQEKKTLNYNDCSAMLTQLKKEMEWLKEVDSTALQSTLKDLDSSYKKFFKEKKGYPKFKSKKNPKQSYACKMNIKVEGDRIKLPKLGWVTFAKSREVEGRILSATVRKNPSGKYFVSVLCETEIQPLLQTEKTVGVDLGIKDFAILSTGEKIANPKALRYYEKKLATWQQKLSRRKKGGQNREKSRKQVARLHERISNTRNDFLHKLSTQLIRENQTICLEDLRVENMIKNHKLAKSIADASWSAFRTMLEYKAAWYGRTISVVGKQFPSSQLCSGCGYQNKEVKNLNLRNWTCPNCGVQHDRDKNAAINIEQEGLRLLT

SEQ ID NO: 2856 - protein, 414 aa, unidentified
MVVYKIMLIFVSDMRKINRTYKFRLYPNKTQADLLARHFGCARFTYNYFLDQRKEQYRLTGKSDNYYAQAKTLTALKKQEATAWLKEVNSQTLQFAIRSLEIAYTNFFQKRAKFPNFKSKRSKNSFTVPQFASIANNRLFIPKFKEGIKCRVHREIKGKIGKVTISKTPSGKYFVSVFTEEEYATPLEKTNKSVGLDMGLKDLLITSEGETFKNNRYTRKYERKLARAQQHLSRKKKGSRGFENQRLKVAKIHEKISNSRADYLHKCSISLVRRYDTICIEDLNVKGMKRNHHLAKSIADASWGSFVTMLTYKADWNGKEVVKINRYFPSSQTCNVCGYVNKQTKNLSVRDWECPVCHTHHNRDVNAAINILRFGLNNISAGTVDYTDGEGVRANLLKGRSSVKSEAHKSLAHG

SEQ ID NO: 2857 - protein, 362 aa, unidentified
MLIHKAYKYRIYPSKEQQRLIHQMFGCCRFVFNHFLGKWNDTYAATGKGLSYNTCATQLPALKTSFEWLKEVDSIALQSAVKHVADSFNRFFKKQTQAPRFKSRKNPIQSYTTKYTNGNIAIQGNQVKLPKLGWVRFANSRTCGGRIFSATVRRNAAGKYFVSLVCEVEQQSLPPADKHIGIDLGLKEFAVCSDGMRVASPKAYRKYEKKLAFWQRRMSRRTQGGSNWHKAKIKAARIHEKIANMRQDFLHQLSTKLIRENQTISIESLQVGKMLKNHKLAKFIADASWSEFARQLTYKSEWYGRILKVADTYAPTSQTCHVCGFVNPAVKQLSVRQWSCPSCGALHDRDENAARNIKKLAV

SEQ ID NO: 2858 - protein, 410 aa, unidentified
MKAQRVEKQMIKPTNEYFPMLDQFCFLSKNLYNHANYIVRQSFVKDNKWIRYGELDKQLRADKDYPDYAEMPTAQAAQQTLRLLDKNWKSFFASIKDWSKNKDKYLGKPKLPRYANKNGRKSLIITNQNCKLKDGMIHFPKSFNGFVCKFYCCNRPDFVKLNQVRFLPHYNCIVIEIVYEVEITDTVKQNQNYISIDIGVDNLATVANSFGKQPFIVNGKPLKSVNQYYNKHVSKYRSIANQMNGVAYTKRMDKLTEKRNRKMEDYLHKTSREIIEYCKKYNVSKIIIGNNKEWKQNSKLSKKVNQHFVQIPYNRLIQMLEYKAQEIGVTVIITEESYTSGTSFVDNEMPVKENYNKSRRIKRGLFKTSDGSFINADVNGSYQIMKKVIPNGEILWNRSCAYQPFRVAIV

SEQ ID NO: 2859 - protein, 418 aa, unidentified
MMKRVEHHRLKPSSPFYAMLRGFCHRSKNLYNHGNFLIRQTFIDDGKWLRYGEVDRLLKADAEYPDYREMPTAQTAQQTLRILDKNWTSFFAAIKDWKAHPEKYKGRPKLPKYKPKDGYFPLVLTNQNCKLKDGVIRFPRVFQGFTVKAIFASQPDTSFKQARIIPHGDEIELELVYELPEAEEKADNGKYAAIDIGVDNLAALTWNTGERPFLLKGTPLKSVNQYYNKQMAKRRSICELMNGRHSSKRIARLTAKRNRKVEDYLHKASRKVIDLCAEQDVSVLVIGKNKGWKQDVSLGRKVNQSFVQLPFARFIQMIQYKAESIGMKVVLTEESYTSGTSFLDGEAPTKDRYDKSRRVHRGLFQANDGRKINADVNGAYQIMRKVFPNVNANGIEGVALRPAVVALSMSARRSFDCA

SEQ ID NO: 2860 - protein, 418 aa, unidentified
MMKRVERHRLKPSSPFYAMLRGFCHRSKNLYNHGNFLIRQTFIEDGKWLRYGEVDRLLKANTDYPNYREMPTAQTAQQTLRLLDKNWASFFAAIKDWKAHPEKYKGRPKLPKYKPKDGYFPLVLTNQNCKLKDGVIRFPRVFQGFTVKAIFASQPEAVFKQVRIIPHGGEIDLELVYELPEVEEKADNGKYAAIDIGVDNLAALAWNTGKRPVLLKGTPLKSVNQYYNKQMAKRRSICELMNGRHSSKRIARLTAKRNRKVEDYLHKASRKVIDLCAEQDVSVLVIGKNKGWKQEAKLGRRVNQSFMQLPFARFIQMLQYKAKSIGMKVMLTEESYTSGTSFLDGETPTKDRYDKSRRVHRGLFQASDGRKINADINGAYQIMRKVFPNVNADGIEGVALRPAVVALSMSARRSSGCA

SEQ ID NO: 2861 - protein, 418 aa, unidentified
MMKQVERHRLKPSSPFYAMLRGFCHRSKNLYNHGNFLIRQTFIEDGKWLRYGEVDRLLKANTDYPNYREMPTAQTAQQTLRLLDKNWTSFFAAIKDWKAHPEKYKGRPKLPKYKPKDGYFPLVLTNQNCKLKDGVIRFPRTFQGFTVKAIFASQPEAVFKQARIIPHGGEIDLELVYEIPDVEEKADNGKYAAIDIGVDNLAALAWNTGEQPVLLKGTPLKSVNQYYNKQMAKRRSICELMNGRHSSKRIARLTAKRNRKVEDYLHKASRKVIDLCAEQDVSVLVVGKNKGWKQKANLGRRVNQSFVQLPFARFIQMLQYKAESIGMQVVLTEESYTSGTSFLDGEAPTKDHYDKSRRVHRGLFQANDGRKINADVNGAYQIMRKVFPNVNADGIEGVALRPAVVVLSMSARCGSGCA

SEQ ID NO: 2862 - protein, 402 aa, unidentified
MRNLLKAFKTELRLTERQKDKVRRSLGICRFLANQYIARNIWLYRLYQRGVLDEKHPHFVTANDFDKYVNHVLKKKFPWIDQCGSKARKKILVNAEQAFRRFFKGQAHFPRFKRKNQQNVKLYFPKNNKGDWTIWRHKIQIPTIGKVRLKEFGYLPQGVTIKNGHVSYEAGRYYVSITAEIDETSRYNNDLEASYHPQSDGIGVDLGVKSLAIVSDGRIFENINTSSRARRLEKRLRREQRRLSRKYEMRKRKGGSTATASANIEKKKLSVQKLHQRLANLRRNHENQVIHALVEQKPRSITVEDLNVTGMMKNRHLSKAVAQQRFYSFREKLRRKAEIIGIEFRIADRFYPSSKTCHACGHVHSGLKLKDRVYVCPACGFTEDRDLNAALNLRDTKNYRIA

SEQ ID NO: 2863 - protein, 402 aa, unidentified
MRILLKAFKTEIAPTEEQKTKIIRSIGVARFLYNQYIAYNRRLYKMYQRGMLDERQKHFVTAIDFDKYVNHKLKKELPWIDRCGSKARKKALVNAEQAFRRFFAGISHFPTFKKRANQDVKLYFPRNNRGDWKIWRHKLMVPTLKQVKLKEYGYLPVGSVAKSGTVSYTAGRFYVSVVVDIDEKSKHNKDLASCYAKQTEEIGIDLGVKDLAVVSDGRVFENINKSSKIKRLEKRLRREQRCLSRKYESRKKKGIETAAVSANVEKQKLKVQKLHQRITRIREDHENKTVHEVVKQKPRFITVENLNVRGMMKNRHLAKAVAAQRFNHLLSKLKHKAKIIGIEFREVDRFYPSSKTCHACGHVHRGLKLKDRVYICPECGYRMDRDYNASLNLRDAEEYRVV

SEQ ID NO: 2864 - protein, 418 aa, unidentified
MMKRVERHRLKPSSTFYAMLREFCHRSKNLYNHGNFLIRQTFIEDGKWLRYGEVDRLLKADAEYPDYREMPTAQTAQQTLRLLDKNWTSFFAAIKDWKAHPEKYKGRPKLPKYKPKDGYFPLVLTNQNCKLKDGVIRFPRTFQGFTVKAIFASRPEAVFKQACIIPHGGEIELELVYELPKVEEKGDNGKYAAIDIGIDNLAALAWNTGKRPVLLKGTPLKSFNQYYNKQIAKCRSICELMNGRHSSKRIARLTAKRNRKVEDYLHKASRKVIDLCTEQDVSVLVVGKNKGRKQKANLGRKVNQNFVQLPFARFIQMLQYKAESIGVKVVLTEESYTSGTSFLDGEAPTKDRYDKSRRIHRGLFQANDGRKINADVNGAYQIMRKVFPNVNADGIEGVALRPAVVVLSMSARCGSGCA

SEQ ID NO: 2865 - protein, 418 aa, unidentified
MMKRVEHHRLKPSSPFYAMLREFCHRSKNLYNHGNFLIRQTFIDDSKWLRYGEIDRLLKTDTDYPDYREMPTAQTAQQTLRLLDKNWTSFFAAIKDWKAHPEKYKGRPKLPKYKPKDGYFPLVLTNQNCKLKDGVIRFPRTFQGFTVKAIFASQPEAVFKQARIIPHGGEIDLELVYELPKVEEKDDNGKYAAIDIGVDNLAALAWNTGERPVLLKGTPLKSVNQYYNKQMAKRRSICELMNGRHSSKRIARLTAKRNRKVEDYLHKASRKVIDLCAEQDVSVLVIGKNKGWKQKVNLGRKVNQSFVQLPFARFIQMLQYKAESIGMKVVLTEESYTSGTSFLDGEVPTKDHYDKSRRVHRGLFQTNDGRKINADINGAYQIMRKVFPNMSADGIEGVALRPAVVALSMSARCGSSCA

SEQ ID NO: 2866 - protein, 418 aa, unidentified
MMKRVEHHRLKPSSPFYAMLREFCHRSKNLYNHGNFLIRQTFIEDGKWLHYGEVDRLLKADAEYPDYREMPTAQTAQQTLRILDKNWTSFFAAIKDWKAHPEKYRGRPKLPKYKPKDGYFPLVLTNQNCKLKEGVICFPRVFQGLTVKGIFATQPDVVFKQARIIPHGGEIDLELVYELPEVEKKADNGKYAAIDIGVDNLAALAWNTGKRPVLFKGTPLKSVNQYYNKQIAKFRSICELMNGRHSSKRIARLTAKRNRKVEDYLHKASHKVIDLCAEQDVSVLVVGKNKGWKQKANLGRKVNQSFVQLPFARFIQMLQYKAESIGMKVILTEESYTSGTSFLDGETPTKDRYDKSRRVHRGLFQANDGRKINADVNGAYQIMRKVFPNVNADGIEGVALRPAVVALSMSVRRSSGCA

SEQ ID NO: 2867 - protein, 418 aa, unidentified
MMKRVERHRLKPSSTFYAMLREFCHRSKNLYNHGNFLIRQTFIEDGKWLRYGEVDRLLKADAEYPDYREMPTAQTAQQTLRLLDKNWTSFFAAIKDWKAHPEKYKGRPKLPKYKPKDGYFPLVLTNQNCKLKDGVIRFPRTFQGFTVKAIFASRPEAVFKQACIIPHGGEIELELVYELPKVEEKGDNGKYAAIDIGIDNLAALAWNTGKRPVLLKGTPLKSFNQYYNKQIAKCRSICELMNGRHSSKRIARLTAKRNRKVEDYLHKASRKVIDLCTEQDVSVLVIGKNKGWKQEAKLGRRVNQSFVQLPFARFIQMLQYKSEAIGMKVVLTEESYTSGTSFLDGEAPTKDRYDKSRRVYRGLFQANDGRKINADINGAYQIMRKVFPNVNADGIEGVALRPAVVALSMSARRSSGCA

SEQ ID NO: 2868 - protein, 402 aa, unidentified
MKRLLKSFKTELRLNESQKDKIRRSLGICRFLSNQYIARNIWLYRLYRRGILDEKQRRFVTANDFDKYVNHTLKKKFPWIDQCGSKARKKVLVNAEQAFRRFFKGQAHFPCFKRKNQQNVKLYFPKNNKGDWTIWRHKIQVPTIGKVRLKEFGYLPQGVTIKNGHVSYEAGRYYVSVTAEIEETSRYNNDLEASYHPQTDGIGVDLGVKSLAIVSDGRIFENINTSSRARRLQKRLRREQRRVSRKYEMRKKKGGSTATASANIEKKKLSVQRLHQRLANLRRNHENQIIHALVEQKPRFITVEDLNVTGMMKNRHLSKAVSEQRFYSFREKLRRKAESIGIEFRIADRFYPSSKTCHACGHVHSSLKLKARIYVCPVCGYTEDRDLNAALNLRDTKNYRIA

SEQ ID NO: 2869 - protein, 418 aa, unidentified
MMKRVEHHRLKPSSPFYAMLREFCHRSKNLYNHGNFLIRQAFLEDSKWLRYGEVDRLLKADVKYPDYREMPTAQTAQQTLRILDKNWASFFAAIKDWKAHPEKYKGRPKLPKYKPKDGYFPLVLTNQNCKLKDGVIRFPRVFQGFTVKAIFSSQPDAVFKQARIIPHGGEIDLELVYEIPEVDEKADNGKYAAIDIGIDNLVALAWNTGKRPVLFKGTPLKSVNQYYNKQMAKRRSICELMNGRHSSKRIARLTVKRNRKVEDYLHKASRKVIDLCAGQDVSVLVIGKNKGWKQEANLGRKVNQSFVQLPFARFIQMLQYKAESIGMKVVLTEESYTSGTSFLDDEAPVKACYDKSRRVHRGLFLANDGQRINADVNGAYQIMRKVFPNVNADGIEGVALRPAVVALSMSARRGSDCA

SEQ ID NO: 2870 - protein, 402 aa, unidentified
MKRLLRSFKTELRLTESQKDKIRRSLGICRFLANQYIARNIWLYRLYQRGVLDEKQRHFVTANNFDKYVNHVLKKKFPWIDQCGSKARKKVLVNAEQAFKRFFKGQAHFPRFKRKNQQNVKLYFPKNNKGDWTIWRHKIQIPTIGKVRLKEFGYLPQGVTIKNGYVSCEADRYYVSVTAEIEETSRYNNDLEASYHPQTDGIGVDLGVKSLAIVSDGRIFENINMSSRARRLEKRLRREQRRLSRKYEMRKKKGGSTATASANIEKKKLSVQRLHQRLANLRRNHENQIIHALVEQKPRFITVEDLNVTGMMKNRHLSKAVSEQRFYSFREKLRRKAEIIGIEFRIADRFYPSSKTCHACGHVHSGLKLKDRTYVCPACGYKEDRDLNAALNLRDTKDYRIA

SEQ ID NO: 2871 - protein, 374 aa, unidentified
MLVNKAYKFRIYPTKEQEILITKTFGCSRFVFNHFLAKWNETYQETGKGLTYNSCSSQLTQLKKELTWLKEVDSIAIQSSLKNLADAYSRFFKKQNNRPRFKSKKNKMQSYTTKYTNGNIAIVGNKIKLPKLGFVKFAKSRDVEGRILNATIRRNPSGKYFVSILTETEVHELPKTHSSVGVDVGLKNFAILSDGTKYENPKWLRKLEKKLAKEQRILSRRKKGGSNWDKQRVKVARIHEKIVNARTDYLHKISTDIIKNHDVISIEDLQVSNMLKNHKLAKAISEVSWSQFRTMLEYKAKWYGKQVVTVAKNFASSQLCSCCGYQNKDVKNLNLREWDCPSCGTHHDRDINAGQNLRNEAIRLLTVGTTGLAY

SEQ ID NO: 2872 - protein, 410 aa, unidentified
MKAQRVEKKMIKPTNEYFPMLDQFCFLSKNLYNHANYIVRQSFVKDNKWIRYGELDKQLRADKDYPDYAEMPTAQAAQQTLRLLDKNWKSFFASIKDWSKNKDKYLGKPKLPRYANKNGRKSLIITNQNCKLKDGMIHFPKSFNGFVCKFYCCNRPDFVKLNQVRFLPHYNCIVIEIVYEVEITDTVKQNQNYISIDIGVDNLATVANSFGKQPFIVNGKPLKSVNQYYNKHVSKYRSIANQMNGVAYTKRMDKLTEKRNRKMEDYLHKTSREIIEYCKKYNVSKIIIGNNKEWKQNSKLSKKVNQHFVQIPYNRLIQMLEYKAQEIGVTVIITEESYTSGTSFVDNEMPVKENYNKSRRIKRGLFKTSDGSFINADVNGSYQIMKKVIPNGEILWNRSCAYQPFRVAIV

SEQ ID NO: 2873 - protein, 318 aa, unidentified
MLKSFKTELRLTERQKDKVHRSLGICRFLANQYIARNIWLYRLYQRGVLDEKHPHFVTANDFDKYVNHVLKKKFPWIDQCGSKARKKILVNAEQAFRRFFKGQAHFPRFKRKNQQNVKLYFPKNNKGDWTIWRHKIQIPTIGKVRLKEFGYLPQGVTIKNGHVSYEAGRYYVSITAEIDETSRYNNDLEASYHPQSDGIGVDLGVKSLAIVSDGRIFENINTSSRARRLEKRLRREQRRLSRKYEMRKRKGGSTATASANIEKKKLSVQKLHQRLANLRRNHENQVIHALVEQKPRSITVEDLNVTGMMKNRHLSKAV

SEQ ID NO: 2874 - protein, 418 aa, unidentified
MMKRVERHRLKPSSTFYAMLREFCHRSKNLYNHGNFLIRQTFIEDGKWLRYGEVDRLLKADAEYPDYREMPTAQTAQQTLRLLDKNWTSFFAAIKDWKAHPEKYKGRAKLPKYKPKDGYFPLVLTNQNCKLKDGVIRFPRTFQGFTVKAIFASRPEAVFKQACIIPHGGEIELELVYELPKVEEKGDNGKYAAIDIGIDNLAALAWNTGKRPVLLKGTPLKSFNQYYNKQIAKCRSICELMNGRHSSKRIARLTAKRNRKVEDYLHKASRKVIDLCTEQDVSVLVIGKNKGWKQEAKLGRRVNQSFVQLPFARFIQMLQYKSEAIGMKVVLTEESYTSGTSFLDGEAPTKDRYDKSRRVYRGLFQANDGRKINADINGAYQIMRKVFPNVNADGIEGVALRPAVVALSMSARRSSGCA

SEQ ID NO: 2875 - protein, 418 aa, unidentified
MMKRVEHHRLKPSSPFYAMLRGFCHRSKNLYNHGNFLIRQTFIDDGKWLRYGEVDRLLKADAEYPDYREMPTAQTAQQTLRILDKNWTSFFAAIKDWKAHPEKYKGRPKLPKYKPKDGYFPLVLTNQNCKLKDGVIRFPRVFQGFTVKAIFASQPDTSFKQARIIPHGDEIDLELVYELPEAEEKADNGKYAAIDIGVDNLAALTWNTGERPFLLKGTPLKSVNQYYNKQMAKRRSICELMNGRHSSKRIARLTAKRNRKVEDYLHKASRKVIDLCAEQDVSVLVIGKNKGWKQDVSLGRKVNQSFVQLPFARFIQMIQYKAESIGMKVVLTEESYTSGTSFLDGEAPTKDRYDKSRRVHRGLFQANDGRKINADVNGAYQIMRKVFPNVNANGIEGVALRPAVVALSMSARRSSGCA

SEQ ID NO: 2876 - protein, 418 aa, unidentified
MMKRVERHRITPFSPFYAMLRGFCHRSKNLYNHRNFLIRQTFIEDGKWLRYGEVDRLLKANTDYPDYREMPTAQTAQQTLRLLDKNWTSFFAAIKDWKGHPEKYKGRPKLPKYKPKDGYFPLVLTNQNCKLKDGVIRFPRVFQGFTVKAIFASQPDAVFKQARIISHGSDIDLELVYEIPDVEEKADNGKYAAIDIGVDNLAALAWNTGERPVLFKGTPLKSVNQYYNKQIAKFRSICELMNGRHSSKRIARLTAKRNRKVEDYLHKASHKVIDLCAEQDVPVLVVGKNKGWKQKANLGRKVNQSFVQLPFARFIQMLQYKAESIGVKVILTEESYTSGTSFLDGEVPTKDRYDKSRRVHRGLFQASDGRKINADINGAYQIMRKVFPNVNADGIEGVALRPAVVALSMSARRSSGCA

SEQ ID NO: 2877 - protein, 416 aa, unidentified
MAIKATRTYIGSIQNHHQVCDGLDSLGDSASKIWNVARWTADRIWDETGEIPDSGTLKSYMKNQPCWKDLNAQSSQKVIEELSDAFQSWFDLRHKFNEANPPGYRKHGDTRPKSTVTFKEDGFKHDPENNRIRLSKGSNLKEHFSDFLLCEYQTRPDVDLSEVNSVQNVRAVWNGERWELHFVCNVELETADSAGDGVAGIDLGITNIATVAFPDEYVLYPGNSLKEDKHYFTRAEYDTEGEDGPSEKSMWARRKLSERETHYYHTLTDAIITECVERGVGTLAVSWPEDVRASDWGKTGNKKLHSWAFDRIYQYLEYKGEMCGVEVLKENEWNTSKTCSRCGDDTKSNRVERGLYVCSSCELVANADCNGAENMRQKITPNPHGEDRSNGCVAQPSTHLFDRESGTFHTREQVVS

SEQ ID NO: 2878 - protein, 416 aa, unidentified
MAIKATRTYVGSIQNHQQVCDGLDSLGDSASKIWNVARWTADRIWDATGEIPNGSVLKSYMKNQSCWKDLNAQSSQKVIEELSDAFQSWFDLRHNSSEANPPGYRKHGDTRPKSTVTFKEDGFKHDSENNRVRLSKGSNLKEHFSDFLLCEYQTRPDVNLSEVNSVQNIRAVWTGESWELHFVCKVELETADAAGDDVAGIDLGITNIATVAFPDEYVLYPGNSLKEDKHYFTRAEYDTEGENGLSEQSKWARRKLSERETHYYHTLTDAIITECVDRGVGTLAVSWPEDVRESDWGKTGNKKLHTWPFDRIYQYLEYKGEMRGVEVLKENEWNTSKTCSRCGDDTKSNRVERGLYVCSSCELVANADCNGAENMRQKITPSPHGEDRSNGCVAQPSTHLFDRESGTFHTREQVVS

SEQ ID NO: 2879 - protein, 416 aa, unidentified
MAIQATRTYVGSIQNHRQVCDGLDSLGDSASKIWNVARWTADRIWDATGEIPNGSVLKSYMKNQSCWKDLNAQSSQKVIEELSDAFQSWFDLRHKHEKANPPGYRKRGDTRPRSTVTFKQDGFKHDPENNRIRLSKGSNLKEHFSDILLCEYQTRPDVDLSEINRVQNVRTVWNGDEWEVHFVCKVELETADSAGDGVAGIDLGITNIATVAFPDEYVLYPGNLLKEDKHYFTRAEYDTEGENGLSEQSKWARRKLSERETHFYHTLTDAIVTECVERGVGTLAVSWPEDVRASDWGKTGNKKLHSWAFDRIYQYLEYKGEMRGVEMLKENEWNTSKTCSRCGDDTKSNRVERGLYVCSSCELVANADCNGAENMRQKITPSPHGEDRSNGCVAQPLTHLFDRESGTFHTREQVVS

SEQ ID NO: 2880 - protein, 416 aa, unidentified
MAIKATRTYVGFIENPQQVYDGLDSLGDSASKLWNVARWTADRIWDATGEIPNGSVLKSYMKNQPCWKDLNAQSSQKVIEELSDAFQSWFDLRQRFSEANPPGYRKHGDTRPRSTVTFKEDGFKHDPENNRVRLSKGSNLKEHFSDFLLCEYQTRPDVDLSAVNAVQNVRAVWNGDEWELHFVCKVELEVADSAGDGVAGIDLGITNIATAAFPDEYMLYPGNSIKEDKHYFTRTEYDTEGENGPSEQSMWARRKLSERETHFYHTLTDAIITECVERGVGTLAVSWPEDVRQSDWGKTGNKKLHTWAFDRIYQYLEYKGEMRGVEVLKENEWNTSKTCSRCGDDTRSNRVERGLYVCSSCKLVANADCNGAENMRQKITPSPHGEDRSNGCVAQPSTHLFDRESGTFHTREQVVS

SEQ ID NO: 2881 - protein, 420 aa, unidentified
MALLPCAFRFRLEPTAEQAAQLGRLAGARRWVWNWALERRTATYRADGKSVSWAALSAELTGLKQAPAMAWLAEVDSQALQQALADLKRAFANFFESRARFPRRKTRKRSRPAFRIPQRVRLDGGRLYVPGAGWVRVRRARAEDGTFAEIGPTKSARFTCDAGGRWHVALVGARHVEEGPFPLPPEAAAAGMDQGLTTFAVLSDGATVANPRFGRRADRKLRRLHRAVSRKVKGSRNRGKARRALAREYGRVRDRRQDFAAKLATQLITAYPVLGVESLNVSALARTKLSRSVLDAAWGDLHRRLHYKAAWWGGGPDGRTGRWVIPVGRWFPSTKRCSVCHRRNPDLTLADRTWSCGQCASVHDRDGNASENLRQEAWRLLANGLLGKGHEDQQGAAGGQPDARNASGPRVRPSTAGTAG

SEQ ID NO: 2882 - protein, 391 aa, unidentified
MLKATKVRLYPTTEQAEFLNRQFGAVRFVYNTGLRIMSHRYQRHGQSLSAKHDIKKLLPVAKKSRQYGWLKEADAIALQQACLNLDHAFQRFFDPAQKAGYPRFKSKRGKQSSYHCVGVKAGDDWIKVPKLGPIKARMHRQVEGRLKSITLTRTVTGKHYASLLFDTEQAAPAPLKDVDAAKVVGLDMGLSHLAIDSTGRKIANPRFLKQAQQNLKRKQQALSRTKKGSANRAKARLLVAKAHERLANARHDFQHKFSRQIVDDSQAVIVETLKVRNMMKNARLAKHIGDASWHALVTKLDYKAKKQGKHLVKIDPWFASSKTCHVCQHKMDAMPLNVRSWECPACHTQHDRDINAALNIKHQGIVKLKAEGLSVSAHGGLRKSGMSPVAA

SEQ ID NO: 2883 - protein, 391 aa, unidentified
MLKATKVRLYPTTEQAEFLNRQFGAVRFVYNTGLRIISHRHKRHGQSLSAKHDIKKLLPVAKKSRKYGWLKEADSVALQQACLNLDHAFQRFFDPAQKAGYPRFKSKRGKQSSYHCVGVKAGDDWIKVPKLGPIKARMHRQVEGRLKSITLTRTVTGKHYASLLYETEQAAPAPLKAVDAAKVLGLDMGLSHLAIDSTGRKIANPRFLKQAQQNLKRKQQALSRTKKGSANRAKARLLVAKAHERLANARHDFQHKFSRQIVDDNQAVIVETLKARNMMKNARLAKHIGDASWHALVTKLDYKAKEQGKHLVKIDPWFASSKTCHVCQHKMDAMPLNIRSWECPACHTQHDRDINAALNIKHQGIIELKAEGLSVSAHGGLRKSGTSSAAA

SEQ ID NO: 2884 - protein, 372 aa, unidentified
MIAVEKAYKFRMYPNKKQQELINKTFGCCRFVYNKYLAKRIEVYKNDKETFTYKQCSSDLTNLKKELNWLKEPDKFSLQNALKDLENAYEKFFKEKAGFPKFKSKKTNRFSYKTNFTNGNIMYCGQHIKLPKLGMVKIRDKQVPKGRILNATISKEPSGRYYVSLCCTDVDIEAFENTNNQIGLDLGIKEFCISSCGEFIENPKYLKKSLNKLAKLQRELSRKTIGSLNRNKARLKVARLQEHIANQRKDFLQKLSTKLIKENDIICIEDLQVKNMIRNRKLSRLISDVSWSEFIRQLEYKANWYGRQIVKVGKFFASSQICNKCGYKNEEVKDLNIRDWICPSCNETHDRDINASINILKEGLRLITIQNK

SEQ ID NO: 2885 - protein, 391 aa, unidentified
MTTHRKVYRYRIEPTPVQESKLYMLAGSRRFVFNWALARRREHYAETGKTLGYNAQAGELTALKNQEETSWLKESDSQLLQQALKDVERAFVNFFEKRARFPRFKSKKTDTPRFRIPQRVRIEGSRVYVPKVGWVKLRKSQEIEGKTKSATFKREADGHWYVSLVSEFEMPDVPLPPVPESEVVGIDLGLKDFYVLSDGGRKEAPRFARKGQRKLRRAARRHSRCTRGSNRKAKAKRKLARVHRQIANQRKDFVHKATSGLVQQYQGFCIENLSIKGMAKTKLSKSVLDAALGEFRRQLAYKAQWHRKWLAVIDRWFPSSKLCGECGSINADLTLSDREWTCECGAVHDRDLNAARNIKREGLSQIVVAGHAETLNARGEGVRPAIAGSPR

SEQ ID NO: 2886 - protein, 416 aa, unidentified
MVIKVTRTYVGSIQNHRQVCNGLDSLGDSASKLWNVARWTADRVWDATGEIPDEGVLKSYMKNQECWKDLNAQSSQKVIEELSDAFQSWFDLRHKDPKANPPGYRKHGDKRPKSTVTFKEDGFKHDPKNNRVRLSKGSNLKAHFSDFLLCEYQTRPDVDLSEVNSVQNVRAVWNGDEWELHFVCKVELETNDSAGDGVAGIDLGIKNIATVAFPDEYVLYPGNSLKQDKHYFTRAEYDTEGENGPSEKSMWARRKLAERETHFYHTLTDTIITECVERSVGTLAVSWPEDVRESDWGKTGNKKLHTWAFDRIYQYLNYKGEIRGVGVLKENEWNTSKTCSACGDDTKANRKHRGLYVCSSCRLVGNADCNGAENMRQKITPSPHGEDRSNGCVAQPSVHLFDSESGAFAPREQVVS

SEQ ID NO: 2887 - protein, 416 aa, unidentified
MAIQVTRTYVGSIQNHRQVCNGLDSLGDSASKLWNVARWTADRVWDATGEIPDEGVLKSYMKNQECWKDLNAQSSQKVIEELSDAFQSWFDLRHKDPKANPPGYRKHGDKRPKSTVTFKEDGFKHDPKNNRVRLSKGSNLKAHFSDFLLCEYQTRPDVDLSEVNSVQNVRAVWNGDEWELHFVCKVELETNDSAGDGVAGIDLGIKNIATVAFPDEYVLYPGNSLKQDKHYFTRAEYDTEGENGPSEKSMWARRKLAERETHFYHTLTDTIITECVERSVGTLAVSWPEDVRESDWGKTGNKKLHTWAFDRIYQYLNYKGEIRGVGVLKENEWNTSKTCSACGDDTKGNRKHRGLYVCSSCGLVGNADCNGAENMRQKITPSPHGEDRSNGCVAQPSVHLFDSESGAFAPREQVVS

SEQ ID NO: 2888 - protein, 372 aa, unidentified
MVVVEKAYKFRMYPNKKQQELINKTFGCCRFVYNKYLAKRIDVYKNNKETFTYKQCSSDLTNLKKELKWLKEPDKFSLQNALKDLDNAYKKFFKEKTGFPKFKSKKINRFSYKTNFTNGNIMYCGQHIKLPKLGMVKIRDKQVPQGRILNATISKEPSGRYYVSLCCTDVDIEAFENTNNHIGLDLGIKEFCISSCGEFIENPKYLKKSLNKLAKLQRELSRKTIGSLNRNKARLKVARLQEHIANQRKDFLQKLSTKLIKENDIICIEDLQVKNMIKNHKLSRSISDVSWSEFIRQLEYKANWHGRQIVKVGKFFASSQICNKCGYKNEEVKNLNIREWICPSCNETHDRDINASINILKEGLRLITIQNK

SEQ ID NO: 2889 - protein, 372 aa, unidentified
MVVVEKAYKFRMYPNKKQQELINKTFGCCRFVYNKYLAKRIDVYKNNKETFTYKQCSSDLNNLKKELKWLKEPDKFSLQNALKDLDNAYKKFFKEKVGFPKFKSKKINRFSYKTNFTNGNIMYCGQHIKLPKLGMVKIRDKQVPKGRILNATISKEPSGRYYVSLCCTDVDIEAFENTNNHIGLDLGIKEFCISSCGEFIENPKYLKKSLNKLAKLQRELSRKTIGSLNRNKARLKVARLQEHIANQRNDFLQKLSTKLIKENDIICIEDLQVKNMIKNRRLSRLISDVSWSEFVRQLEYKANWYGRKIVKVGKFFASSQICNKCGYKNEEVKDLNIREWICPSCNETHNRDINASINILKEGLRLITIQNK

SEQ ID NO: 2890 - protein, 372 aa, unidentified
MIVVEKAYKFRMYPNKKQQELINKTFGCCRFVYNKYLAKRIEVYKNNKETFTYKQCSSDLTNLKKELKWLKEPDKFSLQNALRDLDNAYKKFFKEKVGFPKFKSKKINRFSYKTNFTNGNIMYCGQHIKLPKLGMVKIRDKQVPKGRILNATISKEPSGRYYVSLCCTDVDIEVFENTNNQIGLDLGIKEFCISSCGEFIENPKYIKKSLNKLAKLQRELSRKTIGSLNRNKARLKVARLQEHIANQRNDFLQKLSTKLIKENDIICIEDLQVKNMIKNRRLSRLISDVSWSEFVRQLEYKANWYGRKIVKVGKFFASSQICNKCGYKNEEVKDLNIREWICPSCNETHNRDINASINILKEGLRLITIQNK

SEQ ID NO: 2891 - protein, 369 aa, unidentified
MEKAYKFRMYPNKKQQELINKTFGCCRFVYNKYLAKRIEVYKNAKETFTYKQCSSDLTNLKKELNWLKEPDKFSLQNALKDLDNAYKKFFKEKAGFPKFKSKKINRFSYKTNFTNGNIMYCGQHIKLPKLDMVKIRDKQVPKGRILNATISKEPSGRYYVSLCCTDVDIEAFENTNNQIGLDLGIKEFCISSCGEFIENPKYLKKSLNKLAKLQRELSRKTIGSLNRNKARLKVARLQEHIANQRNDFLQKLSTKLIKDNDIICIEDLQVKNMIRNRKLSRLISDVSWSEFIRQLEYKANWYGRQIVKVGKFFASSQICNKCGYKNEEVKDLNIREWICPSCNETHDRDINASINILKEGLRLITIQNK

SEQ ID NO: 2892 - protein, 369 aa, unidentified
MKKAYKFRMYPNKKQQELINKTFGCCRFVYNKYLAKRIEVYKNDKETFTYKQCSSDLTNLKKELKWLKEPDKFSLQNALKDLDNAYKKFFKEKAGFPKFKSKKINRFSYKTNFTNGNIVYCGQHIKLPKLGMVKVRDKQVPKGRILNATISKEPSGRYYVSLCCTDVDIEAFENTNNQIGLDLGIKEFCISSCGEFIENPKYLKKSLNKLAKLQRELSRKTIGSLNRNKARLKVARLQEHIANQRNDFLQKLSTKLIKENDIICIEDLQVKNMIRNRKLSRLISDVSWSEFIRQLEYKANWYGRQIVKVGKFFASSQICNKCGYKNEEVKDLNIREWICPSCNETHDRDINASINILKEGLRLITIQNK

SEQ ID NO: 2893 - protein, 369 aa, unidentified
MEKAYKFRMYPNKKQQELINKTFGCCRFVYNKYLAKRIDVYKNNKETFTYKQCSSDLNNLKKELKWLKEPDKFSLQNALKDLDNAYKKFFKEKVGFPKFKSKKINRFSYKTNFTNGNIMYCGQHIKLPKLGMVKIRDKQVPKGRILNATISKEPSGRYYVSLCCTDVDIEAFENTNNHIGLDLGIKEFCISSCGEFIENPKYLKKSLNKLAKLQRELSRKTIGSLNRNKARLKVARLQEHIANQRNDFLQKLSTKLIKENDIICIEDLQVKNMIKNRRLSRLISDVSWSEFVRQLEYKANWYGRKIVKVGKFFASSQICNKCGYKNEEVKDLNIREWICPSCNETHNRDINASINILKEGLRLITIQNK

SEQ ID NO: 2894 - protein, 372 aa, unidentified
MVVVEKAYKFRMYPNKKQQELINKTFGCCRFVYNKYLAKRIEVYKNAKETFTYKQCSSDLTNLKKELKWLKEPDKFSLQNALRDLDNAYKKFFKEKAGFPKFKSKKINRFSYKTNFTNGNIMYCGQHIKLPKLGMVKIRDKQVPKGRILNATISKEPSGRYYVSLCCTDVDIEAFENTNNHIGLDLGIKEFCISSCGDFIENPKYLKKSLNKLAKLQRELSRKTIGSLNRNKARLKVARLQEHIANQRNDFLQKLSTKLIKENDIICIEDLQVKNMIRNRKLSRLISDVSWSEFIRQLEYKANWYGRQIVKVGKFFASSQICNKCGYKNEEVKNLNIREWICPSCNETHDRDINASINILKEGLRLITIQNK

SEQ ID NO: 2895 - protein, 372 aa, unidentified
MIVVEKAYKFRMYPNKKQQELINKTFGCCRFVYNKYLAKRIEVYKNAKETFTYKQCSSDLTNLKKELNWLKEPDKFSLQNALKDLDNAYKKFFKEKAGFPKFKSKKINRFSYKTNFTNGNIMYCGQHIKLPKLDMVKIRDKQVPKGRILNATISKEPSGRYYVSLCCTDVDIEAFENTNNQIGLDLGIKEFCISSCGEFIENPKYLKKSLNKLAKLQRELSRKTIGSLNRNKARLKVARLQEHIANQRNDFLQKLSTKLIKDNDIICIEDLQVKNMIRNRKLSRLISDVSWSEFIRQLEYKANWYGRQIVKVGKFFASSQICNKCGYKNEEVKDLNIREWICPSCNETHDRDINASINILKEGLRLITIQNK

SEQ ID NO: 2896 - protein, 372 aa, unidentified
MIVVEKAYKFRIYPNKKQQELINKTFGCCRFVYNKYLAKRIDVYKSDKETFTYKQCSSDLTNLKKELKWLKEPDKFSLQNALKDLDNAYKKFFKEKAGFPKFKSKKINRFSYKTNFTNGNIMYCGQHIKLPKLGMVKVRDKQIPQGRILNATISKEPSGRYYVSLCCTDVDIEVFENTNNQIGLDLGIKEFCISSCGEFIENPKYLKRSLNKLAKLQRELSRKTIGSLNRNKARLKVAGLQEHIANQRNDFLQKLSTKLIKENDIICIEDLQVKNMIKNRKLSRLISDVSWSEFVRQLEYKANWHGRQIVKVGKFFASSQICNKCGYKNEEVKNLNIREWICPSCNETHDRDINASINILKEGLRLITIQNK

SEQ ID NO: 2897 - protein, 369 aa, unidentified
MEKAYKFRMYPNKKQQELINKTFGCCRFVYNKYLAKRIDVYKNNKETFTYKQCSSDLTNLKKELKWLKEPDKFSLQNALKDLDNAYKKFFKEKTGFPKFKSKKINRFSYKTNFTNGNIMYCGQHIKLPKLGMVKIRDKQVPQGRILNATISKEPSGRYYVSLCCTDVDIEAFENTNNHIGLDLGIKEFCISSCGEFIENPKYLKKSLNKLAKLQRELSRKTIGSLNRNKARLKVARLQEHIANQRKDFLQKLSTKLIKENDIICIEDLQVKNMIKNHKLSRSISDVSWSEFIRQLEYKANWHGRQIVKVGKFFASSQICNKCGYKNEEVKNLNIREWICPSCNETHDRDINASINILKEGLRLITIQNK

SEQ ID NO: 2898 - protein, 372 aa, unidentified
MIAVKKAYKFRMYPNKKQQELINKTFGCCRFVYNKYLAKRIDVYKNDKETFTYKQCSSDLTNLKKELNWLKEPDKFSLQNALKDLDNAYKKFFKEKAGFPKFKSKKINRFSYKTNFTNGNIMYCGQHIKLPKLGMVKVRDKQVPKGRILNATISKEPSGRYYVSLCCTDVDIEAFENTNNHIGLDLGIKEFCISSCGEFIENPKYLKKSLNKLAKLQRELSRKTIGSLNRNKARLKVARLQEHIANQRNDFLQKLSTKLIKENDIICIEDLQVKNMIRNRKLSRLISDVSWSEFIRQLEYKANWYGRQIVKVGKFFASSQICNKCGYKNEEVKDLNIREWICPSCNETHDRDINASINILKEGLRLITIQNK

SEQ ID NO: 2899 - protein, 372 aa, unidentified
MIAVKKAYKFRMYPNKKQQELINKTFGCCRFVYNKYLAKRIDVYKNDKETFTYKQCSSDLTNLKKELKWLKEPDKFSLQNALKDLDNAYKKFFKEKAGFPKFKSKKINRFSYKTNFTNGNIMYFSQHIKLPKLGMVKIRDKQVPQGRILNATISKEPSGRYYVSLCCTDVDIEAFENTNNQIGLDLGIKEFCISSCGEFIENPKYLKKSLNKLAKLQRELSRKTIGSLNRNKARLKVARFQEHIANQRNDFLQKLSTKLIKENDIICIEDLQVKNMIRNRKLSRLISDVSWSEFIRQLEYKANWYGRQIVKVGKFFASSQICNKCGYKNEEVKDLNIREWICPSCNETHDRDINASINILKEGLRLITIQNK

SEQ ID NO: 2900 - protein, 372 aa, unidentified
MIVVEKAYKFRMYPNKKQQELINKTFGCCRFVYNKYLAKRIDVYKNDKETFTYKQCSSDLTNLKKELKWLKEPDKFSLQNALKDLDNAYKKFFKKKAGFPKFKSKKINRFSYKTNFTNGNIVYCGQHIKLPKLGMVKIRDKQVPQGRILNATISKEPSGRYYVSLCCTDVDIEVFENTNNQIGLDLGIKEFCISSCGDFIENPKYLKKSLNKLAKLQRELSRKTIGSLNRNKARLKVARLQEHIANQRNDFLQKLSTKLIKENDIICIEDLQVKNMIRNRKLSRLISDVSWSEFIRQLEYKANWHGRQIVKVGKFFASSQICNKCGYKNEEVKDLNIREWICPSCNETHDRDINASINILKEGLRLITIQNK

SEQ ID NO: 2901 - protein, 372 aa, unidentified
MIAVKKAYKFRLYPNKKQQELINKTFGCCRFVYNKYLAKRIDVYKNNKETFTYKQCSSDLTNLKKELKWLKEPDKFSLQNALKDLDNAYKKFFKEKAGFPKFKSKKINRFSYKTNFTNGNIMYCGQHIKLPKLGMVKVRDKQVPQGRILNATISKEPSGRYYVSLCCTDVDIEAFENTNNHIGLDLGIKEFCISSCGEFIENPKYLKKSLNKLAKLQRELSRKTIGSLNRNKARLKVARLQEHIANQRNDFLQKLSTKLIKENDIICIEDLQVKNMIRNRKLSRLISDVSWSEFIRQLEYKANWHGRQIVKVGKFFASSQICNKCGYKNEEVKDLNIREWICPSCNETHDRDINASINILKEGLRLITIQNK

SEQ ID NO: 2902 - protein, 372 aa, unidentified
MIAVKKAYKFRMYPNKKQQELINKTFGCCRFVYNKYLAKRIDVYKSDKETFTYKQCSSDLTNLKKELKWLKEPDKFSLQNALKDLDNAYEKFFKKKAGFPKFKSKKINRFSYKTNFTNGNIMYFSQHIKLPKLGMVKVRDKQVPKGRILNATISKEPSGRYYVSLCCTDVDIEAFENTNNQIGLDLGIKEFCISSCGEFIENPKYLKKSLNKLAKLQRELSRKTIGSLNRNKARLKVARLQEHIANQRKDFLQKLSTKLIKENDIICIEDLQVKNMIKNRKLSSLISDVSWSEFIRQLEYKANWYGRQIVKVGKFFASSQICNKCGYKNDEVKNLNIREWICPSCNETHDRDINASINILKEGLRLITIQNK

SEQ ID NO: 2903 - protein, 372 aa, unidentified
MIAVEKAYKFRMYPNKKQQELINKTFGCCRFVYNKYLAKRIEVYKNDKETFTYKQCSSDLTNLKKELNWLKEPDKFSLQNALKDLENAYEKFFKEKAGFPKFKSKKTNRFSYKTNFTNGNIMYCGQHIKLPKLGMVKIRDKQVPKGRILNATISKEPSGRYYVSLCCTDVDIEAFENTNNQIGLDLGIKEFCISSCGEFIENPKYLKKSLNKLAKLQRELSRKTIGSLNRNKARLKVARLQEHIANQRNDFLQKLSTKLIKENDIICIEDLQVKNMIRNHKLSRLISDVSWSEFIRQLEYKANWYGRQIVKVGKFFASSQICNKCGYKNEEVKDLNIRDWICPSCNETHDRDINASINILKEGLRLITIQNK

SEQ ID NO: 2904 - protein, 372 aa, unidentified
MIAVEKAYKFRMYPNKKQQELINKTFGCCRFVYNKYLAKRIEVYKNDKETFTYKQCSSDLTNLKKELKWLKEPDKFSLQNALKDLDNAYKKFFKKKAGFPKFKSKKINRFSYKTNFTNGNIVYCGQHIKLPKLGMVKVRDKQVPKGRILNATISKEPSGRYYVSLCCTDVDIEAFENTNNHIGLDLGIKEFCISSCGEFIENPKYLKKSLNKLAKLQRELSRKTIGSLNRNKARLKVARLQEHIANQRKDFLQKLSTKLIKENDIICIEDLQVKNMIRNRKLSRSISDVSWSEFIRQLEYKANWYGRKIVKVGKFFASSQICNKCGYKNEEVKDLNIREWICPSCNETHDRDINASINILKEGLRLITIQNK

SEQ ID NO: 2905 - protein, 372 aa, unidentified
MIAVKKAYKFRMYPNKKQQELINKTFGCCRFVYNKYLAKRIEVYKNDKETFTYKQCSSDLTNLKKELNWLKEPDKFSLQNALKDLDNAYKKFFKEKAGFPKFKSKKINRFSYKTNFTNGNIMYCGQYIKLPKLGMVKIRDKQVPQGRILNATISKEPSGRYYVSLCCTDVDIEAFENTNNHIGLDLGIKEFCISSCGEFIENPKYLKKSLNKLAKLQRELSRKTIGSLNRNKARLKVARLQEHIANQRNDFLQKLSTKLIKENDIICIEDLQVKNMIRNRKLSRLISDVSWSEFIRQLEYKANWHGRQIVKVGKFFASSQICNKCGYKNEEVKDLNIREWICPSCNETHDRDINASINILKEGLRIITIQNK

SEQ ID NO: 2906 - protein, 369 aa, unidentified
MEKAYKFRMYPNKKQQELINKTFGCCRFVYNKYLAKRIEVYKNDKETFTYKQCSSDLTNLKKELKWLKEPDKFSLQNALKDLDNAYKKFFKEKAGFPKFKSKKINRFSYKTNFTNGNIMYCGQHIKLPKLGMVKIRDKQVPKGRILNATISKEPSGRYYVSLCCTDVDIEAFENTNNQIGLDLGIKEFCISSCGEFIENPKYLKKSLSKLAKLQRELSRKTIGSLNRNKARLKVARLQEHIANQRNDFLQKLSTKLIKENDIICIEDLQVKNMIRNRKLSRLISDVSWSEFIRQLKYKANWHGRQIVKVGKFFASSQICNKCGYKNEEVKDLNIREWICPSCNETHDRDINASINILKEGLRLITIQNK

SEQ ID NO: 2907 - protein, 372 aa, unidentified
MIAVKKAYKFRMYPNKKQQELINKTFGCCRFVYNKYLAKRIEVYKNDKETFTYKQCSSDLTNLKKELNWLKEPDKFSLQNALKDLDNAYKKFFKKKAGFPKFKSKKINRFSYKTNFTNGNIVYCGQHIKLPKLGMVKIRDKQVPKGRILNATISKEPSGRYYVSLCCTDVDIEAFENTNNHIGLDLGIKEFCISSCGEFIENPKYLKKSLNKFAKLQRELSRKTIGSLNRNKARLKVARLQEHIANQRKDFLQKLSTKLIKENDIICIEDLQVKNMIRNRKLSRLISDVSWSEFIRQLEYKANWHGRQIVKVGKFFASSQICNKCGYKNEEVKDLNIREWICPSCNETHDRYINASINILKEGLRLITIQNK

SEQ ID NO: 2908 - protein, 372 aa, unidentified
MIAVKKAYKFRMYPNKKQQELINKTFGCCRFVYNKYLAKRIDVYKNDKETFTYKQCSSDLTNLKKELNWLKEPDKFSLQNALKDLDNAYKKFFKEKAGFPKFKSKKINRFSYKTNFTNGNIMYCGQHIKLPKLGMVKVRDKQVPKGRILNATISKEPSGRYYVSLCCTDVDIEAFENTNNHIGLDLGIKEFCISSCGEFIENPKYLKKSLNKLAKLQRELSRKTIGSLNRNKARLKVARLQEHIANQRNDFLQKLSTKLIKENDIICIEDLQVKNMIKNHKLSRLISDVSWSEFIRQLEYKANWHGRQIVKVGKFFASSQICNKCGYKNEEVKNLNIREWICPSCNETHDRDINASINILKEGLRLITIQNK

SEQ ID NO: 2909 - protein, 372 aa, unidentified
MVVVKKAYKFRMYPNKKQQELINKTFGCCRFVYNKYLAKRIDVYKNNKETFTYKQCSSDLTNLKKELNWLKEPDKFSLQNALKDLDNAYKKFFKEKAGFPKFKSKKINRFSYKTNFTNGNIMYCGQHIKLPKLGMVKVRDKQVPKGRILNATISKEPSGRYYVSLCCTDVDIEAFENTNNQIGLDLGIKEFCISSCGDFIENPKYLKKSLNKLAKLQRELSRKTIGSLNRNKARLKVARLQEHIANQRKDFLQKLSTKLIKENDIICIEDLQVKNMIKNHKLSRLISDVSWSEFIRQLEYKANWYGRQIVKVGKFFASSQICNKCGYKNEEVKDLNIREWICPSCNETHDRDINAGMNILKEGLRLITIQNK

SEQ ID NO: 2910 - protein, 372 aa, unidentified
MIVVEKAYKFRMYPNKKQQELINKTFGCCRFVYNKYLAKRIEVYKNDKETFTYKQCSSDLTNLKKELKWLKEPDKFSLQNALKDLDNAYKKFFKEKVGFPKFKSKKINRFSYKTNFTNGNIMYLGQHIKLPKLGMIKIRDKQVPQGRILNATISKEPSGRYYVSLCCTDVDIEAFENTNNQIGLDLGIKEFCISSCGEFIENPKYLKKSLNKLAKLQRELSRKTIGSLNRNKARLKVARLQEHIANQRKDFLQKLSTKLIKENDIICIEDLQVKNMIRNRKLSRLISDVSWSEFIRQLEYKANWHGRQIVKVGKFFASSQICNKCGYKNEEVKNLNIREWICPSCNETHNRDINASINILKEGLRLITIQNK

SEQ ID NO: 2911 - protein, 372 aa, unidentified
MVVVEKAYKFRMYPNKKQQELINKTFGCCRFVYNKYLAKRIEVYKNDKETFTYKQCSSDLTNLKKELKWLKEPDKFSLQNALKDLDNAYEKFFKEKAGFPKFKSKKINRFSYKTNFTNGNIMYFSQHIKLPKLGMVKIRDKQVPKGRILNATISKEPSGRYYVSLCCTDVDIEAFENTNNQIGLDLGIKEFCISSCGDFIENPKYLKKSLNKLAKLQRELSRKTIGSLNRNKARLKVARLQEHIANQRNDFLQKLSTKLIKENDIICIEDLQVKNMIRNRKLSRLISDVPWSEFIRQLEYKANWYGRQIVKVGKFFASSQICNKCGYKNEEVKNLNIREWICPSCNETHDRDINASINILKEGLRLITIQNK

SEQ ID NO: 2912 - protein, 372 aa, unidentified
MVVVEKAYKFRMYPNKKQQELINKTFGCCRFVYNKYLAKRIEVYKNDKETFTYKQCSSDLTNLKKELNWLKEPDKFSLQNALKDLDNAYEKFFKKKAGFPKFKSKKINRFSYKTNFTNGNIMYCGQHIKLPKLGMVKIRDKQVPKGRILNATISKEPSGRYYVSLCCTDVDIEVFENTNNQIGLDLGIKEFCISSCGDFIENPKYLKKSLNKLAKLQRELSRKTIGSLNRNKARLKVARLQEHIANQRNDFLQKLSTKLIKENDIICIEDLQVKNMIRNHKLSRLISDVSWSEFIRQLEYKANWYGRQIVKVGKFFASSQICNKCGYKNEEVKNLNIREWICPSCNETHDRDINASINILKEGLRLITIQNK

SEQ ID NO: 2913 - protein, 372 aa, unidentified
MIAVKKAYKFRIYPNKKQQELINKTFGCCRFVYNKYLAKRIDVYKNDKETFTYKQCSSDLTNLKKELNWLKEPDKFSLQNALKDLDNAYKKFFKEKAGFPKFKSKKINRFSYKTNFTNGNIMYCGQHIKLPKLGMVKVRDKQVPKGRILNATISKEPSGRYYVSLCCTDVDIEAFENTNNHIGLDLGIKEFCISSCGEFIENPKYLKKSLNKLAKLQRELSRKTIGSLNRNKARLKVARLQEHIANQRNDFLQKLSTKLIKENDIICIEDLQVKNMIKNHKLSRLISDVSWSEFIRQLEYKANWHGRQIVKVGKFFASSQICNKCGYKNEEVKNLNIREWICPSCNETHDRDINASINILKEGLRLITIQNK

SEQ ID NO: 2914 - protein, 372 aa, unidentified
MIAVKKAYKFRMYPNKKQQELINKTFGCCRFVYNKYLAKRIEVYKNDKETFTYKQCSSDLTNLKKELNWLKEPDKFSLQNALKDLDNAYKKFFKEKAGFPKFKSKKINRFSYKTNFTNGNIMYCGQYIKLPKLGMVKIRDKQVPQGRILNATISKEPSGRYYVSLCCTDVDIEAFENTNNHIGLDLGIKEFCISSCGEFIENPKYLKKSLNKLAKLQRELSRKTIGSLNRNKARLKVARLQEHIANQRNDFLQKLSTKLIKENDIICIEDLQVKNMIKNRKLSRSISDVSWSEFIRQLEYKANWHGRQIVKVGKFFASSQICNKCGYKNEEVKDLNIREWICPSCNETHDRDINASINILKEGLRLITIQNK

SEQ ID NO: 2915 - protein, 372 aa, unidentified
MIAVKKAYKFRIYPNKKQQELINKTFGCCRFVYNKYLAKRIDVYKNDKETFTYKQCSSDLTNLKKELNWLKEPDKFSLQNALKDLDNAYKKFFKEKAGFPKFKSKKINRFSYKTNFTNGNIMYCGQHIKLPKLGMVKVRDKQVPKGRILNATISKEPSGRYYVSLCCTDVDIEAFENTNNHIGLDLGIKEFCISSCGEFIENPKYLKKSLNKLAKLQRELSRKTIGSLNRNKARLKVARLQEHIANQRNDFLQKLSTKLIKENDIICIEDLQVKNMIKNHKLSRLISDVSWSEFIRQLEYKANWYGRQIVKVGKFFASSQICNKCGYKNEEVKDLNIREWICPSCNETHDRDINASINILKEGLRLITIQNK

SEQ ID NO: 2916 - protein, 369 aa, unidentified
MEKAYKFRMYPNKKQQELINKTFGCCRFVYNKYLAKRIDVYKNNKETFTYKQCSSDLTNLKKELKWLKEPDKFSLQNALKDLDNAYKKFFKEKVGFPKFKSKKINRFSYKTNFTNGNIMYCGQHIKLPKLGMVKVRDKQVPKGRILNATISKEPSGRYYVSLCCTDVDIEVFENTNNQIGLDLGIKEFCISSCGEFIENPKYLKKSLNKLAKLQRELSRKTIGSLNRNKARLKVARLQEHIANQRKDFLQKLSTKLIKENDIICIEDLQVKNMIKNHKLSRLISDVSWSEFIRQLEYKANWYGRKIVKVGKFFASSQICNKCGYKNEEVKDLNIREWICPSCNETHDRDINASINILKEGLRLITIQNK

SEQ ID NO: 2917 - protein, 372 aa, unidentified
MIVVEKAYKFRMYPNKKQQELINKTFGCCRFVYNKYLAKRIDVYKNDKETFTYKQCSSDLTNLKKELKWLKEPDKFSLQNALKDLDNAYKKFFKEKAGFPKFKSKKINRFSYKTNFTNGNIMYCGQHIKLPKLGMVKIRDKQVPQGRILNATISKEPSGRYYVSLCCTDVDIEAFENTNNQIGLDLGIKEFCISSCGEFIENPKYLKKSLNKLAKLQRELSRKTIGSLNRNKARLKVARLQEHIANQRNDFLQKLSTKLIKENDIICIEDLQVKNMIRNRKLSRLISDVSWSEFIRQLEYKANWYGRQIVKVGKFFASSQICNKCGYKNEEVKDLNIREWICPSCNETHDRDINASINILKEGLRLITIQNK

SEQ ID NO: 2918 - protein, 372 aa, unidentified
MIAVKKAYKFRMYPNKKQQELINKTFGCCRFVYNKYLAKRIDVYKNDKETFTYKQCSSDLTNLKKELKWLKEPDKFSLQNALKDLDNAYKKFFKEKAGFPKFKSKKINRFSYKTNFTNGNIMYCGQHIKLPKLGMVKIRDKQVPQGRILNATISKEPSGRYYVSLCCTDVDIEAFENTNNHIGLDLGIKEFCISSCGEFIENPKYLKKSLNKLAKLQRELSRKTIGSLNRNKARLKVARLQEHIANQRNDFLQKLSTKLIKENDIICIEDLQVKNMIRNRKLSRLISDVSWSEFIRQLEYKANWHGRQIVKVGKFFASSQICNKCGYKNEEVKDLNIREWICPSCNETHDRDINASINILKEGLRLITIQNK

SEQ ID NO: 2919 - protein, 372 aa, unidentified
MIAVKKAYKFRMYPNKKQQELINKTFGCCRFVYNKYLAKRIDVYKNDKETFTYKQCSSDLTNLKKELKWLKEPDKFSLQNALKDLDNAYKKFFKEKAGFPKFKSKKINRFSYKTNFTNGNIMYCGQHIKLPKLGMVKIRDKQVPQGRILNATISKEPSGRYYVSLCCTDVDIEAFENTNNHIGLDLGIKEFCISSCGDFIENPKYLKKSLNKLAKLQRELSRKTIGSLNRNKARLKVARLQEHIANQRNDFLQKLSTKLIKENDIICIEDLQVKNMIRNRKLSRLISDVSWSEFIRQLEYKANWHGRQIVKVGKFFASSQICNKCGYKNEEVKDLNIREWICPSCNETHDRDINASINILKEGLRLITIQNK

SEQ ID NO: 2920 - protein, 372 aa, unidentified
MIAVKKAYKFRIYPNKKQQELINKTFGCCRFVYNKYLAKRIDVYKNDKETFTYKQCSSDLTNLKKELNWLKEPDKFSLQNALKDLDNAYKKFFKEKAGFPKFKSKKINRFSYKTNFTNGNIMYCGQHIKLPKLGMVKVRDKQVPKGRILNATISKEPSGRYYVSLCCTDVDIEAFENTNNHIGLDLGIKEFCISSCGEFIENPKYLKKSLNKLAKLQRELSRKTIGSLNRNKARLKVARLQEHIANQRNDFLQKLSTKLIKENDIICIEDLQVKNMIKNHKLSRSISDVSWSEFIRQLEYKANWHGRQIVKVGKFFASSQICNKCGYKNEEVKDLNIREWIYPSCNETHDRDINASINILKEGLRLITIQNK

SEQ ID NO: 2921 - protein, 369 aa, unidentified
MEKAYKFRMYPNKKQQELINKTFGCCRFVYNKYLAKRIDVYKNNKETFTYKQCSSDLTNLKKELKWLKEPDKFSLQNALKDLDNAYKKFFKEKVGFPKFKSKKINRFSYKTNFTNGNIMYCGQHIKLPKLGMVKIRDKQVPKGRILNATISKEPSGRYYVSLCCTDVDIEAFENTNNHIGLDLGIKEFCISSCGEFIENPKYLKKSLNKLAKLQRELSRKTIGSLNRNKARLKVARLQEHIANQRNDFLQKLSTKLIKENDIICIEDLQVKNMIRNRKLSRSISDVSWSEFIRQLEYKANWHGRQIVKVGKFFASSQICNKCGYKNEEVKNLNIREWICPSCNETHDRDINASINILKEGLRLITIQNK

SEQ ID NO: 2922 - protein, 369 aa, unidentified
MEKAYKFRMYPNKKQQELINKTFGCCRFVYNKYLAKRIEVYKNDKETFTYKQCSSDLTNLKKELKWLKEPDKFLLQNALKDLDNAYKKFFKEKAGFPKFKSKKINRFSYKTNFTNGNIMYFSQHIKLPKLGMVKIRDKQVPKGRILNATISKEPSGRYYVSLCCTDVDIEVFENTNNQIGLDLGIKEFCISSCGDFIENHKYLKKSLNKLAKLQRELSRKTIGSLNRNKARLKVARLQEHIANQRKDFLQKLSTKLIKENDIICIEDLQVKNMIRNRKLSRLISDVSWSEFIRQLEYKANWHGRQIVKVGKFFESSQICNKCGYKNEEVKDLNIREWICPSCNETHDRDINASINILKEGLRLITIQNK

SEQ ID NO: 2923 - protein, 369 aa, unidentified
MKKAYKFRMYPNKKQQELINKTFGCCRFVYNKYLAKRIDVYKNNKETFTYKQCSSDLTNLKKELNWLKEPDKFSLQNALKDLDNAYKKFFKEKAGFPKFKSKKINRFSYKTNFTNGNIMYCGQHIKLPKLGMVKVRDKQVPKGRILNATISKEPSGRYYVSLCCTDVDIEAFENTNNQIGLDLGIKEFCISSCGDFIENPKYLKKSLNKLAKLQRELSRKTIGSLNRNKARLKVARLQEHIANQRKDFLQKLSTKLIKENDIICIEDLQVKNMIKNHKLSRLISDVSWSEFIRQLEYKANWYGRQIVKVGKFFASSQICNKCGYKNEEVKDLNIREWICPSCNETHDRDINAGMNILKEGLRLITIQNK

SEQ ID NO: 2924 - protein, 369 aa, unidentified
MEKAYKFRMYPNKKQQELINKTFGCCRFVYNKYLAKRIEVYKNDKETFTYKQCSSDLTNLKKELKWLKEPDKFSLQNALKDLDNAYKKFFKEKVGFPKFKSKKINRFSYKTNFTNGNIMYLGQHIKLPKLGMIKIRDKQVPQGRILNATISKEPSGRYYVSLCCTDVDIEAFENTNNQIGLDLGIKEFCISSCGEFIENPKYLKKSLNKLAKLQRELSRKTIGSLNRNKARLKVARLQEHIANQRKDFLQKLSTKLIKENDIICIEDLQVKNMIRNRKLSRLISDVSWSEFIRQLEYKANWHGRQIVKVGKFFASSQICNKCGYKNEEVKNLNIREWICPSCNETHNRDINASINILKEGLRLITIQNK

SEQ ID NO: 2925 - protein, 369 aa, unidentified
MKKAYKFRMYPNKKQQELINKTFGCCRFVYNKYLAKRIEVYKNDKETFTYKQCSSDLTNLKKELKWLKEPDKFSLQNALKDLENAYEKFFKEKTGFPKFKSKKTNRFSYKTNFTNGNIMYFGQHIKLPKLGMVKIRDKQVPQGRILNATISKEPSGRYYVSLCCTDVDIEAFENTNNQIGLDLGIKEFCISSCGDFIENPKYLKKSLNKLAKLQRELSRKTIGSLNRNKARLKVARLQEHIANQRKDFLQKLSTKLIKENDIICIEDLQVKNMIGNHKLSRLISDVSWSEFVRQLKYKANWHGRQIVKVGKFFASSQICNKCGYKNEEVKNLNIREWICPSCNETHDRDINASMNILKEGLRLITIQNK

SEQ ID NO: 2926 - protein, 369 aa, unidentified
MKKAYKFRMYPNKKQQELINKTFGCCRFVYNKYLAKRIDFYKNDKETFTYKQCSSDLTNLKKELKWLKEPDKFSLQNALKDLENAYNKFFKEKTGFPKFKSKKTNRFSYKTNFTNGNIMYCGQHIKLPKLGMVKIRDKQVPQGRILNATISKEPSGRYYVSLCCTDVDIEAFENTNNQIGLDLGIKEFCISSCGDFIENPKYLKKSLNKLAKLQRELSRKTIGSLNRNKARLKVARLQEHIANQRKDFLQKLSTKLIKENDIICIEDLQVKNMIRNSKLSRLISDVSWSEFIRQLEYKANWHGRQIVKVSKFFASSQICNKCGYKNEEVKNLNIREWICPSCNETHDRDINASINILKEGLRLITIQNK

SEQ ID NO: 2927 - protein, 369 aa, unidentified
MEKAYKFRMYPNKKQQELINKTFGCCRFVYNKYLAKRIDVYKNDKETFTYKQCSSDLTNLKKELKWLKEPDKFSLQNALKDLENAYEKFFKEKAGFPKFKSKKINRFSYKTNFTNGNIMYFGQHIKLPKLGMVKIRDKQVPQGRILNATISKEPSGRYYVSLCCTDVDIEAFENTNNQIGLDLGIKEFCISSCGEFIENPKYLKKSLNKLAKLQRELSRKTIGSLNRNKARLKVARLQEHIANQRKDFLQKLSTKLIKENDIICIEDLQVKNMIRNRKLSRLISDVSWSEFVRQLEYKANWHGRQIVKVGKFFASSQICNKCGYKNEEVKNLNIREWICPSCNETHDRDINASMNILKEGLRLITIQNK

SEQ ID NO: 2928 - protein, 369 aa, unidentified
MKKAYKFRMYPNKKQQELINKTFGCCRFVYNKYLAKRIDVYKNNKETFTYKQCSSDLTNLKKELKWLKEPDKFSLQNALKDLDNAYKKFFKEKAGFPKFKSKKINRFSYKTNFTNGNIMYCGQHIKLPKLGMVKVRDKQVPQGRILNATISKEPSGRYYVSLCCTDVDIEAFENTNNHIGLDLGIKEFCISSCGEFIENPKYLKKSLNKLAKLQRELSRKTIGSLNRNKARLKVARLQEHIANQRNDFLQKLSTKLIKENDIICIEDLQVKNMIRNRKLSRLISDVSWSEFIRQLEYKANWHGRQIVKVGKFFASSQICNKCGYKNEEVKDLNIREWICPSCNETHDRDINASINILKEGLRLITIQNK

SEQ ID NO: 2929 - protein, 369 aa, unidentified
MEKAYKFRMYPNKKQQELINKTFGCCRFVYNKYLAKRIEVYKNDKETFTYKQCSSDLTNLKKELNWLKEPDKFSLQNALKDLDNAYKKFFKEKAGFPKFKSKKINRFSYKTNFTNGNIMYCGQHIKLPKLGMVKVRDKQVPKGRILNATISKEPSGRYYVSLCCTDVDIEAFENTNNHIGLDLGIKEFCISSCGEFIENPKYLKKSLNKLAKLQRELSRKTIGSLNRNKARLKVARLQEHIANQRNDFLQKLSTKLIKENDIICIEDLQVKNMIKNHKLSRLISDVSWSEFIRQLEYKANWHGRQIVKVGKFFASSQICNKCGYKNEEVKNLNIREWICPSCNETHDRDINASINILKEGLRLITIQNK

SEQ ID NO: 2930 - protein, 372 aa, unidentified
MAVVEKAYKFRMYPNKKQQELINKTFGCCRFVYNKYLAKRIEVYKNNKETFTYKQCSSDLTNLKKELKWLKEPDKFSLQNALKDLDNAYKKFFKEKAGFPKFKSKKINRFSYKTNFTNGNIMYCGQYIKLPKLGMVKVRDKQVPQGRILNATISKEPSGRYYVSLCCTNVDIEVFENTNNQIGLDLGIKEFCISSCGDFIENPKYLKKSLNKLAKLQRELSRKTIGSLNRNKARLKVARLQEHIANQRNDFLQKLSTKLIKENDIICIEDLQVKNMIRNRKLSRLISDVSWSEFVRQLKYKANWHGRQIVKVGKFFASSQICNKCGYKNEEMKDLNIREWICPSCNETHDRDINASINILKEGLRLITIQNK

SEQ ID NO: 2931 - protein, 372 aa, unidentified
MIAVKKAYKFRMYPNKKQQELINKTFGCCRFVYNKYLAKRIDVYKNDKETFTYKQCSSDLTNLKKELKWLKEPDKFSLQNALKDLDNAYKKFFKEKAGFPKFKSKKINRFSYKTNFTNGNIMYCGQHIKLPKLGMVKIRDKQVPKGRILNATISKEPSGRYYVSLCCIDVDIEVFENTNNHIGLDLGIKEFCISSCGEFIENPKYLKKSLNKLAKLQRELSRKTIGSLNRNKARLKVARLQEHIANQRNDFLQKLSTKLIKENDIICIEDLQVKNMIRNRKLSRLISDVSWSEFIRQLEYKANWYGRQIVKVGKFFASSQICNKCGYKNEEVKNLNIREWICPSCNETHDRDINASINILKEGLRLITIQNK

SEQ ID NO: 2932 - protein, 372 aa, unidentified
MIVVEKAYKFRMYPNKKQQELINKTFGCCRFVYNKYLAKRIEVYKNDKETFTYKQCSSDLTNLKKELKWLKEPDKFLLQNALKDLDNAYKKFFKEKAGFPKFKSKKINRFSYKTNFTNGNIMYFSQHIKLPKLGMVKIRDKQVPKGRILNATISKEPSGRYYVSLCCTDVDIEVFENTNNQIGLDLGIKEFCISSCGDFIENHKYLKKSLNKLAKLQRELSRKTIGSLNRNKARLKVARLQEHIANQRKDFLQKLSTKLIKENDIICIEDLQVKNMIRNRKLSRLISDVSWSEFIRQLEYKANWHGRQIVKVGKFFESSQICNKCGYKNEEVKDLNIREWICPSCNETHDRDINASINILKEGLRLITIQNK

SEQ ID NO: 2933 - protein, 372 aa, unidentified
MVVVEKAYKFRMYPNKKQQELINKTFGCCRFVYNKYLAKRIDVYKNNKETFTYKQCSSDLTNLKKELKWLKEPDKFSLQNALKDLDNAYKKFFKEKVGFPKFKSKKINRFSYKTNFTNGNIMYCGQHIKLPKLGMVKIRDKQVPKGRILNATISKEPSGRYYVSLCCTDVDIEAFENTNNHIGLDLGIKEFCISSCGEFIENPKYLKKSLNKLAKLQRELSRKTIGSLSRNKARLKVARLQEHIANQRNDFLQKLSTKLIKENDIICIEDLQVKNMIRNRKLSRSISDVSWSEFIRQLEYKANWYGRKIVKVGKFFASSQICNKCGYKNEEVKDLNIREWICPSCNETHDRDINASINILKEGLRLITIQNK

SEQ ID NO: 2934 - protein, 372 aa, unidentified
MIVVEKAYKFRMYPNKKQQELINKTFGCCRFVYNKYLAKRIEVYKNDKETFTYKQCSSDLTNLKKELNWLKEPDKFSLQNALKDLDNAYKKFFKKKAGFPKFKSKKINRFSYKTNFTNGNIVYCGQHIKLPKLGMVKIRDKQVPKGRILNATISKEPSGRYYVSLCCTDVDIEAFENTNNHIGLDLGIKEFCISSCGEFIENPKYLKKSLNKFAKLQRELSRKTIGSLNRNKARLKVARLQEHIANQRKDFLQKLSTKLIKENDIICIEDLQVKNMIRNRKLSRLISDVSWSEFIRQLEYKANWHGRQIVKVGKFFASSQICNKCGYKNEEVKDLNIREWICPSCNETHDRYINASINILKEGLRLITIQNK

SEQ ID NO: 2935 - protein, 372 aa, unidentified
MIAVKKAYKFRMYPNKKQQELINKTFGCCRFVYNKYLAKRIDVYKNDKETFTYKQCSSDLTNLKKELKWLKEPDKFSLQNALKDLDNAYKKFFKEKAGFPKFKSKKINRFSYKTNFTNGNIMYCGQHIKLPKLGMVKIRDKQVPQGRILNATISKEPSGRYYVSLCCTDVDIEAFENTNNHIGLDLGIKEFCISSCGEFIENPKYLKKSLNKLAKLQRELSRKTIGSLNRNKARLKVARLQEHIANQRNDFLQKLSTKLIKENDIICIEDLQVKNMIRNRKLSRLISDVSWSEFIRQLEYKANWHGRQIVKVGKFFASSQICNKCGYKNEEVKNLNIREWICPSCNETHDRDINASRNILKEGLRLITIQNK

SEQ ID NO: 2936 - protein, 372 aa, unidentified
MVVVEKAYKFRMYPNKKQQELINKTFGCCRFVYNKYLAKRIEVYKNDKETFTYKQCSSDLTNLKKELNWLKEPDKFSLQNALKDLDNAYKKFFKEKAGFPKFKSKKINRFSYKTNFTNGNIMYCGQHIKLPKLGMVKVRDKQVPKGRILNATISKEPSGRYYVSLCCTDVDIEAFENTNNHIGLDLGIKEFCISSCGEFIENPKYLKKSLNKLAKLQRELSRKTIGSLNRNKARLKVARLQEHIANQRNDFLQKLSTKLIKENDIICIEDLQVKNMIKNHKLSRLISDVSWSEFIRQLEYKANWHGRQIVKVGKFFASSQICNKCGYKNEEVKNLNIREWICPSCNETHDRDINASINILKEGLRLITIQNK

SEQ ID NO: 2937 - protein, 372 aa, unidentified
MVVVEKAYKFRMYPNKKQQELINKTFGCCRFVYNKYLAKRIDVYKNNKETFTYKQCSSDLTNLKKELKWLKEPDKFSLQNALKDLDNAYKKFFKEKVGFPKFKSKKINRFSYKTNFTNGSIMYCGQHIKLPKLGMVKIRDKQVPKGRILNATISKEPSGRYYVSLCCTDVDIEAFENTNNHIGLDLGIKEFCISSCGEFIENPKYLKKSLNKLAKLQRELSRKTIGSLNRNKARLKVARLQEHIANQRNDFLQKLSTKLIKENDIICIEDLQVKNMIKNHKLSRSISDVSWSEFIRQLEYKANWYGRKIVKVGKFFASSQICNKCGYKNEEVKDLNIREWICPSCNETHDRDINASINILKEGLRLITIQNK

SEQ ID NO: 2938 - protein, 372 aa, unidentified
MIVVEKAYKFRIYPNKKQQELINKTFGCCRFVYNKYLAKRIDVYKNNKETFTYKQCSSDLTNLKKELNWLKEPDKFSLQNALKDLDNAYKKFFKEKAGFPKFKSKKINRFSYKTNFTNGNIMYCGQHIKLPKLGMIKIRDKQVPKGRILNATISKEPSGRYYVSLCCTDVDIEAFENTNNHIGLDLGIKEFCISSCGEFIENPKYLKKSLKKLAKLQRELSRKTIGSLNRNKARLKVARLQEHIANQRNDFLQKLSTKLIKENDIICIEDLQVKNMIKNRKLSRLISDVSWSEFIRQLEYKANWYGRQIVKVGKFFASSQICNKCGYKNEEVKDLNIREWICPSCNETHDRDINASINILKEGLRLITIQNK

SEQ ID NO: 2939 - protein, 372 aa, unidentified
MVVVEKAYKFRMYPNKKQQELINKTFGCCRFVYNKYLAKRIDVYKNNKETFTYKQCSSDLTNLKKELKWLKEPDKFSLQNALKDLDNAYKKFFKEKVGFPKFKSKKINRFSYKTNFTNGNIMYCGQHIKLPKLGMVKIRDKQVPKGRILNATISKEPSGRYYVSLCCTDVDIEAFENTNNHIGLDLGIKEFCISSCGEFIENPKYLKKSLNKLAKLQRELSRKTIGSLNRNKARLKVARLQEHIANQRNDFLQKLSTKLIKENDIICIEDLQVKNMIRNRKLSRSISDVSWSEFIRQLEYKANWHGRQIVKVGKFFASSQICNKCGYKNEEVKNLNIREWICPSCNETHDRDINASINILKEGLRLITIQNK

SEQ ID NO: 2940 - protein, 369 aa, unidentified
MEKAYKFRMYPNKKQQELINKTFGCCRFVYNKYLAKRIDVYKNDKETFTYKQCSSDLTNLKKELKWLKEPDKFSLQNALKDLENAYEKFFKEKAGFPKFKSKKTNRFSYKTNFTNGNIMYCGQHIKLPKLGMVKIRDKQVPQGRILNATISKEPSGRYYVSLCCTDVDIEAFENTNNQIGLDLGIKEFCISSCGEFIENPKYLKKSLNKLAKLQRELSRKTIGSLNRNKARLKVARLQEHIANQRKDFLQKLSTKLIKENDIICIEDLQVKNMIRNRKLSRLISDVSWSEFIRQLEYKANWHGRKIVRVGKFFASSQICNKCGYKNEEVKNLNIREWICPSCNETHDRDINASMNILKEGLRLITIQNK

SEQ ID NO: 2941 - protein, 369 aa, unidentified
MEKAYKFRMYPNKKQQELINKTFGCCRFVYNKYLAKRIDVYKNDKETFTYKQCSSDLTNLKKELKWLKEPDKFSLQNALKDLENAYEKFFKEKAGFPKFKSKKINRFSYKTNFTNGNIMYCGQHIKLPKLGMVKIRDKQVPQGRILNATISKEPSGRYYVSLCCTDVDIEAFENTNNQIGLDLGIKEFCISSCGEFIENPKYLKKSLNKLAKLQRELSRKTIGSLNRNKARLKVARLQEHIANQRKDFLQKLSTKLIKENDIICIEDLQVKNMIRNRKLSRLISDVSWSEFVRQLEYKANWHGRQIVKVGKFFASSQICNKCGYKNEEVKNLNIREWICPSCNETHDRDINASMNILKEGLRLITIQNK

SEQ ID NO: 2942 - protein, 369 aa, unidentified
MEKAYKFRMYPNKKQQELINKTFGCCRFVYNKYLAKRIDVYKNNKETFTYKQCSSDLTNLKKELKWLKEPDKFSLQNALKDLDNAYKKFFKEKTGFPKFKSKKINRFSYKTNFTNGNIMYCGQHIKLPKLGMVKIRDKQVPQGRILNATISKEPSGRYYVSLCCTDVDIEAFENTNNHIGLDLGIKEFCISSCGEFIENPKYLKKSLNKLAKLQRELSRKTIGSLNRNKARLKVARLQEHIANQRNDFLQKLSTKLIKENDIICIEDLQVKNMIKNHKLSRSISDVSWSEFIRQLEYKANWHGRQIVKVGKFFASSQICNKCGYKNEEVKNLNIREWICPSCNETHDRDINASINILKEGLRLITIQNK

SEQ ID NO: 2943 - protein, 369 aa, unidentified
MEKAYKFRMYPNKKQQELINKTFGCCRFVYNKYLAKRIDVYKNNKETFTYKQCSSDLTNLKKELKWLKEPDKFSLQNALKDLDNAYKKFFKEKTGFPKFKSKKINRFSYKTNFTNGNIMYCGQHIKLPKLGMVKIRDKQVPKGRILNATISKEPSGRYYVSLCCTDVDIEAFENTNNHIGLDLGIKEFCISSCGEFIENPKYLKKSLNKLAKLQRELSRKTIGSLNRNKARLKVARLQEHIANQRNDFLQKLSTKLIKENDIICIEDLQVKNMIRNRKLSRSISDVSWSEFIRQLEYKANWYGRKIVKVGKFFASSQICNKCGYKNEEVKKLNIREWICPSCNETHDRDINASINILKEGLRLITIQNK

SEQ ID NO: 2944 - protein, 369 aa, unidentified
MEKAYKFRMYPNKKQQELINKTFGCCRFVYNKYLAKRIDVYKNDKETFTYKQCSSDLTNLKKELKWLKEPDKFSLQNALKDLDNAYKKFFKEKAGFPKFKSKKINRFSYKTNFTNGNIMYCGQHIKLPKLGMVKIRDKQVPQGRILNATISKEPSGRYYVSLCCTDVDIEAFENTNNHIGLDLGIKEFCISSCGEFIENPKYLKKSLNKLAKLQRELSRKTIGSLNRNKARLKVARLQEHIANQRNDFLQKLSTKLIKENDIICIEDLQVKNMIKNHKLSRLISDVSWSEFIRQLEYKANWHGRQIVKVGKFFASSQICNKCGYKNEEVKNLNIREWICPSCNETHDRDINASINILKEGLRLITTQNK

SEQ ID NO: 2945 - protein, 369 aa, unidentified
MEKAYKFRMYPNKKQQELINKTFGCCRFVYNKYLAKRIEVYKNDKETFTYKQCSSDLTNLKKELKWLKEPDKFSLQNALKDLDNAYKKFFKEKAGFPKFKSKKINRFSYKTNFTNGNIMYCGQHIKLPKLGMVKIRDKQVPQGRILNAAISKEPSGRYYVSLCCTDVDIEAFENTNNQIGLDLGIKEFCISSCGEFIENPKYLKKSLNKLAKLQRELSRKTIGSLNRNKARLKVARLQEHIANQRNDFLQKLSTKLIKENDIICIEDLQVKNMIRNSKLSRLISDVSWSEFIRQLEYKANWYGRQIVKVGKFFASSQICNKCGYKNEEVKDLNIREWICPSCNETHDRDINASINILKEGLRLITIQNK

SEQ ID NO: 2946 - protein, 369 aa, unidentified
MEKAYKFRMYPNKKQQELIDKTFGCCRFVYNKYLAKRIDVYKNDKETFTYKQCSSDLTNLKKELKWLKEPDKFSLQNALKDLENAYEKFFKEKTGFPKFKSKKTNRFSYKTNFTNGNIMYCGQHIKLPKLGMVKIRDKQVPQGRILNATISKEPSGRYYVSLCCTDVDIEAFENTNNQIGLDLGIKEFCISSCGDFIENPKYLKKSLNKLAKLQRELSRKTIGSLNRNKARLKVARLQEHIANQRKDFLQKLSTKLIKENDIICIEDLQVKNMIGNHKLSRLISDVSWSEFVRQLEYKANWHGRQIVKVGKFFASSQICNKCGYKNEEVKNLNIREWICPSCNETHDRDINASMNILKEGLRLITIQNK

SEQ ID NO: 2947 - protein, 299 aa, unidentified
MKKAYKFRLYPNKKQQELINKTFGCCRFVYNKYLAKRIDVYKNNKETFTYKQCSSDLTNLKKELKWLKEPDKFSLQNALKDLDNAYKKFFKEKAGFPKFKSKKINRFSYKTNFTNGNIMYCGQHIKLPKLGMVKIRDKQVPQGRILNATISKEPSGRYYVSLCCTDVDIEAFENTNNQIGLDLGIKEFCISSCGEFIENPKYLKKSLNKLAKLQRELSRKTIGSLNRNKARLKVARLQEHIANQRNDFLQKLSTKLIKENDIICIEDLQVKNMIKNHKLSRLISDVSWSEFIRQLXRVN

SEQ ID NO: 2948 - protein, 369 aa, unidentified
MEKAYKFRMYPNKKQQELINKTFGCCRFVYNKYLAKRIDVYKNDKETFTYKQCSSDLTNLKKELKWLKEPDKFSLQNALKDLDNAYKKFFKEKAGFPKFKSKKINRFSYKTNFTNGNIMYCGQHIKLPKLGMVKIRDKQVPKGRILNATISKEPSGRYYVSLCCTDVDIEVFENTNNQIGLDLGIKEFCISSCGEFIENPKYLKKSLNKLAKLQRELSRKTIGSLNRNKARLKVARLQEHIANQRNDFLQKLSTKLIKENDIICIEDLQVKNMIRNRKLSRLISDVSWSEFIRQLEYKANWHGRQIVKVGKFFASSQICNKCGYKNEEVKDLNIREWICPSCNETHDRDINASINILKEGLRLITIQNK

SEQ ID NO: 2949 - protein, 369 aa, unidentified
MEKAYKFRMYPNKKQQELINKTFGCCRFVYNKYLAKRIDVYKNDKETFTYKQCSSDLTNLKKELKWLKEPDKFSLQNALRDLDNAYKKFFKEKVGFPKFKSKKINRFSYKTNFTNGNIMYCGQHIKLPKLGMVKIRDKQVPQGRILNATISKEPSGRYYVSLCCTDVDIEAFENTNNQIGLDLGIKEFCISSCGEFIENPKYLKKSLNKLAKLQRELSRKTIGSLNRNKARLKVARLQEHIANQRNDFLQKLSTKLIKENDIICIEDLQVKNMIRNCKLSRLISDVSWSEFIRQLEYKANWHGRQIVKVGKFFASSQICNKCGYKNEEVKDLNIREWICPSCNETHDRDINASINILKEGLRLITIQNK

SEQ ID NO: 2950 - protein, 369 aa, unidentified
MEKAYKFRMYPNKKQQELINKTFGCCRFVYNKYLAKRIDVYKNDKETFTYKQCSSDLTNLKKELKWLKEPDKFSLQNALKDLDNAYKKFFKEKARFPKFKSKKINRFSYKTNFTNGNIMYCGQHIKLPKLGMVKIRDKQVPKGRILNATISKEPSGRYYVSLCCTDVDIKAFENTNNQIGLDLGIKEFCISSCGDFIENPKYLKKSLSKLAKLQRELSRKTIGSLNRNKARLKVARLQEHIANQRNDFLQKLSTKLIKENDIICIEDLQVKNMIRNRKLSRLISDVSWSEFIRQLEYKANWYGRQIVKVGKFFASSQICNKCGYKNEEVKNLNIREWICPSCNETHDRDINASINILKEGLRLITIQNK

SEQ ID NO: 2951 - protein, 369 aa, unidentified
MKKAYKFRLYPNKKQQELINKTFGCCRFVYNKYLAKRIDVYKNDKETFTYKQCSSDLTNLKKELKWLKEPDKFSLQNALKDLDNAYKKFFKEKAGFPKFKSKKINRFSYKTNFTNGNIMYCGQHIKLPKLGMVKIRDKQVPQGRILNATISKEPSGRYYVSLCCTDVDIEAFENTNNQIGLDLGIKEFCISSCGEFIENPKYLKKSLNKLAKLQRELSRKTIGSLNRNKARLKVARLQEHIANQRKDFLQKLSTKLIKENDIICIEDLQVKNMIKNHKLSRSISDVSWSEFIRQLEYKANWHGRQIVKVGKFFASSQICNKCGYKNEEVKNLNIREWICPSCNETHDRDINASINILKEGLRLITIQNK

SEQ ID NO: 2952 - protein, 369 aa, unidentified
MEKAYKFRMYPNKKQQELINKTFGCCRFVYNKYLAKRIDVYKNNKETFTYKQCSSDLTNLKKELKWLKEPDKFSLQNALKDLDNAYKKFFKEKTGFPKFKSKKINRFSYKTNFTNGNIMYCGQHIKLPKLGMVKIRDKQVPQGRILNATISKEPSGRYYVSLCCTDVDIGAFENTNNHIGLDLGIKEFCISSCGEFIENPKYLKKSLNKLAKLQRELSRKTIGSLNRNKARLKVARLQEHIANQRKDFLQKLSTKLIKENDIICIEDLQVKNMIKNHKLSRSISDVSWSEFIRQLEYKANWHGRQIVKVGKFFASSQICNKCGYKNEEVKDLNIREWICPSCNETHDRDINASINILKEGLRLITIQNK

SEQ ID NO: 2953 - protein, 369 aa, unidentified
MEKAYKFRMYPNKKQQELINKTFGCCRFVYNKYLAKRIEVYKNDKETFTYKQCSSDLTNLKKELKWLKEPDKFSLQNALKDLDNAYKKFFKEKAGFPKFKSKKINRFSYKTNFTNGNIMYCGQHIKLPKLGMVKVRDKQVPKGRILNATISKEPSGRYYVSLCCTDVDIEAFENTNNQIGLDLGIKEFCISSCGEFIENPKYLKKSLSKLAKLQRELSRKTIGSLNRNKARLKVARLQEHIANQRNDFLQKLSTKLIKENDIICIEDLQVKNMIRNRKLSRLISDVSWSEFIRQLKYKANWHGRQIVKVGKFFASSQICNKCGYKNEEVKDLNIREWICPSCNETHDRDINASINILKEGLRLITIQNK

SEQ ID NO: 2954 - protein, 369 aa, unidentified
MEKAYKFRMYPNKKQQELINKTFGCCRFVYNKYLAKRIDVYKNDKETFTYKQCSSDLTNLKKELKWLKEPDKFSLQNALKDLDNAYKKFFKEKTGFPKFKSKKINRFSYKTNFTNGNIMYCGQHIKLPKLGMVKIRDKQVPQGRILNATISKEPSGRYYVSLCCTDVDIEAFENTNNHIGLDLGIKEFCISSCGEFIENPKYLKKSLNKLAKLQRELSRKTIGSLNRNKARLKVARLQEHIANQRKDFLQKLSTKLIKENDIICIEDLQVKNMIKNHKLSRSISDVSWSEFIRQLEYKANWHGRQIVKVGKFFASSQICNKCGYKNEEVKNLNIREWICPSCNETHDRDINASINILKEGLRLITIQNK

SEQ ID NO: 2955 - protein, 369 aa, unidentified
MEKAYKFRMYPNKKQQELINKTFGCCRFVYNKYLAKRIEVYKNNKETFTYKQCSSDLTNLKKELKWLKEPDKFSLQNALKDLDNAYKKFFKEKAGFPKFKSKKINRFSYKTNFTNGNIMYCGQHIKLPKLGMVKIRDKQVPKGRILNATISKEPSGRYYVSLCCTDVDIEVFENTNNQIGLDLGIKEFCISSCGEFIENPKYLKKSLNKLAKLQRELSRKTIGSLNRNKARLKVARLQEHIANQRNDFLQKLSTKLIKENDIICIEDLQVKNMIKNRKLSRLISDVSWSEFIRQLQYKANWHGRQIVKVGKFFASSQICNKCGYKNEEVKDLNIREWICPSCNETHDRDINASINILKEGLRLITTQNK

SEQ ID NO: 2956 - protein, 369 aa, unidentified
MEKAYKFRMYPNKKQQELINKTFGCCRFVYNKYLAKRIDVYKNNKETFTYKQCSSDLTNLKKELKWLKEPDKFSLQNALKDLDNAYKKFFKEKTGFPKFKSKKINRFSYKTNFTNGNIMYCGQHIKLPKLGMVKIRDKQVPQGRILNATISKEPSGRYYVSLCCTDVDIEAFENTNNHIGLDLGIKEFCISSCGEFIENPKYLKKSLNKLAKLQRELSRKTIGSLNRNKARLKVARLQEHIANQRKDFLQKLSTKLIKENDIICIEDLQVKNMIKNHKLSRSISDVSWSEFIRQLEYKANWHGRQIVKVGKFFASSQICNKCGYKNEEVKDLNIREWICPSCNETHDRDINASINILKEGLRLITIQNK

SEQ ID NO: 2957 - protein, 369 aa, unidentified
MEKAYKFRMYPNKKQQELINKTFGCCRFVYNKYLAKRIDVYKNNKETFTYKQCSSDLTNLKKELKWLKEPDKFSLQNALKDLDNAYKKFFKEKTGFPKFKSKKINRFSYKTNFTNGNIMYCGQHIKLPKLGMVKIRDKQVPQGRILNATISKEPSGRYYVSLCCTDVDIEAFENTNNHIGLDLGIKEFCISSCGEFIENPKYLKKSLNKLAKLQRELSRKTIGSLNRNKARLKVARLQEHIANQRNDFLQKLSTKLIKENDIICIEDLQVKNMIKNHKLSRSISDVSWSEFIRQLEYKANWHGRQIVKVGKFFASSQICNKCGYKNEEVKDLNIREWICPSCNETHDRDINASINILKEGLRLITIQNK

SEQ ID NO: 2958 - protein, 369 aa, unidentified
MEKAYKFRMYPNKKQQELINKTFGCCRFVYNKYLAKRIEVYKNDKETFTYKQCSSDLTNLKKELNWLKEPDKFSLQNALKDLENAYEKFFKEKAGFPKFKSKKTNRFSYKTNFTNGNIMYFGQHIKLPKLGMVKIRDKQVPQGRILNATISKEPSGRYYVSLCCTDVDIEAFENTNNQIGLDLGIKEFCISSCGDFIENPKYLKKSLNKLAKLQRELSRKTIGSLNRNKARLKVARLQEHIANQRKDFLQKLSTKLIKENDIICIEDLQVKNMIGNHKLSRLISDVSWSEFVRQLKYKANWHGRQIVKVGKFFASSQICNKCGYKNEEVKNLNIREWICPSCNETHDRDINASMNILKEGLRLITIQNK

SEQ ID NO: 2959 - protein, 356 aa, unidentified
MEKAYKFRMYPNKKQQELINKTFGCCRFVYNKYLAKRIDVYKNNKETFTYKQCSSDLTNLKKELKWLKEPDKFSLQNALKDLDNAYKKFFKEKTGFPKFKSKKINRFSYKTNFTNGNIMYCGQHIKLPKLGMVKIRDKQVPQGRILNATISKEPSGRYYVSLCCTDVDIEAFENTNNHIGLDLGIKEFCISSCGEFIENPKYLKKSLNKLAKLQRELSRKTIGSLNRNKARLKVARLQEHIANQRKDFLQKLSTKLIKENDIICIEDLQVKNMIKNHKLSRSISDVSWSEFIRQLEYKANWHGRQIVKVGKFFASSQICNKCGYKNEEVXXXFANKLIIRHNRLKVIYGVVFIEFA

SEQ ID NO: 2960 - protein, 369 aa, unidentified
MEKAYKFRMYPNKKQQELINKTFGCCRFVYNKYLAKRIDVYKNNKETFTYKQCSSDLTNLKKELKWLKEPDKFSLQNALKDLDNAYKKFFKEKTGFPKFKSKKINRFSYKTNFTNGNIMYCGQHIKLPKLGMVKIRDKQVPQGRILNATISKEPSGRYYVSLCCTDVDIEVFENTNNHIGLDLGIKEFCISSCGEFIENPKYLKKSLNKLAKLQRELSRKTIGSLNRNKARLKVARLQEHIANQRKDFLQKLSTKLIKENDIICIEDLQVKNMIKNHKLSRSISDVSWSEFIRQLEYKANWHGRQIVKVGKFFASSQICNKCGYKNEEVKDLNIREWICPSCNETHDRDINASINILKEGLRLITIQNK

SEQ ID NO: 2961 - protein, 369 aa, unidentified
MEKAYKFRMYPNKKQQELINKTFGCCRFVYNKYLAKRIDVYKNDKETFTYKQCSSDLTNLKKELKWLKEPDKFSLQNALKDLDNAYKKFFKEKAGFPKFKSKKINRFSYKTNFTNGNIMYCGQHIKLPKLGMVKIRDKQVPKGRILNATISKEPSGRYYVSLCCTDVDIEVFENTNNQIGLDLGIKEFCISSCGEFIENPKYLKKSLNKLAKLQRELSRKTIGSLNRNKARLKVARLQEHIANQRNDFLQKLSTKLIKENDIICIEDLQVKNMIKNRKLSRSISDVSWSEFIRQLEYKANWHGRQIVKVGKFFASSQICNKCGYKNEEVKDLNIREWICPSCNETHDRDINASINILKEGLRLITIQNK

SEQ ID NO: 2962 - protein, 369 aa, unidentified
MEKAYKFRMYPNKKQQELINKTFGCCRFVYNKYLAKRIDVYKNNKETFTYKQCSSDLTNLKKELNWLKEPDKFSLQNALKDLDNAYKKFFKKKAGFPKFKSKKINRFSYKTNFTNGNIVYCGQHIKLPKLGMVKIRDKQVPQGRILNATISKEPSGRYYVSLCCTDVDIEVFENTNNQIGLDLGIKEFCISSCGDFIENPKYLKKSLNKLAKLQRELSRKTIGSLNRNKARLKVARLQEHIANQRNDFLQKLSTKLIKENDIICIEDLQVKNMIRNRKLSRLISDVSWSEFIRQLEYKANWHGRQIVKVGKFFASSQICNKCGYKNEEVKDLNIREWICPSCNETHDRDINASINILKEGLRLITIQNK

SEQ ID NO: 2963 - protein, 369 aa, unidentified
MEKAYKFRMYPNKKQQELINKTFGCCRFVYNKYLAKRIDVYKNNKETFTYKQCSSDLTNLKKELKWLKEPDKFSLQNALKDLDNAYKKFFKEKVGFPKFKSKKINRFSYKTNFTNGNIMYFSQHIKLPKLGMVKIRDKQVPQGRILNATISKEPSGRYYVSLCCTDVDIEVFENTNNQIGLDLGIKEFCISSCGEFIENPKYLKKSLNKLAKLQRELSRKTIGSLNRNKARLKVARLQEHIANQRKDFLQKLSTKLIKENDIICIEDLQVKNMIRKRKLSRLISDVSWSEFIRQLEYKANWYGRKIVKVGKFFASSQICNKCGYKNEEVKDLNIREWICPSCNETHDRDINASINILKEGLRLITIQNK

SEQ ID NO: 2964 - protein, 369 aa, unidentified
MEKAYKFRMYPNKKQQELINKTFGCCRFVYNKYLAKRIDVYKNNKETFTYKQCSSDLTNLKKELNWLKEPDKFSLQNALKDLDNAYKKFFKKKAGFPKFKSKKINRFSYKTNFTNGNIVYCGQHIKLPKLGMVKIRDKQVPQGRILNATISKEPSGRYYVSLCCTDVDIEVFENTNNQIGLDLGIKEFCISSCGDFIENPKYLKKSLNKLAKLQRELSRKTIGSLNRNKARLKVARLQEHIANQRNDFLQKLSTKLIKENDIICIEDLQVKNMIRNRKLSRLISDVSWSEFIRQLEYKANWYGRQIVKVGKFFASSQICNKCGYKNEEVKDLNIREWICPSCNETHDRDINASINILKEGLRLITIQNK

SEQ ID NO: 2965 - protein, 369 aa, unidentified
MEKAYKFRVYPNKKQQELINKTFGCCRFVYNKYLAKRIEVYKNDKETFTYKQCSSDLTNLKKELKWLKEPDKFSLQNALKDLDNAYKKFFKEKAGFPKFKSKKINRFSYKTNFTNGNIMYFSQHIKLPKLGMVKIRDKQVPKGRILNATISKEPSGRYYVSLCCTDVDIEVFENTNNQIGLDLGIKEFCISSCGDFIENHKYLKKSLNKLAKLQRELSRKTIGSLNRNKARLKVARLQEHIANQRKDFLQKLSTKLIKENDIICIEDLQVKNMIRNRKLSRLISDVSWSEFIRQLEYKANWYGRQIVKVGKFFASSQICNKCGYKNEEVKDLNIREWICPSCNETHDRDINASINILKEGLRLITIQNK

SEQ ID NO: 2966 - protein, 285 aa, unidentified
MEKAYKFRMYPNKKQQELINKTFGCCRFVYNKYLAKRIDVYKNNKETFTYKQCSSDLTNLKKELKWLKEPDKFSLQNALKDLDNAYKKFFKEKTGFPKFKSKKINRFSYKTNFTNGNIMYCGQHIKLPKLGMVKIRDKQVPQGRILNATISKEPSGRYYVSLCCTDVDIEAFENTNNHIGLDLGIKEFCISSCGEFIENPKYLKKSLNKLAKLQRELSRKTIGSLNRNKARLKVARLQEHIANQRKDFLQKLSTKLIKENDIICIEDLQVKNMIKNHKLSRXFNK

SEQ ID NO: 2967 - protein, 369 aa, unidentified
MEKAYKFRMYPNKKQQELINKTFGCCRFVYNKYLAKRIDVYKNDKETFTYKQCSSDLTNLKKELKWLKEPDKFSLQNALKDLDNAYKKFFKEKAGFPKFKSKKINRFSYKTNFTNGNIMYCGQHIKLPKLGMVKIRDKQVPKGRILNATISKEPSGRYYVSLCCTDVDIEVFENTNNQIGLDLGIKEFCISSCGEFIENPKYLKKSLNKLAKLQRELSRKTIGSLNRNKARLKVARLQEHIANQRNDFLQKLSTKLIKENDIICIEDLQVKNMIRNRKLSRLISDVSWSEFIRQLEYKANWHGRQIVKVGKFFASSQICNKCGYKNEEVKNLNIREWICPSCNETHDRDINASINILKEGLRLITIQNK

SEQ ID NO: 2968 - protein, 272 aa, unidentified
MEKAYKFRMYPNKKQQELINKTFGCCRFVYNKYLAKRIDVYKNNKETFTYKQCSSDLTNLKKELKWLKEPDKFSLQNALKDLDNAYKKFFKEKTGFPKFKSKKINRFSYKTNFTNGNIMYCGQHIKLPKLGMVKIRDKQVPQGRILNATISKEPSGRYYVSLCCTDVDIEAFENTNNHIGLDLGIKEFCISSCGEFIENPKYLKKSLNKLAKLQRELSRKTIGSLNRNKARLKVARLQEHIANQRNDFLQKLSTKLIKENDIICIEDLQVKI

SEQ ID NO: 2969 - protein, 369 aa, unidentified
MEKAYKFRMYPNKKQQELINKTFGCCRFVYNKYLAKRIDVYKNNKETFTYKQCSSDLTNLKKELKWLKEPDKFSLQNALKDLDNAYKKFFKEKVGFPKFKSKKINRFSYKTNFTNGNIMYCGQHIKLPKLGMVKIRDKQVPQGRILNATISKEPSGRYYVSLCCTDVDIEAFENTNNHIGLDLGIKEFCISSCGEFIENPKYLKKSLNKLAKLQRELSRKTIGSLNRNKARLKVARLQEHIANQRNDFLQKLSTKLIKENDIICIEDLQVKNMIRNRKLSRSISDVSWSEFIRQLEYKANWYGRKIVKVGKFFASSQICNKCGYKNEEVKDLNIREWICPSCNETHDRDINASINILKEGLRLITIQNK

SEQ ID NO: 2970 - protein, 268 aa, unidentified
MEKAYKFRMYPNKKQQELINKTFGCCRFVYNKYLAKRIDVYKNDKETFTYKQCSSDLTNLKKELKWLKEPDKFSLQNALKDLDNAYKKFFKEKVGFPKFKSKKINRFSYKTNFTNGNIMYLGQHIKLPKLGMIKIRDKQVPQGRILNATISKEPSGRYYVSLCCTDVDIEVFENTNNQIGLDLGIKEFCISSCGEFIENPKYLKKSLNKLAKLQRELSRKTIGSLNRNKARLKVARLQEHIANQRKDFLQKLSTKLIKENDIICIEDL

SEQ ID NO: 2971 - protein, 400 aa, unidentified
MKKAYKFRLYPNKKQQELINKTFGCCRFVYNKYLAKRIDVYKNDKETFTYKQCSSDLTNLKKELKWLKEPDKFLLQNALKDLDNAYKKFFKEKAGFPKFKSKKINRFSYKTNFTNGNIMYFSQHIKLPKLGMVKIRDKQVPKGRILNATISKEPSGRYYVSLCCTDVDIEVFENTNNQIGLDLGIKEFCISSCGDFIENHKYLKKSLNKLAKLQRELSRKTIGSLNRNKARLKVARLQEHIANQRKDFLQKLSTKLIKENDIICIEDLQVKNMIRNRKLSRLISDVSWSEFIRQLEYKANWHGRQIVKVGKFFESSQICNKCGYKNEEVKDLNIREWICPSCNETHDRDINASINILCKNRRNYGDSLWRISKTYFSMQNSMKQEPCDFSHGRFRIVVVM

SEQ ID NO: 2972 - protein, 369 aa, unidentified
MEKAYKFRMYPNKKQQELINKTFGCCRFVYNKYLAKRIDVYKNNKETFTYKQCSSDLTNLKKELKWLKEPDKFSLQNALKDLDNAYKKFFKEKTGFPKFKSKKINRFSYKTNFTNGNIMYCGQHIKLPKLGMVKIRDKQVPQGRILNATISKEPSGRYYVSLCCTDVDIEVFENTNNHIGLDLGIKEFCISSCGEFIENPKYLKKSLNKLAKLQRELSRKTIGSLNRNKARLKVARLQEHIANQRKDFLQKLSTKLIKENDIICIEDLQVKNMIKNHKLSRSISDVSWSEFIRQLEYKANWHGRQIVKVGKFFASSQICNKCGYKNEEVKNLNIREWICPSCNETHDRDINASINILKEGLRLITIQNK

SEQ ID NO: 2973 - protein, 372 aa, unidentified
MVVVEKAYKFRMYPNKKQQELINKTFGCCRFVYNKYLAKRIDVYKNNKETFTYKQCSSDLTNLKKELKWLKEPDKFSLQNALKDLDNAYKKFFKEKTGFPKFKSKKINRFSYKTNFTNGNIMYCGQHIKLPKLGMVKIRDKQVPQGRILNATISKEPSGRYYVSLCCTDVDIEAFENTNNHIGLDLGIKEFCISSCGEFIENPKYLKKSLNKLAKLQRELSRKTIGSLNRNKARLKVARLQEHIANQRNDFLQKLSTKLIKENDIICIEDLQVKNMIKNHKLSRSISDVSWSEFIRQLEYKANWHGRQIVKVGKFFASSQICNKCGYKNEEVKNLNIREWICPSCNETHDRDINASINILKEGLRLITIQNK

SEQ ID NO: 2974 - protein, 372 aa, unidentified
MVVVEKAYKFRMYPNKKQQELINKTFGCCRFVYNKYLAKRIDVYKNNKETFTYKQCSSDLTNLKKELKWLKEPDKFSLQNALKDLDNAYKKFFKEKTGFPKFKSKKINRFSYKTNFTNGNIMYCGQHIKLPKLGMVKIRDKQVPQGRILNATISKEPSGRYYVSLCCTDVDIEAFENTNNHIGLDLGIKEFCISSCGEFIENPKYLKKSLNKLAKLQRELSRKTIGSLNRNKARLKVARLQEHIANQRNDFLQKLSTKLIKENDIICIEDLQVKNMIKNHKLSRSISDVSWSEFIRQLEYKANWHGRQIVKVGKFFASSQICNKCGYKNEEVKDLNIREWICPSCNETHDRDINASINILKEGLRLITIQNK

SEQ ID NO: 2975 - protein, 372 aa, unidentified
MIVVEKAYKFRMYPNKKQQELINKTFGCCRFVYNKYLAKRIDVYKNDKETFTYKQCSSDLTNLKKELKWLKEPDKFSLQNALKDLDNAYKKFFKEKAGFPKFKSKKINRFSYKTNFTNGNIMYCGQHIKLPKLGMVKIRDKQVPKGRILNATISKEPSGRYYVSLCCTDVDIEVFENTNNQIGLDLGIKEFCISSCGEFIENPKYLKKSLNKLAKLQRELSRKTIGSLNRNKARLKVARLQEHIANQRNDFLQKLSTKLIKENDIICIEDLQVKNMIRNRKLSRLISDVSWSEFIRQLEYKANWHGRQIVKVGKFFASSQICNKCGYKNEEVKDLNIREWICPSCNETHDRDINASINILKEGLRLITIQNK

SEQ ID NO: 2976 - protein, 372 aa, unidentified
MVVVEKAYKFRMYPNKKQQELINKTFGCCRFVYNKYLAKRIDVYKNNKETFTYKQCSSDLTNLKKELKWLKEPDKFSLQNALKDLDNAYKKFFKEKTGFPKFKSKKINRFSYKTNFTNGNIMYCGQHIKLPKLGMVKIRDKQVPQGRILNATISKEPSGRYYVSLCCTDVDIEVFENTNNHIGLDLGIKEFCISSCGEFIENPKYLKKSLNKLAKLQRELSRKTIGSLNRNKARLKVARLQEHIANQRKDFLQKLSTKLIKENDIICIEDLQVKNMIKNHKLSRSISDVSWSEFIRQLEYKANWHGRQIVKVGKFFASSQICNKCGYKNEEVKNLNIREWICPSCNETHDRDINASINILKEGLRLITIQNK

SEQ ID NO: 2977 - protein, 287 aa, unidentified
MIVVEKAYKFRMYPNKKQQELINKTFGCCRFVYNKYLAKRIEVYKNDKETFTYKQCSSDLTNLKKELNWLKEPDKFSLQNALKDLDNAYKKFFKKKAGFPKFKSKKINRFSYKTNFTNGNIVYCGQHIKLPKLGMVKIRDKQVPKGRILNATISKEPSGRYYVSLCCTDVDIEAFENTNNHIGLDLGIKEFCISSCGEFIENPKYLKKSLNKFAKLQRELSRKTIGSLNRNKARLKVARLQEHIANQRKDFLQKLSTKLIKENDIICIEDLQVKNMIRNRKLSRLIS

SEQ ID NO: 2978 - protein, 372 aa, unidentified
MIAVKKAYKFRMYPNKKQQELINKTFGCCRFVYNKYLAKRIEVYKNDKETFTYKQCSSDLTNLKKELNWLKEPDKFSLQNALKDLDNAYKKFFKEKAGFPKFKSKKINRFSYKTNFTNGNIMYCGQYIKLPKLGMVKIRDKQVPQGRILNATISKEPSGRYYVSLCCTDVDIEAFENTNNHIGLDLGIKEFCISSCGEFIENPKYLKKSLNKLAKLQRELSRKTIGSLNRNKARLKVARLQEHIANQRNDFLQKLSTKLIKENDIICIEDLQVKNMIKNRKLSRSISDVSWSEFIRQLEYKANWHGRQIVKVGKFFASSQICNKCGYKNEEMKDLNIREWICPSCNETHDRDINASINILKEGLRLITIQNK

SEQ ID NO: 2979 - protein, 372 aa, unidentified
MAVVEKAYKFRMYPNKKQQELINKTFGCCRFVYNKYLAKRIEVYKNNKETFTYKQCSSDLTNLKKELKWLKEPDKFSLQNALKDLDNAYKKFFKEKAGFPKFKSKKINRFSYKTNFTNGNIMYCGQYIKLPKLGMVKVRDKQVPQGRILNATISKEPSGRYYVSLCCTNVDIEVFENTNNQIGLDLGIKEFCISSCGDFIENPKYLKKSLNKLAKLQRELSRKTIGSLNRNKARLKVARLQEHIANQRNDFLQKLSTKLIKENDIICIEDLQVKNMIRNRKLSRLISDVSWSEFVRQLKYKANWHGRQIVKVGKFFASSQICNKCGYKNEEVKDLNIREWICPSCNETHDRDINASINILKEGLRLITIQNK

SEQ ID NO: 2980 - protein, 372 aa, unidentified
MIAVKKAYKFRMYPNKKQQELINKTFGCCRFVYNKYLAKRIDVYKNDKETFTYKQCSSDLTNLKKELKWLKEPDKFSLQNALKDLDNAYKKFFKEKAGFPKFKSKKINRFSYKTNFTNGNIMYCGQHIKLPKLGMVKIRDKQVPKGRILNATISKEPSGRYYVSLCCIDVDIEVFENTNNHIGLDLGIKEFCISSCGEFIENPKYLKKSLNKLAKLQRELSRKTIGSLNRNKARLKVARLQEHIANQRNDFLQKLSTKLIKENDIICIEDLQVKNMIRNRKLSRLISDVSWSEFIRQLEYKANWYGRQIVKVGKFFASSQICNKCGYKNEEVKDLNIREWICPSCNETHDRDINASINILKEGLRLITIQNK

SEQ ID NO: 2981 - protein, 372 aa, unidentified
MVVVEKAYKFRMYPNKKQQELINKTFGCCRFVYNKYLAKRIDVYKNNKETFTYKQCSSDLTNLKKELNWLKEPDKFSLQNALKDLDNAYKKFFKKKAGFPKFKSKKINRFSYKTNFTNGNIVYCGQHIKLPKLGMVKIRDKQVPQGRILNATISKEPSGRYYVSLCCTDVDIEVFENTNNQIGLDLGIKEFCISSCGEFIENPKYLKKSLNKLAKLQRELSRKTIGSLNRNKARLKVARLQEHIANQRNDFLQKLSTKLIKENDIICIEDLQVKNMIRNRKLSRLISDVSWSEFIRQLEYKANWHGRQIVKVGKFFASSQICNKCGYKNEEVKDLNIREWICPSCNETHDRDINASINILKEGLRLITIQNK

SEQ ID NO: 2982 - protein, 372 aa, unidentified
MIAVEKAYKFRVYPNKKQQELINKTFGCCRFVYNKYLAKRIEVYKNDKETFTYKQCSSDLTNLKKELKWLKEPDKFSLQNALKDLDNAYKKFFKEKAGFPKFKSKKINRFSYKTNFTNGNIMYFSQHIKLPKLGMVKIRDKQVPKGRILNATISKEPSGRYYVSLCCTDVDIEVFENTNNQIGLDLGIKEFCISSCGDFIENHKYLKKSLNKLAKLQRELSRKTIGSLNRNKARLKVARLQEHIANQRKDFLQKLSTKLIKENDIICIEDLQVKNMIRNRKLSRLISDVSWSEFIRQLEYKANWYGRQIVKVGKFFASSQICNKCGYKNEEVKDLNIREWICPSCNETHDRDINASINILKEGLRLITIQNK

SEQ ID NO: 2983 - protein, 372 aa, unidentified
MVVVEKAYKFRMYPNKKQQELINKTFGCCRFVYNKYLAKRIDVYKNNKETFTYKQCSSDLTNLKKELNWLKEPDKFSLQNALKDLDNAYKKFFKKKAGFPKFKSKKINRFSYKTNFTNGNIVYCGQHIKLPKLGMVKIRDKQVPQGRILNATISKEPSGRYYVSLCCTDVDIEVFENTNNQIGLDLGIKEFCISSCGDFIENPKYLKKSLNKLAKLQRELSRKTIGSLNRNKARLKVARLQEHIANQRNDFLQKLSTKLIKENDIICIEDLQVKNMIRNRKLSRLISDVSWSEFIRQLEYKANWHGRQIVKVGKFFASSQICNKCGYKNEEVKDLNIREWICPSCNETHDRDINASINILKEGLRLITIQNK

SEQ ID NO: 2984 - protein, 372 aa, unidentified
MVVVEKAYKFRMYPNKKQQELINKTFGCCRFVYNKYLAKRIDVYKNNKETFTYKQCSSDLTNLKKELKWLKEPDKFSLQNALKDLDNAYKKFFKEKVGFPKFKSKKINRFSYKTNFTNGNIMYFSQHIKLPKLGMVKIRDKQVPQGRILNATISKEPSGRYYVSLCCTDVDIEVFENTNNQIGLDLGIKEFCISSCGEFIENPKYLKKSLNKLAKLQRELSRKTIGSLNRNKARLKVARLQEHIANQRKDFLQKLSTKLIKENDIICIEDLQVKNMIRKRKLSRLISDVSWSEFIRQLEYKANWYGRKIVKVGKFFASSQICNKCGYKNEEVKDLNIREWICPSCNETHDRDINASINILKEGLRLITIQNK

SEQ ID NO: 2985 - protein, 372 aa, unidentified
MIVVEKAYKFRMYPNKKQQELINKTFGCCRFVYNKYLAKRIEVYKNDKETFTYKQCSSDLTNLKKELKWLKEPDKFSLQNALKDLDNAYKKFFKEKSGFPKFKSKKINRFSYKTNFTNGNIMYFSQHIKLPKLGMVKIRDKQVPQGRILNATISKEPSGRYYVSLCCTDVDIEAFENTNNQIGLDLGIKEFCISSCGDFIENPKYLKKSLNKLAKLQRELSRKTIGSLNRNKARLKVARLQEHIANQRNDFLQKLSTKLIKENDIICIEDLQVKNMIKNHKLSRLISDVSWSEFIRQLEYKANWYGRQIVKVGKFFASSQICNKCGYKNEEVKDLNIREWICPSCNETHDRDINASINILKEGLRLITIQNK

SEQ ID NO: 2986 - protein, 372 aa, unidentified
MIVVEKAYKFRMYPNKKQQELINKTFGCCRFVYNKYLAKRIDVYKNDKETFTYKQCSSDLTNLKKELKWLKEPDKFSLQNALKDLDNAYKKFFKEKAGFPKFKSKKINRFSYKTNFTNGNIMYCGQHIKLPKLGMVKIRDKQVPKGRILNATISKEPSGRYYVSLCCTDVDIEVFENTNNQIGLDLGIKEFCISSCGEFIENPKYLKKSLNKLAKLQRELSRKTIGSLNRNKARLKVARLQEHIANQRNDFLQKLSTKLIKENDIICIEDLQVKNMIKNRKLSRSISDVSWSEFIRQLEYKANWHGRQIVKVGKFFASSQICNKCGYKNEEVKDLNIREWICPSCNETHDRDINASINILKEGLRLITIQNK

SEQ ID NO: 2987 - protein, 372 aa, unidentified
MVVVEKAYKFRMYPNKKQQELINKTFGCCRFVYNKYLAKRIDVYKNDKETFTYKQCSSDLTNLKKELNWLKEPDKFSLQNALKDLDNAYKKFFKKKAGFPKFKSKKINRFSYKTNFTNGNIVYCGQHIKLPKLGMVKIRDKQVPQGRILNATISKEPSGRYYVSLCCTDVDIEVFENTNNQIGLDLGIKEFCISSCGDFIENPKYLKKSLNKLAKLQRELSRKTIGSLNRNKARLKVARLQEHIANQRNDFLQKLSTKLIKENDIICIEDLQVKNMIRNRKLSRLISDVSWSEFIRQLEYKANWHGRQIVKVGKFFASSQICNKCGYKNEEVKDLNIREWICPSCNETHDRDINASINILKEGLRLITIQNK

SEQ ID NO: 2988 - protein, 372 aa, unidentified
MVVVEKAYKFRMYPNKKQQELINKTFGCCRFVYNKYLAKRIDVYKNDKETFTYKQCSSDLTNLKKELKWLKEPDKFSLQNALKDLDNAYKKFFKEKTGFPKFKSKKINRFSYKTNFTNGNIMYCGQHIKLPKLGMVKIRDKQVPQGRILNATISKEPSGRYYVSLCCTDVDIEAFENTNNHIGLDLGIKEFCISSCGEFIENPKYLKKSLNKLAKLQRELSRKTIGSLNRNKARLKVARLQEHIANQRKDFLQKLSTKLIKENDIICIEDLQVKNMIKNHKLSRSISDVSWSEFIRQLEYKANWHGRQIVKVGKFFASSQICNKCGYKNEEVKNLNIREWICPSCNETHDRDINASINILKEGLRLITIQNK

SEQ ID NO: 2989 - protein, 372 aa, unidentified
MIAVKKAYKFRMYPNKKQQELINKTFGCCRFVYNKYLAKRIEVYKNDKETFTYKQCSSDLTNLKKELNWLKEPDKFSLQNALKDLDNAYKKFFKEKAGFPKFKSKKINRFSYKTNFTNGNIMYCGQYIKLPKLGMVKVRDKQVPQGRILNATISKEPSGRYYVSLCCTDVDIEAFENTNNHIGLDLGIKEFCISSCGEFIENPKYLKKSLNKLAKLQRELSRKTIGSLNRNKARLKVARLQEHIANQRNDFLQKLSTKLIKENDIICIEDLQVKNMIKNRKLSRSISDVSWSEFIRQLEYKANWHGRQIVKVGKFFASSQICNKCGYKNEEMKDLNIREWICPSCNETHDRDINASINILKEGLRLITIQNK

SEQ ID NO: 2990 - protein, 372 aa, unidentified
MAVVEKAYKFRMYPNKKQQELINKTFGCCRFVYNKYLAKRIEVYKNNKETFTYKQCSSDLTNLKKELKWLKEPDKFSLQNALKDLDNAYKKFFKEKAGFPKFKSKKINRFSYKTNFTNGNIMYCGQYIKLPKLGMVKIRDKQVPQGRILNATISKEPSGRYYVSLCCTNVDIEVFENTNNQIGLDLGIKEFCISSCGDFIENPKYLKKSLNKLAKLQRELSRKTIGSLNRNKARLKVARLQEHIANQRNDFLQKLSTKLIKENDIICIEDLQVKNMIRNRKLSRLISDVSWSEFVRQLKYKANWHGRQIVKVGKFFASSQICNKCGYKNEEVKDLNIREWICPSCNETHDRDINASINILKEGLRLITIQNK

SEQ ID NO: 2991 - protein, 372 aa, unidentified
MIVVEKAYKFRMYPNKKQQELINKTFGCCRFVYNKYLAKRIEVYKNDKETFTYKQCSSDLTNLKKELNWLKEPDKFSLQNALKDLDNAYKKFFKKKAGFPKFKSKKINRFSYKTNFTNGNIVYCGQHIKLPKLGMVKIRDKQVPKGRILNATISKEPSGRYYVSLCCTDVDIEAFENTNNHIGLDLGIKEFCISSCGEFIENPKYLKKSLNKFAKLQRELSRKTIGSLNRNKARLKVARLQEHIANQRKDFLQKLSTKLIKENDIICIEDLQVKNMIRNRKLSRLISDVSWSEFIRQLEYKANWHGRQIVKVGKFFASSQICNKCGYKNEEVKDLNIREWICPSCNETHDRDINASINILKEGLRLITIQNK

SEQ ID NO: 2992 - protein, 372 aa, unidentified
MVVVEKAYKFRMYPNKKQQELINKTFGCCRFVYNKYLAKRIDVYKNDKETFTYKQCSSDLTNLKKELKWLKEPDKFSLQNALKDLDNAYKKFFKEKTGFPKFKSKKINRFSYKTNFTNGNIMYCGQHIKLPKLGMVKIRDKQVPQGRILNATISKEPSGRYYVSLCCTDVDIEAFENTNNHIGLDLGIKEFCISSCGEFIENPKYLKKSLNKLAKLQRELSRKTIGSLNRNKARLKVARLQEHIANQRNDFLQKLSTKLIKENDIICIEDLQVKNMIRNHKLSRSISDVSWSEFIRQLEYKANWHGRQIVKVGKFFASSQICNKCGYKNEEVKDLNIREWICPSCNETHDRDINASINILKEGLRLITIQNK

SEQ ID NO: 2993 - protein, 372 aa, unidentified
MIAVKKAYKFRIYPNKKQQELINKTFGCCRFVYNKYLAKRIDVYKNDKETFTYKQCSSDLTNLKKELNWLKEPDKFSLQNALKDLDNAYKKFFKEKAGFPKFKSKKINRFSYKTNFTNGNIMYCGQHIKLPKLGMVKVRDKQVPKGRILNATISKEPSGRYYVSLCCTDVDIEAFENTNNHIGLDLGIKEFCISSCGEFIENPKYLKKSLNKLAKLQRELSRKTIGSLNRNKARLKVARLQEHIANQRNDFLQKLSTKLIKENDIICIEDLQVKNMIKNHKLSRSISDVSWSEFIRQLEYKANWHGRQIVKVGKFFASSQICNKCGYKNEEVKNLNIREWICPSCNETHDRDINASINILKEGLRLITIQNK

SEQ ID NO: 2994 - protein, 332 aa, unidentified
MVVVEKAYKFRMYPNKKQQELINKTFGCCRFVYNKYLAKRIDVYKNNKETFTYKQCSSDLTNLKKELKWLKEPDKFSLQNALKDLDNAYKKFFKEKTGFPKFKSKKINRFSYKTNFTNGNIMYCGQHIKLPKLGMVKIRDKQVPQGRILNATISKEPSGRYYVSLCCTDVDIEAFENTNNHIGLDLGIKEFCISSCGEFIENPKYLKKSLNKLAKLQRELSRKTIGSLNRNKARLKVARLQEHIANQRKDFLQKLSTKLIKENDIICIEDLQVKNMIKNHKLSRSISDVSWSEFIRQLEYKANWHGRQIVKVGKFFASSQICNKCGYKNEEV

SEQ ID NO: 2995 - protein, 372 aa, unidentified
MIVVEKAYKFRMYPNKKQQELINKTFGCCRFVYNKYLAKRIDVYKNDKETFTYKQCSSDLTNLKKELKWLKEPDKFSLQNALKDLDNAYKKFFKEKAGFPKFKSKKINRFSYKTNFTNGNIMYCGQHIKLPKLGMVKIRDKQVPKGRILNATISKEPSGRYYVSLCCTDVDIEVFENTNNQIGLDLGIKEFCISSCGEFIENPKYLKKSLNKLAKLQRELSRKTIGSLNRNKARLKVARLQEHIANQRNDFLQKLSTKLIKENDIICIEDLQVKNMIRNRKLSRLISDVSWSEFIRQLEYKANWHGRQIVKVGKFFASSQICNKCGYKNEEVKNLNIREWICPSCNETHDRDINASINILKEGLRLITIQNK

SEQ ID NO: 2996 - protein, 372 aa, unidentified
MIAVKKAYKFRIYPNKKQQELINKTFGCCRFVYNKYLAKRIDVYKNDKETFTYKQCSSDLTNLKKELNWLKEPDKFSLQNALKDLDNAYKKFFKEKAGFPKFKSKKINRFSYKTNFTNGNIMYCGQHIKLPKLGMVKVRDKQVPKGRILNATISKEPSGRYYVSLCCTDVDIEAFENTNNHIGLDLGIKEFCISSCGEFIENPKYLKKSLNKLAKLQRELSRKTIGSLNRNKARLKVARLQEHIANQRNDFLQKLSTKLIKENDIICIEDLQVKNMIKNHKLSRSISDVSWSEFIRQLEYKANWHGRQIVKVGKFFASSQICNKCGYKNEEVKDLNIREWICPSCNETHDRDINASINILKEGLRLITIQNK

SEQ ID NO: 2997 - protein, 372 aa, unidentified
MVVVEKAYKFRMYPNKKQQELINKTFGCCRFVYNKYLAKRIDVYKNNKETFTYKQCSSDLTNLKKELKWLKEPDKFSLQNALKDLDNAYKKFFKEKTGFPKFKSKKINRFSYKTNFTNGNIMYCGQHIKLPKLGMVKIRDKQVPQGRILNATISKEPSGRYYVSLCCTDVDIEVFENTNNHIGLDLGIKEFCISSCGEFIENPKYLKKSLNKLAKLQRELSRKTIGSLNRNKARLKVARLQEHIANQRKDFLQKLSTKLIKENDIICIEDLQVKNMIKNHKLSRSISDVSWSEFIRQLEYKANWHGRQIVKVGKFFASSQICNKCGYKNEEVKDLNIREWICPSCNETHDRDINASINILKEGLRLITIQNK

SEQ ID NO: 2998 - protein, 372 aa, unidentified
MIAVKKAYKFRLYPNKKQQELINKTFGCCRFVYNKYLAKRIDVYKNNKETFTYKQCSSDLTNLKKELKWLKEPDKFSLQNALKDLDNAYKKFFKEKAGFPKFKSKKINRFSYKTNFTNGNIMYCGQHIKLPKLGMVKVRDKQVPKGRILNATISKEPSGRYYVSLCCTDVDIEAFENTNNHIGLDLGIKEFCISSCGEFIENPKYLKKSLNKLAKLQRELSRKTIGSLNRNKARLKVARLQEHIANQRNDFLQKLSTKLIKENDIICIEDLQVKNMIKNHKLSRLISDVSWSEFIRQLEYKANWYGRQIVKVGKFFASSQICNKCGYKNEEVKDLNIREWICPSCNETHDRDINASRNILKEGLRLITIQNK

SEQ ID NO: 2999 - protein, 372 aa, unidentified
MVVVEKAYKFRMYPNKKQQELINKTFGCCRFVYNKYLAKRIDVYKNNKETFTYKQCSSDLTNLKKELNWLKEPDKFSLQNALKDLDNAYKKFFKKKAGFPKFKSKKINRFSYKTNFTNGNIVYCGQHIKLPKLGMVKIRDKQVPQGRILNATISKEPSGRYYVSLCCTDVDIEVFENTNNQIGLDLGIKEFCISSCGDFIENPKYLKKSLNKLAKLQRELSRKTIGSLNRNKARLKVARLQEHIANQRNDFLQKLSTKLIKENDIICIEDLQVKNMIRNRKLSRLISDVSWSEFIRQLEYKANWYGRQIVKVGKFFASSQICNKCGYKNEEVKDLNIREWICPSCNETHDRDINASINILKEGLRLITIQNK

SEQ ID NO: 3000 - protein, 372 aa, unidentified
MIAVKKAYKFRMYPNKKQQELINKTFGCCRFVYNKYLAKRIDVYKNDKETFTYKQCSSDLTNLKKELKWLKEPDKFSLQNALKDLDNAYKKFFKEKAGFPKFKSKKINRFSYKTNFTNGNIMYCGQYIKLPKLGMVKIRDKQVPQGRILNATISKEPSGRYYVSLCCTDVDIEAFENTNNHIGLDLGIKEFCISSCGEFIENPKYLKKSLNKLAKLQRELSRKTIGSLNRNKARLKVARLQEHIANQRNDFLQKLSTKLIKENDIICIEDLQVKNMIKNRKLSRSISDVSWSEFIRQLEYKANWHGRQIVKVGKFFASSQICNKCGYKNEEVKDLNIREWICPSCNETHDRDINASINILKEGLRLITIQNK

SEQ ID NO: 3001 - protein, 372 aa, unidentified
MIAVKKAYKFRMYPNKKQQELINKTFGCCRFVYNKYLAKRIDVYKNDKETFTYKQCSSDLTNLKKELKWLKEPDKFSLQNALKDLDNAYKKFFKEKAGFPKFKSKKINRFSYKTNFTNGNIMYCGQYIKLPKLGMVKIRDKQVPQGRILNATISKEPSGRYYVSLCCIDVDIEVFENTNNHIGLDLGIKEFCISSCGEFIENPKYLKKSLNKLAKLQRELSRKTIGSLNRNKARLKVARLQEHIANQRNDFLQKLSTKLIKENDIICIEDLQVKNMIRNRKLSRLISDVSWSEFIRQLEYKANWYGRQIVKVGKFFASSQICNKCGYKNEEVKNLNIREWICPSCNETHDRDINASINILKEGLRLITIQNK

SEQ ID NO: 3002 - protein, 372 aa, unidentified
MIAVKKAYKFRMYPNKKQQELINKTFGCCRFVYNKYLAKRIEVYKNDKETFTYKQCSSDLTNLKKELNWLKEPDKFSLQNALKDLDNAYKKFFKEKAGFPKFKSKKINRFSYKTNFTNGNIMYCGQHIKLPKLGMVKIRDKQVPQGRILNATISKEPSGRYYVSLCCTDVDIEAFENTNNHIGLDLGIKEFCISSCGEFIENPKYLKKSLNKLAKLQRELSRKTIGSLNRNKARLKVARLQEHIANQRNDFLQKLSTKLIKENDIICIEDLQVKNMIRNRKLSRLISDVSWSEFIRQLEYKANWHGRQIVKVGKFFASSQICNKCGYKNEEVKDLNIREWICPSCNETHDRDINASINILKEGLRIITIQNK

SEQ ID NO: 3003 - protein, 372 aa, unidentified
MIVVEKAYKFRMYPNKKQQELINKTFGCCRFVYNKYLAKRIEVYKNDKETFTYKQCSSDLTNLKKELKWLKEPDKFSLQNALKDLDNAYKKFFKEKAGFPKFKSKKINRFSYKTNFTNGNIMYCGQHIKLPKLGMVKIRDKQVPQGRILNATISKEPSGRYYVSLCCTDVDIEAFENTNNQIGLDLGIKEFCISSCGEFIENPKYLKKSLNKLAKLQRELSRKTIGSLNRNKARLKVARLQEHIANQRKDFLQKLSTKLIKENDIICIEDLQVKNMIRNRKLSRLISDVSWSEFIRQLEYKANWHGRQIVKVGKFFASSQICNKCGYKNEEVKDLNIREWICPSCNETHDRDINASINILKEGLRLITIQNK

SEQ ID NO: 3004 - protein, 372 aa, unidentified
MVVVEKAYKFRMYPNKKQQELINKTFGCCRFVYNKYLAKRIDVYKNNKETFTYKQCSSDLTNLKKELKWLKEPDKFSLQNALKDLDNAYKKFFKEKTGFPKFKSKKINRFSYKTNFTNGNIMYCGQHIKLPKLGMVKIRDKQVPQGRILNATISKEPSGRYYVSLCCTDVDIEAFENTNNHIGLDLGIKEFCISSCGEFIENPKYLKKSLNKLAKLQRELSRKTIGSLNRNKARLKVARLQEHIANQRKDFLQKLSTKLIKENDIICIEDLQVKNMIKNHKLSRSISDVSWSEFIRQLEYKANWHGRQIVKVGKFFASSQICNKCGYKNEEVKDLNIREWICPSCNETHDRDINASINILKEGLRLITIQNK

SEQ ID NO: 3005 - protein, 372 aa, unidentified
MIAVKKAYKFRLYPNKKQQELINKTFGCCRFVYNKYLAKRIDVYKNNKETFTYKQCSSDLTNLKKELKWLKEPDKFSLQNALKDLDNAYKKFFKEKAGFPKFKSKKINRFSYKTNFTNGNIMYCGQHIKLPKLGMVKVRDKQVPQGRILNATISKEPSGRYYVSLCCTDVDIEAFENTNNHIGLDLGIKEFCISSCGEFIENPKYLKKSLNKLAKLQRELSRKTIGSLNRNKARLKVARLQEHIANQRNDFLQKLSTKLIKENDIICIEDLQVKNMIRNRKLSRLISDVSWSEFIRQLEYKANWHGRQIVKVGKFFASSQICNKCGYKNEEVKNLNIREWICPSCNETHDRDINASINILKEGLRLITIQNK

SEQ ID NO: 3006 - protein, 327 aa, unidentified
MAVVEKAYKFRMYPNKKQQELINKTFGCCRFVYNKYLAKRIEVYKNNKETFTYKQCSSDLTNLKKELKWLKEPDKFSLQNALKDLDNAYKKFFKEKAGFPKFKSKKINRFSYKTNFTNGNIMYCGQYIKLPKLGMVKVRDKQVPQGRILNATISKEPSGRYYVSLCCTNVDIEVFENTNNQIGLDLGIKEFCISSCGDFIENPKYLKKSLNKLAKLQRELSRKTIGSLNRNKARLKVARLQEHIANQRNDFLQKLSTKLIKENDIICIEDLQVKNMIRNRKLSRLISDVSWSEFVRQLKYKANWHGRQIVKVGKFFASSQICNKCGY

SEQ ID NO: 3007 - protein, 372 aa, unidentified
MIAVEKAYKFRMYPNKKQQELINKTFGCCRFVYNKYLAKRIEVYKNDKETFTYKQCSSDLTNLKKELKWLKEPDKFSLQNALKDLDNAYKKFFKKKAGFPKFKSKKINRFSYKTNFTNGNIVYCGQHIKLPKLGMVKVRDKQVPKGRILNATISKEPSGRYYVSLCCTDVDIEAFENTNNHIGLDLGIKEFCISSCGEFIENPKYLKKSLNKLAKLQRELSRKTIGSLNRNKARLKVARLQEHIANQRKDFLQKLSTKLIKENDIICIEDLQVKNMIRNRKLSRLISDVSWSEFIRQLEYKANWYGRKIVKVGKFFASSQICNKCGYKNEEVKNLNIREWICPSCNKTHDRDINASINILKEGLRLITIQNK

SEQ ID NO: 3008 - protein, 372 aa, unidentified
MIVVEKAYKFRMYPNKKQQELINKTFGCCRFVYNKYLAKRIEVYKNDKETFTYKQCSSDLTNLKKELKWLKEPDKFSLQNALKDLDNAYKKFFKKKAGFPKFKSKKINRFSYKTNFTNGNIVYCGQHIKLPKLGMVKIRDKQVPKGRILNATISKEPSGRYYVSLCCTDVDIEAFENTNNHIGLDLGIKEFCISSCGEFIENPKYLKKSLNKFAKLQRELSRKTIGSLNRNKARLKVARLQEHIANQRKDFLQKLSTKLIKENDIICIEDLQVKNMIRNRKLSRLISDVSWSEFIRQLEYKANWHGRQIVKVGKFFASSQICNKCGYKNEEVKDLNIREWICPSCNETHDRYINASINILKEGLRLITIQNK

SEQ ID NO: 3009 - protein, 372 aa, unidentified
MIAVEKAYKFRMYPNKKQQELINKTFGCCRFVYNKYLAKRIEVYKNDKETFTYKQCSSDLTNLKKELKWLKEPDKFSLQNALRDLDNAYKKFFKEKVGFPKFKSKKINRFSYKTNFTNGNIMYCGQHIKLPKLGMVKIRDKQVPQGRILNATISKEPSGRYYVSLCCTDVDIEAFENTNNQIGLDLGIKEFCISSCGEFIENPKYLKKSLNKLAKLQRELSRKTIGSLNRNKARLKVARLQEHIANQRNDFLQKLSTKLIKENDIICIEDLQVKNMIRNCKLSRLISDVSWSEFIRQLEYKANWHGRQIVKVGKFFASSQICNKCGYKNEEVKDLNIREWICPSCNETHDRDINASINILKEGLRLITIQNK

SEQ ID NO: 3010 - protein, 368 aa, unidentified
MIAVKKAYKFRMYPNKKQQELINKTFGCCRFVYNKYLAKRIDVYKNDKETFTYKQCSSDLTNLKKELKWLKEPDKFSLQNALKDLDNAYKKFFKEKAGFPKFKSKKINRFSYKTNFTNGNIMYFSQHIKLPKLGMVKIRDKQVPQGRILNATISKEPSGRYYVSLCCTDVDIEAFENTNNQIGLDLGIKEFCISSCGEFIENPKYLKKSLNKLAKLQRELSRKTIGSLNRNKARLKVARFQEHIANQRNDFLQKLSTKLIKENDIICIEDLQVKNMIRNRKLSRLISDVSWSEFIRQLEYKANWYGRQIVKVGKFFASSQICNKCGYKNEEVKDLNIREWICPSCNETHDRDINASINILKEGLRLIT

SEQ ID NO: 3011 - protein, 372 aa, unidentified
MVVVEKAYKFRMYPNKKQQELIDKTFGCCRFVYNKYLAKRIDVYKNDKETFTYKQCSSDLTNLKKELKWLKEPDKFSLQNALKDLENAYEKFFKEKTGFPKFKSKKTNRFSYKTNFTNGNIMYCGQHIKLPKLGMVKIRDKQVPQGRILNATISKEPSGRYYVSLCCTDVDIEAFENTNNQIGLDLGIKEFCISSCGDFIENPKYLKKSLNKLAKLQRELSRKTIGSLNRNKARLKVARLQEHIANQRKDFLQKLSTKLIKENDIICIEDLQVKNMIGNHKLSRLISDVSWSEFVRQLEYKANWHGRQIVKVGKFFASSQICNKCGYKNEEVKNLNIREWICPSCNETHDRDINASMNILKEGLRLITIQNK

SEQ ID NO: 3012 - protein, 372 aa, unidentified
MIAVKKAYKFRMYPNKKQQELINKTFGCCRFVYNKYLAKRIDVYKNNKETFTYKQCSSDLTNLKKELKWLKEPDKFSLQNALKDLDNAYEKFFKKKAGFPKFKSKKINRFSYKTNFTNGNIMYFSQHIKLPKLGMVKIRDKQVPKGRILNATISKEPSGRYYVSLCCTDVDIEAFENTNNHIGLDLGIKEFCISSCGEFIENPKYLKKSLNKLAKLQRELSRKTIGSLNRNKARLKVARLQEHIANQRKDFLQKLSTKLIKENDIICIEDLQVKNMIKNHKLSRSISDVSWSEFIRQLEYKANWYGRQIVKVGKFFASSQICNKCGYKNEEVKNLNIREWICPSCNETHDRDINASINILKEGLRLITIQNK

SEQ ID NO: 3013 - protein, 372 aa, unidentified
MIAVKKAYKFRLYPNKKQQELINKTFGCCRFVYNKYLAKRIDVYKNNKETFTYKQCSSDLTNLKKELKWLKEPDKFSLQNALKDLDNAYKKFFKEKAGFPKFKSKKINRFSYKTNFTNGNIMYCGQHIKLPKLGMVKIRDKQVPQGRILNATISKEPSGRYYVSLCCTDVDIEAFENTNNHIGLDLGIKEFCISSCGEFIENPKYLKKSLNKLAKLQRELSRKTIGSLNRNKARLKVARLQEHIANQRNDFLQKLSTKLIKENDIICIEDLQVKNMIRNRKLSRLISDVSWSEFIRQLEYKANWHGRQIVKVGKFFASSQICNKCGYKNEEVKNLNIREWICPSCNETHDRDINASINILKEGLRLITIQNK

SEQ ID NO: 3014 - protein, 372 aa, unidentified
MIAVKKAYKFRMYPNKKQQELINKTFGCCRFVYNKYLAKRIEVYKNDKETFTYKQCSSDLTNLKKELNWLKEPDKFSLQNALKDLDNAYKKFFKEKAGFPKFKSKKINRFSYKTNFTNGNIMYCGQYIKLPKLGMVKIRDKQVPQGRILNATISKEPSGRYYVSLCCTDVDIEAFENTNNHIGLDLGIKEFCISSCGDFIENPKYLKKSLNKLAKLQRELSRKTIGSLNRNKARLKVARLQEHIANQRNDFLQKLSTKLIKENDIICIEDLQVKNMIRNRKLSRLISDVSWSEFIRQLEYKANWHGRQIVKVGKFFASSQICNKCGYKNEEVKDLNIREWICPSCNETHDRDINASINILKEGLRIITIQNK

SEQ ID NO: 3015 - protein, 333 aa, unidentified
MVVVEKAYKFRMYPNKKQQELINKTFGCCRFVYNKYLAKRIDVYKNNKETFTYKQCSSDLTNLKKELKWLKEPDKFSLQNALKDLDNAYKKFFKEKTGFPKFKSKKINRFSYKTNFTNGNIMYCGQHIKLPKLGMVKIRDKQVPQGRILNATISKEPSGRYYVSLCCTDVDIEAFENTNNHIGLDLGIKEFCISSCGEFIENPKYLKKSLNKLAKLQRELSRKTIGSLNRNKARLKVARLQEHIANQRKDFLQKLSTKLIKENDIICIEDLQVKNMIKNHKLSRSISDVSWSEFIRQLEYKANWHGRQIVKVGKFFASSQICNKCGYKNEEVK

SEQ ID NO: 3016 - protein, 372 aa, unidentified
MIAVKKAYKFRMYPNKKQQELINKTFGCCRFVYNKYLAKRIEVYKNDKETFTYKQCSSDLTNLKKELNWLKEPDKFSLQNALKDLDNAYKKFFKEKAGFPKFKSKKINRFSYKTNFTNGNIMYCGQYIKLPKLGMVKIRDKQVPQGRILNATISKEPSGRYYVSLCCTDVDIEAFENTNNHIGLDLGIKEFCISSCGEFIENPKYLKKSLNKLAKLQRELSRKTIGSLNRNKARLKVARLQEHIANQRNDFLQKLSTKLIKENDIICIEDLQVKNMIKNRKLSRSISDVSWSEFIRQLEYKANWHGRQIVKVGKFFASSQICNKCGYKNEEVKNLNIREWICPSCNETHDRDINASINILKEGLRLITIQNK

SEQ ID NO: 3017 - protein, 372 aa, unidentified
MIAVKKAYKFRMYPNKKQQELINKTFGCCRFVYNKYLAKRIDVYKNDKETFTYKQCSSDLTNLKKELNWLKEPDKFSLQNALKDLDNAYKKFFKEKAGFPKFKSKKINRFSYKTNFTNGNIMYCGQYIKLPKLGMVKIRDKQVPQGRILNATISKEPSGRYYVSLCCTDVDIEAFENTNNHIGLDLGIKEFCISSCGEFIENPKYLKKSLNKLAKLQRELSRKTIGSLNRNKARLKVARLQEHIANQRNDFLQKLSTKLIKENDIICIEDLQVKNMIRNRKLSRLISDVSWSEFIRQLEYKANWHGRQIVKVGKFFASSQICNKCGYKNEEVKDLNIREWICPSCNETHDRDINASINILKEGLRLITIQNK

SEQ ID NO: 3018 - protein, 334 aa, unidentified
MVVVEKAYKFRMYPNKKQQELINKTFGCCRFVYNKYLAKRIDVYKNNKETFTYKQCSSDLTNLKKELKWLKEPDKFSLQNALKDLDNAYKKFFKEKTGFPKFKSKKINRFSYKTNFTNGNIMYCGQHIKLPKLGMVKIRDKQVPQGRILNATISKEPSGRYYVSLCCTDVDIEAFENTNNHIGLDLGIKEFCISSCGEFIENPKYLKKSLNKLAKLQRELSRKTIGSLNRNKARLKVARLQEHIANQRKDFLQKLSTKLIKENDIICIEDLQVKNMIKNHKLSRSISDVSWSEFIRQLEYKANWHGRQIVKVGKFFASSQICNKCGYKNEEVKN

SEQ ID NO: 3019 - protein, 372 aa, unidentified
MIAVEKAYKFRMYPNKKQQELINKTFGCCRFVYNKYLAKRIEVYKNNKETFTYKQCSSDLTNLKKELKWLKEPDKFSLQNALKDLDNAYKKFFKEKAGFPKFKSKKINRFSYKTNFTNGNIMYCGQHIKLPKLGMVKIRDKQVPKGRILNATISKEPSGRYYVSLCCTDVDIEVFENTNNQIGLDLGIKEFCISSCGEFIENPKYLKKSLNKLAKLQRELSRKTIGSLNRNKARLKVARLQEHIANQRNDFLQKLSTKLIKENDIICIEDLQVKNMIKNRKLSRLISDVSWSEFIRQLQYKANWHGRQIVKVGKFFASSQICNKCGYKNEEVKDLNIREWICPSCNETHDRDINASINILKEGLRLITTQNK

SEQ ID NO: 3020 - protein, 372 aa, unidentified
MAVVEKAYKFRMYPNKKQQELINKTFGCCRFVYNKYLAKRIEVYKNNKETFTYKQCSSDLTNLKKELKWLKEPDKFSLQNALKDLDNAYKKFFKEKAGFPKFKSKKINRFSYKTNFTNGNIMYCGQYIKLPKLGMVKIRDKQVPQGRILNATISKEPSGRYYVSLCCTNVDIEVFENTNNQIGLDLGIKEFCISSCGDFIENPKYLKKSLNKLAKLQRELSRKTIGSLNRNKARLKVARLQEHIANQRNDFLQKLSTKLIKENDIICIEDLQVKNMIRNRKLSRLISDVSWSEFVRQLKYKANWHGRQIVKVGKFFASSQICNKCGYKNEEMKDLNIREWICPSCNETHDRDINASINILKEGLRLITIQNK

SEQ ID NO: 3021 - protein, 372 aa, unidentified
MVVVEKAYKFRMYPNKKQQELINKTFGCCRFVYNKYLAKRIDVYKNNKETFTYKQCSSDLTNLKKELKWLKEPDKFSLQNALKDLDNAYKKFFKEKVGFPKFKSKKINRFSYKTNFTNGNIMYCGQHIKLPKLGMVKIRDKQVPQGRILNATISKEPSGRYYVSLCCTDVDIEAFENTNNHIGLDLGIKEFCISSCGEFIENPKYLKKSLNKLAKLQRELSRKTIGSLNRNKARLKVARLQEHIANQRNDFLQKLSTKLIKENDIICIEDLQVKNMIRNRKLSRSISDVSWSEFIRQLEYKANWYGRKIVKVGKFFASSQICNKCGYKNEEVKDLNIREWICPSCNETHDRDINASINILKEGLRLITIQNK

SEQ ID NO: 3022 - protein, 372 aa, unidentified
MVVVEKAYKFRMYPNKKQQELINKTFGCCRFVYNKYLAKRIDVYKNNKETFTYKQCSSDLTNLKKELKWLKEPDKFSLQNALKDLDNAYKKFFKEKTGFPKFKSKKINRFSYKTNFTNGNIMYCGQHIKLPKLGMVKIRDKQVPKGRILNATISKEPSGRYYVSLCCTDVDIEAFENTNNHIGLDLGIKEFCISSCGEFIENPKYLKKSLNKLAKLQRELSRKTIGSLNRNKARLKVARLQEHIANQRNDFLQKLSTKLIKENDIICIEDLQVKNMIRNRKLSRSISDVSWSEFIRQLEYKANWYGRKIVKVGKFFASSQICNKCGYKNEEVKKLNIREWICPSCNETHDRDINASINILKEGLRLITIQNK

SEQ ID NO: 3023 - protein, 372 aa, unidentified
MIAVKKAYKFRMYPNKKQQELINKTFGCCRFVYNKYLAKRIDVYKNDKETFTYKQCSSDLTNLKKELNWLKEPDKFSLQNALKDLDNAYKKFFKEKAGFPKFKSKKINRFSYKTNFTNGNIMYFSQHIKLPKLGMVKIRDKQVPKGRILNATISKEPSGRYYVSLCCTDVDIEAFENTNNQIGLDLGIKEFCISSCGEFIENPKYLKKSLNKLAKLQRELSRKTIGSLNRNKARLKVARLQEHIANQRKDFLQKLSTKLIKENDIICIEDLQVKNMIRNRKLSRLISDVSWSEFIRQLEYKANWHGRQIVKVGKFFASSQICNKCGYKNEEVKDLNIREWICPSCNETHDRDINASINILKEGLRLITIQNK

SEQ ID NO: 3024 - protein, 369 aa, unidentified
MEKAYKFRMYPNKKQQELINKTFGCCRFVYNKYLAKRIEVYKNDKETFTYKQCSSDLTNLKKELKWLKEPDKFSLQNALKDLDNAYKKFFKEKVGFPKFKSKKINRFSYKTNFTNGNIMYCGQHIKLPKLGMVKIRDKQVPKGRILNATISKEPSGRYYVSLCCTDVDIEVFENTNNQIGLDLGIKEFCISSCGEFIENPKYLKKSLNKLAKLQRELSRKTIGSLNRNKARLKVARLQEHIANQRNDFLQKLSTKLIKENDIICIEDLQVKNMIKNRRLSRLISDVSWSEFIRQLEYKANWHGRKIVKVGKFFASSQICNKCGYKNEEVKDLNIREWICPSCNETHDRDINASINILKEGLRLITIQNK

SEQ ID NO: 3025 - protein, 369 aa, unidentified
MEKAYKFRMYPNKKQQELINKTFGCCRFVYNKYLAKRIEVYKNDKETFTYKQCSSDLTNLKKELKWLKEPDKFSLQNALKDLDNAYKKFFKEKVGFPKFKSKKINRFSYKTNFTNGNIMYCGQHIKLPKLGMVKIRDKQVPQGRILNATISKEPSGRYYVSLCCTDVDIEAFENTNNHIGLDLGIKEFCISSCGEFIENPKYLKKSLNKLAKLQRELSRKTIGSLNRNKARLKVARLQEHIANQRNDFLQKLSTKLIKENDIICIEDLQVKNMIRNRKLSRLISDVSWSEFIRQLEYKANWYGRKIVKVGKFFASSQICNKCGYKNEEVKDLNIREWICPSCNETHDRDINASINILKEGLRLITIQNK

SEQ ID NO: 3026 - protein, 277 aa, unidentified
MIAVKKAYKFRIYPNKKQQELINKTFGCCRFVYNKYLAKRIDVYKNDKETFTYKQCSSDLTNLKKELNWLKEPDKFSLQNALKDLDNAYKKFFKEKAGFPKFKSKKINRFSYKTNFTNGNIMYCGQHIKLPKLGMVKVRDKQVPKGRILNATISKEPSGRYYVSLCCTDVDIEAFENTNNHIGLDLGIKEFCISSCGEFIENPKYLKKSLNKLAKLQRELSRKTIGSLNRNKARLKVARLQEHIANQRNDFLQKLSTKLIKENDIICIEDLQVKNMI

SEQ ID NO: 3027 - protein, 333 aa, unidentified
MVVVEKAYKFRMYPNKKQQELINKTFGCCRFVYNKYLAKRIDVYKNNKETFTYKQCSSDLTNLKKELNWLKEPDKFSLQNALKDLDNAYKKFFKKKAGFPKFKSKKINRFSYKTNFTNGNIVYCGQHIKLPKLGMVKIRDKQVPQGRILNATISKEPSGRYYVSLCCTDVDIEAFENTNNHIGLDLGIKEFCISSCGDFIENPKYLKKSLNKLAKLQRELSRKTIGSLNRNKARLKVARLQEHIANQRNDFLQKLSTKLIKENDIICIEDLQVKNMIRNHKLSRLISDVSWSEFIRQLEYKANWHGRQIVKVGKFFASSQICNKCGYKNEEVK

SEQ ID NO: 3028 - protein, 335 aa, unidentified
MIVVEKAYKFRMYPNKKQQELINKTFGCCRFVYNKYLAKRIEVYKNDKETFTYKQCSSDLTNLKKELNWLKEPDKFSLQNALKDLDNAYKKFFKKKAGFPKFKSKKINRFSYKTNFTNGNIVYCGQHIKLPKLGMVKIRDKQVPKGRILNATISKEPSGRYYVSLCCTDVDIEAFENTNNHIGLDLGIKEFCISSCGEFIENPKYLKKSLNKFAKLQRELSRKTIGSLNRNKARLKVARLQEHIANQRKDFLQKLSTKLIKENDIICIEDLQVKNMIRNRKLSRLISDVSWSEFIRQLEYKANWHGRQIVKVGKFFASSQICNKCGYKNEEVKDL

SEQ ID NO: 3029 - protein, 372 aa, unidentified
MIAVKKAYKFRMYPNKKQQELINKTFGCCRFVYNKYLAKRIDVYKNDKETFTYKQCSSDLTNLKKELKWLKEPDKFSLQNALKDLDNAYKKFFKEKAGFPKFKSKKINRFSYKTNFTNGNIMYCGQHIKLPKLGMVKIRDKQVPKGRILNATISKEPSGRYYVSLCCIDVDIEVFENTNNHIGLDLGIKEFCISSCGEFIENPKYLKKSLNKLAKLQRELSRKTIGSLNRNKARLKVARLQEHIANQRNDFLQKLSTKLIKENDIICIEDLQVKNMIRNRKLSRLISDVSWSEFIRQLEYKANWHGRQIVKVGKFFASSQICNKCGYKNEEVKDLNIREWIYPSCNETHDRDINASINILKEGLRLITIQNK

SEQ ID NO: 3030 - protein, 277 aa, unidentified
MIAVKKAYKFRMYPNKKQQELINKTFGCCRFVYNKYLAKRIDVYKNDKETFTYKQCSSDLTNLKKELKWLKEPDKFSLQNALKDLDNAYKKFFKEKAGFPKFKSKKINRFSYKTNFTNGNIMYCGQHIKLPKLGMVKIRDKQVPQGRILNATISKEPSGRYYVSLCCTDVDIEVFENTNNHIGLDLGIKEFCISSCGEFIENPKYLKKSLNKLAKLQRELSRKTIGSLNRNKARLKVARLQEHIANQRNDFLQKLSTKLIKENDIICIEDLQVKNMI

SEQ ID NO: 3031 - protein, 372 aa, unidentified
MVVVEKAYKFRMYPNKKQQELINKTFGCCRFVYNKYLAKRIDVYKNNKETFTYKQCSSDLTNLKKELNWLKEPDKFSLQNALKDLDNAYKKFFKKKAGFPKFKSKKINRFSYKTNFTNGNIVYCGQHIKLPKLGMVKIRDKQVPQGRILNATISKEPSGRYYVSLCCTDVDIEVFENTNNQIGLDLGIKEFCISSCGEFIENPKYLKKSLNKLAKLQRELSRKTIGSLNRNKARLKVARFQEHIANQRNDFLQKLSTKLIKENDIICIEDLQVKNMIRNRKLSRLISDVSWSEFIRQLEYKANWHGRQIVKVGKFFASSQICNKCGYKNEEVKDLNIREWICPSCNETHDRDINASINILKEGLRLITIQNK

SEQ ID NO: 3032 - protein, 372 aa, unidentified
MIAVEKAYKFRMYPNKKQQELINKTFGCCRFVYNKYLAKRIEVYKNDKETFTYKQCSSDLTNLKKELNWLKEPDKFSLQNALKDLDNAYKKFFKKKAGFPKFKSKKINRFSYKTNFTNGNIVYCGQHIKLPKLGMVKIRDKQVPQGRILNATISKEPSGRYYVSLCCTDVDIEVFENTNNQIGLDLGIKEFCISSCGEFIENPKYLKKSLNKLAKLQRELSRKTIGSLNRNKARLKVARLQEHIANQRNDFLQKLSTKLIKENDIICIEDLQVKNMIRNRKLSRLISDVSWSEFIRQLEYKANWHGRQIVKVGKFFASSQICNKCGYKNEEVKDLNIREWICPSCNETHDRDINASINILKEGLRLITIQNK

SEQ ID NO: 3033 - protein, 372 aa, unidentified
MAVVEKAYKFRMYPNKKQQELINKTFGCCRFVYNKYLAKRIDVYKNNKETFTYKQCSSDLTNLKKELKWLKEPDKFSLQNALKDLDNAYKKFFKEKVGFPKFKSKKINRFSYKTNFTNGNIMYCGQHIKLPKLGMVKVRDKQVPKGRILNATISKEPSGRYYVSLCCTDVDIEAFENTNNQIGLDLGIKEFCISSCGEFIENPKYLKKSLNKLAKLQRELSRKTIGSLNRNKARLKVARLQEHIANQRNDFLQKLSTKLIKENDIICIEDLQVKNMIRNRKLSRLISDVSWSEFIRQLEYKANWHGRQIVKVGKFFASSQICNKCGYKNEEVKNLNIREWICPSCNETHDRDINASINILKEGLRLITIQNK

SEQ ID NO: 3034 - protein, 458 aa, unidentified
MEKAYKFRMYPNKKQQELINKTFGCCRFVYNKYLAKRIEVYKNAKETFTYKQCSSDLTNLKKELKWLKEPDKFSLQNALKDLDNAYKKFFKEKAGFPKFKSKKINRFSYKTNFTNGNIMYCGQHIKLPKLGMVKIRDKQVPQGRILNATISKEPSGRYYVSLCCTDVDIEAFENTNNQIGLDLGIKEFCISSCGEFIENPKYLKKSLNKLAKLQRELSRKTIGSLNRNKARLKVARLQEHIANQRNDFLQKLSTKLIKENDIICIEDLQVKNMIKNRKLSRLISDVSWSEFVRQLEYKANWYGRQIVKVGKFFASSQICXLKVARLQEHIANQRNDFLQKLSTKLIKENDIICIEDLQVKNMIKNRKLSRLISDVSWSEFVRQLEYKANWYGRQIVKVGKFFASSQICNKCGYKNEEVKDLNIREWICPSCNETHDRDINASINILKEGLRLITIQNK

SEQ ID NO: 3035 - protein, 372 aa, unidentified
MVVVEKAYKFRMYPNKKQQELINKTFGCCRFVYNKYLAKRIDVYKNNKETFTYKQCSSDLTNLKKELKWLKEPDKFSLQNALKDLDNAYKKFFKEKTGFPKFKSKKINRFSYKTNFTNGNIMYCGQHIKLPKLGMVKIRDKQVPQGRILNATISKEPSGRYYVSLCCTDVDIEAFENTNNHIGLDLGIKEFCISSCGEFIENPKYLKKSLNKLAKLQRELSRKTIGSLNRNKARLKVARLQEHIANQRNDFLQKLSTKLIKENDIICIEDLQVKNMIRNRKLSRSISDVSWSEFIRQLEYKANWYGRKIVKVGKFFASSQICNKCGYKNEEVKKLNIREWICPSCNETHDRDINASINILKEGLRLITIQNK

SEQ ID NO: 3036 - protein, 372 aa, unidentified
MIVVEKAYKFRMYPNKKQQELINKTFGCCRFVYNKYLAKRIEVYKNDKETFTYKQCSSDLTNLKKELNWLKEPDKFSLQNALKDLDNAYKKFFKKKAGFPKFKSKKINRFSYKTNFTNGNIVYCGQHIKLPKLGMVKIRDKQVPKGRILNATISKEPSGRYYVSLCCTDVYIEAFENTNNHIGLDLGIKEFCISSCGEFIENPKYLKKSLNKFAKLQRELSRKTIGSLNRNKARLKVARLQEHIANQRKDFLQKLSTKLIKENDIICIEDLQVKNMIRNRKLSRLISDVSWSEFIRQLEYKANWHGRQIVKVGKFFASSQICNKCGYKNEEVKDLNIREWICPSCNETHDRDINASINILKEGLRLITIQNK

SEQ ID NO: 3037 - protein, 372 aa, unidentified
MIVVEKAYKFRMYPNKKQQELINKTFGCCRFVYNKYLAKRIEVYKNDKETFTYKQCSSDLTNLKKELKWLKEPDKFSLQNALKDLDNAYKKFFKEKAGFPKFKSKKINRFSYKTNFTNGNIMYCGQHIKLPKLGMVKIRDKQVPQGRILNATISKEPSGRYYVSLCCTDVDIEVFENTNNQIGLDLGIKEFCISSCGEFIENPKYLKKSLNKLAKLQRELSRKTIGSLNRNKARLKVARLQEHIANQRNDFLQKLSTKLIKENDIICIEDLQVKNMIRNRKLSRLISDVSWSEFIRQLEYKANWYGRQIVKVGKFFASSQICNKCGYKNEEVKDLNIREWICPSCNETHDRDINASINILKEGLRLITIQNK

SEQ ID NO: 3038 - protein, 271 aa, unidentified
MVVVEKAYKFRMYPNKKQQELINKTFGCCRFVYNKYLAKRIEVYKNAKETFTYKQCSSDLTNLKKELKWLKEPDKFSLQNALRDLDNAYKKFFKEKAGFPKFKSKKINRFSYKTNFTNGNIMYCGQHIKLPKLGMVKIRDKQVPKGRILNATISKEPSGRYYVSLCCTDVDIEAFENTNNHIGLDLGIKEFCISSCGDFIENPKYLKKSLNKLAKLQRELSRKTIGSLNRNKARLKVARLQEHIANQRNDFLQKLSTKLIKENDIICIEDL

SEQ ID NO: 3039 - protein, 289 aa, unidentified
MIVVEKAYKFRMYPNKKQQELINKTFGCCRFVYNKYLAKRIEVYKNAKETFTYKQCSSDLTNLKKELNWLKESDKFSLQNALKDLDNAYKKFFKEKAGFPKFKSKKINRFSYKTNFTNGNIMYCGQHIKLPKLDMVKIRDKQVPKGRILNATISKEPSGRYYVSLCCTDVDIEAFENTNNQIGLDLGIKEFCISSCGEFIENPKYLKKSLNKLAKLQRELSRKTIGSLNRNKARLKVARLQEHIANQRNDFLQKLSTKLIKDNDIICIEDLQVKNMIRNRKLSRLISDV

SEQ ID NO: 3040 - protein, 332 aa, unidentified
MVVVEKAYKFRMYPNKKQQELINKTFGCCRFVYNKYLAKRIDVYKNNKETFTYKQCSSDLTNLKKELNWLKEPDKFSLQNALKDLDNAYKKFFKKKAGFPKFKSKKINRFSYKTNFTNGNIVYCGQHIKLPKLGMVKIRDKQVPQGRILNATISKEPSGRYYVSLCCTDVDIEVFENTNNQIGLDLGIKEFCISSCGDFIENPKYLKKSLNKLAKLQRELSRKTIGSLNRNKARLKVARLQEHIANQRNDFLQKLSTKLIKENDIICIEDLQVKNMIRNRKLSRLISDVSWSEFIRQLEYKANWHGRQIVKVGKFFASSQICNKCGYKNEEV

SEQ ID NO: 3041 - protein, 372 aa, unidentified
MTVVEKAYKFRMYPNKKQQELINKTFGCCRFVYNKYLAKRIEVYKNAKETFTYKQCSSDLTNLKKELNWLKEPDKFSLQNALKDLDNAYKKFFKEKAGFPKFKSKKINRFSYKTNFTNGNIMYCGQHIKLPKLDMVKIRDKQVPKGRILNATISKEPSGRYYVSLCCTDVDIEAFENTNNQIGLDLGIKEFCISSCGEFIENPKYFKKSLNKLAKLQRELSRKTIGSLNRNKARLKVARLQEHIANQRNDFLQKLSTKLIKENDIICIEDLQVKNMIKNRKLSRLISDVSWSEFIHQLKYKANWYGRQIVKVGKFFASSQICNKCGYKNEEVKDLNIREWICPSCNETHDRDINASINILKEGLRLITIQNK

SEQ ID NO: 3042 - protein, 372 aa, unidentified
MIAVKKAYKFRMYPNKKQQELINKTFGCCRFVYNKYLAKRIEVYKNDKETFTYKQCSSDLTNLKKELNWLKEPDKFSLQNALKDLDNAYKKFFKEKAGFPKFKSKKINRFSYKTNFTNGNIMYCGQYIKLPKLGMVKVRDKQVPQGRILNATISKEPSGRYYVSLCCTDVDIEAFENTNNHIGLDLGIKEFCISSCGEFIENPKYLKKSLNKLAKLQRELSRKTIGSLNRNKARLKVARLQEHIANQRNDFLQKLSTKLIKENDIICIEDLQVKNMIKNRKLSRSISDVSWSEFIRQLEYKANWHGRQIVKVGKFFASSQICNKCGYKNEEVKDLNIREWICPSCNETHDRDINASINILKEGLRLITIQNK

SEQ ID NO: 3043 - protein, 372 aa, unidentified
MVVVEKAYKFRMYPNKKQQELINKTFGCCRFVYNKYLAKRIEVYKNAKETFTYKQCSSDLTNLKKELNWLKEPDKFSLQNALKDLDNAYKKFFKEKAGFPKFKSKKINRFSYKTNFTNGNIMYCGQHIKLPKLDMVKIRDKQVPKGRILNATISKEPSGRYYVSLCCTDVDIEAFENTNNQIGLDLGIKEFCISSCGEFIENPKYFKKSLNKLAKLQRELSRKTIGSLNRNKARLKVARLQEHIANQRNDFLQKLSTKLIKENDIICIEDLQVKNMIKNRKLSRLISDVSWSEFIHQLKYKANWYGRQIVKVGKFFASSQICNKCGYKNEEVKDLNIREWICPSCNETHDRDINASINILKEGLRLITIQNK

SEQ ID NO: 3044 - protein, 372 aa, unidentified
MIAVEKAYKFRMYPNKKQQELINKTFGCCRFVYNKYLAKRIDVYKNDKETFTYKQCSSDLTNLKKELKWLKEPDKFSLQNALKDLDNAYKKFFKEKAGFPKFKSKKINRFSYKTNFTNGNIMYCGQHIKLPKLGMVKVRDKQVPKGRILNATISKEPSGRYYVSLCCTDVDIEAFENTNNHIGLDLGIKEFCISSCGEFIENPKYLKKSLNKLAKLQRELSRKTIGSLNRNKARLKVARLQEHIANQRNDFLQKLSTKLIKENDIICIEDLQVKNMIKNHKLSRLISDVSWSEFIRQLEYKANWHGRQIVKVGKFFASSQICNKCGYKNEEVKNLNIREWICPSCNETHDRDINASINILKEGLRLITIQNK

SEQ ID NO: 3045 - protein, 375 aa, unidentified
MVVVEKAYKFRMYPNKKQQELINKTFGCCRFVYNKYLAKRIEVYKNDKETFTYKQCSSDLTNLKKELKWLKEPDKFSLQNALKDLDNAYEKFFKEKAGFPKFKSKKINRFSYKTNFTNGNIMYFSQHIKLPKLGMVKIRDKQVPKGRILNATISKEPSGRYYVSLCCTDVDIEAFENTNNQIGLDLGIKEFCISSCGDFIENPKYLKKSLNKLAKLQRELSRKTIGSLNRNKARLKVARLQEHIANQRNDFLQKLSTKLIKENDIICIEDLQVKNMIRNRKLSRLISDVPWSEFIRQLEYKANWYGRQIVKVGKFFASSQICNKCGYKNEEVKNLNIREWICPSCNETHDRDINASINILKEGLRLITIQNKQLM

SEQ ID NO: 3046 - protein, 369 aa, unidentified
MKKAYKFRMYPNKKQQELINKTFGCCRFVYNKYLAKRIEVYKNAKETFTYKQCSSDLTNLKKELNWLKEPDKFSLQNALKDLENAYKKFFKEKAGFPKFKSKKINRFSYKTNFTNGNIMYCGQHIKLPKLGMVKVRDKQVPKGRILNATISKEPSGRYYVSLCCTDVDIEAFENTNNQIGLDLGIKEFCISSCGEFIENPKYLKKSLNKLAKLQRELSRKTIGSLNRNKARLKVARLQEHIANQRKDFLQKLSTKLIKENDIICIEDLQVKNMIKNHKLSRLISDVSWSEFIRQLEYKANWHGRQIVKVGKFFASSQICNKCGYKSEVVKDLNIREWICPSCNETHDRDINASINILKEGLRLITIQNK

SEQ ID NO: 3047 - protein, 369 aa, unidentified
MEKAYKFRMYPNKKQQELINKTFGCCRFVYNKYLAKRIEVYKNNKETFTYKQCSSDLTNLKKELNWLKEPDKFSLQNALKDLDNAYKKFFKEKAGFPKFKSKKINRFSYKTNFTNGNIMYCGQHIKLPKLGMVKIRDKQVPKGRILNATISKEPSGRYYVSLCCTDVDIEAFENTNNHIGLDLGIKEFCISSCGEFIENPKYLKKSLSKLAKLQRELSRKTIGSLNRNKARLKVARLQEHIANQRKDFLQKLSTKLIKENDIICIEDLQVKNMIRNHKLSRLISDVSWSEFVRQLEYKANWYGRQIVKVGKFFASSQICNKCGYKNEEVKNLNIREWICPSCNETHDRDINASINILKEGLRLITIQNK

SEQ ID NO: 3048 - protein, 369 aa, unidentified
MEKAYKFRMYPNKKQQELINKTFGCCRFVYNKYLAKRIDVYKNNKETFTYKQCSSDLTNLKKELKWLKEPDKFSLQNALKDLDNAYKKFFKEKVGFPKFKSKKINRFSYKTNFTNGNIMYCGQHIKLPKLGMVKVRDKQVPKGRILNATISKEPSGRYYVSLCCTDVDIEVFENTNNQIGLDLGIKEFCISSCGEFIENPKYLKKSLNKLAKLQRELSRKTIGSLNRNKARLKVARLQEHIANQRKDFLQKLSTKLIKENDIICIEDLQVKNMIKNHKLSRLISDVSWSEFIRQLEYKANWYGRKIVKVGKFFASSQICNKCGYKNEEVKNLNIREWICPSCNETHDRDINASINILKEGLRLITIQNK

SEQ ID NO: 3049 - protein, 369 aa, unidentified
MEKAYKFRMYPNKKQQELINKTFGCCRFVYNKYLAKRIEVYKNDKETFTYKQCSSDLTNLKKELKWLKEPDKFSLQNALKDLDNAYKKFFKEKAGFPKFKSKKINRFSYKTNFTNGNIMYLGQHIKLPKLGMIKIRDKQVPQGRILNATISKEPSGRYYVSLCCTDVDIEAFENTNNQIGLDLGIKEFCISSCGEFIENPKYLKKSLNKLAKLQRELSRKTIGSLNRNKARLKVARLQEHIANQRKDFLQKLSTKLIKEDDIICIEDLQVKNMIRNRKLSRLISDVSWSEFIRQLEYKANWHGRQIVKVGKFFASSQICNKCGYKNEEVKNLNIREWICPSCNETHNRDINASINILKEGLRLITIQNK

SEQ ID NO: 3050 - protein, 369 aa, unidentified
MEKAYKFRMYPNKKQQELINKTFGCCRFVYNKYLAKRIDVYKNDKETFTYKQCSSDLTNLKKELKWLKEPDKFSLQNALKDLDNAYKKFFKEKVGFPKFKSKKINRFSYKTNFTNGNIMYLGQHIKLPKLGMIKIRDKQVPQGRILNATISKEPSGRYYVSLCCTDVDIEAFENTNNQIGLDLGIKEFCISSCGEFIENPKYLKKSLNKLAKLQRELSRKTIGSLNRNKARLKVARLQEHIANQRKDFLQKLSTKLIKENDIICIEDLQVKNMIRNRKLSRLISDVSWSEFIRQLEYKANWHGRQIVKVGKFFASSQICNKCGYKNEEVKNLNIREWICPSCNETHNRDINASINILKEGLRLITIQNK

SEQ ID NO: 3051 - protein, 372 aa, unidentified
MIVVEKAYKFRMYPNKKQQELINKTFGCCRFVYNKYLAKRIEVYKNDKETFTYKQCSSDLTNLKKELKWLKEPDKFSLQNALKDLDNAYKKFFKEKAGFPKFKSKKINRFSYKTNFTNGNIMYLGQHIKLPKLGMIKIRDKQVPQGRILNATISKEPSGRYYVSLCCTDVDIEAFENTNNQIGLDLGIKEFCISSCGEFIENPKYLKKSLNKLAKLQRELSRKTIGSLNRNKARLKVARLQEHIANQRKDFLQKLSTKLIKEDDIICIEDLQVKNMIRNRKLSRLISDVSWSEFIRQLEYKANWHGRQIVKVGKFFASSQICNKCGYKNEEVKNLNIREWICPSCNETHNRDINASINILKEGLRLITIQNK

SEQ ID NO: 3052 - protein, 372 aa, unidentified
MIVVEKAYKFRMYPNKKQQELINKTFGCCRFVYNKYLAKRIDVYKNDKETFTYKQCSSDLTNLKKELKWLKEPDKFSLQNALKDLDNAYKKFFKEKVGFPKFKSKKINRFSYKTNFTNGNIMYLGQHIKLPKLGMIKIRDKQVPQGRILNATISKEPSGRYYVSLCCTDVDIEAFENTNNQIGLDLGIKEFCISSCGEFIENPKYLKKSLNKLAKLQRELSRKTIGSLNRNKARLKVARLQEHIANQRKDFLQKLSTKLIKENDIICIEDLQVKNMIRNRKLSRLISDVSWSEFIRQLEYKANWHGRQIVKVGKFFASSQICNKCGYKNEEVKNLNIREWICPSCNETHNRDINASINILKEGLRLITIQNK

SEQ ID NO: 3053 - protein, 372 aa, unidentified
MIVVEKAYKFRMYPNKKQQELINKTFGCCRFVYNKYLAKRIDVYKNDKETFTYKQCSSDLTNLKKELKWLKEPDKFSLQNALKDLDNAYEKFFKEKAGFPKFKSKKINRFSYKTNFTNGNIMYFSQHIKLPKLGMVKIRDKQVPKGRILNATISKEPSGRYYVSLCCTDVDIEAFENTNNQIGLDLGIKEFCISSCGDFIENPKYLKKSLNKLAKLQRELSRKTIGSLNRNKARLKVARLQEHIANQRNDFLQKLSTKLIKENDIICIEDLQVKNMIRNRKLSRLISNVSWSEFIRQLEYKANWHGRQIVKVGKFFASSQICNKCGYKNEEVKDLNIREWICPSCNETHDRDINASINILKEGLRLITIQNK

SEQ ID NO: 3054 - protein, 372 aa, unidentified
MIAVKKAYKFRMYPNKKQQELINKTFGCCRFVYNKYLAKRIDVYKNDKETFTYKQCSSDLTNLKKELKWLKEPDKFSLQNALKDLDNAYKKFFKEKAGFPKFKSKKINRFSYKTNFTNGNIMYCGQHIKLPKLGMVKIRDKQVPQGRILNATISKEPSGRYYVSLCCTDVDIEAFENTNNHIGLDLGIKEFCISSCGEFIENPKYLKKSLNKLAKLQRELSRKTIGSLNRNKARLKVARLQEHIANQRNDFLQKLSTKLIKENDIICIEDLQVKNMIRNRKLSRLISDVSWSEFIRQLEYKANWHGRQIVKVGKFFESSQICNKCGYKNEEVKNLNIREWICPSCNETHDRDINASRNILKEGLRLITIQNK

SEQ ID NO: 3055 - protein, 372 aa, unidentified
MIAVEKAYKFRMYPNKKQQELINKTFGCCRFVYNKYLAKRIEVYKNDKETFTYKQCSSDLTNLKKELNWLKEPDKFSLQNALKDLENAYEKFFKEKAGFPKFKSKKTNRFSYKTNFTNGNIMYCGQHIKLPKLGMVKIRDKQVPKGRILNATISKEPSGRYYVSLCCTDVDIEAFENTNNQIGLDLGIKEFCISSCGEFIENPKYLKKSLNKLAKLQRELSRKTIGSLNRNKARLKVARLQEHIANQRNDFLQKLSTKLIKENDIICIEDLQVKNMIRNHKLSRLISDVSWSEFIRQLEYKANWYGRKIVKVGKFFASSQICNKCGYKNEEVKDLNIRDWICPSCNETHDRDINASINILKEGLRLITIQNK

SEQ ID NO: 3056 - protein, 369 aa, unidentified
MEKAYKFRMYPNKKQQELINKTFGCCRFVYNKYLAKRIEVYKNAKETFTYKQCSSDLTNLKKELNWLKEPDKFSLQNALKDLDNAYKKFFKEKAGFPKFKSKKINRFSYKTNFTNGNIMYCGQHIKLPKLDMVKIRDKQVPKGRILNATISKEPSGRYYVSLCCTDVDIEVFENTNNHIGLDLGIKEFCISSCGEFIENPKYLKKSLNKLAKLQRELSRKTIGSLNRNKARLKVARLQEHIANQRNDFLQKLSTKLIKDNDIICIEDLQVKNMIRNRKLSRLISDVSWSEFVRQLEYKANWHGRQIVKVGKFFASSQICNKCGYKNEEVKDLNIREWICPSCNETHDRDINASINILKEGLRLITIQNK

SEQ ID NO: 3057 - protein, 369 aa, unidentified
MEKAYKFRMYPNKKQQELINKTFGCCRFVYNKYLAKRIEVYKNDKETFTYKQCSSDLTNLKKELKWLKEPDKFSLQNALKDLDNAYKKFFKEKVGFPKFKSKKINRFSYKTNFTNGNIMYLGQHIKLPKLGMIKIRDKQVPQGRILNATISKEPSGRYYVSLCCTDVDIEAFENTNNQIGLDLGIKEFCISSCGEFIENPKYLKKSLNKLAKLQRELSRKTIGSLNRNKARLKVARLQEHIANQRNDFLQKLSTKLIKENDIICIEDLQVKNMIRNRKLSRLISDVSWSEFIRQLEYKANWHGRQIVKVGKFFASSQICNKCGYKNEEVKNLNIREWICPSCNETHNRDINASINILKEGLRLITIQNK

SEQ ID NO: 3058 - protein, 372 aa, unidentified
MIVVEKAYKFRMYPNKKQQELINKTFGCCRFVYNKYLAKRIEVYKNDKETFTYKQCSSDLTNLKKELKWLKEPDKFLLQNALKDLDNAYKKFFKEKAGFPKFKSKKINRFSYKTNFTNGNIMYFSQHIKLPKLGMVKIRDKQVPKGRILNATISKEPSGRYYVSLCCTDVDIEVFENTNNQIGLDLGIKEFCISSCGDFIENHKYLKKSLNKLAKLQRELSRKTIGSLNRNKARLKVARLQEHIANQRKDFLQKLSTKLIKENDIICIEDLQVKNMIRNRKLSRLISDVSWSEFIRQLEYKANWYGRQIVKVGKFFASSQICNKCGYKNEEVKDLNIREWICPSCNETHDRDINASINILKEGLRLITIQNK

SEQ ID NO: 3059 - protein, 338 aa, unidentified
MAVVEKAYKFRMYPNKKQQELINKTFGCCRFVYNKYLAKRIEVYKNNKETFTYKQCSSDLTNLKKELKWLKEPDKFSLQNALKDLDNAYKKFFKEKAGFPKFKSKKINRFSYKTNFTNGNIMYCGQYIKLPKLGMVKVRDKQVPQGRILNATISKEPSGRYYVSLCCTNVDIEVFENTNNQIGLDLGIKEFCISSCGDFIENPKYLKKSLNKLAKLQRELSRKTIGSLNRNKARLKVARLQEHIANQRNDFLQKLSTKLIKENDIICIEDLQVKNMIRNRKLSRLISDVSWSEFVRQLKYKANWHGRQIVKVGKFFASSQICNKCGYKNEEMKDLNIR

SEQ ID NO: 3060 - protein, 372 aa, unidentified
MIAVKKAYKFRMYPNKKQQELINKTFGCCRFVYNKYLAKRIDVYKNDKETFTYKQCSSDLTNLKKELKWLKEPDKFSLQNALKDLDNAYKKFFKEKAGFPKFKSKKINRFSYKTNFTNGNIMYCGQHIKLPKLGMVKIRDKQVPQGRILNATISKEPSGRYYVSLCCTDVDIEAFENTNNQIGLDLGIKEFCISSCGEFIENPKYLKKSLNKLAKLQRELSRKTIGSLNRNKARLKVARLQEHIANQRKDFLQKLSTKLIKENDIICIEDLQVKNMIKNHKLSRLISDVSWSEFIRQLEYKANWYGRQIVKVGKFFASSQICNKCGYKNEEVKNLNIREWICPSCNETHDRDINASINILKEGLRLITIQNK

SEQ ID NO: 3061 - protein, 372 aa, unidentified
MAVVEKAYKFRMYPNKKQQELINKTFGCCRFVYNKYLAKRIEVYKNNKETFTYKQCSSDLTNLKKELKWLKEPDKFSLQNALKDLDNAYKKFFKEKAGFPKFKSKKINRFSYKTNFTNGNIMYCGQYIKLPKLGMVKVRDKQVPQGRILNATISKEPSGRYYVSLCCTNVDIEVFENTNNQIGLDLGIKEFCISSCGDFIENPKYLKKSLNKLAKLQRELSRKTIGSLNRNKARLKVARLQEHIANQRNDFLQKLSTKLIKENDIICIEDLQVKNMIRNRKLSRLISDVSWSEFVRQLKYKANWHGRQIVKVGKFFASSQICNKCGYKNEEMKDLNIREWICPSCNETHDRDINASINILKEGLRLIISQNK

SEQ ID NO: 3062 - protein, 300 aa, unidentified
MAVVEKAYKFRMYPNKKQQELINKTFGCCRFVYNKYLAKRIEVYKNDKETFTYKQCSSDLTNLKKELKWLKEPDKFSLQNALKDLDNAYKKFFKEKAGFPKFKSKKINRFSYKTNFTNGNIMYCGQHIKLPKLGMVKVRDKQVPKGRILNATISKEPSGRYYVSLCCTDVDIEAFENTNNHIGLDLGIKEFCISSCGEFIENPKYLKKSLNKLAKLQRELSRKTIGSLNRNKARLKVARLQEHIANQRNDFLQKLSTKLIKENDIICIEDLQVKNMIRNRKLSRLISDVSWSEFIRQLEY

SEQ ID NO: 3063 - protein, 372 aa, unidentified
MVVVEKAYKFRMYPNKKQQELINKTFGCCRFVYNKYLAKRIDVYKNNKETFTYKQCSSDLTNLKKELKWLKEPDKFSLQNALKDLDNAYKKFFKEKAGFPKFKSKKINRFSYKTNFTNGNIMYCGQHIKLPKLGMVKIRDKQVPKGRILNATISKEPSGRYYVSLCCTDVDIEAFENTNNHIGLDLGIKEFCISSCGEFIENPKYLKKSLNKLAKLQRELSRKTIGSLNRNKARLKVARLQEHIANQRNDFLQKLSTKLIKENDIICIEDLQVKNMIRNRKLSRSISDVSWSEFIRQLEYKANWYGRKIVKVGKFFASSQICNKCGYKNEEVKDLNIREWICPSCNETHDRDINASINILKEGLRLITIQNK

SEQ ID NO: 3064 - protein, 332 aa, unidentified
MVVVKKAYKFRMYPNKKQQELINKTFGCCRFVYNKYLAKRIDVYKNDKETFTYKQCSSDLTNLKKELKWLKEPDKFSLQNALKDLDNAYKKFFKEKAGFPKFKSKKINRFSYKTNFTNGNIMYCGQHIKLPKLGMVKIRDKQVPQGRILNATISKEPSGRYYVSLCCTDVDIEAFENTNNHIGLDLGIKEFCISSCGEFIENPKYLKKSLNKLAKLQRELSRKTIGSLNRNKARLKVARLQEHIANQRNDFLQKLSTKLIKENDIICIEDLQVKNMIRNRKLSRLISDVSWSEFIRQLEYKANWYGRQIVKVGKFFASSQICNKCGYKNEEV

SEQ ID NO: 3065 - protein, 284 aa, unidentified
MVVVEKAYKFRMYPNKKQQELINKTFGCCRFVYNKYLAKRIDVYKNNKETFTYKQCSSDLTNLKKELKWLKEPDKFSLQNALKDLDNAYKKFFKEKVGFPKFKSKKINRFSYKTNFTNGNIMYCGQHIKLPKLGMVKIRDKQVPKGRILNATISKEPSGRYYVSLCCTDVDIEAFENTNNHIGLDLGIKEFCISSCGEFIENPKYLKKSLNKLAKLQRELSRKTIGSLNRNKARLKVARLQEHIANQRNDFLQKLSTKLIKENDIICIEDLQVKNMIRNRKLSR

SEQ ID NO: 3066 - protein, 338 aa, unidentified
MIAVKKAYKFRMYPNKKQQELINKTFGCCRFVYNKYLAKRIEVYKNDKETFTYKQCSSDLTNLKKELNWLKEPDKFSLQNALKDLDNAYKKFFKEKAGFPKFKSKKINRFSYKTNFTNGNIMYCGQYIKLPKLGMVKIRDKQVPQGRILNATISKEPSGRYYVSLCCTDVDIEAFENTNNHIGLDLGIKEFCISSCGEFIENPKYLKKSLNKLAKLQRELSRKTIGSLNRNKARLKVARLQEHIANQRNDFLQKLSTKLIKENDIICIEDLQVKNMIKNRKLSRSISDVSWSEFIRQLEYKANWHGRQIVKVGKFFASSQICNKCGYKNEEVKDLNIR

SEQ ID NO: 3067 - protein, 352 aa, unidentified
MAVVEKAYKFRMYPNKKQQELINKTFGCCRFVYNKYLAKRIEVYKNNKETFTYKQCSSDLTNLKKELKWLKEPDKFSLQNALKDLDNAYKKFFKEKAGFPKFKSKKINRFSYKTNFTNGNIMYCGQYIKLPKLGMVKVRDKQVPQGRILNATISKEPSGRYYVSLCCTNVDIEVFENTNNQIGLDLGIKEFCISSCGDFIENPKYLKKSLNKLAKLQRELSRKTIGSLNRNKARLKVARLQEHIANQRNDFLQKLSTKLIKENDIICIEDLQVKNMIRNRKLSRLISDVSWSEFVRQLKYKANWHGRQIVKVGKFFASSQICNKCGYKNEEMKDLNIREWICPSCNETHDRD

SEQ ID NO: 3068 - protein, 372 aa, unidentified
MIAVKKAYKFRMYPNKKQQELINKTFGCCRFVYNKYLAKRIDVYKNDKETFTYKQCSSDLTNLKKELKWLKEPDKFSLQNALKDLDNAYKKFFKEKAGFPKFKSKKINRFSYKTNFTNGNIMYCGQHIKLPKLGMVKIRDKQVPKGRILNATISKEPSGRYYVSLCCIDVDIEAFENTNNHIGLDLGIKEFCISSCGEFIENPKYLKKSLNKLAKLQRELSRKTIGSLNRNKARLKVARLQEHIANQRNDFLQKLSTKLIKENDIICIEDLQVKNMIRNRKLSRLISDVSWSEFIRQLEYKANWYGRQIVKVGKFFASSQICNKCGYKNEEVKNLNIREWICPSCNETHDRDINASINILKEGLRLITIQNK

SEQ ID NO: 3069 - protein, 372 aa, unidentified
MVVVEKAYKFRMYPNKKQQELINKTFGCCRFVYNKYLAKRIDVYKNNKETFTYKQCSSDLTNLKKELKWLKEPDKFSLQNALKDLDNAYKKFFKEKVGFPKFKSKKINRFSYKTNFTNGNIMYCGQHIKLPKLGMVKIRDKQVPKGRILNATISKEPSGRYYVSLCCTDVDIEAFENTNNHIGLDLGIKEFCISSCGEFIENPKYLKKSLNKLAKLQRELSRKTIGSLNRNKARLKVARLQEHIANQRNDFLQKLSTKLIKENDIICIEDLQVKNMIRNRKLSRSISDVSWSEFIRQLEYKANWYGRKIVKVGKFFASSQICNKCGYKNEEVKDLNIREWICPSCNETHDRDINASINILKEGLRLITIQNK

SEQ ID NO: 3070 - protein, 372 aa, unidentified
MIAVEKAYKFRMYPNKKQQELINKTFGCCRFVYNKYLAKRIDVYKNDKETFTYKQCSSDLTNLKKELKWLKEPDKFSLQNALKDLDNAYKKFFKEKAGFPKFKSKKINRFSYKTNFTNGNIMYCGQHIKLPKLGMVKIRDKQVPKGRILNATISKEPSGRYYVSLCCTDVDIEAFENTNNQIGLDLGIKEFCISSCGDFIENPKYLKKSLSKLAKLQRELSRKTIGSLNRNKARLKVARLQEHIANQRNDFLQKLSTKLIKENDIICIEDLQVKNMIKNRKLSRLISDVSWSEFIRQLEYKANWYGRQIVKVGKFFASSQICNKCGYKNEEVKNLNIREWICPSCNETHDRDINASINILKEGLRLITIQNK

SEQ ID NO: 3071 - protein, 372 aa, unidentified
MVVVEKAYKFRMYPNKKQQELINKTFGCCRFVYNKYLAKRIEVYKNDKETFTYKQCSSDLTNLKKELKWLKEPDKFSLQNALKDLDNAYKKFFKEKAGFPKFKSKKINRFSYKTNFTNGNIMYCGQHIKLPKLGMVKIRDKQVPQGRILNATISKEPSGRYYVSLCCTDVDIEAFENTNNHIGLDLGIKEFCISSCGEFIENPKYLKKSLNKLAKLQRELSRKTIGSLNRNKARLKVARLQEHIANQRNDFLQKLSTKLIKENDIICIEDLQVKNMIRNRKLSRLISDVSWSEFIRQLEYKANWYGRQIVKVGKFFASSQICNKCGYKNEEVKNLNIREWICPSCNETHDRDINASINILKEGLRLITIQNK

SEQ ID NO: 3072 - protein, 292 aa, unidentified
MIAVKKAYKFRMYPNKKQQELINKTFGCCRFVYNKYLAKRIDVYKNDKETFTYKQCSSDLTNLKKELKWLKEPDKFSLQNALKDLDNAYKKFFKEKAGFPKFKSKKINRFSYKTNFTNGNIMYCGQHIKLPKLGMVKIRDKQVPKGRILNATISKEPSGRYYVSLCCIDVDIEVFENTNNHIGLDLGIKEFCISSCGEFIENPKYLKKSLNKLAKLQRELSRKTIGSLNRNKARLKVARLQEHIANQRNDFLQKLSTKLIKENDIICIEDLQVKNMIRNRKLSRLISDVSWS

SEQ ID NO: 3073 - protein, 372 aa, unidentified
MIVVEKAYKFRMYPNKKQQELINKTFGCCRFVYNKYLAKRIEVYKNDKETFTYKQCSSDLTNLKKELKWLKEPDKFSLQNALKDLDNAYKKFFKEKAGFPKFKSKKINRFSYKTNFTNGNIMYCGQHIKLPKLGMVKIRDKQVPQGRILNATISKEPSGRYYVSLCCTDVDIEAFENTNNQIGLDLGIKEFCISSCGEFIENPKYLKKSLNKLAKLQRELSRKTIGSLNRNKARLKVARLQEHIANQRNDFLQKLSTKLIKENDIICIEDLQVKNMIRNRKLSRLISDVSWSEFIRQLEYKANWYGRQIVKVGKFFASSQICNKCGYKNEEVKDLNIREWICPSCNETHDRDINASINILKEGLRLITIQNK

SEQ ID NO: 3074 - protein, 258 aa, unidentified
MIVVEKAYKFRMYPNKKQQELINKTFGCCRFVYNKYLAKRIEVYKNDKETFTYKQCSSDLTNLKKELKWLKEPDKFLLQNALKDLDNAYKKFFKEKAGFPKFKSKKINRFSYKTNFTNGNIMYFSQHIKLPKLGMVKIRDKQVPKGRILNATISKEPSGRYYVSLCCTDVDIEVFENTNNQIGLDLGIKEFCISSCGDFIENHKYLKKSLNKLAKLQRELSRKTIGSLNRNKARLKVARLQEHIANQRKDFLQKLSTK

SEQ ID NO: 3075 - protein, 372 aa, unidentified
MVVVEKAYKFRMYPNKKQQELINKTFGCCRFVYNKYLAKRIDVYKNNKETFTYKQCSSDLTNLKKELKWLKEPDKFSLQNALKDLDNAYKKFFKEKAGFPKFKSKKINRFSYKTNFTNGNIMYCGQHIKLPKLGMVKIRDKQVPQGRILNATISKEPSGRYYVSLCCTDVDIEAFENTNNHIGLDLGIKEFCISSCGEFIENPKYLKKSLNKLAKLQRELSRKTIGSLNRNKARLKVARLQEHIANQRNDFLQKLSTKLIKENDIICIEDLQVKNMIRNRKLSRSISDVSWSEFIRQLEYKANWYGRQIVKVGKFFASSQICNKCGYKNEEVKDLNIREWICPSCNETHDRDINASINILKEGLRLITIQNK

SEQ ID NO: 3076 - protein, 372 aa, unidentified
MIAVKKAYKFRMYPNKKQQELINKTFGCCRFVYNKYLAKRIDVYKNDKETFTYKQCSSDLTNLKKELKWLKEPDKFSLQNALKDLDNAYKKFFKEKAGFPKFKSKKINRFSYKTNFTNGNIMYCGQYIKLPKLGMVKIRDKQVPQGRILNATISKEPSGRYYVSLCCTDVDIEAFENTNNHIGLDLGIKEFCISSCGEFIENPKYLKKSLNKLAKLQRELSRKTIGSLNRNKARLKVARLQEHIANQRNDFLQKLSTKLIKENDIICIEDLQVKNMIRNRKLSRLISDVSWSEFIRQLEYKANWYGRQIVKVGKFFASSQICNKCGYKNEEVKDLNIREWICPSCNETHDRDINASINILKEGLRLITIQNK

SEQ ID NO: 3077 - protein, 372 aa, unidentified
MIAVKKAYKFRMYPNKKQQELINKTFGCCRFVYNKYLAKRIDVYKNDKETFTYKQCSSDLTNLKKELKWLKEPDKFSLQNALKDLDNAYKKFFKEKAGFPKFKSKKINRFSYKTNFTNGNIMYCGQHIKLPKLGMVKIRDKQVPQGRILNATISKEPSGRYYVSLCCTDVDIEAFENTNNHIGLDLGIKEFCISSCGEFIENPKYLKKSLNKLAKLQRELSRKTIGSLNRNKARLKVARLQEHIANQRNDFLQKLSTKLIKENDIICIEDLQVKNMIRKRKLSRLISDVSWSEFIRQLEYKANWHGRQIVKVGKFFASSQICNKCGYKNEEVKNLNIREWICPSCNETHDRDINASRNILKEGLRLITIQNK

SEQ ID NO: 3078 - protein, 372 aa, unidentified
MIAVKKAYKFRMYPNKKQQELINKTFGCCRFVYNKYLAKRIDVYKNDKETFTYKQCSSDLTNLKKELKWLKEPDKFSLQNALKDLDNAYKKFFKEKAGFPKFKSKKINRFSYKTNFTNGNIMYCGQHIKLPKLGMVKIRDKQVPQGRILNATISKEPSGRYYVSLCCTDVDIEAFENTNNHIGLDLGIKEFCISSCGEFIENPKYLKKSLNKLAKLQRELSRKTIGSLNRNKARLKVARLQEHIANQRNDFLQKLSTKLIKENDIICIEDLQVKNMIRNRKLSRLISDVSWSEFIRQLEYKANWYGRQIVKVGKFFASSQICNKCGYKNEEVKDLNIREWICPSCNETHDRDINASINILKEGLRLITIQNK

SEQ ID NO: 3079 - protein, 372 aa, unidentified
MIAVKKAYKFRMYPNKKQQELINKTFGCCRFVYNKYLAKRIDVYKNDKETFTYKQCSSDLTNLKKELKWLKEPDKFSLQNALKDLDNAYKKFFKEKAGFPKFKSKKINRFSYKTNFTNGNIMYCGQHIKLPKLGMVKIRDKQVPKGRILNATISKEPSGRYYVSLCCIDVDIEVFENTNNHIGLDLGIKEFCISSCGDFIENPKYLKKSLNKLAKLQRELSRKTIGSLNRNKARLKVARLQEHIANQRNDFLQKLSTKLIKENDIICIEDLQVKNMIRNRKLSRLISDVSWSEFIRQLEYKANWYGRQIVKVGKFFASSQICNKCGYKNEEVKNLNIREWICPSCNETHDRDINASINILKEGLRLITIQNK

SEQ ID NO: 3080 - protein, 321 aa, unidentified
MIAVKKAYKFRMYPNKKQQELINKTFGCCRFVYNKYLAKRIDVYKNDKETFTYKQCSSDLTNLKKELKWLKEPDKFSLQNALKDLDNAYKKFFKEKAGFPKFKSKKINRFSYKTNFTNGNIMYCGQHIKLPKLGMVKIRDKQVPKGRILNATISKEPSGRYYVSLCCTDVDIEAFENTNNHIGLDLGIKEFCISSCGEFIENPKYLKKSLNKLAKLQRELSRKTIGSLNRNKARLKVARLQEHIANQRNDFLQKLSTKLIKENDIICIEDLQVKNMIRNRKLSRLISDVSWSEFIRQLEYKANWHGRQIVKVGKFFASSQI

SEQ ID NO: 3081 - protein, 369 aa, unidentified
MVVVEKAYKFRMYPNKKQQELINKTFGCCRFVYNKYLAKRIEVYKNDKETFTYKQCSSDLTNLKKELKWLKEPDKFSLQNALKDLDNAYKKFFKEKAGFPKFKSKKINRFSYKTNFTNGNIMYCGQHIKLPKLGMVKIRDKQVPQGRILNATISKEPSGRYYVSLCCTDVDIEAFENTNNHIGLDLGIKEFCISSCGEFIENPKYLKKSLNKLAKLQRELSRKTIGSLNRNKARLKVARLQEHIANQRKDFLQKLSTKLIKENDIICIEDLQVKNMIKNRKLSRSISDVSWSEFIRQLEYKANWHGRQIVKVGKFFASSQICNKCGYKNEEVKNLNIREWICPSCNETHDRDINASINILKEGLRLITI

SEQ ID NO: 3082 - protein, 372 aa, unidentified
MIAVKKAYKFRLYPNKKQQELINKTFGCCRFVYNKYLAKRIDVYKNDKETFTYKQCSSDLTNLKKELKWLKEPDKFSLQNALKDLDNAYKKFFKEKAGFPKFKSKKINRFSYKTNFTNGNIMYCGQHIKLPKLGMVKIRDKQVPQGRILNATISKEPSGRYYVSLCCTDVDIEAFENTNNHIGLDLGIKEFCISSCGEFIENPKYLKKSLNKLAKLQRELSRKTIGSLNRNKARLKVARLQEHIANQRNDFLQKLSTKLIKENDIICIEDLQVKNMIRNHKLSRLISDVSWSEFIRQLEYKANWYGRQIVKVGKFFASSQICNKCGYKNEEVKDLNIREWICPSCNETHDRDINASINILKEGLRLITIQNK

SEQ ID NO: 3083 - protein, 267 aa, unidentified
MVVVEKAYKFRMYPNKKQQELINKTFGCCRFVYNKYLAKRIDVYKNDKETFTYKQCSSDLTNLKKELKWLKEPDKFSLQNALKDLDNAYKKFFKEKAGFPKFKSKKINRFSYKTNFTNGNIMYCGQHIKLPKLGMVKIRDKQVPQGRILNATISKEPSGRYYVSLCCTDVDIEAFENTNNHIGLDLGIKEFCISSCGEFIENPKYLKKSLNKLAKLQRELSRKTIGSLNRNKARLKVARLQEHIANQRNDFLQKLSTKLIKENDIIC

SEQ ID NO: 3084 - protein, 304 aa, unidentified
MIAVKKAYKFRMYPNKKQQELINKTFGCCRFVYNKYLAKRIEVYKNDKETFTYKQCSSDLTNLKKELNWLKEPDKFSLQNALKDLDNAYKKFFKEKAGFPKFKSKKINRFSYKTNFTNGNIMYCGQYIKLPKLGMVKIRDKQVPQGRILNATISKEPSGRYYVSLCCTDVDIEAFENTNNHIGLDLGIKEFCISSCGEFIENPKYLKKSLNKLAKLQRELSRKTIGSLNRNKARLKVARLQEHIANQRNDFLQKLSTKLIKENDIICIEDLQVKNMIKNRKLSRSISDVSWSEFIRQLEYKANW

SEQ ID NO: 3085 - protein, 372 aa, unidentified
MAVVEKAYKFRMYPNKKQQELINKTFGCCRFVYNKYLAKRIEVYKNAKETFTYKQCSSDLTNLKKELNWLKEPDKFSLQNALKDLDNAYKKFFKEKAGFPKFKSKKINRFSYKTNFTNGNIMYCGQHIKLPKLDMVKIRDKQVPKGRILNATISKEPSGRYYVSLCCTDVDIEVFENTNNHIGLDLGIKEFCISSCGEFIENPKYLKKSLNKLAKLQRELSRKTIGSLNRNKARLKVARLQEHIANQRNDFLQKLSTKLIKDNDIICIEDLQVKNMIRNRKLSRLISDVSWSEFVRQLEYKANWHGRQIVKVGKFFASSQICNKCGYKNEEVKDLNIREWICPSCNETHDRDINASINILKEGLRLITIQNK

SEQ ID NO: 3086 - protein, 372 aa, unidentified
MAVVEKAYKFRMYPNKKQQELINKTFGCCRFVYNKYLAKRIEVYKNDKETFTYKQCSSDLTNLKKELKWLKEPDKFSLQNALRDLDNAYKKFFKEKAGFPKFKSKKINRFSYKTNFTNGNIMYCGQHIKLPKLGMVKIRDKQVPKGRILNATISKEPSGRYYVSLCCTDVDIEVFENTNNHIGLDLGIKEFCISSCGEFIENPKYLKKSLNKLAKLQRELSRKTIGSLNRNKARLKVARLQEHIANQRNDFLQKLSTKLIKENDIICIEDLQVKNMIKNRRLSRLISDVSWSEFIRQLEYKANWHGRKIVKVGKFFASSQICNKCGYKNEEVKDLNIREWICPSCNETHDRDINASINILKEGLRLITIQNK

SEQ ID NO: 3087 - protein, 372 aa, unidentified
MIVVEKAYKFRMYPNKKQQELINKTFGCCRFVYNKYLAKRIEVYKNDKETFTYKQCSSDLTNLKKELKWLKEPDKFSLQNALKDLDNAYKKFFKEKVGFPKFKSKKINRFSYKTNFTNGNIMYLGQHIKLPKLGMIKIRDKQVPQGRILNATISKEPSGRYYVSLCCTDVDIEAFENTNNQIGLDLGIKEFCISSCGEFIENPKYLKKSLNKLAKLQRELSRKTIGSLNRNKARLKVARLQEHIANQRNDFLQKLSTKLIKENDIICIEDLQVKNMIRNRKLSRLISDVSWSEFIRQLEYKANWHGRQIVKVGKFFASSQICNKCGYKNEEVKNLNIREWICPSCNETHNRDINASINILKEGLRLITIQNK

SEQ ID NO: 3088 - protein, 341 aa, unidentified
MVVVEKAYKFRMYPNKKQQELINKTFGCCRFVYNKYLAKRIDVYKNDKETFTYKQCSSDLTNLKKELNWLKEPDKFSLQNALKDLDNAYKKFFKKKAGFPKFKSKKINRFSYKTNFTNGNIVYCGQHIKLPKLGMVKIRDKQVPQGRILNATISKEPSGRYYVSLCCTDVDIEVFENTNNQIGLDLGIKEFCISSCGDFIENPKYLKKSLNKLAKLQRELSRKTIGSLNRNKARLKVARLQEHIANQRNDFLQKLSTKLIKENDIICIEDLQVKNMIRNRKLSRLISDVSWSEFIRQLEYKANWHGRQIVKVGKFFASSQICNKCGYKNEEVKDLNIREWI

SEQ ID NO: 3089 - protein, 372 aa, unidentified
MIAVKKAYKFRMYPNKKQQELINKTFGCCRFVYNKYLAKRIEVYKNDKETFTYKQCSSDLTNLKKELNWLKEPDKFSLQNALKDLDNAYKKFFKEKAGFPKFKSKKINRFSYKTNFTNGNIMYCGQYIKLPKLGMVKIRDKQVPQGRILNATISKEPSGRYYVSLCCTDVDIEAFENTNNHIGLDLGIKEFCISSCGEFIENPKYLKKSLNKLAKLQSELSRKTIGSLNRNKARLKVARLQEHIANQRNDFLQKLSTKLIKENDIICIEDLQVKNMIKNRKLSRSISDVSWSEFIRQLEYKANWHGRQIVKVGKFFASSQICNKCGYKNEEVKDLNIREWICPSCNETHDRDINASINILKEGLRLITIQNK

SEQ ID NO: 3090 - protein, 365 aa, unidentified
MIVVEKAYKFRMYPNKKQQELINKTFGCCRFVYNKYLAKRIEVYKNDKETFTYKQCSSDLTNLKKELNWLKEPDKFSLQNALKDLDNAYKKFFKKKAGFPKFKSKKINRFSYKTNFTNGNIVYCGQHIKLPKLGMVKIRDKQVPKGRILNATISKEPSGRYYVSLCCTDVDIEAFENTNNHIGLDLGIKEFCISSCGEFIENPKYLKKSLNKFAKLQRELSRKTIGSLNRNKARLKVARLQEHIANQRKDFLQKLSTKLIKENDIICIEDLQVKNMIXISDVSWSEFIRQLEYKANWHGRQIVKVGKFFASSQICNKCGYKNEEVKDLNIREWICPSCNETHDRYINASINILKEGLRLITIQNK

SEQ ID NO: 3091 - protein, 372 aa, unidentified
MIVVEKAYKFRMYPNKKQQELINKTFGCCRFVYNKYLAKRIEVYKNDKETFTYKQCSSDLTNLKKELNWLKEPDKFSLQNALKDLDNAYKKFFKKKAGFPKFKSKKINRFSYKTNFTNGNIVYCGQHIKLPKLGMVKIRDKQVPKGRILNATISKEPSGRYYVSLCCTDVDIEAFENTNNHIGLDLGIKEFCISSCGEFIENPKYLKKSLNKFAKLQRELSRKTIGSLNRNKARLKVARLQEHIANQRKDFLQKLSTKLIKENDIICIEDLQVKNMIRNRKLSRLISDVSWSEFIRQLEYKANWYGRKIVKVGKFFASSQICNKCGYKNEEVKDLNIREWICPSCNETHDRYINASINILKEGLRLITIQNK

SEQ ID NO: 3092 - protein, 369 aa, unidentified
MEKAYKFRMYPNKKQQELINKTFGCCRFVYNKYLAKRIDVYKNNKETFTYKQCSSDLNNLKKELKWLKEPDKFSLQNALKDLDNAYKKFFKEKAGFPKFKSKKINRFSYKTNFTNGNIMYCGQHIKLPKLGMVKVRDKQVPKGRILNATISKEPSGRYYVSLCCTDVDIEVFENTNNHIGLDLGIKEFCISSCGEFIENPKYLKKSLNKLAKLQRELSRKTIGSLNRNKARLKVARLQEHIANQRNDFLQKLSTKLIKENDIICIEDLQVKNMIKNRRLSRLISDVSWSEFIRQLEYKANWHGRKIVKVGKFFASSQICNKCGYKNEEVKDLNIREWICPSCNETHDRDINASINILKEGLRLITIQNK

SEQ ID NO: 3093 - protein, 369 aa, unidentified
MEKAYKFRMYPNKKQQELINKTFGCCRFVYNKYLAKRIEVYKNAKETFTYKQCSSDLTNLKKELNWLKEPDKFSLQNALKDLDNAYKKFFKEKAGFPKFKSKKINRFSYKTNFTNGNIMYCGQHIKLPKLDMVKIRDKQVPKGRILNATISKEPSGRYYVSLCCTDVDIEVFENTNNQIGLDLGIKEFCISSCGEFIENPKYLKKSLNKLAKLQRELSRKTIGSLNRNKARLKVARLQEHIANQRNDFLQKLSTKLIKDNDIICIEDLQVKNMIRNRKLSRLISDVSWSEFVRQLEYKANWHGRQIVKVGKFFASSQICNKCGYKNEEVKNLNIREWICPSCNETHDRDINASINILKEGLRLITIQNK

SEQ ID NO: 3094 - protein, 300 aa, unidentified
MEKAYKFRMYPNKKQQELINKTFGCCRFVYNKYLAKRIEVYKNAKETFTYKQCSSDLTNLKKELNWLKEPDKFSLQNALKDLDNAYKKFFKEKAGFPKFKSKKINRFSYKTNFTNGNIMYCGQHIKLPKLDMVKIRDKQVPKGRILNATISKEPSGRYYVSLCCTDVDIEAFENTNNHIGLDLGIKEFCISSCGEFIENPKYLKKSLNKLAKLQRELSRKTIGSLNRNKARLKVARLQEHIANQRNDFLQKLSTKLIKDNDIICIEDLQVKNMIRNRKLSRLISDVSWSXXXXSSIRIQG

SEQ ID NO: 3095 - protein, 369 aa, unidentified
MEKAYKFRMYPNKKQQELINKTFGCCRFVYNKYLAKRIEVYKNDKETFTYKQCSSDLTNLKKELKWLKEPDKFSLQNALKDLDNAYKKFFKEKVGFPKFKSKKINRFSYKTNFTNGNIMYCGQHIKLPKLDMVKIRDKQVPKGRILNATISKEPSGRYYVSLCCTDVDIEAFENTNNQIGLDLGIKEFCISSCGEFIENPKYLKKSLNKLAKLQRELSRKTIGSLNRNKARLKVARLQEHIANQRNDFLQKLSTKLIKDNDIICIEDLQVKNMIRNRKLSRLISDVSWSEFIRQLEYKANWYGRQIVKVGKFFASSQICNKCGYKNEEVKDLNIREWICPSCNETHDRDINASINILKEGLRLITIQNK

SEQ ID NO: 3096 - protein, 372 aa, unidentified
MIVVEKAYKFRMYPNKKQQELINKTFGCCRFVYNKYLAKRIDVYKNDKETFTYKQCSSDLTNLKKELKWLKEPDKFSLQNALKDLDNAYKKFFKEKAGFPKFKSKKINRFSYKTNFTNGNIMYCGQHIKLPKLGMVKIRDKQVPQGRILNATISKEPSGRYYVSLCCTDVDIEAFENTNNQIGLDLGIKEFCISSCGEFIENPKYLKKSLNKLAKLQRELSRKTIGSLNRNKARLKVARLQEHIANQRKDFLQKLSTKLIKENDIICIEDLQVKNMIRNRKLSRLISDVSWSEFIRQLKYKANWYGRQIVTVGKFFASSQICNKCGYKNEEVKDLNIREWICPSCNETHDRDINASINILKEGLRLITIQNK

SEQ ID NO: 3097 - protein, 372 aa, unidentified
MVVVEKAYKFRMYPNKKQQELINKTFGCCRFVYNKYLAKRIDVYKNDKETFTYKQCSSDLTNLKKELKWLKEPDKFSLQNALKDLDNAYKKFFKEKAGFPKFKSKKINRFSYKTNFTNGNIMYCGQHIKLPKLGMVKIRDKQVPKGRILNATISKEPSGRYYVSLCCTDVDIEVFENTNNHIGLDLGIKEFCISSCGEFIENPKYLKKSLNKLAKLQRELSRKTIGSLNRNKARLKVARLQEHIANQRNDFLQKLSTKLIKENDIICIEDLQVKNMIRNRKLSRLISDVSWSEFIRQLEYKANWHGRQIVKVGKFFASSQICNKCGYKNEEVKDLNIREWICPSCNETHDRDINASINILKEGLRLITIQNK

SEQ ID NO: 3098 - protein, 372 aa, unidentified
MAVVEKAYKFRMYPNKKQQELINKTFGCCRFVYNKYLAKRIEVYKNDKETFTYKQCSSDLTNLKKELKWLKEPDKFSLQNALKDLDNAYKKFFKEKAGFPKFKSKKINRFSYKTNFTNGNIMYCGQHIKLPKLGMVKVRDKQIPQGRILNATISKEPSGRYYVSLCCTDVDIEVFENTNNQIGLDLGIKEFCISSCGEFIENPKYLKKSLNKLAKLQRELSRKTIGSLNRNKARLKVARLQEHIANQRNDFLQKLSTKLIKENDIICIEDLQVKNMIRNRKLSRLISDVSWSEFVRQLEYKANWHGRQIVKVGKFFASSQICNKCGYKNEEVKDLNIREWICPSCNETHDRDINASINILKEGLRLITIQNK

SEQ ID NO: 3099 - protein, 372 aa, unidentified
MIVVEKAYKFRMYPNKKQQELINKTFGCCRFVYNKYLAKRIEVYKNAKETFTYKQCSSDLTNLKKELKWLKEPDKFSLQNALRDLDNAYKKFFKEKVGFPKFKSKKINRFSYKTNFTNGNIMYCGQHIKLPKLGMVKIRDKQVPKGRILNATISKEPSGRYYVSLCCTDVDIEVFENTNNQIGLDLGIKEFCISSCGDFIENPKYLKKSLNKLAKLQRELSRKTIGSLNRNKARLKVARLQEHIANQRNDFLQKLSTKLIKENDIICIEDLQVKNMIRNRKLSRLISDVSWSEFIRQLEYKANWYGRQIVKVGKFFASSQICNKCGYKNEEVKNLNIREWICPSCNETHDRDINASINILKEGLRLITIQNK

SEQ ID NO: 3100 - protein, 372 aa, unidentified
MIVVEKAYKFRIYPNKKQQELINKTFGCCRFVYNKYLAKRIDVYKSDKETFTYKQCSSDLTNLKKELKWLKEPDKFSLQNALKDLDNAYKKFFKEKAGFPKFKSKKINRFSYKTNFTNGNIMYCGQHIKLPKLGMVKVRDKQIPQGRILNATISKEPSGRYYVSLCCTDVDIEVFENTNNQIGLDLGIKEFCISSCGEFIENPKYLKRSLNKLAKLQRELSRKTIGSLNRNKARLKVAGLQEHIANQRNDFLQKLSTKLIKENDIICIEDLQVKNMIKNRKLSRLISDVSWSEFVRQLEYKANWHGRQIVKVGKFFASSQICNKCGYKNEEVKDLNIREWICPSCNETHDRDINASINILKEGLRLITIQNK

SEQ ID NO: 3101 - protein, 262 aa, unidentified
MIVVEKAYKFRIYPNKKQQELINKTFGCCRFVYNKYLAKRIDVYKSDKETFTYKQCSSDLTNLKKELKWLKEPDKFSLQNALKDLDNAYKKFFKEKAGFPKFKSKKINRFSYKTNFTNGNIMYCGQHIKLPKLGMVKVRDKQIPQGRILNATISKEPSGRYYVSLCCTDVDIEVFENTNNQIGLDLGIKEFCISSCGEFIENPKYLKKSLNKLAKLQRELSRKTIGSLNRNKARLKVARLQEHIANQRNDFLQKLSTKLIKE

SEQ ID NO: 3102 - protein, 372 aa, unidentified
MIVVEKAYKFRIYPNKKQQELINKTFGCCRFVYNKYLAKRIDVYKSDKETFTYKQCSSDLTNLKKELKWLKEPDKFSLQNALKDLDNAYKKFFKEKAGFPKFKSKKINRFSYKTNFTNGNIMYCGQHIKLPKLGMVKVRDKQIPQGRILNATISKEPSGRYYVSLCCTDVDIEVFENTNNQIGLDLGIKEFCISSCGEFIENPKYLKKSLNKLAKLQRELSRKTIGSLNRNKARLKVAGLQEHIANQRNDFLQKLSTKLIKENDIICIEDLQVKNMIKNRKLSRLISDVSWSEFVRQLEYKANWHGRQIVKVGKFFASSQICNKCGYKNEEVKNLNIREWICPSCNETHDRDINASINILKEGLRLITIQNK

SEQ ID NO: 3103 - protein, 370 aa, unidentified
MIVVEKAYKFRIYPNKKQQELINKTFGCCRFVYNKYLAKRIDVYKSDKETFTYKQCSSDLTNLKKELKWLKEPDKFSLQNALKDLDNAYKKFFKEKAGFPKFKSKKINRFSYKTNFTNGNIMYCGQHIKLPKLGMVKVRDKQIPQGRILNATISKEPSGRYYVSLCCTDVDIEVFENTNNQIGLDLGIKEFCISSCGEFIENPKYLKRSLNKLAKLQRELSRKTIGSLNRNKARLKVAGLQEHIANQRNDFLQKLSTKLIKENDIICIEDLQVKNMIRNCKLSRLISDVSWSEFIRQLEYKANWHGRQIVKVGKFFASSQICNKCGYKNEEVKDLSIREWICPSCNETHDRDINASINILKEGLRLITXX

SEQ ID NO: 3104 - protein, 372 aa, unidentified
MVVVEKAYKFRMYPNKKQQELINKTFGCCRFVYNKYLAKRIEVYKNDKETFTYKQCSSDLTNLKKELKWLKEPDKFSLQNALRDLDNAYKKFFKEKAGFPKFKSKKINRFSYKTNFTNGNIMYCGQHIKLPKLGMVKVRDKQVPKGRILNATISKEPSGRYYVSLCCTDVDIEAFENTNNHIGLDLGIKEFCISSCGEFIENPKYLKKSLNKLAKLQRELSRKTIGSLNRNKARLKVARLQEHIANQRNDFLQKLSTKLIKENDIICIEDLQVKNMIKNRRLSRLISDVSWSEFIRQLEYKANWHGRKIVKVGKFFASSQICNKCGYKNEEVKNLNIREWICPSCNETHDRDINASINILKEGLRLITIQNK

SEQ ID NO: 3105 - protein, 372 aa, unidentified
MIVVEKAYKFRMYPNKKQQELINKTFGCCRFVYNKYLAKRIDVYKSNKETFTYKQCSSDLTNLKKELKWLKEPDKFSLQNALKDLDNAYKKFFKEKAGFPKFKSKKINRFSYKTNFTNGNIMYFSQHIKLPKLGMVKIRDKQVPKGRILNATISKEPSGRYYVSLCCTDVDIEVFENTNNQIGLDLGIKEFCISSCGDFIENHKYLKKSLNKLAKLQRELSRKTIGSLNRNKARLKVARLQEHIANQRKDFLQKLSTKLIKENDIICIEDLQVKNMIRNRKLSRLISDVSWSEFIRQLEYKANWHGRQIVKVGKFFESSQICNKCGYKNEEVKDLNIREWICPSCNETHDRDINASINILKEGLRLITIQNK

SEQ ID NO: 3106 - protein, 372 aa, unidentified
MIVVEKAYKFRIYPNKKQQELINKTFGCCRFVYNKYLAKRIDVYKSDKETFTYKQCSSDLTNLKKELKWLKEPDKFSLQNALKDLDNAYKKFFKEKAGFPKFKSKKINRFSYKTNFTNGNIMYCGQHIKLPKLGMVKVRDKQIPQGRILNATISKEPSGRYYVSLCCTDVDIEVFENTNNQIGLDLGIKEFCISSCGEFIENPKYLKRSLNKLAKLQRELSRKTIGSLNRNKARLKVAGLQEHIANQRNDFLQKLSTKLIKENDIICIEDLQVKNMIRNRKLSRLISDVSWSEFVRQLEYKANWHGRQIVKVGKFFASSQICNKCGYKNEEVKNLNIREWICPSCNETHDRDINASINILKEGLRLITIQNK

SEQ ID NO: 3107 - protein, 372 aa, unidentified
MIAVEKAYKFRMYPNKKQQELINKTFGCCRFVYNKYLAKRIDVYKNDKETFTYKQCSSDLTNLKKELKWLKEPDKFSLQNALKDLDNAYKKFFKEKAGFPKFKSKKINRFSYKTNFTNGNIMYCGQHIKLPKLGMVKIRDKQVPQGRILNATISKEPSGRYYVSLCCTDVDIEAFENTNNHIGLDLGIKEFCISSCGEFIENPKYLKKSLNKLAKLQRELSRKTIGSLNRNKARLKVARLQEHIANQRNDFLQKLSTKLIKENDIICIEDLQVKNMIRNRKLSRLISDVSWSEFIRQLEYKANWHGRQIVKVGKFFASSQICNKCRYKNEEVKNLNIREWICPSCNETHDRDINASINILKEGLRLITIQNK

SEQ ID NO: 3108 - protein, 264 aa, unidentified
MVVVEKAYKFRMYPNKKQQELINKTFGCCRFVYNKYLAKRIDVYKNNKETFTYKQCSSDLTNLKKELNWLKEPDKFSLQNALKDLDNAYKKFFKKKAGFPKFKSKKINRFSYKTNFTNGNIVYCGQHIKLPKLGMVKIRDKQVPQGRILNATISKEPSGRYYVSLCCTDVDIEVFENTNNQIGLDLGIKEFCISSCGDFIENPKYLKKSLNKLAKLQRELSRKTIGSLNRNKARLKVARLQEHIANQRNDFLQKLSTKLIKEND

SEQ ID NO: 3109 - protein, 372 aa, unidentified
MVVVEKAYKFRMYPNKKQQELINKTFGCCRFVYNKYLAKRIDVYKNNKETFTYKQCSSDLTNLKKELKWLKEPDKFSLQNALKDLDNAYKKFFKEKAGFPKFKSKKINRFSYKTNFTNGNIVYCGQHIKLPKLGMVKIRDKQVPKGRILNATISKEPSGRYYVSLCCTDVDIEAFENTNNQIGLDLGIKEFCISSCGEFIENPKYLKKSLNKLAKLQRELLRKTIGSLNRNKARLKVARLQEHIANQRNDFLQKLSTKLIKENDIICIEDLQVKNMIRNRKLSRLISDVSWSEFIRQLEYKANWHGRQIVKVGKFFASSQICNKCGYKNEEVKDLNIREWICPSCNETHDRDINASINILKEGLRLITIQNK

SEQ ID NO: 3110 - protein, 372 aa, unidentified
MAVVEKAYKFRMYPNKKQQELINKTFGCCRFVYNKYLAKRIEVYKNNKETFTYKQCSSDLTNLKKELKWLKEPDKFSLQNALKDLDNAYKKFFKEKAGFPKFKSKKINRFSYKTNFTNGNIMYCGQYIKLPKLGMVKVRDKQVPQGRILNATISKEPSGRYYVSLCCTNVDIEVFENTNNQIGLDLGIKEFCISSCGDFIENPKYLKKSLNKLAKLQRELSRKTIGSLNRNKARLKVARLQEHIANQRNDFLQKLSTKLIKENDIICIEDLQVKNMIRNRKLSRLISDVSWSEFIRQLEYKANWHGRQIVKVGKFFASSQICNKCGYKNEEMKDLNIREWICPSCNETHDRDINASINILKEGLRLITIQNK

SEQ ID NO: 3111 - protein, 369 aa, unidentified
MVVVEKAYKFRMYPNKKQQELINKTFGCCRFVYNKYLAKRIDVYKNNKETFTYKQCSSDLTNLKKELKWLKEPDKFSLQNALKDLDNAYKKFFKEKVGFPKFKSKKINRFSYKTNFTNGSIMYCGQHIKLPKLGMVKIRDKQVPKGRILNATISKEPSGRYYVSLCCTDVDIEAFENTNNHIGLDLGIKEFCISSCGEFIENPKYLKKSLNKLAKLQRELSRKTIGSLNRNKARLKVARLQEHIANQRNDFLQKLSTKLIKENDIICIEDLQVKNMIKNHKLSRLISDVSWSEFIRQLEYKANWHGRQIVKVGKFFASSQICNKCGYKNEEVKNLNIREWICPSCNETHDRDINASINILKEGLRLITI

SEQ ID NO: 3112 - protein, 372 aa, unidentified
MVVVEKAYKFRMYPNKKQQELINKTFGCCRFVYNKYLAKRIEVYKNTKETFTYKQCSSDLTNLKKELKWLKEPDKFSLQNALRDLDNAYKKFFKEKVGFPKFKSKKINRFSYKTNFTNGNIMYCGQHIKLPKLGMVKIRDKQVPKGRILNATISKEPSGRYYVSLCCTDVDIEVFENTNNQIGLDLGIKEFCISSCGEFIENPKYLKKSLNKLAKLQRELSRKTIGSLNRNKARLKVARLQEHIANQRNDFLQKLSTKLIKENDIICIEDLQVKNMIRNRKLSRLISDVSWSEFIRQLEYKANWYGRQIVKVGKFFASSQICNKCGYKNEEVKNLNIREWICPSCNETHDRDINASINILKEGLRLITIQNK

SEQ ID NO: 3113 - protein, 372 aa, unidentified
MIVVEKAYKFRIYPNKKQQELINKTFGCCRFVYNKYLAKRIDVYKSDKETFTYKQCSSDLTNLKKELKWLKEPDKFSLQNALKDLDNAYKKFFKEKAGFPKFKSKKINRFSYKTNFTNGNIMYCGQHIKLPKLGMVKVRDKQIPQGRILNATISKEPSGRYYVSLCCTDVDIEVFENTNNQIGLDLGIKEFCISSCGEFIENPKYLKKSLNKLAKLQRELSRKTIGSLNRNKARLKVARLQEHIANQRNDFLQKLSTKLIKENDIICIEDLQVKNMIRNRKLSRLISDVSWSEFVRQLEYKANWHGRQIVKVGKFFASSQICNKCGYKNEEVKDLNIREWICPSCNEIHDRDINASINILKEGLRLITIQNK

SEQ ID NO: 3114 - protein, 372 aa, unidentified
MAVVEKAYKFRMYPNKKQQELINKTFGCCRFVYNKYLAKRIEVYKNDKETFTYKQCSSDLTNLKKELKWLKEPDKFSLQNALKDLDNAYKKFFKEKAGFPKFKSKKINRFSYKTNFTNGNIMYCGQHIKLPKLGMVKIRDKQVPQGRILNATISKEPSGRYYVSLCCTDVDIEAFENTNNQIGLDLGIKEFCISSCGEFIENPKYLKKSLNKLAKLQRELSRKTIGSLNRNKARLKVARLQEHIANQRNDFLQKLSTKLIKENDIICIEDLQVKNMIRNRKLSRLISDVSWSEFIRQLEYKANWYGRQIVKVGKFFASSQICNKCGYKNEEVKDLNIREWICPSCNETHDRDINASINILKEGLRLITIQNK

SEQ ID NO: 3115 - protein, 372 aa, unidentified
MIAVEKAYKFRMYPNKKQQELINKTFGCCRFVYNKYLAKRIEVYKNDKETFTYKQCSSDLTNLKKELKWLKEPDKFSLQNALKDLDNAYKKFFKEKAGFPKFKSKKINRFSYKTNFTNGNIMYCGQHIKLPKLGMVKIRDKQVPQGRILNATISKEPSGRYYVSLCCTDVDIEAFENTNNQIGLDLGIKEFCISSCGEFIENPKYLKKSLNKLAKLQRELSRKTIGSLNRNKARLKVARLQEHIANQRKDFLQKLSTKLIKENDIICIEDLQVKNMIRNRKLSRLISDVSWSEFIRQLEYKANWHGRQIVKVGKFFASSQICNKCGYKNEEVKDLNIREWICPSCNETHDRDINASINILKEGLRLITIQNK

SEQ ID NO: 3116 - protein, 372 aa, unidentified
MIVVEKAYKFRIYPNKKQQELINKTFGCCRFVYNKYLAKRIDVYKNNKETFTYKQCSSDLTNLKKELNWLKEPDKFSLQNALKDLDNAYKKFFKEKAGFPKFKSKKINRFSYKTNFTNGNIMYCGQHIKLPKLGMIKIRDKQVPKGRILNATISKEPSGRYYVSLCCTDVDIEAFENTNNQIGLDLGIKEFCISSCGEFIENPKYLKKSLKKLAKLQRELSRKTIGSLNRNKARLKVARLQEHIANQRNNFLQKLSTKLIKENDIICIEDLQVKNMIKNRKLSRLISDVSWSEFIRQLEYKANWYGRQIVKVGKFFASSQICNKCGYKNEEVKDLNIREWICPSCNETHDRDINASINILKEGLRLITIQNK

SEQ ID NO: 3117 - protein, 372 aa, unidentified
MIVVEKAYKFRMYPNKKQQELINKTFGCCRFVYNKYLAKRIEVYKNNKETFTYKQCSSDLTNLKKELKWLKEPDKFSLQNALRDLDNAYKKFFKEKVGFPKFKSKKINRFSYKTNFTNGNIMYCGQHIKLPKLGMVKIRDKQVPKGRILNATISKEPSGRYYVSLCCTDVDIEAFENTNNHIGLDLGIKEFCISSCGEFIENPKYLKKSLNKLAKLQRELSRKTIGSLNRNKARLKVARLQEHIANQRNDFLQKLSTKLIKENDIICIEDLQVKNMIRNCKLSRLISDVSWSEFIRQLEYKANWHGRQIVKVGKFFASSQICNKCGYKNEEVKNLNIREWICPSCNETHDRDINASINILKEGLRLITIQNK

SEQ ID NO: 3118 - protein, 372 aa, unidentified
MIAVKKAYKFRMYPNKKQQELINKTFGCCRFVYNKYLAKRIDVYKNDKETFTYKQCSSDLTNLKKELKWLKEPDKFSLQNALKDLDNAYKKFFKEKAGFPKFKSKKINRFSYKTNFTNGNIMYCGQHIKLPKLGMVKVRDKQVPKGRILNATISKEPSGRYYVSLCCTDVDIEAFENTNNHIGLDLGIKEFCISSCGEFIENPKYLKKSLNKLAKLQRELSRKTIGSLNRNKARLKVARLQEHIANQRNDFLQKLSTKLIKENDIICIEDLQVKNMIKNHKLSRLISDVSWSEFIRQLEYKANWHGRQIVKVGKFFASSQICNKCGYKNEEVKNLNIREWICPSCNETHDRDINASINILKEGLRLITTQNK

SEQ ID NO: 3119 - protein, 369 aa, unidentified
MEKAYKFRMYPNKKQQELINKTFGCCRFVYNKYLAKRIEVYKNDKETFTYKQCSSDLTNLKKELKWLKEPDKFSLQNALKDLDNAYKKFFKEKAGFPKFKSKKINRFSYKTNFTNGNIVYCGQHIKLPKLGMVKIRDKQVPQGRILNATISKEPSGRYYVSLCCTDVDIEAFENTNNQIGLDLGIKEFCISSCGEFIENPKYLKKSLNKLAKLQRELSRKTIGSLNRNKARLKVARLQEHIANQRNDFLQKLSTKLIKENDIICIEDLQVKNMIRNRKLSRLISDVSWSEFIRQLEYKANWYGRQIVKVGKFFASSQICNKCGYKNEEVKDLNIREWICPSCNETHDRDINASINILKEGLRLITIQNK

SEQ ID NO: 3120 - protein, 369 aa, unidentified
MEKAYKFRMYPNKKQQELINKTFGCCRFVYNKYLAKRIEVYKNDKETFTYKQCSSDLTNLKKELKWLKEPDKFSLQNALKDLDNAYKKFFKEKAGFPKFKSKKINRFSYKTNFTNGNIVYCGQHIKLPKLGMVKIRDKQVPQGRILNATISKEPSGRYYVSLCCTDVDIEAFENTNNQIGLDLGIKEFCISSCGEFIENPKYLKKSLNKLAKLQRELSRKTIGSLNRNKARLKVARLQEHIANQRNDFLQKLSTKLIKENDIICIEDLQVKNMIKNRKLSRSISDVSWSEFIRQLEYKANWYGRQIVKVGKFFASSQICNKCGYKNEEVKNLNIREWICPSCNETHDRDINASINILKEGLRLITIQNK

SEQ ID NO: 3121 - protein, 372 aa, unidentified
MIVVEKAYKFRIYPNKKQQELINKTFGCCRFVYNKYLAKRIDVYKSDKETFTYKQCSSDLTNLKKELKWLKEPDKFSLQNALKDLDNAYKKFFKEKAGFPKFKSKKINRFSYKTNFTNGNIMYCGQHIKLPKLGMVKVRDKQIPQGRILNATISKEPSGRYYVSLCCTDVDIEVFENTNNQIGLDLGIKEFCISSCGEFIENPKYLKKSLNKLAKLQRELSRKTIGSLNRNKARLKVARLQEHIANQRNDFLQKLSTKLIKENDIICIEDLQVKNMIKNRKLSRLISDVSWSEFVRQLEYKANWHGRQIVKVGKFFASSQICNKCGYKNEEVKNLNIREWICPSCNETHDRDINASINILKEGLRLITIQNK

SEQ ID NO: 3122 - protein, 372 aa, unidentified
MVVVEKAYKFRMYPNKKQQELINKTFGCCRFVYNKYLAKRIDVYKNNKETFTYKQCSSDLTNLKKELKWLKEPDKFSLQNALKDLDNAYKKFFKEKAGFPKFKSKKINRFSYKTNFTNGNIVYCGQHIKLPKLGMVKVRDKQVPKGRILNATISKEPSGRYYVSLCCTDVDIEAFENTNNHIGLDLGIKEFCISSCGEFIENPKYLKKSLNKLAKLQRELSRKTIGSLNRNKARLKVARLQEHIANQRKDFLQKLSTKLIKENDIICIEDLQVKSMIKNHKLSRSISDVSWSEFIRQLEYKANWHGRQIVKVGKFFASSQICNKCGYKNEEVKNLNIREWICPSCNETHDRDINASINILKEGLRLITIQNK

SEQ ID NO: 3123 - protein, 372 aa, unidentified
MIVVEKAYKFRMYPNKKQQELINKTFGCCRFVYNKYLAKRIEVYKNDKETFTYKQCSSDLTNLKKELKWLKEPDKFSLQNALKDLDNAYKKFFKEKAGFPKFKSKKTNRFSYKTNFTNGNIMYFSQHIKLPKLGMVKIRDKQVPQGRILNATISKEPSGRYYVSLCCTDVDIEAFENTNNQIGLDLGIKEFCISSCGDFIENPKYLKKSLNKLAKLQRELSRKTIGSLNRNKARLKVARLQEHIANQRNDFLQKLSTKLIKENDIICIEDLQVKNMIKNRKLSRLISDVSWSEFIRQLKYKANWHGRQIVKVGKFFASSQICNKCGYKNEEVKDLSIREWICPSCNETHDRDINASINILKEGLRLITIQNK

SEQ ID NO: 3124 - protein, 372 aa, unidentified
MVVVKKAYKFRMYPNKKQQELINKTFGCCRFVYNKYLAKRIDVYKNNKETFTYKQCSSDLTNLKKELNWLKEPDKFSLQNALKDLDNAYKKFFKEKAGFPKFKSKKINRFSYKTNFTNGNIMYCGQHIKLPKLGMVKVRDKQVPKGRILNATISKEPSGRYYVSLCCTDVDIEAFENTNNQIGLDLGIKEFCISSCGDFIENPKYLKKSLNKLAKLQRELSRKTIGSLNRNKARLKVARLQEHIANQRKDFLQKLSTKLIKENDIICIEDLQVKNMIKNHKLSRLISDVSWSEFIRQLEYKANWYGRQIVNVGKFFASSQICNKCGYKNEEVKDLNIREWICPSCNETHDRDINAGMNILKEGLRLITIQNK

SEQ ID NO: 3125 - protein, 372 aa, unidentified
MVVVEKAYKFRMYPNKKQQELINKTFGCCRFVYNKYLAKRIDVYKNNKETFTYKQCSSDLTNLKKELKWLKEPDKFSLQNALKDLDNAYKKFFKEKAGFPKFKSKKINRFSYKTNFTNGNIMYCGQHIKLPKLGMVKIRDKQVPQGRILNATISKEPSGRYYVSLCCTDVDIEAFENTNNHIGLDLGIKEFCISSCGEFIENPKYLKKSLNKLAKLQRELSRKTIGSLNRNKARLKVARLQEHIANQRKDFLQKLSTKLIKENDIICIEDLQVKNMIKNHKLSRLISDVSWSEFIRQLEYKANWYGRQIVKVGKFFASSQICNKCGYKNEEVKNLNIREWICPSCNETHDRDINASINILKEGLRLITIQNK

SEQ ID NO: 3126 - protein, 372 aa, unidentified
MVVVEKAYKFRMYPNKKQQELINKTFGCCRFVYNKYLAKRIEVYKNDKETFTYKQCSSDLTNLKKELKWLKEPDKFSLQNALKDLDNAYKKFFKEKAGFPKFKSKKINRFSYKTNFTNGNIMYCGQHIKLPKLGMVKIRDKQVPKGRILNATISKEPSGRYYVSLCCTDVDIEAFENTNNHIGLDLGIKEFCISSCGEFIENPKYLKKSLNKLAKLQRELSRKTIGSLNRNKARLKVARLQEHIANQRNDFLQKLSTKLIKENDIICIEDLQVKNMIKNRRLSRLISDVSWSEFVRQLEYKANWYGRKIVKVGKFFASSQICNKCGYKNEEVKDLNIREWICPSCNETHNRDINASINILKEGLRLITIQNK

SEQ ID NO: 3127 - protein, 372 aa, unidentified
MIVVEKAYKFRIYPNKKQQELINKTFGCCRFVYNKYLAKRIDVYKNNKETFTYKQCSSDLTNLKKELNWLKEPDKFSLQNALKDLDNAYKKFFKEKAGFPKFKSKKINRFSYKTNFTNGNIMYCGQHIKLPKLGMIKIRDKQVPKGRILNATISKEPSGRYYVSLCCTDVDIEAFENTNNHIGLDLGIKEFCISSCGEFIENPKYLKKSLKKLAKLQRELSRKTIGSLNRNKARLKVARLQEHIANQRNDFLQKLSTKLIKENDIICIEDLQVKNMIKNRKLSRLISDVSWSEFIRQLEYKANWYGRQIVKVGKFFASSQICNKCGYKNEEVKDLNIREWICPSCNETHDRDINASINILKEGLRLITIKNK

SEQ ID NO: 3128 - protein, 372 aa, unidentified
MIAVKKAYKFRMYPNKKQQELINKTFGCCRFVYNKYLAKRIDVYKNDKETFTYKQCSSDLTNLKKELKWLKEPDKFSLQNALKDLDNAYKKFFKEKAGFPKFKSKRINRFSYKTNFTNGNIMYCGQHIKLPKLGMVKIRDKQVPQGRILNATISKEPSGRYYVSLCCTDVDIEAFENTNNHIGLDLGIKEFCISSCGEFIENPKYLKKSLNKLAKLQRELSRKTIGSLNRNKARLKVARLQEHIANQRNDFLQKLSTKLIKENDIICIEDLQVKNMIRNRKLSRLISDVSWSEFIRQLEYKANWHGRQIVKVGKFFASSQICNKCGYKNEEVKNLNIREWICPSCNETHDRDINASRNILKEGLRLITIQNK

SEQ ID NO: 3129 - protein, 372 aa, unidentified
MVVVKKAYKFRMYPNKKQQELINKTFGCCRFVYNKYLAKRIEVYKNDKETFTYKQCSSDLTNLKKELKWLKEPDKFSLQNALKDLENAYNKFFKEKTGFPKFKSKKTNRFSYKTNFTNGNIMYCGQHIKLPKLGMVKIRDKQVPKGRILNATISKEPSGRYYVSLCCTDVDIEAFENTNNQIGLDLGIKEFCISSCGEFIENPKYLKKSLNKLAKLQRELSRKTIGSLNRNKARLKVARLQEHIANQRKDFLQKLSTKLIKENDIICIEDLQVKNMIRNRKLSRLISDVSWSEFIRQLEYKANWHGRQIVKVGKFFASSQICNKCGYKNEEVKNLNIREWICPSCNETHDRDINASINILKEGLRLITIQNK

SEQ ID NO: 3130 - protein, 372 aa, unidentified
VIVVEKAYKFRIYPNKKQQELINKTFGCCRFVYNKYLAKRIDVYKNNKETFTYKQCSSDLTNLKKELNWLKEPDKFSLQNALKDLDNAYKKFFKEKAGFPKFKSKKINRFSYKTNFTNGNIMYCGQHIKLPKLGMIKIRDKQVPKGRILNATISKEPSGRYYVSLCCTDVDIEAFENTNNHIGLDLGIKEFCISSCGEFIENPKYLKKSLKKLAKLQRELSRKTIGSLNRNKARLKVARLQEHIANQRNDFLQKLSTKLIKENDIICIEDLQVKNMIKNRKLSRLISDVSWSEFIRQLEYKANWYGRQIVKVGKFFASSQICNKCGYKNEEVKDLNIREWICPSCNETHDRDINASINILKEGLRLITIQNK

SEQ ID NO: 3131 - protein, 372 aa, unidentified
MIVVEKAYKFRMYPNKKQQELINKTFGCCRFVYNKYLAKRIEVYKNAKETFTYKQCSSDLTNLKKELKWLKEPDKFSLQNALKDLDNAYKKFFKEKAGFPKFKSKKINRFSYKTNFTNGNIMYCGQHIKLPKLGMVKIRDKQVPKGRILNATISKEPSGRYYVSLCCTDVDIEAFENTNNQIGLDLGIKEFCISSCGEFIENPKYLKKSLNKLAKLQRELSRKTIGSLNRNKARLKVARLQEHIANQRNDFLQKLSTKLIKDNDIICIEDLQVKNMIRNRKLSRLISDVSWSEFIRQLEYKANWYGRQIVKVGKFFASSQICNKCGYKNEEVKDLNIREWICPSCNETHDRDINASINILKEGLRLITIQNK

SEQ ID NO: 3132 - protein, 372 aa, unidentified
MAVVEKAYKFRMYPNKKQQELINKTFGCCRFVYNKYLAKRIEVYKNDKETFTYKQCSSDLTNLKKELKWLKEPDKFSLQNALKDLDNAYKKFFKEKAGFPKFKSKKINRFSYKTNFTNGNIMYCGQHIKLPKLGMVKIRDKQVPKGRILNATISKEPSGRYYVSLCCTDVDIEAFENTNNHIGLDLGIKEFCISSCGEFIENPKYLKKSLNKLAKLQRELSRKTIGSLNRNKARLKVARLQEHIANQRNDFLQKLSTKLIKENDIICIEDLQVKNMIRNRKLSRLISDVSWSEFIRQLEYKANWHGRQIVKVGKFFASSQICNKCGYKNEEVKDLNIREWICPSCNEIHDRDINASINILKEGLRLITIQNK

SEQ ID NO: 3133 - protein, 372 aa, unidentified
MIAVKKAYKFRMYPNKKQQELINKTFGCCRFVYNKYLAKRIDVYKNDKETFTYKQCSSDLTNLKKELKWLKEPDKFSLQNALKDLDNAYKKFFKEKSGFPKFKSKKINRFSYKTNFTNGNIMYCGQHIKLPKLGMVKIRDKQVPQGRILNATISKEPSGRYYVSLCCTDVDIEAFENTNNHIGLDLGIKEFCISSCGEFIENPKYLKKSLNKLAKLQRELSRKTIGSLNRNKARLKVARLQEHIANQRNDFLQKLSTKLIKENDIICIEDLQVKNMIRNRKLSRLISDVSWSEFIRQLEYKANWHGRQIVKVGKFFASSQICNKCGYKNEEVKNLNIREWICPSCNETHDRDINASINILKEGLRLITIQNK

SEQ ID NO: 3134 - protein, 372 aa, unidentified
MIAVEKAYKFRMYPNKKQQELINKTFGCCRFVYNKYLAKRIDVYKNDKETFTYKQCSSDLTNLKKELKWLKEPDKFSLQNALKDLENAYEKFFKEKTGFPKFKSKKTNRFSYKTNFTNGNIMYCGQHIKLPKLGMVKIRDKQVPQGRILNATISKEPSGRYYVSLCCTDVDIEAFENTNNQIGLDLGIKEFCISSCGDFIENPKYLKKSLNKLAKLQRELSRKTIGSLNRNKARLKVARLQEHIANQRKDFLQKLSTKLIKENDIICIEDLQVKNMIRNSKLSRLISDVSWSEFIRQLEYKANWHGRQIVKVSKFFASSQICNKCGYKNEEVKNLNIREWICPSCNETHDRDINASINILKEGLRLITIQNK

SEQ ID NO: 3135 - protein, 372 aa, unidentified
MVVVEKAYKFRMYPNKKQQELINKTFGCCRFVYNKYLAKRIDVYKNDKETFTYKQCSSDLTNLKKELKWLKEPDKFSLQNALKDLENAYEKFFKEKTGFPKFKSKKTNRFSYKTNFTNGNIMYCGQHIKLPKLGMVKIRDKQVPKGRILNATISKEPSGRYYVSLCCTDVDIEAFENTNNQIGLDLGIKEFCISSCGEFIENPKYLKKSLNKLAKLQRELSRKTIGSLNRNKARLKVARLQEHIANQRKDFLQKLSTKLIKENDIICIEDLQVKNMIRNRKLSRLISDVSWSEFIRQLEYKANWYDRQIVKVGKFFASSQICNKCGYKNEEVKDLNIREWICPSCNETHDRDINASINILKEGLRLITIQNK

SEQ ID NO: 3136 - protein, 372 aa, unidentified
MIAVEKAYKFRMYPNKKQQELINKTFGCCRFVYNKYLAKRIDVYKNDKETFTYKQCSSDLTNLKKELKWLKEPDKFSLQNALKDLDNAYKKFFKEKAGFPKFKSKKINRFSYKTNFTNGNIMYCGQHIKLPKLGMVKVRDKQVPKGRILNATISKEPSGRYYVSLCCTDVDIEAFENTNNHIGLDLGIKEFCISSCGEFIENPKYLKKSLNKLAKLQRELSRKTIGSLNRNKARLKVARLQEHIANQRNDFLQKLSTKLIKENDIICIEDLQVKNMIKNHKLSRLISDVSWSEFIRQLEYKANWHGRQIVKVGKFFASSQICNKCGYKNEEVKNLNIREWICPSCNETHDRDINASINILKEGLRLITTQNK

SEQ ID NO: 3137 - protein, 372 aa, unidentified
MVVVEKAYKFRMYPNKKQQELINKTFGCCRFVYNKYLAKRIDVYKNNKETFTYKQCSSDLTNLKKELKWLKEPDKFSLQNALKDLDNAYKKFFKEKAGFPKFKSKKINRFSYKTNFTNGNIMYCGQHIKLPKLGMVKIRDKQVPQGRILNATISKEPSGRYYVSLCCTDVDIEAFENTNNHIGLDLGIKEFCISSCGEFIENPKYLKKSLNKLAKLQRELSRKTIGSLNRNKARLKVARLQEHIANQRKDFLQKLSTKLIKENDIICIEDLQVKNMIKNHKLSRSISDVSWSEFIRQLEYKANWHGRQIVKVGKFFASSQICNKCGYKNEEVKNLNIREWICPSCNETHDRDINASINILKEGLRLITIQNK

SEQ ID NO: 3138 - protein, 372 aa, unidentified
MVVVEKAYKFRMYPNKKQQELINKTFGCCRFVYNKYLAKRIEVYKNDKETFTYKQCSSDLTNLKKELKWLKEPDKFSLQNALKDLDNAYKKFFKEKVGFPKFKSKKINRFSYKTNFTNGNIMYCGQHIKLPKLGMVKIRDKQVPKGRILNATISKEPSGRYYVSLCCTDVDIEVFENTNNQIGLDLGIKEFCISSCGEFIENPKYLKKSLNKLAKLQRELSRKTIGSLNRNKARLKVARLQEHIANQRNDFLQKLSTKLIKENDIICIEDLQVKNMIKNRRLSRLISDVSWSEFIRQLEYKANWHGRKIVKVGKFFASSQICNKCGYKNEEVKDLNIREWICPSCNETHDRDINASINILKEGLRLITIQNK

SEQ ID NO: 3139 - protein, 369 aa, unidentified
MEKAYKFRMYPNKKQQELINKTFGCCRFVYNKYLAKRIEVYKNDKETFTYKQCSSDLTNLKKELKWLKEPDKFSLQNALKDLDNAYKKFFKEKVGFPKFKSKKINRFSYKTNFTNGNIMYCGQHIKLPKLGMVKVRDKQVPKGRILNATISKEPSGRYYVSLCCTDVDIEAFENTNNQIGLDLGIKEFCISSCGEFIENPKYLKKSLNKLAKLQRELSRKTIGSLNRNKARLKVARLQEHIANQRNDFLQKLSTKLIKENDIICIEDLQVKNMIRNRKLSRLISDVSWSEFIRQLEYKANWYGRQIVKVGKFFASSQICNKCGYKNEEVKNLNIREWICPSCNETHDRDINASINILKEGLRLITIQNK

SEQ ID NO: 3140 - protein, 372 aa, unidentified
MIAVKKAYKFRLYPNKKQQELINKTFGCCRFVYNKYLAKRIDVYKNNKETFTYKQCSSDLTNLKKELKWLKEPDKFSLQNALKDLDNAYKKFFKEKAGFPKFKSKKINRFSYKTNFTNGNIMYCGQHIKLPKLGMVKIRDKQVPQGRILNATISKEPSGRYYVSLCCTDVDIEAFENTNNHIGLDLGIKEFCISSCGEFIENPKYLKKSLNKLAKLQRELSRKTIGSLNRNKARLKVARLQEHIANQRNDFLQKLSTKLIKENDIICIEDLQVKNMIRNRKLSRLISDVSWSEFIRQLEYKANWYGRKIVKVGKFFASSQICNKCGYKNEEVKDLNIREWICPSCNETHDRDINASINILKEGLRLITIQNK

SEQ ID NO: 3141 - protein, 372 aa, unidentified
MIAVEKAYKFRMYPNKKQQELINKTFGCCRFVYNKYLAKRIEVYKNDKETFTYKQCSSDLTNLKKELKWLKEPDKFSLQNALKDLDNAYKKFFKEKVGFPKFKSKKINRFSYKTNFTNGNIMYLGQHIKLPKLGMIKIRDKQVPQGRILNATISKEPSGRYYVSLCCTDVDIEAFENTNNQIGLDLGIKEFCISSCGEFIENPKYLKKSLNKLAKLQRELSRKTIGSLNRNKARLKVARLQEHIANQRKDFLQKLSTKLIKENDIICIEDLQVKNMIRNRKLSRLISDVSWSEFIRQLEYKANWHGRQIVKVGKFFASSQICNKCGYKNEEVKNLNIREWICPSCNETHDRDINASINILKEGLRLITIQNK

SEQ ID NO: 3142 - protein, 372 aa, unidentified
MVVVEKAYKFRMYPNKKQQELINKTFGCCRFVYNKYLAKRIEVYKNDKETFTYKQCSSDLTNLKKELKWLKEPDKFSLQNALKDLDNAYKKFFKEKAGFPKFKSKKINRFSYKTNFTNGNIMYCGQHIKLPKLGMVKIRDKQVPQGRILNATISKEPSGRYYVSLCCTDVDIEAFENTNNHIGLDLGIKEFCISSCGEFIENPKYLKKSLNKLAKLQRELSRKTIGSLNRNKARLKVARFQEHIANQRNDFLQKLSTKLIKENDIICIEDLQVKNMIRNRKLSRSISDVSWSEFIRQLEYKANWYGRQIVKVGKFFASSQICNKCGYKNEEVKNLNIREWICPSCNETHDRDINASINILKEGLRLITTQNK

SEQ ID NO: 3143 - protein, 372 aa, unidentified
MIVVEKAYKFRMYPNKKQQELINKTFGCCRFVYNKYLAKRIEVYKNNKETFTYKQCSSDLTNLKKELKWLKEPDKFSLQNALRDLDNAYKKFFKEKVGFPKFKSKKINRFSYKTNFTNGNIMYCGQHIKLPKLGMVKIRDKQVPKGRILNATISKEPSGRYYVSLCCTDVDIEVFENTNNQIGLDLGIKEFCISSCGEFIENPKYLKKSLNKLAKLQRELSRKTIGSLNRNKARLKVARLQEHIANQRNDFLQKLSTKLIKENDIICIEDLQVKNMIKNRRLSRLISDVSWSEFVRQLEYKANWYGRKIVKVGKFFASSQICNKCGYKNEEVKDLNIREWICPSCNETHNRDINASINILKEGLRLITIQNK

SEQ ID NO: 3144 - protein, 372 aa, unidentified
MAVVEKAYKFRMYPNKKQQELINKTFGCCRFVYNKYLAKRIEVYKNDKETFTYKQCSSDLTNLKKELKWLKEPDKFSLQNALKDLDNAYKKFFKEKAGFPKFKSKKINRFSYKTNFTNGNIMYCGQHIKLPKLGMVKIRDKQVPQGRILNATISKEPSGRYYVSLCCTDVDIEAFENTNNHIGLDLGIKEFCISSCGEFIENPKYLKKSLNKLAKLQRELSRKTIGSLNRNKARLKVARLQEHIANQRNDFLQKLSTKLIKENDIICIEDLQVKNMIRNRKLSRLISDVSWSEFIRQLEYKANWHGRQIVKVGKFFASSQICNKCGYKNEEVKDLNIREWICPSCNEIHDRDINASINILKEGLRLITIQNK

SEQ ID NO: 3145 - protein, 372 aa, unidentified
MIVVEKAYKFRMYPNKKQQELINKTFGCCRFVYNKYLAKRIEVYKNAKETFTYKQCSSDLTNLKKELNWLKEPDKFSLQNALKDLDNAYKKFFKEKAGFPKFKSKKINRFSYKTNFTNGNIMYCGQYIKLPKLDMVKIRDKQVPKGRILNATISKEPSGRYYVSLCCTDVDIEAFENTNNQIGLDLGIKEFCISSCGEFIENPKYLKKSLNKLAKLQRELSRKTIGSLNRNKARLKVARLQEHIANQRNDFLQKLSTKLIKDNDIICIEDLQVKNMIRNRKLSRLISDVSWSEFIRQLEYKANWYGRQIVKVGKFFASSQICNKCGYKNEEVKDLNIREWICPSCNETHDRDINASINILKEGLRLITIQNK

SEQ ID NO: 3146 - protein, 321 aa, unidentified
MVVVEKAYKFRMYPNKKQQELINKTFGCCRFVYNKYLAKRIEVYKNDKETFTYKQCSSDLTNLKKELKWLKEPDKFSLQNALKDLDNAYKKFFKEKAGFPKFKSKKINRFSYKTNFTNGNIMYCGQHIKLPKLGMVKIRDKQIPKGRILNATISKEPSGRYYVSLCCTDVDIEAFENTNNHIGLDLGIKEFCISSCGDFIENPKYLKKSLNKLAKLQRELSRKTIGSLNRNKARLKVARLQEHITNQRNDFLQKLSTKLIKENDIICIEDLQVKNMIKNHKLSRSISDVSWSEFIRQLEYKANWYGRQIVKVGKFFASSQI

SEQ ID NO: 3147 - protein, 372 aa, unidentified
MISVKKAYKFRMYPNKKQQELINKTFGCCRFVYNKYLAKRIDVYKNDKETFTYKQCSSDLTNLKKELKWLKEPDKFSLQNALKDLENAYNKFFKEKTGFPKFKSKKTNRFSYKTNFTNGNIMYCGQHIKLPKLGMVKIRDKQVPQGRILNATISKEPSGRYYVSLCCTDVDIEAFENTNNQIGLDLGIKEFCISSCGDFIENPKYLKKSLNKLAKLQRELSRKTIGSLNRNKARLKVARLQEHIANQRKDFLQKLSTKLIKENDIICIEDLQVKNMIRNSKLSRLISDVSWSEFIRQLEYKANWHGRQIVKVSKFFASSQICNKCGYKNEEVKNLNIREWICPSCNETHDRDINASINILKEGLRLITIQNK

SEQ ID NO: 3148 - protein, 372 aa, unidentified
MIAVKKAYKFRMYPNKKQQELINKTFGCCRFVYNKYLAKRIDVYKNNKETFTYKQCSSDLTNLKKELKWLKEPDKFSLQNALKDLDNAYKKFFKEKAGFPKFKSKKINRFSYKTNFTNGNIMYCGQHIKLPKLGMVKIRDKQVPKGRILNATISKEPSGRYYVSLCCTDVDIEAFENTNNHIGLDLGIKEFCISSCGEFIENPKYLKKSLNKLAKLQRELSRKTIGSLNRNKARLKVARLQEHIANQRNDFLQKLSTKLIKENDIICIEDLQVKNMIRNRKLSRLISDVSWSEFIRQLEYKANWHGRQIVKVGKFFASSQICNKCGYKNEEVKDLNIREWICPSCNETHDRDINASINILKEGLRLITIQNK

SEQ ID NO: 3149 - protein, 372 aa, unidentified
MVVVEKAYKFRMYPNKKQQELINKTFGCCRFVYNKYLAKRIDVYKNNKETFTYKQCSSDLTNLKKELKWLKEPDKFSLQNALKDLDNAYKKFFKKKAGFPKFKSKKINRFSYKTNFTNGNIVYCGQHIKLPKLGMVKVRDKQVPKGRILNATISKEPSGRYYVSLCCTDVDIEVFENTNNQIGLDLGIKEFCISSCGDFIENPKYLKKSLNKLAKLQRELSRKTIGSLNRNKARLKVARLQEHIANQRNDFLQKLSTKLIKENDIICIEDLQVKNMIRNRKLSRLISDVSWSEFIRQLEYKANWYGRQIVKVGKFFASSQICNKCGYKNEEVKDLNIREWICPSCNETHDRDINASINILKEGLRLITIQNK

SEQ ID NO: 3150 - protein, 372 aa, unidentified
MIVVEKAYKFRMYPNKKQQELINKTFGCCRFVYNKYLAKRIEVYKNAKETFTYKQCSSDLTNLKKELNWLKEPDKFSLQNALKDLDNAYKKFFKEKAGFPKFKSKKINRFSYKTNFTNGNIMYCGQHIKLPKLGMVKIRDKQVPKGRILNATISKEPSGRYYVSLCCTDVDIEAFENTNNQIGLDLGIKEFCISSCGEFIENPKYLKKSLNKLAKLQRELSRKTIGSLNRNKARLKVAGLQEHIANQRNDFLQKLSTKLIKENDIICIEDLQVKNMIRNRKLSRLISDVSWSEFVRQLEYKANWHGRQIVKVGKFFASSQICNKCGYKNEEVKNLNIREWICPSCNETHDRDINASINILKEGLRLITIQNK

SEQ ID NO: 3151 - protein, 372 aa, unidentified
MVVVEKAYKFRMYPNKKQQELINKTFGCCRFVYNKYLAKRIDVYKNDKETFTYKQCSSDLTNLKKELNWLKEPDKFSLQNALKDLDNAYKKFFKEKAGFPKFKSKKINRFSYKTNFTNGNIMYCGQHIKLPKLGMVKIRDKQVPKGRILNATISKEPSGRYYVSLCCTDVDIEAFENTNNHIGLDLGIKEFCISSCGEFIENPKYLKKSLNKLAKLQRELSRKTIGSLNRNKARLKVARLQEHIANQRNDFLQKLSTKLIKENDIICIEDLQVKNMIRNRKLSRLISDVSWSEFIRQLEYKANWHGRQIVKVGKFFASSQICNKCGYKNEEVKDLNIREWICPSCNETHDRDINASINILKEGLRLITIQNK

SEQ ID NO: 3152 - protein, 372 aa, unidentified
MVVVEKAYKFRMYPNKKQQELINKTFGCCRFVYNKYLAKRIDVYKNDKETFTYKQCSSDLTNLKKELKWLKEPDKFSLQNALKDLDNAYEKFFKEKAGFPKFKSKKTNRFSYKTNFTNGNIMYCGQHIKLPKLGMVKIRDKQVPKGRILNATISKEPSGRYYVSLCCTDVDIEAFENTNNQIGLDLGIKEFCISSCGDFIENPKYLKKSLNKLAKLQRELSRKTIGSLNRNKARLKVARLQEHIANQRKDFLQKLSTKLIKENDIICIEDLQVKNMIRNRKLSRLISDVSWSEFIRQLEYKANWYGKQIVKVGKFFASSQICNKCGYKNEEVKNLNIREWICPSCNETHDRDINASMNILKEGLRLITIQNK

SEQ ID NO: 3153 - protein, 372 aa, unidentified
MVVVEKAYKFRMYPNKKQQELINKTFGCCRFVYNKYLAKRIDVYKNDEETFTYKQCSSDLTNLKKELKWLKEPDKFSLQNALKDLENAYEKFFKEKTGFPKFKSKKTNRFSYKTNFTNGNIMYCGQHIKLPKLGMVKIRDKQVPKGRILNATISKEPSGRYYVSLCCTDVDIEAFENTNNQIGLDLGIKEFCISSCGEFIENPKYLKKSLNKLAKLQRELSRKTIGSLNRNKARLKVARLQEHIANQRKDFLQKLSTKLIKENDIICIEDLQVKNMIRNSKLSRLISDVSWSEFIRQLEYKANWHGRQIVKVGKFFASSQICNKCRYKNEEVKNLNIREWICPSCNETHDRDINASINILKEGLRLITIQNK

SEQ ID NO: 3154 - protein, 372 aa, unidentified
MIAVEKAYKFRMYPNKKQQELINKTFGCCRFVYNKYLAKRIDVYKNNKETFTYKQCSSDLTNLKKELNWLKEPDKFSLQNALKDLDNAYNKFFKKKAGFPKFKSKKINRFSYKTNFTNGNIMYCGQHIKLPKLGMIKIRDKQVPQGRILNATISKEPSGRYYVSLCCTDVDIEVFENTNNQIGLDLGIKEFCISSCGDFIENPKYLKKSLNKLAKLQRELSRKTIGSLNRNKARLKVARLQEHISNQRNDFLQKLSTKLIKENDIICIEDLQVKNMIRNHKLSRLISDVSWSEFIRQLKYKANWYGRKIVKVGKFFASSQICNKCGYKNEEVKDLNIREWICPSCNETHDRDINASINILKEGLRLIAIQNK

SEQ ID NO: 3155 - protein, 372 aa, unidentified
MIAVEKAYKFRMYPNKKQQELINKTFGCCRFVYNKYLAKRIEVYKNDKETFTYKQCSSDLTNLKKELNWLKEPDKFSLQNALKDLDNAYEKFFKEKAGFPKFKSKKTNRFSYKTNFTNGNIMYCGQHIKLPKLGMVKIRDKQVPQGRILNATISKEPSGRYYVSLCCTDVDIEAFENTNNQIGLDLGIKEFCISSCGDFIENPKYLKKSLNKLAKLQRELSRKTIGSLNRNKVRLKVARLQEHIANQRKDFLQKLSTKLIKENDIICIEDLQVKNMIRNRKLSRLISDVSWSEFVRQLEYKANWHGRQIVKVGKFFASSQICNKCGYKNEEVKNLNIRDWICPSCNETHDRDINASINILKEGLRVITIQSK

SEQ ID NO: 3156 - protein, 369 aa, unidentified
MEKAYKFRMYPNKKQQELINKTFGCCRFVYNKYLAKRIDVYKNDKETFTYKQCSSDLTNLKKELKWLKEPDKFSLQNALKDLDNAYKKFFKEKAGFPKFKSKKINRFSYKTNFTNGNIMYCGQHIKLPKLGMVKVRDKQVPKGRILNATISKEPSGRYYVSLCCTDVDIEAFENTNNHIGLDLGIKEFCISSCGEFIENPKYLKKSLNKLAKLQRELSRKTIGSLNRNKARLKVARLQEHIANQRNDFLQKLSTKLIKENDIICIEDLQVKNMIKNHKLSRLISDVSWSEFIRQLEYKANWHGRQIVKVGKFFASSQICNKCGYKNEEVKNLNIREWICPSCNETHDRDINASINILKEGLRLITTQNK

SEQ ID NO: 3157 - protein, 372 aa, unidentified
MIVVKKAYKFRMYPNKKQQELINKTFGCCRFVYNKYLAKRIDVYKNDKETFTYKQCSSDLTNLKKELKWLKEPDKFSLQNALKDLDNAYKKFFKEKAGFPKFKSKKINRFSYKTNFTNGNIMYFSQHIKLPKLGMVKIRDKQVPKGRILNATISKEPSGRYYVSLCCTDVDIEAFENTNNQIGLDLGIKEFCISSCGDFIENPKYLKKSLNKLAKLQRELSRKTIGSLNRNKARLKVARLQEHIANQRNDFLQKLSTKLIKENDIICIEDLQVKNMIRNRKLSRLISDVSWSEFIRQLEYKANWYGRQIVKVGKFFASSQICNKCGYKNEEVKNLNIREWICPSCNETHDRDINASINILKEGLRLITIQNK

SEQ ID NO: 3158 - protein, 319 aa, unidentified
MIAVKKAYKFRMYPNKKQQELINKTFGCCRFVYNKYLAKRIEVYKNDKETFTYKQCSSDLTNLKKELNWLKEPDKFSLQNALKDLDNAYKKFFKEKAGFPKFKSKKINRFSYKTNFTNGNIMYCGQYIKLPKLGMVKIRDKQVPQGRILNATISKEPSGRYYVSLCCTDVDIEAFENTNNHIGLDLGIKEFCISSCGEFIENPKYLKKSLNKLAKLQRELSRKTIGSLNRNKARLKVARLQEHIANQRNDFLQKLSTKLIKENDIICIEDLQVKNMIRNRKLSRLISDVSWSEFIRQLEYKANWHGRQIVKVGKFFASS

SEQ ID NO: 3159 - protein, 285 aa, unidentified
MIAVKKAYKFRMYPNKKQQELINKTFGCCRFVYNKYLAKRIEVYKNDKETFTYKQCSSDLTNLKKELNWLKEPDKFSLQNALKDLDNAYKKFFKEKAGFPKFKSKKINRFSYKTNFTNGNIMYCGQYIKLPKLGMVKIRDKQVPQGRILNATISKEPSGRYYVSLCCTDVDIEAFENTNNHIGLDLGIKEFCISSCGEFIENPKYLKKSLNKLAKLQRELSRKTIGSLNRNKARLKVARLQEHIANQRNDFLQKLSTKLIKENDIICIEDLQVKNMIKNRKLSRS

SEQ ID NO: 3160 - protein, 372 aa, unidentified
MIVVEKAYKFRMYPNKKQQELINKTFGCCRFVYNKYLAKRIEVYKNDKETFTYKQCSSDLTNLKKELKWLKEPDKFSLQNALKDLDNAYKKFFKEKAGFPKFKSKKINRFSYKTNFTNGNIMYCGQHIKLPKLGMVKVRDKQIPQGRILNATISKEPSGRYYVSLCCTDVDIEVFENTNNQIGLDLGIKEFCISSCGEFIENPKYLKKSLNKLAKLQRELSRKTIGSLNRNKARLKVARLQEHIANQRNDFLQKLSTKLIKENDIICIEDLQVKNMIRNRKLSRLISDVSWSEFVRQLEYKANWHGRQIVKVGKFFASSQICNKCGYKNEEVKDLNIREWICPSCNEIHDRDINASINILKEGLRLITIQNK

SEQ ID NO: 3161 - protein, 372 aa, unidentified
MIVVEKAYKFRMYPNKKQQELINKTFGCCRFVYNKYLAKRIEVYKNDKETFTYKQCSSDLTNLKKELKWLKEPDKFSLQNALKDLDNAYKKFFKEKAGFPKFKSKKINRFSYKTNFTNGNIMYCGQHIKLPKLGMVKIRDKQVPKGRILNATISKEPSGRYYVSLCCTDVDIEAFENTNNHIGLDLGIKEFCISSCGDFIENPKYLKKSLNKLAKLQRELSRKTIGSLNRNKARLKVARLQEHIANQRNDFLQKLSTKLIKDNDIICIEDLQVKNMIRNRKLSRLISDVSWSEFIRQLEYKANWYGRQIVKVGKFFASSQICNKCGYKNEEVKDLNIREWICPSCNETHDRDINASINILKEGLRLITIQNK

SEQ ID NO: 3162 - protein, 372 aa, unidentified
MIAVEKAYKFRMYPNKKQQELINKTFGCCRFVYNKYLAKRIEVYKNDKETFTYKQCSSDLTNLKKELKWLKEPDKFSLQNALKDLENAYEKFFKEKAGFPKFKSKKTNRFSYKTNFTNGNIMYCGQHIKLPKLGMVKIRDKQVPQGRILNATISKEPSGRYYVSLCCTDVDIEAFENTNNQIGLDLGIKEFCISSCGEFIENPKYLKKSLNKLAKLQRELSRKTIGSLNRNKARLKVARLQEHIANQRKDFLQKLSTKLIKENDIICIEDLQVKNMIRNSKLSRLISDVSWSEFIRQLEYKANWHGRQIVKVGKFFASSQICNKCGYKNEEVKNLNIREWICPSCNETHDRDINASINILKEGLRLITIQNK

SEQ ID NO: 3163 - protein, 372 aa, unidentified
MIAVKKAYKFRMYPNKKQQELINKTFGCCRFVYNKYLAKRIDVYKNDKETFTYKQCSSDLTNLKKELKWLKEPDKFSLQNALKDLENAYNKFFKEKTGFPKFKSKKTNRFSYKTNFTNGNIMYCGQHIKLPKLGMVKIRDKQVPQGRILNATISKEPSGRYYVSLCCTDVDIEAFENTNNQIGLDLGIKEFCISSCGDFIENPKYLKKSLNKLAKLQRELSRKTIGSLNRNKARLKVARLQEHIANQRKDFLQKLSTKLIKENDIICIEDLQVKNMIRNRKLSRLISDVSWSEFIRQLEYKANWHGRQIVKVGKFFASSQICNKCGYKNEEVKNLNIREWICPSCNETHDRDINASINILKEGLRLITIQNK

SEQ ID NO: 3164 - protein, 372 aa, unidentified
MISVKKAYKFRMYPNKKQQELINKTFGCCRFVYNKYLAKRIDVYKNDKETFTYKQCSSDLTNLKKELKWLKEPDKFSLQNALKDLENAYNKFFKEKTGFPKFKSKKTNRFSYKTNFTNGNIMYCGQHIKLPKLGMVKIRDKQVPQGRILNATISKEPSGRYYVSLCCTDVDIEAFENTNNQIGLDLGIKEFCISSCGDFIENPKYLKKSLNKLAKLQRELSRKTIGSLNRNKARLKVARLQEHIANQRKDFLQKLSTKLIKENDIICIEDLQVKNMIRNRKLSRLISDVSWSEFIRQLEYKANWYGRQIVKVGKFFASSQICNKCGYKNEEVKNLNIREWICPSCNETHDRDINASINILKEGLRLITIQNK

SEQ ID NO: 3165 - protein, 372 aa, unidentified
MIAVKKAYKFRMYPNKKQQELINKTFGCCRFVYNKYLAKRIDVYKNDKETFTYKQCSSDLTNLKKELKWLKEPDKFSLQNALKDLENAYNKFFKEKTGFPKFKSKKTNRFSYKTNFTNGNIMYCGQHIKLPKLGMVKIRDKQVPQGRILNATISKEPSGRYYVSLCCTDVDIEAFENTNNQIGLDLGIKEFCISSCGDFIENPKYLKKSLNKLAKLQRELSRKTIGSLNRNKARLKVARLQEHIANQRKDFLQKLSTKLIKENDIICIEDLQVKNMIRNSKLSRLISDVSWSEFIRQLEYKANWHGRQIVKVSKFFASSQICNKCGYKNEEVKNLNIREWICPSCNETHDRDINASINILKEGLRLITIQNK

SEQ ID NO: 3166 - protein, 372 aa, unidentified
MIAVEKAYKFRMYPNKKQQELINKTFGCCRFVYNKYLAKRIEVYKNDKETFTYKQCSSDLTNLKKELNWLKEPDKFSLQNALKDLENAYEKFFKEKAGFPKFKSKKTNRFSYKTNFTNGNIMYCGQHIKLPKLGMVKIRDKQVPKGRILNATISKEPSGRYYVSLCCTDVDIEAFENTNNQIGLDLGIKEFCISSCGEFIENPKYLKKSLNKLAKLQRELSRKTIGSLNRNKARLKVARLQEHIANQRNDFLQKLSTKLIKENDIICIEDLQVKNMIRNRKLSRLISDVSWSEFIRQLEYKANWYGRQIVKVGKFFASSQICNKCGYKNEEVKDLNIRDWICPSCNETHDRDINASINILKEGLRLITIQNK

SEQ ID NO: 3167 - protein, 372 aa, unidentified
MIAVKKAYKFRLYPNKKQQELINKTFGCCRFVYNKYLAKRIDVYKNNKETFTYKQCSSDLTNLKKELKWLKEPDKFSLQNALKDLDNAYKKFFKEKAGFPKFKSKKINRFSYKTNFTNGNIMYCGQHIKLPKLGMVKVRDKQVPQGRILNATISKEPSGRYYVSLCCTDVDIEVFENTNNHIGLDLGIKEFCISSCGDFIENPKYLKKSLNKLAKLQRELSRKTIGSLNRNKARLKVARLQEHIANQRNDFLQKLSTKLIKENDIICIEDLQVKNMIRNRKLSRLISDVSWSEFIRQLEYKANWHGRQIVKVGKFFASSQICNKCGYKNEEVKDLNIREWICPSCNETHDRDINASINILKEGLRLITIQNK

SEQ ID NO: 3168 - protein, 372 aa, unidentified
MIAVEKAYKFRMYPNKKQQELINKTFGCCRFVYNKYLAKRIDVYKNDKETFTYKQCSSDLTNLKKELKWLKEPDKFSLQNALKDLDNAYKKFFKEKAGFPKFKSKKINRFSYKTNFTNGNIMYCGQHIKLPKLGMVKIRDKQVPKGRILNATISKEPSGRYYVSLCCTDVDIEVFENTNNQIGLDLGIKEFCISSCGDFIENPKYLKKSLNKLAKLQRELSRKTIGSLNRNKARLKVARLQEHIANQRKDFLQKLSTKLIKENDIICIEDLQVKNMIRNRKLSRSISDVSWSEFIRQLEYKANWYGRKIVKVGKFFASSQICNKCGYKNEEVKDLNIREWICPSCNETHDRDINASINILKEGLRLITIQNK

SEQ ID NO: 3169 - protein, 372 aa, unidentified
MIAVKKAYKFRMYPNKKQQELINKTFGCCRFVYNKYLAKRIDVYKSDKETFTYKQCSSDLTNLKKELKWLKEPDKFSLQNALKDLDNAYKKFFKEKAGFPKFKSKKINRFSYKTNFTNGNIMYCGQYIKLPKLGMVKIRDKQVPQGRILNATISKEPSGRYYVSLCCTDVDIEVFENTNNHIGLDLGIKEFCISSCGDFIENPKYLKKSLNKLAKLQRELSRKTIGSLNRNKARLKVAGLQEHIANQRNDFLQKLSTKLIKENDIICIEDLQVKNMIRNRKLSRLISDVSWSEFIRQLEYKANWYGRQIVKVGKFFASSQICNKCGYKNEEIKDLNIREWICPSCNETHDRDINASINILKEGLRLITIQNK

SEQ ID NO: 3170 - protein, 372 aa, unidentified
MIAVEKAYKFRMYPNKKQQELINKTFGCCRFVYNKYLAKRIDVYKNDKETFTYKQCSSDLTNLKKELNWLKEPDKFSLQNALKDLDNAYKKFFKEKAGFPKFKSKKINRFSYKTNFTNGNIMYCGQHIKLPKLGMVKIRDKQVPQGRILNATISKEPSGRYYVSLCCTDVDIEAFENTNNQIGLDLGIKEFCISSCGEFIENPKYLKKSLNKLAKLQRELSRKTIGSLNRNKARLKVARFQEHIANQRNDFLQKLSTKLIKENDIICIEDLQVKNMIRNRKLSRLISDVSWSEFIRQLEYKANWYGRQIVKVGKFFASSQICNKCGYKNEEVKDLNIREWICPSCNETHDRDINASINILKEGLRLITIQNK

SEQ ID NO: 3171 - protein, 372 aa, unidentified
MAVVEKAYKFRMYPNKKQQELINKTFGCCRFVYNKYLAKRIEVYKNDKETFTYKQCSSDLTNLKKELKWLKEPDKFSLQNALKDLDNAYKKFFKEKAGFPKFKSKKINRFSYKTNFTNGNIMYCGQHIKLPKLGMVKVRDKQIPQGRILNATISKEPSGRYYVSLCCTDVDIEVFENTNNQIGLDLGIKEFCISSCGEFIENPKYLKKSLNKLAKLQRELSRKTIGSLNRNKARLKVARLQEHIANQRNDFLQKLSTKLIKENDIICIEDLQVKNMIRNRKLSRLISDVSWSEFVRQLEYKANWHGRQIVKVGKFFASSQICNKCGYKNEEVKDLNIREWICPSCNEIHDRDINASINILKEGLRLITIQNK

SEQ ID NO: 3172 - protein, 372 aa, unidentified
MIEVKKAYKFRMYPNKKQQELINKTFGCCRFVYNKYLAKRIEVYKNDKETFTYKQCSSDLTNLKKELKWLKEPDKFSLQNALKDLDNAYKKFFKEKAGFPKFKSKKINRFSYKTNFTNGNIVYCGQHIKLPKLGMVKVRDKQVPKGRILNATISKEPSGRYYVSLCCTDVDIEAFENTNNQIGLDLGIKEFCISSCGEFIENPKYLKKSLNKLAKLQRELSRKTIGSLNRNKARLKVARLQEHIANQRNDFLQKLSTKLIKENDIICIEDLQVKNMIRNRKLSRLISDVSWSEFIRQLEYKANWYGRQIVKVGKFFASSQICNKCGYKNEEVKDLNIREWICPSCNETHDRDINASINILKEGLRLITIQNK

SEQ ID NO: 3173 - protein, 372 aa, unidentified
MIAVKKAYKFRIYPNKKQQELINKTFGCCRFVYNKYLAKRIDVYKNDKETFTYKQCSSDLTNLKKELNWLKEPDKFSLQNALKDLENAYNKFFKEKAGFPKFKSKKTNRFSYKTNFTNGNIVYCGQHIKLPKLGMVKIRDKQVPKGRILNATISKEPSGRYYVSLCCTDVDIEVFENTNNQIGLDLGIKEFCISSCGDFIENPKYLKKSLNKLAKLQSELSRKTIGSLNRNKARLKVARLQEHIANQRKDFLQKLSTKLIKENDIICIEDLQVKNMIKNHKLSRSISDVSWSEFIRQLEYKANWYGRKIVKVGKFFASSQICNKCGYKNEEVKDLSIREWICPSCNETHDRDINASINILKEGLRLITIQNK

SEQ ID NO: 3174 - protein, 369 aa, unidentified
MEKAYKFRMYPNKKQQELINKTFGCCRFVYNKYLAKRIEVYKNDKETFTYKQCSSDLTNLKKELKWLKEPDKFSLQNALKDLDNAYKKFFKEKAGFPKFKSKKINRFSYKTNFTNGNIMYCGQHIKLPKLGMVKVRDKQIPQGRILNATISKEPSGRYYVSLCCTDVDIEVFENTNNQIGLDLGIKEFCISSCGEFIENPKYLKKSLNKLAKLQRELSRKTIGSLNRNKARLKVARLQEHIANQRNDFLQKLSTKLIKENDIICIEDLQVKNMIRNRKLSRLISDVSWSEFVRQLEYKANWHGRQIVKVGKFFASSQICNKCGYKNEEVKDLNIREWICPSCNEIHDRDINASINILKEGLRLITIQNK

SEQ ID NO: 3175 - protein, 369 aa, unidentified
MEKAYKFRIYPNKKQQELINKTFGCCRFVYNKYLAKRIDVYKSDKETFTYKQCSSDLTNLKKELKWLKEPDKFSLQNALKDLDNAYKKFFKEKAGFPKFKSKKINRFSYKTNFTNGNIMYCGQHIKLPKLGMVKVRDKQIPQGRILNATISKEPSGRYYVSLCCTDVDIEVFENTNNQIGLDLGIKEFCISSCGEFIENPKYLKRSLNKLAKLQRELSRKTIGSLNRNKARLKVAGLQEHIANQRNDFLQKLSTKLIKENDIICIEDLQVKNMIKNRKLSRLISDVSWSEFVRQLEYKANWHGRQIVKVGKFFASSQICNKCGYKNEEVKNLNIREWICPSCNETHDRDINASINILKEGLRLITIQNK

SEQ ID NO: 3176 - protein, 372 aa, unidentified
MIAVEKAYKFRMYPNKKQQELINKTFGCCRFVYNKYLAKRIEVYKNDKETFTYKQCSSDLTNLKKELKWLKEPDKFSLQNALKDLDNAYKKFFKEKAGFPKFKSKKINRFSYKTNFTNGNIMYCGQHIKLPKLGMVKIRDKQVPKGRILNATISKEPSGRYYVSLCCTDVDIEVFENTNNQIGLDLGIKEFCISSCGEFIENPKYLKKSLNKLAKLQRELSRKTIGSLNRNKARLKVARLQEHIANQRNDFLQKLSTKLIKENDIICIEDLQVKNMIRNCKLSRLISDVSWSEFIRQLEYKANWHGRQIVKVGKFFASSQICNKCGYKNEEVKDLSIREWICPSCNETHDRDINASINILKEGLRLITTQNK

SEQ ID NO: 3177 - protein, 369 aa, unidentified
MEKAYKFRIYPNKKQQELINKTFGCCRFVYNKYLAKRVDAYKNDKETFTYKQCSSDLTNLKKELNWLKEPDKFSLQNALKDLENAYEKFFKKKAGFPKFKSKKINRFSYKTNFTNGNIMYCGQHIKLPKLGMVKIRDKQVPKGRILNATISKEQSGRYYVSLCCTDVDIEVFENTNNQIGLDLGIKEFCISSCGDFIENPKYLKKSLSKLAKLQKELSRKTIGSLNRNKARLKVARLQEHIANQRNDFLQKLSTKLIKENDIICIEDLQVKNMIKNHKLSRSISDVSWSEFIRQLEYKANWYGRQIVKVGKFFASSQICNKCGYKNEEVKDLNIREWICPSCNETHDRDINASINILKEGLRLITIQNK

SEQ ID NO: 3178 - protein, 369 aa, unidentified
MKKAYKFRMYPNKKQQELINKTFGCCRFVYNKYLAKRIDVYKNDKETFTYKQCSSDLTNLKKELKWLKEPDKFSLQNALKDLDNAYKKFFKEKAGFPKFKSKKINRFSYKTNFTNGNIMYFSQHIKLPKLGMVKIRDKQVPQGRILNATISKEPSGRYYVSLCCTDVDIEAFENTNNQIGLDLGIKEFCISSCGEFIENPKYLKKSLNKLAKLQRELSRKTIGSLNRNKARLKVARFQEHIANQRNDFLQKLSTKLIKENDIICIEDLQVKNMIRNRKLSRLISDVSWSEFIRQLEYKANWYGRQIVKVGKFFASSQICNKCGYKNEEVKDLNIREWICPSCNETHDRDINASINILKEGLRLITIQNK

SEQ ID NO: 3179 - protein, 369 aa, unidentified
MEKAYKFRIYPNKKQQELINKTFGCCRFVYNKYLAKRVDAYKNDKETFTYKQCSSDLTNLKKELNWLKEPDKFSLQNALKDLENAYEKFFKKKAGFPKFKSKKISRFSYKTNFTNGNIMYCGQHIKLPKLGMVKIRDKQVPKGRILNATISKEQSGRYYVSLCCTDVDIEVFENTNNQIGLDLGIKEFCISSCGDFIENPKYLKKSLSKLAKLQKELSRKTIGSLNRNKARLKVARLQEHIANQRNDFLQKLSTKLIKENDIICIEDLQVKNMIKNHKLSRSISDVSWSEFIRQLEYKANWYGRQIVKVGKFFASSQICNKCGYKNEEVKDLNIREWICPSCNETHDRDINASINILKEGLRLITIQNK

SEQ ID NO: 3180 - protein, 369 aa, unidentified
MEKAYKFRMYPNKKQQELINKTFGCCRFVYNKYLAKRIDVYKKHKETFTYKQCSSDLTNLKKELKWLKEPDKFSLQNALRDLDNAYKKFFKEKAGFPKFKSKKINRFSYKTNFTNGNIMYCGQYIKLPKLGMVKIRDKQVPQGRILNATISKEPSGRYYVSLCCTDVDIGAFENTNNHIGLDLGIKEFCISSCGDFIENPKYLKKSLNKLAKLQRELSRKTIGSLNRNKARLKVARFQEHIANQRKDFLQKLSTKLIKENDIICIEDLQVKNMIRNRKLSRLISDVSWSEFIRQLEYKANWHGRQIVKVGKFFASSQICNKCGYKNEEVKDLNIREWICPSCNETHDRDINASINILKEGLRLITIQNK

SEQ ID NO: 3181 - protein, 372 aa, unidentified
MVVVEKAYKFRMYPNKKQQELINKTFGCCRFVYNKYLAKRIDVYKNDKETFTYKQCSSDLTNLKKELKWLKEPDKFSLQNALKDLENAYEKFFKEKAGFPKFKSKKTNRFSYKTNFTNGNIMYCGQHIKLPKLGMVKIRDKQVPQGRILNATISKEPSGRYYVSLCCTDVDIEAFENTNNQIGLDLGIKEFCISSCGEFIENPKYLKKSLNKLAKLQRELSRKTIGSLNRNKARLKVARLQEHIANQRNDFLQKLSTKLIKENDIICIEDLQVKNMIRNHKLSRLISDVSWSEFIRQLEYKANWYGRKIVKVGKFFASSQICNKCGYKNEEVKNLNIREWICPSCNETHDRDINASINILKEGLRLITIQNK

SEQ ID NO: 3182 - protein, 372 aa, unidentified
MIVVEKAYKFRMYPNKKQQELINKTFGCCRFVYNKYLAKRIEVYKNDKETFTYKQCSSDLTNLKKELKWLKEPDKFSLQNALKDLDNAYKKFFKEKSGFPKFKSKKINRFSYKTNFTNGNIMYFSQHIKLPKLGMVKIRDKQVPQGRILNATISKEPSGRYYVSLCCTDVDIEAFENTNNQIGLDLGIKEFCISSCGDFIENPKYLKKSLNKLAKLQRELSRKTIGSLNRNKARLKVAGLQEHIANQRNDFLQKLSTKLIKENDIICIEDLQVKNMIKNHKLSRLISDVSWSEFIRQLEYKANWYGRQIVKVGKFFASSQICNKCGYKNEEMKDLNIREWICPSCNETHDRDINASINILKEGLRLITIQNK

SEQ ID NO: 3183 - protein, 372 aa, unidentified
MVVVEKAYKFRIYPNKKQQELINKTFGCCRFVYNKYLAKRVDAYKNDKETFTYKQCSSDLTNLKKELNWLKEPDKFSLQNALKDLENAYEKFFKKKAGFPKFKSKKISRFSYKTNFTNGNIMYCGQHIKLPKLGMVKIRDKQVPKGRILNATISKEQSGRYYVSLCCTDVDIEVFENTNNQIGLDLGIKEFCISSCGDFIENPKYLKKSLSKLAKLQKELSRKTIGSLNRNKARLKVARLQEHIANQRNDFLQKLSTKLIKENDIICIEDLQVKNMIKNHKLSRSISDVSWSEFIRQLEYKANWYGRQIVKVGKFFASSQICNKCGYKNEEVKDLNIREWICPSCNETHDRDINASINILKEGLRLITIQNK

SEQ ID NO: 3184 - protein, 372 aa, unidentified
MIVVEKAYKFRMYPNKKQQELINKTFGCCRFVYNKYLAKRIDVYKKHKETFTYKQCSSDLTNLKKELKWLKEPDKFSLQNALRDLDNAYKKFFKEKAGFPKFKSKKINRFSYKTNFTNGNIMYCGQYIKLPKLGMVKIRDKQVPQGRILNATISKEPSGRYYVSLCCTDVDIGAFENTNNHIGLDLGIKEFCISSCGDFIENPKYLKKSLNKLAKLQRELSRKTIGSLNRNKARLKVARFQEHIANQRKDFLQKLSTKLIKENDIICIEDLQVKNMIRNRKLSRLISDVSWSEFIRQLEYKANWHGRQIVKVGKFFASSQICNKCGYKNEEVKDLNIREWICPSCNETHDRDINASINILKEGLRLITIQNK

SEQ ID NO: 3185 - protein, 372 aa, unidentified
MIAVEKAYKFRVYPNKKQQELINKTFGCCRFVYNKYLAKRIDVYKNNKETFTYKQCSSDLTNLKKELKWLKEPDKFSLQNALKDLDNAYKKFFKEKAGFPKFKSKKINRFSYKTNFTNGNIMYCGQHIKLPKLGMVKVRDKQVPKGRILNATISKEPSGRYYVSLCCTDVDIEAFENTNNHIGLDLGIKEFCISSCGEFIENPKYLKKSLNKLVKLQSELSRKTIGSLNRNKARLKVARLQEHIANQRKDFLQKLSTKLIKENDIICIEDLQVKNMIKNHKLSRSISDVSWSEFIRQLEYKANWYGRQIVKVGKFFASSQICNKCGYKNEEVKDLNIREWICPSCNETHDRDINASINILKEGLRLITIQNK

SEQ ID NO: 3186 - protein, 372 aa, unidentified
MIAVKKAYKFRLYPNKKQQKLINKTFGCCRFVYNKYLAKRIDVYKNNKETFTYKQCSSDLTNLKKELKWLKEPDKFSLQNALKDLDNAYKKFFKEKAGFPKFKSKKINRFSYKTNFTNGNIMYCGQHIKLPKLGMVKVRDKQVPKGRILNATISKEPSGRYYVSLCCTDVDIEAFENTNNHIGLDLGIKEFCISSCGEFIENPKYLKKSLNKLVKLQSELSRKTIGSLNRNKARLKVARLQEHIANQRKDFLQKLSTKLIKENDIICIEDLQVKNMIKNHKLSRSISDVSWSEFIRQLEYKANWHGRQIVKVGKFFASSQICNKCGYKNEEVKDLNIREWICPSCNETHNRDINASINILKEGLRLITIQNK

SEQ ID NO: 3187 - protein, 372 aa, unidentified
MIAVKKAYKFRMYPNKKQQELINKTFGCCRFVYNKYLAKRIDVYKSDKETFTYKQCSSDLTNLKKELKWLKEPDKFSLQNALKDLDNAYKKFFKEKAGFPKFKSKKINRFSYKTNFTNGNIMYCGQYIKLPKLGMVKIRDKQVPQGRILNATISKEPSGRYYVSLCCTDVDIEVFENTNNHIGLDLGIKEFCISSCGDFIENPKYLKKSLNKLAKLQRELSRKTIGSLNRNKARLKVAGLQEHIANQRNDFLQKLSTKLIKENDIICIEDLQVKNMIRNRKLSRLISDVSWSEFIRQLEYKANWYGRKIVKVGKFFASSQICNKCGYKNEEVKDLNIREWICPSCNETHDRDINASRNILKEGLRLITIQNK

SEQ ID NO: 3188 - protein, 372 aa, unidentified
MIAVKKAYKFRMYPNKKQQELINKTFGCCRFVYNKYLAKRIDVYKSDKETFTYKQCSSDLTNLKKELKWLKEPDKFSLQNALKDLDNAYKKFFKEKAGFPKFKSKKINRFSYKTNFTNGNIMYCGQYIKLPKLGMVKIRDKQVPQGRILNATISKEPSGRYYVSLCCTDVDIEVFENTNNHIGLDLGIKEFCISSCGDFIENPKYLKKSLNKLAKLQRELSRKTIGSLNRNKARLKVAGLQEHIANQRNDFLQKLSTKLIKENDIICIEDLQVKNMIRNRKLSRLISDVSWSEFIRQLEYKANWYGRKIVKVGKFFASSQICNKCGYKNEEVKDLNIREWICPSCNETHDRDINASINILKEGLRLITIQNK

SEQ ID NO: 3189 - protein, 372 aa, unidentified
MIAVEKAYKFRMYPNKKQQELINKTFGCCRFVYNKYLAKKIEVYKNDKETFTYKQCSSDLTNLKKELKWLKEPDKFSLQNALKDLDNAYKKFFKEKAGFPKFKSKKTNRFSYKTNFTNGNIMYFSQHIKLPKLGMVKIRDKQVPQGRILNATISKEPSGRYYVSLCCTDVDIEAFENTNNQIGLDLGIKEFCISSCGEFIENPKYLKKSLNKLAKLQRELSRKTIGSLNRNKARLKVAGLQEHIANQRNDFLQKLSTKLIKENDIICIEDLQVKNMIKNRKLSRLISDVSWSEFIHQLKYKANWYGRQIVKVGKFFASSQICNKCGYKNEEVKDLNIREWICPSCNETHDRDINASINILKEGLRLITIQNK

SEQ ID NO: 3190 - protein, 372 aa, unidentified
MVVVEKAYKFRMYPNKKQQELINKTFGCCRFVYNKYLAKRIDVYKNDKETFTYKQCSSDLTNLKKELKWLKEPDKFSLQNALKDLENAYEKFFKEKAGFPKFKSKKINRFSYKTNFTNGNIMYFGQHIKLPKLGMVKIRDKQVPQGRILNATISKEPSGRYYVSLCCTDVDIEAFENTNNQIGLDLGIKEFCISSCGEFIENPKYLKKSLNKLAKLQRELSRKTIGSLNRNKARLKVARLQEHIANQRKDFLQKLSTKLIKENDIICIEDLQVKNMIRNRKLSRLISDVSWSEFVRQLEYKANWHGRQIVKVGKFFASSQICNKCGYKNEEVKNLNIREWICPSCNETHDRDINASMNILKEGLRLITIQNK

SEQ ID NO: 3191 - protein, 372 aa, unidentified
MVVVEKAYKFRMYPNKKQQELINKTFGCCRFVYNKYLAKRIDVYKNDKETFTYKQCSSDLTNLKKELKWLKEPDKFSLQNALKDLENAYNKFFKKKAGFPKFKSKKINRFSYKTNFTNGNIMYCGQHIKLPKLGMVKIRDKQVPKGRMLNATISKEPSGRYYVSLCCTDVDIEAFENTNNQIGLDLGIKEFCISSCGDFIENPKYLKKSLNKLAKLQRELSRKTIGSLNRNKARLKVARLQEHIANQRNDFLQKLSTKLIKENDIICIEDLQVKNMIRNRKLSRLISDVSWSEFVRQLKYKANWHGRKIVKVGKFFASSQICNKCGYKNEEVKDLNIRDWICPSCNETHDRDINASINILKEGLRLITIQNK

SEQ ID NO: 3192 - protein, 372 aa, unidentified
MIAVEKAYKFRMYPNKKQQELINKTFGCCRFVYNKYLAKRIDVYKNNKETFTYKQCSSDLTNLKKELKWLKEPDKFSLQNALKDLENAYEKFFKEKTGFPKFKSKKTNRFSYKTNFTNGNIMYCGQHIKLPKLGMVKIRDKQVPKGRILNATISKEPSGRYYVSLCCTDVDTEAFENTNNQIGLDLGIKEFCISSCGEFIENPKYLKKSLSKLAKLQRELSRKTIGSLNRNKARLKVARLQEHIANQRNDFLQKLSTKLIKENDIICIEDLQVKNMIRNHKLSRLISDVSWSEFIRQLEYKANWHGRQIVKVGKFFASSQICNKCGYKNEEVKDLNIRDWICPSCNETHDRDINASINILKEGLRLITIQNK

SEQ ID NO: 3193 - protein, 372 aa, unidentified
MIAVEKAYKFRIYPNKKQQELINKTFGCCRFVYNKYLAKKIDVYKNNKETFTYKQCSSDLTNLKKELKWLKEPDKFSLQNALKDLDNAYKKFFKKKAGFPKFKSKKINRFSYKTNFTNGNIMYCGQHIKLPKLGMVKIRDKQVPQGRILNATISKEPSGRYYVSLCCTDVDIEAFENTNNHIGLDLGIKEFCISSCGEFIENPKYLKKSLNKLAKLQRELSRKTIGSLNRNKARLKVARLQEHIANQRKDFLQKLSTKLIKENDIICIEDLQVKNMIRNRKLSRLISDVSWSEFIRQLEYKANWYGRKIVKVGKFFASSQICNKCGYKNEEVKNLNIREWICPSCNKTHDRDINASINILKEGLRLITIQNK

SEQ ID NO: 3194 - protein, 369 aa, unidentified
MEKAYKFRMYPNKKQQELINKTFGCCRFVYNKYLAKRIDVYKNDKETFTYKQCSSDLTNLKKELNWLKEPDKFSLQNALKDLDNAYKKFFKEKAGFPKFKSKKINRFSYKTNFTNGNIMYCGQHIKLPKLGMVKIRDKQVPQGRILNATISKEPSGRYYVSLCCTDVDIEAFENTNNQIGLDLGIKEFCISSCGEFIENPKYLKKSLNKLAKLQRELSRKTIGSLNRNKARLKVARFQEHIANQRNDFLQKLSTKLIKENDIICIEDLQVKNMIRNRKLSRLISDVSWSEFIRQLEYKANWYGRQIVKVGKFFASSQICNKCGYKNEEVKDLNIREWICPSCNETHDRDINASINILKEGLRLITIQNK

SEQ ID NO: 3195 - protein, 372 aa, unidentified
MVVVEKAYKFRIYPNKKQQELINKTFGCCRFVYNKYLAKRVDAYKNDKETFTYKQCSSDLTNLKKELNWLKEPDKFSLQNALKDLENAYEKFFKKKAGFPKFKSKKINRFSYKTNFTNGNIMYCGQHIKLPKLGMVKIRDKQVPKGRILNATISKEQSGRYYVSLCCTDVDIEVFENTNNQIGLDLGIKEFCISSCGDFIENPKYLKKSLSKLAKLQKELSRKTIGSLNRNKARLKVARLQEHIANQRNDFLQKLSTKLIKENDIICIEDLQVKNMIKNHKLSRSISDVSWSEFIRQLEYKANWYGRQIVKVGKFFASSQICNKCGYKNEEVKDLNIREWICPSCNETHDRDINASINILKEGLRLITIQNK

SEQ ID NO: 3196 - protein, 372 aa, unidentified
MIAVEKAYKFRVYPNKKQQELINKTFGCCRFVYNKYLAKRIDVYKSDKETFTYKQCSSDLTNLKKELKWLKEPDKFSLQNALKDLDNAYKKFFKEKAGFPKFKSKKINRFSYKTNFTNGNIMYCGQYIKLPKLGMVKIRDKQVPQGRILNATISKEPSGRYYVSLCCTDVDIEAFENTNNHIGLDLGIKEFCISSCGDFIENPKYLKKSLNKLAKLQRELSRKTIGSLNRNKARLKVAGLQEHIANQRNDFLQKLSTKLIKENDIICIEDLQVKNMIRNRKLSRLISDVSWSEFIRQLEYKANWYGRKIVKVGKFFASSQICNKCGYKNEEVKDLNIREWICPSCNETHDRDINASINILKEGLRLITIQNK

SEQ ID NO: 3197 - protein, 369 aa, unidentified
MKKAYKFRMYPNKKQQELINKTFGCCRFVYNKYLAKRIDVYKNDKETFTYKQCSSDLTNLKKELKWLKEPDKFSLQNALKDLDNAYKKFFKEKAGFPKFKSKKINRFSYKTNFTNGNIVYCGQHIKLPKLGMVKIRDKQVPQGRILNATISKEPSGRYYVSLCCTDVDIEVFENTNNQIGLDLGIKEFCISSCGEFIENPKYLKKSLNKLAKLQRELSRKTIGSLNRNKARLKVARLQEHIANQRNDFLQKLSTKLIKENDIICIEDLQVKNMIRNRKLSRLISDVSWSEFIRQLEYKANWHGRQIVKVGKFFASSQICNKCGYKNEEVKDLNIREWICPSCNETHDRDINASINILKEGLRLITIQNK

SEQ ID NO: 3198 - protein, 366 aa, unidentified
MEKAYKFRMYPNKKQQELINKTFGCCRFVYNKYLAKKIEVYESDKETFTYKQCSSDLTNLKRELEWLKEPDKFSLQNTLKDLENAYKKFFKENTGFPKFKSKKTNRFSYRTNFTNGNIMYCSQYIKLPKLGMVKVRDKQIPQGRILNATISKEPSGKYYVSLCCTDIDIKAFENTNNQIGLDLGIKEFCISSCGDFIENPKYLKKSLNRLAKLQRKLSRKTIGSLNRNKARLKVARFQEHIANQRKDFLQKLSTKLIRENDIICIEDLQVKNMTRNRKLSRLISDVSWSEFVRQLEYKANWYGRQIVKVGKFFASSQICNKCGYKNEEMKNLSIRKWICPCCNVTHDRDINASINILKEGLRLIRV

SEQ ID NO: 3199 - protein, 366 aa, unidentified
MEKAYKFRMYPNKKQQELINKTFGCCRFVYNKYLSKKIEIYENNKETFTYKQCSSDLTNLKRELEWLKEPDKFSLQNTLKDLENAYKKFFKENTGFPKFKSKKTNRFSYRTNFTNGNIMYCSQYIKLPKLGMVKVRDKQVPQGRILNATISKEPSGKYYVSLCCTDIDIKAFENTNSQIGLDLGIKEFCISSCGDFIENPKYLLKSLNKLAKLQRELSRKTIGSSNRNKARLKVARLQEHIANQRKDFLQKLSTKLIRENDIICIEDLQVKNMTRNSKLSRLISDVSWSEFVRQLEYKANWYGRQIVRVGKFFASSQICNKCGYKNEEMKNLSIREWICPCCNVTHDRDINASINILKEGLRLITV

SEQ ID NO: 3200 - protein, 372 aa, unidentified
MIVVEKAYKFRMYPNKKQQELINKTFGCCRFVYNKYLAKRIEVYKNNKETFTYKQCSSDLTNLKKELNWLKEPDKFSLQNALKDLDNAYKKFFKEKAGFPKFKSKKINRFSYKTNFTNGNIMYCGQHIKLPKLGMVKIRDKQVPKGRILNATISKEPSGRYYVSLCCTDVDIEAFENTNNHIGLDLGIKEFCISSCGEFIENPKYLKKSLSKLAKLQRELSRKTIGSLNRNKARLKVARLQEHIANQRKDFLQKLSTKLIKENDIICIEDLQVKNMIRNHKLSRLISDVSWSEFVRQLEYKANWYGRQIVKVGKFFASSQICNKCGYKNEEVKNLNIREWICPSCNETHDRDINASINILKEGLRLITIQNK

SEQ ID NO: 3201 - protein, 262 aa, unidentified
MVVVEKAYKFRMYPNKKQQELINKTFGCCRFVYNKYLAKRIDVYKNDKETFTYKQCSSDLTNLKKELNWLKEPDKFSLQNALKDLENAYNKFFKEKAGFPKFKSKKINRFSYKTNFTNGNIMYCGQHIKLPKLGMVKIRDKQVPKGRILNATISKEPSGRYYVSLCCTDVDIEAFENTNNQIGLDLGIKEFCISSCGEFIENPKYLKKSLNKLAKLQRELSRKTIGSLNRNKARLKVARLQEHIANQRNDFLQKLSTKLIKE

SEQ ID NO: 3202 - protein, 255 aa, unidentified
MIVVEKAYKFRMYPNKKQQELINKTFGCCRFVYNKYLAKRIEVYKNDKETFTYKQCSSDLTNLKKELKWLKEPDKFSLQNALKDLDNAYKKFFKEKVGFPKFKSKKINRFSYKTNFTNGNIMYLGQHIKLPKLGMIKIRDKQVPQGRILNATISKEPSGRYYVSLCCTDVDIEAFENTNNQIGLDLGIKEFCISSCGEFIENPKYLKKSLNKLAKLQRELSRKTIGSLNRNKARLKVARLQEHIANQRKDFLQKL

SEQ ID NO: 3203 - protein, 372 aa, unidentified
MIAVEKAYKFRMYPNKKQQELINKTFGCCRFVYNKYLAKRIDVYKNDKETFTYKQCSSDLTNLKKELKWLKEPDKFSLQNALKDLENAYEKFFKEKTGFPKFKSKKTNRFSYKTNFTNGNIMYCGQHIKLPKLGMVKIRDKQVPKGRILNATISKEPSGRYYVSLCCTDVDIEAFENTNNQIGLDLGIKEFCISSCGEFIENPKYLKKSLSKLAKLQRELSRKTIGSLNRNKARLKVARLQEHIANQRNDFLQKLSTKLIKENDIICIEDLQVKNMIRNRKLSRLISDVSWSEFVRQLEYKANWHGRQIVKVGKFFASSQICNKCGYKNEEVKNLNIREWICPSCNETHDRDINASINILKEGLRLITIQNK

SEQ ID NO: 3204 - protein, 372 aa, unidentified
MVVVEKAYKFRIYPNKKQQELINKTFGCCRFVYNKYLAKRIEVYKNDKETFTYKQCSSDLTNLKKELNWLKEPDKFSLQNALKDLENAYEKFFKKKAGFPKFKSKKINRFSYKTNFTNGNIMYCGQHIKLPKLGMVKIRDKQVPKGRILNATISKEPSGRYYVSLCCTDVDIEAFENTNNQIGLDLGIKEFCISSCGEFIENPKYLKKSLNKLAKLQRELSRKTIGSLNRNKARLKVARLQEHIANQRNDFLQKLSTKLIKENDIICIEDLQVKNMIKNHKLSRLISDVSWSEFIRQLEYKANWYGRKIVKVGKFFASSQICNKCGYKNEEVKNLNIREWICPSCNETHDRDINASINILKEGLRLITIQNK

SEQ ID NO: 3205 - protein, 372 aa, unidentified
MVVVEKAYKFRMYPNKKQQELINKTFGCCRFVYNKYLAKRIEVYKNDKETFTYKQCSSDLTNLKKELKWLKEPDKFSLQNALKDLDNAYKKFFKEKAGFPKFKSKKINRFSYKTNFTNGNIMYCGQHIKLPKLGMVKIRDKQVPKGRILNATISKEPSGRYYVSLCCTDVDIEVFENTNNQIGLDLGIKEFCISSCGEFIENPKYLKKSLNKLAKLQRELSRKTIGSLNRNKARLKVARLQEHIANQRNDFLQKLTTKLIKENDIICIEDLQVKNMIKNRKLSRLISDVSWSEFIRQLEYKANWYGRQIVKVGKFFASSQICNKCGYKNEEVKDLNIREWICPSCNETHNRDINASINILKEGLRLITIQNK

SEQ ID NO: 3206 - protein, 369 aa, unidentified
MEKAYKFRMYPNKKQQELINKTFGCCRFVYNKYLAKRIDVYKNDKETFTYKQCSSDLTNLKKELKWLKEPDKFSLQNALKDLENAYNKFFKEKAGFPKFKSKKINRFSYKTNFTNGNIMYCGQRIKLPKLGMVKIRDKQVPKGRILNATISKEPSGRYYVSLCCTDVDIEAFENANNQIGLDLGIKEFCISSCGEFIENPKYLKKSLNKLAKLQRELSRKTIGSLNRNKARLKVARLQEHIANQRNDFLQKLSTKLIKENDIICIEDLQVKNMIRNHKLSRLISDVSWSEFIRQLEYKANWYGRKIVKVGKFFASSQICNKCGYKNEEVKNLNIREWICPSCNETHDRDINASINILKEGLRLITIQNK

SEQ ID NO: 3207 - protein, 369 aa, unidentified
MEKAYKFRMYPNKKQQELINKTFGCCRFVYNKYLAKRIDVYKNDKETFTYKQCSSDLTNLKKELKWLKEPDKFSLQNALKDLENAYNKFFKKKAGFPKFKSKKINRFSYKTNFTNGNIMYCGQHIKLPKLGMVKIRDKQVPKGRMLNATISKEPSGRYYVSLCCTDVDIEAFENTNNQIGLDLGIKEFCISSCGDFIENPKYLKKSLNKLAKLQRELSRKTIGSLNRNKARLKVARLQEHIANQRNDFLQKLSTKLIKENDIICIEDLQVKNMIRNRKLSRLISDVSWSEFVRQLKYKANWHGRKIVKVGKFFASSQICNKCGYKNEEVKDLNIRDWICPSCNETHDRDINASINILKEGLRLITIQNK

SEQ ID NO: 3208 - protein, 369 aa, unidentified
MKKAYKFRMYPNKKQQELINKTFGCCRFVYNKYLAKRIDVYKNDKETFTYKQCSSDLTNLKKELKWLKEPDKFSLQNALKDLDNAYKKFFKEKAGFPKFKSKKINRFSYKTNFTNGNIMYCGQHIKLPKLGMVKIRDKQVPQGRILNATISKEPSGRYYVSLCCTDVDIEAFENTNNHIGLDLGIKEFCISSCGEFIENPKYLKKSLNKLAKLQRELSRKTIGSLNRNKARLKVARLQEHIANQRNDFLQKLSTKLIKENDIICIEDLQVKNMIRNRKLSRLISDVSWSEFIRQLEYKANWHGRQIVKVGKFFASSQICNKCGYKNEEVKNLNIREWICPSCNETHDRDINASRNILKEGLRLITIQNK

SEQ ID NO: 3209 - protein, 369 aa, unidentified
MEKAYKFRMYPNKKQQELINKTFGCCRFVYNKYLAKRIDVYKKHKETFTYKQCSSDLTNLKKELKWLKEPDKFSLQNALRDLDNAYKKFFKEKAGFPKFKSKKINRFSYKTNFTNGNIMYCGQHIKLPKLGMVKVRDKQVPQGRILNATISKEPSGRYYVSLCCTDVDIGAFENTNNHIGLDLGIKEFCISSCGDFIENPKYLKKSLNKLAKLQRELSRKTIGSLNRNKARLKVARFQEHIANQRKDFLQKLSTKLIKENDIICIEDLQVKNMIRNRKLSRLISDVSWSEFIRQLEYKANWHGRQIVKVGKFFASSQICNKCGYKNEEVKDLNIREWICPSCNETHDRDINASINILKEGLRLITIQNK

SEQ ID NO: 3210 - protein, 372 aa, unidentified
MIVVEKAYKFRMYPNKKQQELINKTFGCCRFVYNKYLAKRIDVYKNDKETFTYKQCSSDLTNLKKELKWLKEPDKFSLQNALKDLDNAYEKFFKEKAGFPKFKSKKINRFSYKTNFTNGNIMYCGQHIKLPKLGMVKIRDKQVPQGRILNATISKEPSGRYYVSLCCTDVDIEAFENTNNHIGLDLGIKEFCISSCGDFIENPKYLKKSLSKLAKLQRELSRKTIGSLNRNKARLKVARLQEHIANQRNDFLQKLSTKLIKENDIICIEDLQVKNMIRNRKLSRLISDVSWSEFIRQLEYKANWHGRQIVKVGKFFASSQICNKCGYKNEEVKDLNIREWICPSCNETHDRDINASINILKEGLRLITIQNK

SEQ ID NO: 3211 - protein, 372 aa, unidentified
MVVVEKAYKFRMYPNKKQQELINKTFGCCRFVYNKYLAKRIDVYKNNKETFTYKQCSSDLTNLKKELKWLKEPDKFSLQNALKDLDNAYKKFFKEKAGFPKFKSKKINRFSYKTNFTNGNIMYCGQHIKLPKLGMVKIRDKQVPKGRILNATISKEPSGRYYVSLCCTDVDIEAFENTNNHIGLDLGIKEFCISSCGEFIENPKYLKKSLNKLAKLQRELSRKTIGSLNRNKARLEVAGLQEHIANQRKDFLQKLSTKLIKENDIICIEDLQVKNMIRNRKLSRLISDVSWSEFIRQLEYKANWHGRQIVKVGKFFASSQICNKCGYKNEEVKDLNIREWICPSCNETHDRDINASINILKEGLRLITTQNK

SEQ ID NO: 3212 - protein, 372 aa, unidentified
MVVVKKAYKFRMYPNKKQQELINKTFGCCRFVYNKYLAKRIDAYKNDKETFTYKQCSSDLTNLKKELKWLKEPDKFSLQNALKDLENAYNKFFKEKAGFPKFKSKKTNRFSYKTNFTNGNIMYCGQHIKLPKLGMVKIRDKQVPKGRILNATISKEPSGRYYVSLCCTDVDIEVFKNTNNQIGLDLGIKEFCISSCGEFIENPKYLKKSLNKLAKLQRELSRKTIGSLNRNKARLKVARLQEHIANQRNDFLQKLSTKLIKENDIICIEDLQVKNMIRNHKLSRLISDVSWSEFIRQLEYKANWYGRQIVKVGKFFASSQICNKCGYKNEEVKNLNIREWICPSCNETHDRDINASMNILKEGLRLITIQNK

SEQ ID NO: 3213 - protein, 372 aa, unidentified
MIAVKKAYKFRLYPNKKQQELINKTFGCCRFVYNKYLAKRIDVYKNDKETFTYKQCSSDLTNLKKELKWLKEPDKFSLQNALKDLDNAYKKFFKEKAGFPKFKSKKINRFSYKTNFTNGNIMYCGQHIKLPKLGMVKIRDKQVPQGRILNATISKEPSGRYYVSLCCTDVDIEAFENTNNHIGLDLGIKEFCISSCGEFIENPKYLKKSLNKLAKLQRELSRKTIGSLNRNKARLKVARLQEHIANQRKDFLQKLSTKLIKENDIICIEDLQVKNMIRKRKLSRLISDVSWSEFIRQLEYKANWHGRQIVKVGKFFASSQICNKCGYKNEEVKNLNIREWICPSCNETHDRDINASRNILKEGLRLITIQNK

SEQ ID NO: 3214 - protein, 372 aa, unidentified
MIAVKKAYKFRLYPNKKQQELINKTFGCCRFVYNKYLAKRIDVYKNNKETFTYKQCSSDLTNLKKELKWLKEPDKFSLQNALKDLDNAYKKFFKEKAGFPKFKSKKINRFSYKTNFTNGNIMYCGQHIKLPKLGMVKVRDKQVPQGRILNATISKEPSGRYYVSLCCTDVDIEAFENTNNHIGLDLGIKEFCISSCGEFIENPKYLKKSLNKLVKLQSELSRKTIGSLNRNKARLKVARLQEHIANQRKDFLQKLSTKLIKENDIICIEDLQVKNMIKNHKLSRSISDVSWSEFIRQLEYKANWYGRQIVKVGKFFASSQICNKCGYKNEEVKDLNIREWICPSCNETHDRDINSSINILKEGLRLITIQNK

SEQ ID NO: 3215 - protein, 372 aa, unidentified
MIAVKKAYKFRIYPNKKQQELINKTFGCCRFVYNKYLAKRIDVYKNDKETFTYKQCSSDLTNLKKELKWLKEPDKFSLQNALKDLDNAYKKFFKEKAGFPKFKSKKINRFSYKTNFTNGNIMYCGQHIKLPKLGMVKIRDKQVPKGRILNATISKEASGRYYVSLCCTDVDIEVFENTNNQIGLDLGIKEFCISSCGEFIENPKYLKKSLNKLAKLQRELSRKTIGSLNRNKARLKVARLQEHIANQRNDFLKKLSTKLIKENDIICIEDLQVKNMIRNRKLSRLISDVSWSEFIRQLEYKANWHGRQIVKVGKFFASSQICNKCGYKNEEVKDLNIREWICPSCNETHDRDINASINILKEGLRLITIQNK

SEQ ID NO: 3216 - protein, 369 aa, unidentified
MKKAYKFRLYPNKKQQELINKTFGCCRFVYNKYLAKRIDVYKNNKETFTYKQCSSDLTNLKKELKWLKEPDKFSLQNALKDLDNAYKKFFKEKAGFPKFKSKKINRFSYKTNFTNGNIMYCGQHIKLPKLGMVKIRDKQVPQGRILNATISKEPSGRYYVSLCCTDVDIEAFENTNNQIGLDLGIKEFCISSCGEFIENPKYLKKSLNKLAKLQRELSRKTIGSLNRNKARLKVARLQEHIANQRNDFLQKLSTKLIKENDIICIEDLQVKNMIKNHKLSRLISDVSWSEFIRQLEYKANWYGRQIVKVGKFFASSQICNKCGYKNEEVKDLNIREWICPSCNETHDRDINASINILKEGLRLITIQNK

SEQ ID NO: 3217 - protein, 369 aa, unidentified
MEKAYKFRMYPNKKQQELINKTFGCCRFVYNKYLAKRIDVYKKHKETFTYKQCSSDLTNLKKELKWLKEPDKFSLQNALRDLDNAYKKFFKEKAGFPKFKSKKINRFSYKTNFTNGNIMYCGQHIKLPKLGMVKIRDKQVPQGRILNATISKEPSGRYYVSLCCTDVDIGAFENTNNHIGLDLGIKEFCISSCGDFIENPKYLKKSLNKLAKLQRELSRKTIGSLNRNKARLKVARFQEHIANQRKDFLQKLSTKLIKENDIICIEDLQVKNMIRNRKLSRLISDVSWSEFIRQLEYKANWHGRQIVKVGKFFASSQICNKCGYKNEEVKNLNIREWICPSCNETHDRDINASINILKEGLRLITIQNK

SEQ ID NO: 3218 - protein, 369 aa, unidentified
MKKAYKFRMYPNKKQQELINKTFGCCRFVYNKYLAKRIDVYKNDKETFTYKQCSSDLTNLKKELKWLKEPDKFSLQNALKDLDNAYKKFFKEKAGFPKFKSKKINRFSYKTNFTNGNIMYCGQHIKLPKLGMVKIRDKQVPQGRILNATISKEPSGRYYVSLCCTDVDIEAFENTNNHIGLDLGIKEFCISSCGEFIENPKYLKKSLNKLAKLQRELSRKTIGSLNRNKARLKVARLQEHIANQRNDFLQKLSTKLIKENDIICIEDLQVKNMIRNRKLSRLISDVSWSEFIRQLEYKANWHGRQIVKVGKFFASSQICNKCRYKNEEVKNLNIREWICPSCNETHDRDINASINILKEGLRLITIQNK

SEQ ID NO: 3219 - protein, 272 aa, unidentified
MKKAYKFRMYPNKKQQELINKTFGCCRFVYNKYLAKRIDVYKNDKETFTYKQCSSDLTNLKKELKWLKEPDKFSLQNALKDLDNAYKKFFKEKAGFPKFKSKKINRFSYKTNFTNGNIMYCGQHIKLPKLGMVKIRDKQVPQGRILNATISKEPSGRYYVSLCCTDVDIEAFENTNNHIGLDLGIKEFCISSCGEFIENPKYLKKSLNKLAKLQRELSRKTIGSLNRNKARLKVARLQEHIANQRNDFLQKLSTKLIKENDIICIEDLQVKX

SEQ ID NO: 3220 - protein, 369 aa, unidentified
MKKAYKFRMYPNKKQQELINKTFGCCRFVYNKYLAKRIDVYKNDKETFTYKQCSSDLTNLKKELKWLKEPDKFSLQNALKDLDNAYKKFFKEKAGFPKFKSKKINRFSYKTNFTNGNIMYCGQHIKLPKLGMVKIRDKQVPQGRILNATISKEPSGRYYVSLCCTDVDIEAFENTNNHIGLDLGIKEFCISSCGEFIENPKYLKKSLNKLAKLQRELSRKTIGSLNRNKARLKVARLQEHIANQRKDFLQKLSTKLIKENDIICIEDLQVKNMIRKRKLSRLISDVSWSEFIRQLEYKANWHGRQIVKVGKFFASSQICNKCGYKNEEVKNLNIREWICPSCNETHDRDINASRNILKEGLRLITIQNK

SEQ ID NO: 3221 - protein, 369 aa, unidentified
MEKAYKFRVYPNKKQQELINKTFGCCRFVYNKYLAKRIDVYKSDKETFTYKQCSSDLTNLKKELKWLKEPDKFSLQNALKDLDNAYKKFFKEKAGFPKFKSKKINRFSYKTNFTNGNIMYCGQHIKLPKLGMVKIRDKQVPQGRILNATISKEPSGRYYVSLCCTDVDIEVFENTNNQIGLDLGIKEFCISSCGDFIENPKYLKKSLNKLAKLQRELSRKTIGSLNRNKARLKVAGLQEHIANQRNDFLQKLSTKLIKENDIICIEDLQVKNMIRNRKLSRLISDVSWSEFIRQLEYKANWYGRKIVKVGKFFASSQICNKCGYKNEEVKDLNIREWICPSCNETHDRDINASINILKEGLRLITIQNK

SEQ ID NO: 3222 - protein, 369 aa, unidentified
MEKAYKFRMYPNKKQQELINKTFGCCRFVYNKYLAKRIDVYKNDKETFTYKQCSSDLTNLKKELNWLKEPDKFSLQNALKDLENAYNKFFKEKAGFPKFKSKKINRFSYKTNFTNGNIMYCGQHIKLPKLGMVKVMDKQVPQGRILNATISKEPSGRYYVSLCCTDVDIEAFKNTNNQIGLDLGIKEFCISSCGEFIENPKYLKKSLNKLAKLQRELSRKTIGSLNRNKARLKVARLQEHIANQRNDFLQKLSTKLIKENDIICIEDLQVKNMIRNRKLSRLISDVSWSEFIRQLEYKANWYGRQIVKVGKFFASSQICNKCGYKNEEVKNLNIREWICPSCNETHDRDINASINILKEGLRLITIQNK

SEQ ID NO: 3223 - protein, 369 aa, unidentified
MEKAYKFRMYPNKKQQELINKTFGCCRFVYNKYLAKRIDVYKKHKETFTYKQCSSDLTNLKKELKWLKEPDKFSLQNALRDLDNAYKKFFKEKAGFPKFKSKKINRFSYKTNFTNGNIMYCGQYIKLPKLGMVKIRDKQVPQGRILNATISKEPSGRYYVSLCCTDVDIGAFENTNNHIGLDLGIKEFCISSCGDFIENPKYLKKSLNKLAKLQRELSRKTIGSLNRNKARLKVARFQEHIANQRKDFLQKLSTKLIKENDIICIEDLQVKNMIRNRKLSRLISDVSWSEFIRQLEYKANWHGRQIVKVGKFFASSQICNKCGYKNEEVKNLNIREWICPSCNETHDRDINASINILKEGLRLITIQNK

SEQ ID NO: 3224 - protein, 255 aa, unidentified
MEKAYKFRMYPNKKQQELINKTFGCCRFVYNKYLAKRIDVYKKHKETFTYKQCSSDLTNLKKELKWLKEPDKFSLQNALRDLDNAYKKFFKEKAGFPKFKSKKINRFSYKTNFTNGNIMYCGQYIKLPKLGMVKIRDKQVPQGRILNATISKEPSGRYYVSLCCTDVDIGAFENTNNHIGLDLGIKEFCISSCGDFIENPKYLKKSLNKLAKLQRELSRKTIGSLNRNKARLKVARFQEHIANQRKDFLXQVNSE

SEQ ID NO: 3225 - protein, 369 aa, unidentified
MKKAYKFRMYPNKKQQELINKTFGCCRFVYNKYLAKRIDVYKNDKETFTYKQCSSDLTNLKKELKWLKEPDKFSLQNALKDLDNAYKKFFKEKAGFPKFKSKKINRFSYKTNFTNGNIMYCGQHIKLPKLGMVKIRDKQVPQGRILNATISKEPSGRYYVSLCCTDVDIEVFENTNNQIGLDLGIKEFCISSCGEFIENPKYFKKSLNKLAKLQRELSRKTIGSLNRNKARLKVARLQEHIANQRNDFLQKLSTKLIKENDIICIEDLQVKNMIKNHKLSRLISDVSWSEFIRQLEYKANWHGRQIVKVGKFFASSQICNKCGYKNEEVKNLNIREWICPSCNETHDRDINASRNILKEGLRLITIQNK

SEQ ID NO: 3226 - protein, 369 aa, unidentified
MEKAYKFRMYPNKKQQELINKTFGCCRFVYNKYLAKRIDVYKNNKETFTYKQCSSDLTNLKKELNWLKEPDKFSLQNALKDLDNAYKKFFKEKAGLPKFKSKKINRFSYKTNFTNGNIMYCGQHIKLPKLGMVKIRDKQVPQGRILNATISKEPSGRYYVSLCCTDVDIEAFENTNNQIGLDLGIKEFCISSCGEFIENPKYLKKSLNKLAKLQRELSRKTIGSLNRNKARLKVARLQEHIANQRNDFLQKLSTKLIKENDIICIEDLQVKNMIRNRKLSRLISDVSWSEFIRQLEYKANWYGRQIVKVGKFFASSQICNKCGYKNEEVKDLNIREWICPSCNETHDRDINASINILKEGLRLITIQNK

SEQ ID NO: 3227 - protein, 369 aa, unidentified
MEKAYKFRMYPNKKQQELINKTFGCCRFVYNKYLAKRIDVYKKHKETFTYKQCSSDLTNLKKELKWLKEPDKFSLQNALRDLDNAYKKFFKEKAGFPKFKSKKINRFSYKTNFTNGNIMYCGQYIKLPKLGMVKIRDKQVPQGRILNATISKEPSGRYYVSLCCTDVDIGAFENTNNHIGLDLGIKEFCISSCGEFIENPKYLKKSLNKLAKLQRELSRKTIGSLNRNKARLKVARFQEHIANQRKDFLQKLSTKLIKENDIICIEDLQVKNMIRNRKLSRLISDVSWSEFIRQLEYKANWHGRQIVKVGKFFASSQICNKCGYKNEEVKDLNIREWICPSCNETHDRDINASINILKEGLRLITIQNK

SEQ ID NO: 3228 - protein, 369 aa, unidentified
MKKAYKFRMYPNKKQQELINKTFGCCRFVYNKYLAKRIDVYKNDKETFTYKQCSSDLTNLKKELKWLKEPDKFSLQNALKDLDNAYKKFFKEKTGFPKFKSKKINRFSYKTNFTNGNIMYCGQHIKLPKLGMVKIRDKQVPQGRILNATISKEPSGRYYVSLCCTDVDIEAFENTNNHIGLDLGIKEFCISSCGEFIENPKYLKKSLNKLAKLQRELSRKTIGSLNRNKARLKVARLQEHIANQRNDFLQKLTTKLIKENDIICIEDLQVKNIIRNRKLSRLISDVSWSEFIRQLEYKANWHGRQIVKVDKFFASSQICNKCGYKNEEVKNLNIREWICPSCNETHDRDINASINILKEGLRLITIQNK

SEQ ID NO: 3229 - protein, 369 aa, unidentified
MEKAYKFRMYPNKKQQELINKTFGCCRFVYNKYLAKRIEVYKNDKETFTYKQCSSDLTNLKKELKWLKEPDKFSLQNVLKDLDNAYKKFFKEKAGFPKFKSKKINRFSYKTNFTNGNIMYCGQHIKLPKLGMVKIRDKQVPQGRILNATISKEPSGRYYVSLCCTDVDIEAFENTNNHIGLDLGIKEFCISSCGEFIENPKYLKKSLNKLAKLQRELSRKTIGSLNRNKARLKVARLQEHIANQRNDFLQKLSTKLIKENDIICIEDLQVKNMIRNSKLSRLISDVSWSEFIRQLEYKANWYGRQIVKVGKFFASSQICNKCGYKNEEVKDLNIREWICPSCNETHDRDINASINILKEGLRLITIQNK

SEQ ID NO: 3230 - protein, 274 aa, unidentified
MEKAYKFRMYPNKKQQELINKTFGCCRFVYNKYLAKRIDVYKNNKETFTYKQCSSDLTNLKKELKWLKEPDKFSLQNALKDLDNAYKKFFKEKTGFPKFKSKKINRFSYKTNFTNGNIMYCGQHIKLPKLGMVKIRDKQVPQGRILNATISKEPSGRYYVSLCCTDVDIEAFENTNNHIGLDLGIKEFCISSCGEFIENPKYLKKSLNKLAKLQRELSRKTIGSLNRNKARLKVARLQEHIANQRNDFLQKLSTKLIKENDIICIEXNYPFYKK

SEQ ID NO: 3231 - protein, 369 aa, unidentified
MEKAYKFRMYPNKKQQELINKTFGCCRFVYNKYLAKRIDVYKNDKETFTYKQCSSDLTNLKKELNWLKEPDKFSLQNVLKDLDNAYEKFFKKKAGFPKFKSKKINRFSYKTNFTNGNIMYCGQHIKLPKLGMVKIRDKQVPKGRILNATISKEPSGRYYVSLCCTDVDIEAFENTNNQIGLDLGIKEFCISSCGEFIENPKYLKKSLNKLAKLQRELSRKTIGSLNRNKARLKVARLQEHIANQRNDFLQKLSTKLIKENDIICIEDLQVKNMIRNRKLSRLISDVSWSEFIRQLEYKANWYGRKIVKVGKFFASSQICNKCGYKNEEVKNLNIREWICPSCNETHDRDINASINILKEGLRLITIQNK

SEQ ID NO: 3232 - protein, 369 aa, unidentified
MEKAYKFRMYPNKKQQELINKTFGCCRFVYNKYLAKRIDVYKKHKETFTYKQCSSDLTNLKKELKWLKEPDKFSLQNALRDLDNAYKKFFKEKAGFPKFKSKKINRFSYKTNFTNGNIMYCGQHIKLPKLGMVKIRDKQVPQGRILNATISKEPSGRYYVSLCCTDVDIGAFENTNNHIGLDLGIKEFCISSCGDFIENPKYLKKSLNKLAKLQRELSRKTIGSLNRNKARLKVARFQEHIANQRKDFLQKLSTKLIKENDIICIEDLQVKNMIRNRKLSRLISDVSWSEFIRQLEYKANWHGRQIVKVGKFFASSQICNKCGYKNEEVKDLNIREWICPSCNETHDRDINASINILKEGLRLITIQNK

SEQ ID NO: 3233 - protein, 369 aa, unidentified
MEKAYKFRMYPNKKQQELINKTFGCCRFVYNKYLAKRIDVYKNDKETFTYKQCSSDLTNLKKELNWLKEPDKFSLQNALKDLDNAYKKFFKEKAGFPKFKSKKINRFSYKTNFTNGNIMYCGQHIKLPKLGMVKIRDKQVPKGRILNATISKEPSGRYYVSLCCTDVDIEVFENTNNQIGLDLGIKEFCISSCGEFIENPKYLKKSLNKLAKLQRELSRKTIGSLNRNKARLKVARLQEHIANQRNDFLQKLSTKLIKENDIICIEDLQVKNMIRNRKLSRLISDVSWSEFIRQLEYKANWHGRQIVKVGKFFASSQICNKCGYKNEEVKNLNIREWICPSCNETHDRDINASINILKEGLRLITIQNK

SEQ ID NO: 3234 - protein, 369 aa, unidentified
MEKAYKFRMYPNKKQQELINKTFGCCRFVYNKYLAKRIEVYKNDKETFTYKQCSSDLTNLKKELKWLKEPDKFSLQNALKDLDNAYKKFFKEKAGFPKFKSKKINRFSYKTNFTNGNIMYCGQHIKLPKLGMVKIRDKQVPKGRILNATISKEPSGRYYVSLCCTDVDIEAFENTNNHIGLDLGIKEFCISSCGEFIENPKYLKKSLNKLAKLQRELSRKTIGSLNRNKARLKVARLQEHIANQRNDFLQKLSTKLIKENDIICIEDLQVKNMIRNRKLSRSISDVSWSEFIRQLEYKSNWYGRKIVKVGKFFASSQICNKCGYKNEEVKDLNIREWICPSCNETHDRDINASINILKEGLRLITIQNK

SEQ ID NO: 3235 - protein, 369 aa, unidentified
MEKAYKFRMYPNKKQQELINKTFGCCRFVYNKYLAKRIEVYKNAKETFTYKQCSSDLTNLKKELKWFKEPDKFSLQNALKDLDNAYKKFFKEKAGLPKFKSKKINRFSYKTNFTNGNIMYFSQHIKLPKLGMVKIKDKQVPKGRILNATISKESSGRYYVSLCCTDVDIEAFENTNNHIGLDLGIKEFCTSSCGEFIENPKYLKKSLNKLAKLQRELSRKTIGSLNRNKARLKVAGLQEHIANQRNDFLQKLSTKLIKENDIICIEDLQVKNMIRNRKLSRLISDVSWSELIRQLEYKANWYGRKIVKVGKFFASSQICNKCGYKNEEVKDLNIREWICPSCNETHDRDINASINILKEGLRLITIQNK

SEQ ID NO: 3236 - protein, 289 aa, unidentified
MKKAYKFRMYPNKKQQELINKTFGCCRFVYNKYLAKRIEVYKNDKETFTYKQCSSDLTNLKKELKWLKEPDKFSLQNALKDLDNAYKKFFKEKAGFPKFKSKKINRFSYKTNFTNGNIMYCGQYIKLPKLGMVKIRDKQVPKGRILNATISKEPSGRYYVSLCCTDVDIEAFENTNNHIGLDLGIKEFCISSCGEFIENPKYLKKSLNKLAKLQRELSRKTIGSLNRNKARLKVARLQEHIANQRNDFLQKLSTKLIKENDIICIEDLQVKNMIRNRKLSRLISMVDKL

SEQ ID NO: 3237 - protein, 369 aa, unidentified
MEKAYKFRMYPNKKQQELINKTFGCCRFVYNKYLAKRIEVYKNDKETFTYKQCSSDLTNLKKELKWLKEPDKFSLQNALKDLDNAYKKFFKEKAGFPKFKSKKINRFSYKTNFTNGNIMYFSQHIKLPKLGMVKIRDKQVPKGRILNATISKEPSGRYYVSLCCTDVDIESFENTNNHIGLDLGIKEFCISSCGEFIENPKYLKKSLNKLAKLQRELSRKTIGSLNRNKARLKVARLQEHIANQRNDFLQKLSTKLIKENDIICIEDLQVKNMIRNRKLSRLISDVSWSEFIRQLKYKANWHGRQIVKVGKFFASSQICNKCGYKNEEVKDLNIREWICPSCNETHDRDINASINILKEGLRLITIQNK

SEQ ID NO: 3238 - protein, 369 aa, unidentified
MKKAYKFRIYPNKKQQELINKTFGCCRFVYNKYLAKRIDVYKNDKETFTYKQCSSDLTNLKKELNWLKEPDKFSLQNALKDLDNAYKKFFKEKAGFPKFKSKKINRFSYKTNFTNGNIMYCGQHIKLPKLGMVKVRDKQVPKGRILNATISKEPSGRYYVSLCCTDVDIEAFENTNNHIGLDLGIKEFCISSCGEFIENPKYLKKSLNKLAKLQRELSRKTIGSLNRNKARLKVARLQEHIANQRKDFLQKLSTKLIKENDIICIEDLQVKNMIKNHKLSRSISDVSWSEFIRQLEYKANWHGRQIVKVGKFFASSQICNKCGYKNEEVKDLNIREWICPSCNETHDRDINASINILKEGLRLITIQNK

SEQ ID NO: 3239 - protein, 369 aa, unidentified
MKKAYKFRLYPNKKQQELINKTFGCCRFVYNKYLAKRIDVYKNNKETFTYKQCSSDLTNLKKELKWLKEPDKFSLQNALKDLDNAYKKFFKEKAGFPKFKSKKINRFSYKTNFTNGNIMYCGQHIKLPKLGMVKVRDKQVPQGRILNATISKEPSGRYYVSLCCTDVDIEAFENTNNQIGLDLGIKEFCISSCGEFIENPKYLKKSLNKLAKLQRELSRKTIGSLNRNKARLKVARLQEHIANQRNDFLQKLSTKLIKENDIICIEDLQVKNMIRNRKLSRLISDVSWSEFIRQLEYKANWHGRQIVKVGKFFASSQICNKCGYKNEEVKNLNIREWICPSCNETHDRDINASINILKEGLRLITIQNK

SEQ ID NO: 3240 - protein, 369 aa, unidentified
MEKAYKFRMYPNKKQQELINKTFGCCRFVYNKYLAKRIEVYKNDKETFTYKQCSSDLTNLKKELKWLKEPDKFSLQNALKDLDNAYKKFFKEKAGFPKFKSKKINRFSYKTNFTNGNIMYCGQHIKLPKLGMVKVRDKQVPKGRILNATISKEPSGRYYVSLCCTDVDIEAFENTNNHIGLDLGIKEFCISSCGEFIENPKYLKKSLNKLAKLQRELSRKTIGSLNRNKARLKVTRLQEHIANQRNDFLQKLSTKLIKENDIICIEDLQVKNMIINRKLSRLISDVSWSEFIRQLEYKANWYGRQIVKVGKFFASSQICNKCGYKNEEVKDLNIREWICPSCNETHDRDINASINILKEGLRLITIQNK

SEQ ID NO: 3241 - protein, 369 aa, unidentified
MKKAYKFRMYPNKKQQELINKTFGCCRFVYNKYLAKRIDVYKNNKETFTYKQCSSDLTNLKKELNWLKEPDKFSLQNALKDLDNAYKKFFKEKAGFPKFKSKKINRFSYKTNFTNGNIMYCGQHIKLPKLGMVKIRDKQVPKGRILNATISKEPSGRYYVSLCCTDVDIEVFENTNNQIGLDLGIKEFCISSCGDFIENPKYLKKSLNKLAKLQRELSRKTIGSLNRNKARLKVARLQEHIANQRNNFLQKLSTKLIKENDIICIEDLQVKNMIRNRKLSRLISDVSWSEFIRQLEYKANWYGRQIVKVGKFFASSQICNKCGYKNEEVKNLNIREWICPSCNETHDRDINASINILKEGLRLITIQNK

SEQ ID NO: 3242 - protein, 263 aa, unidentified
MKKAYKFRIYPNKKQQELINKTFGCCRFVYNKYLAKRIDVYKNDKETFTYKQCSSDLTNLKKELNWLKEPDKFSLQNALKDLDNAYKKFFKEKAGFPKFKSKKINRFSYKTNFTNGNIMYCGQHIKLPKLGMVKVRDKQVPKGRILNATISKEPSGRYYVSLCCTDVDIEAFENTNNHIGLDLGIKEFCISSCGEFIENPKYLKKSLNKLAKLQRELSRKTIGSLNRNKARLKVARLQEHIANQRXXXXXXXXXXXFSTKTIY

SEQ ID NO: 3243 - protein, 369 aa, unidentified
MEKAYKFRMYPNKKQQELINKTFGCCRFVYNKYLAKRIDVYKNDKETFTYKQCSSDLTNLKKELKWLKEPDKFSLQNALKDLDNAYKKFFKEKTGFPKFKSKKINRFSYKTNFTNGNIMYCGQHIKLPKLGMVKIRDKQVPQGRILNATISKEPSGRYYVSLCCTDVDIEAFENTNNHIGLDLGIKEFCISSCGEFIENPKYLKKSLNKLAKLQRELSRKTIGSLNRNKARLKVARLQEHIANQRNDFLQKLSTKLIKENDIICIEDLQVKNMIRNHKLSRSISDVSWSEFIRQLEYKANWHGRQIVKVGKFFASSQICNKCGYKNEEVKDLNIREWICPSCNETHDRDINASINILKEGLRLITIQNK

SEQ ID NO: 3244 - protein, 372 aa, unidentified
MVVVEKAYKFRMYPNKKQQELINKTFGCCRFVYNKYLAKRIDVYKNDKETFTYKQCSSDLTNLKKELKWLKEPDKFSLQNALKDLENAYEKFFKEKAGFPKFKSKKINRFSYKTNFTNGNIMYCGQHIKLPKLGMVKIRDKQVPQGRILNATISKEPSGRYYVSLCCTDVDIEAFENTNNQIGLDLGIKEFCISSCGEFIENPKYLKKSLNKLAKLQRELSRKTIGSLNRNKARLKVARLQEHIANQRKDFLQKLSTKLIKENDIICIEDLQVKNMIRNRKLSRLISDVSWSEFVRQLEYKANWHGRQIVKVGKFFASSQICNKCGYKNEEVKNLNIREWICPSCNETHDRDINASMNILKEGLRLITIQNK

SEQ ID NO: 3245 - protein, 372 aa, unidentified
MIAVKKAYKFRMYPNKKQQELINKTFGCCRFVYNKYLAKRIDVYKSDKETFTYKQCSSDLTNLKKELKWLKEPDKFSLQNALKDLDNAYKKFFKEKAGFPKFKSKKINRFSYKTNFTNGNIMYCGQHIKLPKLGMVKIRDKQVPQGRILNATISKEPSGRYYVSLCCTDVDIEVFENTNNHIGLDLGIKEFCISSCGDFIENPKYLKKSLNKLAKLQRELSRKTIGSLNRNKARLKVAGLQEHIANQRNDFLQKLSTKLIKENDIICIEDLQVKNMIRNRKLSRLISDVSWSEFIRQLEYKANWYGRKIVKVGKFFASSQICNKCGYKNEEVKDLNIREWICPSCNETHDRDINASINILKEGLRLITIQNK

SEQ ID NO: 3246 - protein, 372 aa, unidentified
MIAVEKAYKFRVYPNKKQQELINKTFGCCRFVYNKYLAKRIDVYKSDKETFTYKQCSSDLTNLKKELKWLKEPDKFSLQNALKDLDNAYKKFFKEKAGFPKFKSKKINRFSYKTNFTNGNIMYCGQHIKLPKLGMVKIRDKQVPQGRILNATISKEPSGRYYVSLCCTDVDIEVFENTNNQIGLDLGIKEFCISSCGDFIENPKYLKKSLNKLAKLQRELSRKTIGSLNRNKARLKVAGLQEHIANQRNDFLQKLSTKLIKENDIICIEDLQVKNMIRNRKLSRLISDVSWSEFIRQLEYKANWYGRKIVKVGKFFASSQICNKCGYKNEEVKDLNIREWICPSCNETHDRDINASINILKEGLRLITIQNK

SEQ ID NO: 3247 - protein, 372 aa, unidentified
MIVVEKAYKFRMYPNKKQQELINKTFGCCRFVYNKYLAKRIDVYKKHKETFTYKQCSSDLTNLKKELKWLKEPDKFSLQNALRDLDNAYKKFFKEKAGFPKFKSKKINRFSYKTNFTNGNIMYCGQYIKLPKLGMVKIRDKQVPQGRILNATISKEPSGRYYVSLCCTDVDIGAFENTNNHIGLDLGIKEFCISSCGDFIENPKYLKKSLNKLAKLQRELSRKTIGSLNRNKARLKVARFQEHIANQRKDFLQKLSTKLIKENDIICIEDLQVKNMIRNRKLSRLISDVSWSEFIRQLEYKANWHGRQIVKVGKFFASSQICNKCGYKNEEVKNLNIREWICPSCNETHDRDINASINILKEGLRLITIQNK

SEQ ID NO: 3248 - protein, 372 aa, unidentified
MIVVEKAYKFRMYPNKKQQELINKTFGCCRFVYNKYLAKRIDVYKNDKGTFTYKQCSSDLTNLKKELNWLKEPDKFSLQNALKDLDNAYEKFFKKKAGFPKFKSKKINRFSYKTNFTNGNIMYCGQHIKLPKLGMVKIRDKQVPQGRILNATISKEQSGRYYVSLCCTDVDIEAFENTNNQIGLDLGIKEFCISSCGEFIENPKYLKKSLNKLAKLQRELSRKTIGSLNRNKARLKVARLQEHIANQRNDFLQKLSTKLIKENDIICIEDLQVKNMIRNRKLSRLISDVSWSEFIRQLEYKANWYGRQIVKVGKFFASSQICNKCGYKNEEVKDLNIREWICPSCNETHDRDINASINILKEGLRLITIQNK

SEQ ID NO: 3249 - protein, 372 aa, unidentified
MIAVEKAYKFRMYPNKKQQELINKTFGCCRFVYNKYLAKRIDVYKNDKETFTYKQCSSDLTNLKKELKWLKEPDKFSLQNALKDLENAYEKFFKKKAGFPKFKSKKINRFSYKTNFTNGNIMYFSQHIKLPKLGMVKIRDKQVPQGRILNATISKEPSGRYYVSLCCTDVDIEAFENTNNQIGLDLGIKEFCISSCGEFIENPKYLKKSLNKLAKLQRELSRKTIGSLNRNKARLKVARFQEHIANQRKDFLQKLSTKLIKENDIICIEDLQVKNMIRNRKLSRLISDVSWSEFIRQLEYKANWHSRQIVKVGKFFASSQICNKCGYKNEEVKNLNIREWICPSCNETHDRDINASINILKEGLRLITIQNK

SEQ ID NO: 3250 - protein, 372 aa, unidentified
MIAVKKAYKFRMYPNKKQQELINKTFGCCRFVYNKYLAKRIDVYKSDKETFTYKQCSSDLTNLKKELKWLKEPDKFSLQNALKDLDNAYKKFFKEKAGFPKFKSKKINRFSYKTNFTNGNIMYCGQYIKLPKLGMVKIRDKQVPQGRILNATISKEPSGRYYVSLCCTDVDIEAFENTNNHIGLDLGIKEFCISSCGEFIENPKYLKKSLNKLAKLQRELSRKTIGSLNRNKARLKVAGLQEHIANQRNDFLQKLSTKLIKENDIICIEDLQVKNMIRNRKLSRLISDVSWSEFIRQLEYKANWYGRKIVKVGKFFASSQICNKCGYKNEEVKDLNIREWICPSCNETHDRDINASINILKEGLRLITIQNK

SEQ ID NO: 3251 - protein, 372 aa, unidentified
MIAVEKAYKFRVYPNKKQQELINKTFGCCRFVYNKYLAKRIDVYKSDKETFTYKQCSSDLTNLKKELKWLKEPDKFSLQNALKDLDNAYKKFFKEKAGFPKFKSKKINRFSYKTNFTNGNIMYCGQYIKLPKLGMVKIRDKQVPQGRILNATISKEPSGRYYVSLCCTDVDIEVFENTNNHIGLDLGIKEFCISSCGEFIENPKYLKKSLNKLAKLQRELSRKTIGSLNRNKARLKVAGLQEHIANQRNDFLQKLSTKLIKENDIICIEDLQVKNMIRNRKLSRLISDVSWSEFIRQLEYKANWYGRKIVKVGKFFASSQICNKCGYKNEEVKDLNIREWICPSCNETHDRDINASINILKEGLRLITIQNK

SEQ ID NO: 3252 - protein, 304 aa, unidentified
MIVVEKAYKFRMYPNKKQQELINKTFGCCRFVYNKYLAKRIDVYKKHKETFTYKQCSSDLTNLKKELKWLKEPDKFSLQNALRDLDNAYKKFFKEKAGFPKFKSKKINRFSYKTNFTNGNIMYCGQYIKLPKLGMVKIRDKQVPQGRILNATISKEPSGRYYVSLCCTDVDIEVFENTNNQIGLDLGIKEFCISSCGEFIENPKYFKKSLNKLAKLQRELSRKTIGSLNRNKARLKVARLQEHIANQRNDFLQKLSTKLIKENDIICIEDLQVKNMIKNHKLSRLISDVSWSEFIRQLEYKANW

SEQ ID NO: 3253 - protein, 372 aa, unidentified
MIAVEKAYKFRVYPNKKQQELINKTFGCCRFVYNKYLAKRIDVYKSDKETFTYKQCSSDLTNLKKELKWLKEPDKFSLQNALKDLDNAYKKFFKEKAGFPKFKSKKINRFSYKTNFTNGNIMYCGQYIKLPKLGMVKIRDKQVPQGRILNATISKEPSGRYYVSLCCTDVDIEVFENTNNHIGLDLGIKEFCISSCGDFIENPKYLKKSLNKLAKLQRELSRKTIGSLNRNKARLKVAGLQEHIANQRNDFLQKLSTKLIKENDIICIEDLQVKNMIRNRKLSRLISDVSWSEFIRQLEYKANWYGRKIVKVGKFFASSQICNKCGYKNEEVKDLNIREWICPSCNETHDRDINASINILKEGLRLITIQNK

SEQ ID NO: 3254 - protein, 372 aa, unidentified
MIVVEKAYKFRMYPNKKQQELINKTFGCCRFVYNKYLAKRIDVYKKHKETFTYKQCSSDLTNLKKELKWLKEPDKFSLQNALRDLDNAYKKFFKEKAGFPKFKSKKINRFSYKTNFTNGNIMYCGQYIKLPKLGMVKIRDKQVPQGRILNATISKEPSGRYYVSLCCTDVDIEVFENTNNHIGLDLGIKEFCISSCGDFIENPKYLKKSLNKLAKLQRELSRKTIGSLNRNKARLKVARFQEHIANQRKDFLQKLSTKLIKENDIICIEDLQVKNMIRNRKLSRLISDVSWSEFIRQLEYKANWHGRQIVKVGKFFASSQICNKCGYKNEEVKDLNIREWICPSCNETHDRDINASINILKEGLRLITIQNK

SEQ ID NO: 3255 - protein, 372 aa, unidentified
MIAVEKAYKFRMYPNKKQQELINKTFGCCRFVYNKYLAKRIEVYKNAKETFTYKQCSSDLTNLKKELKWFKEPDKFSLQNALKDLDNAYKKFFKEKAGLPKFKSKKINRFSYKTNFTNGNIMYFSQHIKLPKLGMVKIKDKQVPKGRILNATISKESSGRYYVSLCCTDVDIEAFENTNNHIGLDLGIKEFCTSSCGEFIENPKYLKKSLNKLAKLQRELSRKTIGSLNRNKARLKVAGLQEHIANQRNDFLQKLSTKLIKENDIICIEDLQVKNMIRNRKLSRLISDVSWSELIRQLEYKANWYGRKIVKVGKFFASSQICNKCGYKNEEVKDLNIREWICPSCNETHDRDINASINILKEGLRLITIQNK

SEQ ID NO: 3256 - protein, 372 aa, unidentified
MIAVKKAYKFRMYPNKKQQELINKTFGCCRFVYNKYLAKRIDVYKNDKETFTYKQCSSDLTNLKKELKWLKEPDKFSLQNALKDLDNAYKKFFKEKAGFPKFKSKKINRFSYKTNFTNGNIMYCGQHIKLPKLGMVKIRDKQVPQGRILNATISKEPSGRYYVSLCCTDVDIEAFENTNNHIGLDLGIKEFCISSCGEFIENPKYLKKSLNKLAKLQRELSRKTIGSLNRNKARLKVARLQEHIANQRKDFLQKLSTKLIKENDIICIEDLQVKNMIRKRKLSRLISDVSWSEFIRQLEYKANWHGRQIVKVGKFFASSQICNKCGYKNEEVKNLNIREWICPSCNETHDRDINASRNILKEGLRLITIQNK

SEQ ID NO: 3257 - protein, 372 aa, unidentified
MIAVEKAYKFRVYPNKKQQELINKTFGCCRFVYNKYLAKRIDVYKSDKETFTYKQCSSDLTNLKKELKWLKEPDKFSLQNALKDLDNAYKKFFKEKAGFPKFKSKKINRFSYKTNFTNGNIMYCGQHIKLPKLGMVKIRDKQVPQGRILNATISKEPSGRYYVSLCCTDVDIEAFENTNNHIGLDLGIKEFCISSCGEFIENPKYLKKSLNKLAKLQRELSRKTIGSLNRNKARLKVAGLQEHIANQRNDFLQKLSTKLIKENDIICIEDLQVKNMIRNRKLSRLISDVSWSEFIRQLEYKANWYGRKIVKVGKFFASSQICNKCGYKNEEVKDLNIREWICPSCNETHDRDINASINILKEGLRLITIQNK

SEQ ID NO: 3258 - protein, 372 aa, unidentified
MVVVEKAYKFRMYPNKKQQELINKTFGCCRFVYNKYLAKRIDVYKKHKETFTYKQCSSDLTNLKKELKWLKEPDKFSLQNALKDLDNAYKKFFKEKTGFPKFKSKKINRFSYKTNFTNGNIMYCGQHIKLPKLGMVKVRDKQVPKGRILNATISKEPSGRYYVSLCCTDVDIEAFENTNNHIGLDLGIKEFCISSCGEFIENPKYFKKSLNKLAKLQRELSRKTIGSLNRNKARLKVAGLQEHIANQRKDFLQKLSTKLIKENDIICIEDLQVKNMIKNHKLSRLISDVSWSEFIRQLEYKANWHGRQIVKVGKFFASSQICNKCGYKNEEVKDLNIREWICHSCNETHDRDINASINILKEGLRLITIQNK

SEQ ID NO: 3259 - protein, 372 aa, unidentified
MVVVEKAYKFRMYPNKKQQELINKTFGCCRFVYNKYLAKRIDVYKNNKETFTYKQCSSDLTNLKKELKWLKEPDKFSLQNALKDLDNAYKKFFKEKAGFPKFKSKKINRFSYKTNFTNGNIMYCGQHIKLPKLGMVKIRDKQVPKGRILNATISKEPSGRYYVSLCCTDVDIEAFENTNNHIGLDLGIKEFCISSCGEFIENPKYLKKSLNKLAKLQRELSRKTIGSLNRNKARLEVAGLQEHIANQRKDFLQKLSTKLIKENDIICIEDLQVKNMIRNRKLSRLISDVSWSEFIRQLEYKANWHGRQIVKVGKFFASSQICNKCGYKNEEVKDLNIREWICPSCNETHDRDINASINILKEGLRLITIQNK

SEQ ID NO: 3260 - protein, 372 aa, unidentified
MIVVEKAYKFRMYPNKKQQELINKTFGCCRFVYNKYLAKRIEVYKNDKETFTYKQCSSDLTNLKKELKWLKEPDKFSLQNALKDLDNAYKKFFKEKAGFPKFKSKKINRFSYKTNFTNGNIMYFSQHIKLPKLGMVKIRDKQVPKGRILNATISKEPSGRYYVSLCCTDVDIEAFENTNNQIGLDLGIKEFCISSCGEFIENPKYLKKSLSKLAKLQRELSRKTIGSLNRNKARLKVARLQEHIANQRNDFLQKLSTKLIKENDIICIEDLQVKNMIRNRKLSRLISDVSWSEFIRQLKYKANWHGRQIVKVGKFFASSQICNKCGYKNEEIKDLNIREWICPSCNETHDRDINASINILKEGLRLITIQNK

SEQ ID NO: 3261 - protein, 372 aa, unidentified
MIAVEKAYKFRVYPNKKQQELINKTFGCCRFVYNKYLAKRIDVYKNDKETFTYKQCSSDLTNLKKELKWLKEPDKFSLQNALKDLDNAYKKFFKEKAGFPKFKSKKINRFSYKTNFTNGNIMYCGQHIKLPKLGMVKVRDKQVPKGRILNATISKEPSGRYYVSLCCTDVDIEAFENTNNHIGLDLGIKEFCISSCGEFIENPKYLKKSLNKLVKLQSELSRKTIGSLNRNKARLKVARLQEHIANQRKDFLQKLSTKLIKENDIICIEDLQVKNMIKNHKLSRSISDVSWSEFIRQLEYKANWYGRQIVKVGKFFASSQICNKCGYKNEEVKDLNIREWICPSCNETHDRDINASINILKEGLRLITIQNK

SEQ ID NO: 3262 - protein, 372 aa, unidentified
MVVVEKAYKFRMYPNKKQQELINKTFGCCRFVYNKYLAKRIDVYKNNKETFTYKQCSSDLTNLKKELKWLKEPDKFSLQNALKDLDNAYKKFFKEKTGFPKFKSKKINRFSYKTNFTNGNIMYCGQHIKLPKLGMVKIRDKQVPQGRILNATISKEPSGRYYVSLCCTDVDIGAFENTNNHIGLDLGIKEFCISSCGEFIENPKYLKKSLNKLAKLQRELSRKTIGSLNRNKARLKVARLQEHIANQRKDFLQKLSTKLIKENDIICIEDLQVKNMIKNHKLSRSISDVSWSEFIRQLEYKANWHGRQIVKVGKFFASSQICNKCGYKNEEVKDLNIREWICPSCNETHDRDINASINILKEGLRLITIQNK

SEQ ID NO: 3263 - protein, 372 aa, unidentified
MIAVKKAYKFRLYPNKKQQELINKTFGCCRFVYNKYLAKRIDVYKNDKETFTYKQCSSDLTNLKKELKWLKEPDKFSLQNALKDLDNAYKKFFKEKAGFPKFKSKKINRFSYKTNFTNGNIMYCGQHIKLPKLGMVKIRDKQVPQGRILNATISKEPSGRYYVSLCCTDVDIEAFENTNNQIGLDLGIKEFCISSCGEFIENPKYLKKSLNKLAKLQRELSRKTIGSLNRNKARLKVARLQEHIANQRKDFLQKLSTKLIKENDIICIEDLQVKNMIKNHKLSRLISDVSWSEFIRQLEYKANWYGRQIVKVGKFFASSQICNKCGYKNEEVKDLNIREWICPSCNETHDRDINASINILKEGLRLITIQNK

SEQ ID NO: 3264 - protein, 372 aa, unidentified
MIAVKKAYKFRMYPNKKQQELINKTFGCCRFVYNKYLAKRIDVYKSDKETFTYKQCSSDLTNLKKELKWLKEPDKFSLQNALKDLDNAYKKFFKEKAGFPKFKSKKINRFSYKTNFTNGNIMYCGQHIKLPKLGMVKIRDKQVPQGRILNATISKEPSGRYYVSLCCTDVDIEAFENTNNHIGLDLGIKEFCISSCGDFIENPKYLKKSLNKLAKLQRELSRKTIGSLNRNKARLKVAGLQEHIANQRNDFLQKLSTKLIKENDIICIEDLQVKNMIRNRKLSRLISDVSWSEFIRQLEYKANWYGRKIVKVGKFFASSQICNKCGYKNEEVKDLNIREWICPSCNETHDRDINASINILKEGLRLITIQNK

SEQ ID NO: 3265 - protein, 372 aa, unidentified
MIVVEKAYKFRMYPNKKQQELINKTFGCCRFVYNKYLAKRIDVYKKHKETFTYKQCSSDLTNLKKELKWLKEPDKFSLQNALRDLDNAYKKFFKEKAGFPKFKSKKINRFSYKTNFTNGNIMYCGQHIKLPKLGMVKIRDKQVPQGRILNATISKEPSGRYYVSLCCTDVDIEAFENTNNHIGLDLGIKEFCISSCGEFIENPKYLKKSLNKLAKLQRELSRKTIGSLNRNKARLKVARFQEHIANQRKDFLQKLSTKLIKENDIICIEDLQVKNMIRNRKLSRLISDVSWSEFIRQLEYKANWHGRQIVKVGKFFASSQICNKCGYKNEEVKNLNIREWICPSCNETHDRDINASINILKEGLRLITIQNK

SEQ ID NO: 3266 - protein, 372 aa, unidentified
MIAVKKAYKFRMYPNKKQQELINKTFGCCRFVYNKYLAKRIDVYKSDKETFTYKQCSSDLTNLKKELKWLKEPDKFSLQNALKDLDNAYKKFFKEKAGFPKFKSKKINRFSYKTNFTNGNIMYCGQHIKLPKLGMVKIRDKQVPQGRILNATISKEPSGRYYVSLCCTDVDIEVFENTNNHIGLDLGIKEFCISSCGDFIENPKYLKKSLNKLAKLQRELSRKTIGSLNRNKARLKVAGLQEHIANQRNDFLQKLSTKLIKENDIICIEDLQVKNMIKNRKLSRLISDVSWSEFIRQLEYKANWYGRKIVKVGKFFASSQICNKCGYKNEEVKDLNIREWICPSCNETHDRDINASINILKEGLRLITIQNK

SEQ ID NO: 3267 - protein, 372 aa, unidentified
MIVVEKAYKFRMYPNKKQQELINKTFGCCRFVYNKYLAKRIDVYKKHKETFTYKQCSSDLTNLKKELKWLKEPDKFSLQNALRDLDNAYKKFFKEKAGFPKFKSKKINRFSYKTNFTNGNIMYCGQHIKLPKLGMVKIRDKQVPQGRILNATISKEPSGRYYVSLCCTDVDIEVFENTNNHIGLDLGIKEFCISSCGDFIENPKYLKKSLNKLAKLQRELSRKTIGSLNRNKARLKVARFQEHIANQRKDFLQKLSTKLIKENDIICIEDLQVKNMIRNRKLSRLISDVSWSEFIRQLEYKANWHGRQIVKVGKFFASSQICNKCGYKNEEVKDLNIREWICPSCNETHDRDINASINILKEGLRLITIQNK

SEQ ID NO: 3268 - protein, 372 aa, unidentified
MIVVEKAYKFRMYPNKKQQELINKTFGCCRFVYNKYLAKRIEVYKNDKETFTYKQCSSDLTNLKKELKWLKEPDKFSLQNVLKDLDNAYKKFFKEKAGFPKFKSKKINRFSYKTNFTNGNIMYCGQHIKLPKLGMVKIRDKQVPQGRILNATISKEPSGRYYVSLCCTDVDIEAFENTNNHIGLDLGIKEFCISSCGEFIENPKYLKKSLNKLAKLQRELSRKTIGSLNRNKARLKVARLQEHIANQRNDFLQKLSTKLIKENDIICIEDLQVKNMIRNSKLSRLISDVSWSEFIRQLEYKANWYGRQIVKVGKFFASSQICNKCGYKNEEVKDLNIREWICPSCNETHDRDINASINILKEGLRLITIQNK

SEQ ID NO: 3269 - protein, 372 aa, unidentified
MIAVKKAYKFRLYPNKKQQELINKTFGCCRFVYNKYLAKRIDVYKNNKETFTYKQCSSDLTNLKKELKWLKEPDKFSLQNALKDLDNAYKKFFKEKAGFPKFKSKKINRFSYKTNFTNGNIMYCGQHIKLPKLGMVKIRDKQVPQGRILNATISKEPSGRYYVSLCCTDVDIEAFENTNNQIGLDLGIKEFCISSCGEFIENPKYLKKSLNKLAKLQRELSRKTIGSLNRNKARLKVARLQEHIANQRKDFLQKLSTKLIKENDIICIEDLQVKNMIKNHKLSRLISDVSWSEFIRQLEYKANWYGRQIVKVGKFFASSQICNKCGYKNEEVKDLNIREWICPSCNETHDRDINASINILKEGLRLITIQNK

SEQ ID NO: 3270 - protein, 372 aa, unidentified
MIVVEKAYKFRMYPNKKQQELINKTFGCCRFVYNKYLAKRIDVYKKHKETFTYKQCSSDLTNLKKELKWLKEPDKFSLQNALRDLDNAYKKFFKEKAGFPKFKSKKINRFSYKTNFTNGNIMYCGQHIKLPKLGMVKIRDKQVPQGRILNATISKEPSGRYYVSLCCTDVDIGAFENTNNHIGLDLGIKEFCISSCGDFIENPKYLKKSLNKLAKLQRELSRKTIGSLNRNKARLKVARFQEHIANQRKDFLQKLSTKLIKENDIICIEDLQVKNMIRNRKLSRLISDVSWSEFIRQLEYKANWHGRQIVKVGKFFASSQICNKCGYKNEEVKDLNIREWICPSCNETHDRDINASINILKEGLRLITIQNK

SEQ ID NO: 3271 - protein, 372 aa, unidentified
MIVVEKAYKFRMYPNKKQQELINKTFGCCRFVYNKYLAKRIEVYKNDKETFTYKQCSSDLTNLKKELKWLKEPDKFSLQNALKDLDNAYKKFFKEKSGFPKFKSKKINRFSYKTNFTNGNIMYFSQHIKLPKLGMVKIRDKQVPQGRILNATISKEPSGRYYVSLCCTDVDIEAFENTNNQIGLDLGIKEFCISSCGDFIENPKYLKKSLNKLAKLQRELSRKTIGSLNRNKARLKVAGLQEHIANQRNDFLQKLSTKLIKENDIICIEDLQVKNMIKNHKLSRLISDVSWSEFIRQLEYKANWYGRQIVKVGKFFASSQICNKCGYKNEEVKNLNIREWICPSCNETHDRDINASINILKEGLRLITIQNK

SEQ ID NO: 3272 - protein, 372 aa, unidentified
MIAVEKAYKFRVYPNKKQQELINKTFGCCRFVYNKYLAKRIDVYKSDKETFTYKQCSSDLTNLKKELKWLKEPDKFSLQNALKDLDNAYKKFFKEKAGFPKFKSKKINRFSYKTNFTNGNIMYCGQHIKLPKLGMVKIRDKQVPQGRILNATISKEPSGRYYVSLCCTDVDIEVFENTNNHIGLDLGIKEFCISSCGDFIENPKYLKKSLNKLAKLQRELSRKTIGSLNRNKARLKVAGLQEHIANQRNDFLQKLSTKLIKENDIICIEDLQVKNMIRNRKLSRLISDVSWSEFIRQLEYKANWYGRKIVKVGKFFASSQICNKCGYKNEEVKDLNIREWICPSCNETHDRDINASINILKEGLRLITIQNK

SEQ ID NO: 3273 - protein, 372 aa, unidentified
MIVVEKAYKFRMYPNKKQQELINKTFGCCRFVYNKYLAKRIDVYKKHKETFTYKQCSSDLTNLKKELKWLKEPDKFSLQNALRDLDNAYKKFFKEKAGFPKFKSKKINRFSYKTNFTNGNIMYCGQYIKLPKLGMVKIRDKQVPQGRILNATISKEPSGRYYVSLCCTDVDIEVFENTNNHIGLDLGIKEFCISSCGEFIENPKYLKKSLNKLAKLQRELSRKTIGSLNRNKARLKVARFQEHIANQRKDFLQKLSTKLIKENDIICIEDLQVKNMIRNRKLSRLISDVSWSEFIRQLEYKANWHGRQIVKVGKFFASSQICNKCGYKNEEVKDLNIREWICPSCNETHDRDINASINILKEGLRLITIQNK

SEQ ID NO: 3274 - protein, 372 aa, unidentified
MVVVEKAYKFRMYPNKKQQELINKTFGCCRFVYNKYLAKRIDVYKNDKETFTYKQCSSDLTNLKKELNWLKEPDKFSLQNALKDLENAYNKFFKEKAGFPKFKSKKINRFSYKTNFTNGNIMYCGQHIKLPKLGMVKVMDKQVPQGRILNATISKEPSGRYYVSLCCTDVDIEAFKNTNNQIGLDLGIKEFCISSCGEFIENPKYLKKSLNKLAKLQRELSRKTIGSLNRNKARLKVARLQEHIANQRNDFLQKLSTKLIKENDIICIEDLQVKNMIRNRKLSRLISDVSWSEFIRQLEYKANWYGRQIVKVGKFFASSQICNKCGYKNEEVKNLNIREWICPSCNETHDRDINASINILKEGLRLITIQNK

SEQ ID NO: 3275 - protein, 372 aa, unidentified
MIAVKKAYKFRMYPNKKQQELINKTFGCCRFVYNKYLAKRIDVYKSDKETFTYKQCSSDLTNLKKELKWLKEPDKFSLQNALKDLDNAYKKFFKEKAGFPKFKSKKINRFSYKTNFTNGNIMYCGQYIKLPKLGMVKIRDKQVPQGRILNATISKEPSGRYYVSLCCTDVDIEAFENTNNHIGLDLGIKEFCISSCGDFIENPKYLKKSLNKLAKLQRELSRKTIGSLNRNKARLKVAGLQEHIANQRNDFLQKLSTKLIKENDIICIEDLQVKNMIRNRKLSRLISDVSWSEFIRQLEYKANWYGRKIVKVGKFFASSQICNKCGYKNEEVKDLNIREWICPSCNETHDRDINASINILKEGLRLITIQNK

SEQ ID NO: 3276 - protein, 372 aa, unidentified
MIAVKKAYKFRIYPNKKQQELINKTFGCCRFVYNKYLAKRIDVYKNDKETFTYKQCSSDLTNLKKELKWLKEPDKFSLQNALKDLDNAYKKFFKEKAGFPKFKSKKINRFSYKTNFTNGNIMYCGQHIKLPKLGMVKIRDKQVPKGRILNATISKEASGRYYVSLCCTDVDIEVFENTNNQIGLDLGIKEFCISSCGEFIENPKYLKKSLNKLAKLQRELSRKTIGSLNRNKARLKVARLQEHIANQRNDFLQKLSTKLIKENDIICIEDLQVKNMIRNRKLSRLISDVSWSEFIRQLEYKANWHGRQIVKVGKFFASSQICNKCGYKNEEVKDLNIREWICPSCNETHDRDINASINILKEGLRLITIQNK

SEQ ID NO: 3277 - protein, 372 aa, unidentified
MIAVKKAYKFRMYPNKKQQELINKTFGCCRFVYNKYLAKRIDVYKNNKETFTYKQCSSDLTNLKKELKWLKEPDKFSLQNALKDLDNAYKKFFKEKAGFPKFKSKKINRFSYKTNFTNGNIMYCGQHIKLPKLGMVKIRDKQVPQGRILNATISKEPSGRYYVSLCCTDVDIEVFENTNNHIGLDLGIKEFCISSCGDFIENPKYLKKSLNKLAKLQRELSRKTIGSLNRNKARLKVAGLQEHIANQRNDFLQKLSTKLIKENDIICIEDLQVKNMIKNHKLSRLISDVSWSEFIRQLEYKANWYGRQIVKVGKFFASSQICNKCGYKNEEVKNLNIREWICPSCNETHDRDINASINILKEGLRLITIQNK

SEQ ID NO: 3278 - protein, 372 aa, unidentified
MIVVEKAYKFRMYPNKKQQELINKTFGCCRFVYNKYLAKRIDVYKKHKETFTYKQCSSDLTNLKKELKWLKEPDKFSLQNALRDLDNAYKKFFKEKAGFPKFKSKKINRFSYKTNFTNGNIMYCGQHIKLPKLGMVKIRDKQVPQGRILNAAISKEPSGRYYVSLCCTDVDIEVFENTNNHIGLDLGIKEFCISSCGDFIENPKYLKKSLNKLAKLQRELSRKTIGSLNRNKARLKVARFQEHIANQRKDFLQKLSTKLIKENDIICIEDLQVKNMIRNRKLSRLISDVSWSEFIRQLEYKANWHGRQIVKVGKFFASSQICNKCGYKNEEVKDLNIREWICPSCNETHDRDINASINILKEGLRLITIQNK

SEQ ID NO: 3279 - protein, 372 aa, unidentified
MIAVKKAYKFRMYPNKKQQELINKTFGCCRFVYNKYLAKRIEVYKNDKETFTYKQCSSDLTNLKKELKWLKEPDKFSLQNALKDLDNAYKKFFKEKAGFPKFKSKKINRFSYKTNFTNGNIMYCGQYIKLPKLGMVKIRDKQVPQGRILNATISKEPSGRYYVSLCCTDVDIEAFENTNNHIGLDLGIKEFCISSCGDFIENPKYLKKSLNKLAKLQRELSRKTIGSLNRNKARLKVARLQEHIANQRNDFLQKLSTKLIKENDIICIEDLQVKNMIKNRKLSRSISDVSWSEFIRQLEYKANWHGRQIVKVGKFFASSQICNKCGYKNEEVKDLNIREWICPSCNETHDRDINASINILKEGLRLITIQNK

SEQ ID NO: 3280 - protein, 372 aa, unidentified
MIAVKKAYKFRMYPNKKQQELINKTFGCCRFVYNKYLAKRIDVYKSDKETFTYKQCSSDLTNLKKELKWLKEPDKFSLQNALKDLDNAYKKFFKEKAGFPKFKSKKINRFSYKTNFTNGNIMYCGQHIKLPKLGMVKIRDKQVPQGRILNATISKEPSGRYYVSLCCTDVDIEVFENTNNHIGLDLGIKEFCISSCGDFIENPKYLKKSLNKLAKLQRELSRKTIGSLNRNKARLKVAGLQEHIANQRNDFLQKLSTKLIKENDIICIEDLQVKNMIRNRKLSRLISDVSWSEFIRQLEYKANWYGRQIVKVGKFFASSQICNKCGYKNEEIKDLNIREWICPSCNETHDRDINASINILKEGLRLITIQNK

SEQ ID NO: 3281 - protein, 280 aa, unidentified
MIAVKKAYKFRIYPNKKQQELINKTFGCCRFVYNKYLAKRIDVYKNDKETFTYKQCSSDLTNLKKELNWLKEPDKFSLQNALKDLDNAYKKFFKEKAGFPKFKSKKINRFSYKTNFTNGNIMYCGQHIKLPKLGMVKVRDKQVPKGRILNATISKEPSGRYYVSLCCTDVDIEALENTNNHIGLDLGIKEFCISSCGEFIENPKYLKKSLNKLAKLQRELSRKTIGSLNRNKARLKVARLQEHIANQRNDFLQKLSTKLIKENDIICIEDLQVKNMIRNR

SEQ ID NO: 3282 - protein, 372 aa, unidentified
MIVVKKAYKFRMYPNKKQQELINKTFGCCRFVYNKYLAKRIEVYKNDKETFTYKQCSSDLTNLKKELKWLKEPDKFSLQNALKDLDNAYKKFFKEKAGFPKFKSKKINRFSYKTNFTNGNIMYCGQYIKLPKLGMVKIRDKQVPKGRILNATISKEPSGRYYVSLCCTDVDIEAFENTNNHIGLDLGIKEFCISSCGEFIENPKYLKKSLNKLAKLQRELSRKTIGSLNRNKARLKVARLQEHIANQRNDFLQKLSTKLIKENDIICIEDLQVKNMIRNRKLSRLISDVSWSEFIRQLEYKANWYGRQIVKVGKFFASSQICNKCGYKNEEVKDLNIREWICPSCNETHDRDINASINILKEGLRLITIQNK

SEQ ID NO: 3283 - protein, 372 aa, unidentified
MIAVKKAYKFRIYPNKKQQELINKTFGCCRFVYNKYLAKRIDVYKNDKETFTYKQCSSDLTNLKKELNWLKEPDKFSLQNALKDLDNAYKKFFKEKAGFPKFKSKKINRFSYKTNFTNGNIMYCGQHIKLPKLGMVKIRDKQVPKGRILNATISKEPSGRYYVSLCCTDVDIEAFENTNNHIGLDLGIKEFCISSCGEFIENPKYLKKSLNKLAKLQRELSRKTIGSLNRNKARLKVARFQEHIANQRNDFLQKLSTKLIKENDIICIEDLQVKNMIRNRKLSRLISDVSWSEFIRQLEYKANWYGRQIVKVGKFFASSQICNKCGYKNEEVKDLNIREWICPSCNETHDRDINASINILKEGLRLITIQNK

SEQ ID NO: 3284 - protein, 372 aa, unidentified
MIVVEKAYKFRMYPNKKQQELINKTFGCCRFVYNKYLAKRIDVYKNDKETFTYKQCSSDLTNLKKELNWLKEPDKFSLQNALKDLDNAYKKFFKEKAGFPKFKSKKINRFSYKTNFTNGNIMYCGQHIKLPKLGMVKIRDKQVPKGRILNATISKEPSGRYYVSLCCTDVDIEVFENTNNQIGLDLGIKEFCISSCGEFIENPKYLKKSLNKLAKLQRELSRKTIGSLNRNKARLKVARLQEHIANQRNDFLQKLSTKLIKENDIICIEDLQVKNMIRNRKLSRLISDVSWSEFIRQLEYKANWHGRQIVKVGKFFASSQICNKCGYKNEEVKNLNIREWICPSCNETHDRDINASINILKEGLRLITIQNK

SEQ ID NO: 3285 - protein, 372 aa, unidentified
MIAVKKAYKFRLYPNKKQQELINKTFGCCRFVYNKYLAKRIDVYKNNKETFTYKQCSSDLTNLKKELKWLKEPDKFSLQNALKDLDNAYKKFFKEKAGFPKFKSKKINRFSYKTNFTNGNIMYCGQHIKLPKLGIVKVRDKQVPKGRILNATISKEPSGRYYVSLCCTDVDIEAFENTNNHIGLDLGIKEFCISSCGEFIENPKYLKKSLNKLVKLQSELSRKTIGSLNRNKARLKVARLQEHIANQRKDFLQKLSTKLIKENDIICIEDLQVKNMIKNHKLSRSISDVSWSEFIRQLEYKANWYGRQIVKVGKFFASSQICNKCGYKNEEVKDLNIREWICPSCNETHDRDINASINILKEGLRLITIQNK

SEQ ID NO: 3286 - protein, 372 aa, unidentified
MIAVKKAYKFRMYPNKKQQELINKTFGCCRFVYNKYLAKRIDVYKSDKETFTYKQCSSDLTNLKKELKWLKEPDKFSLQNALKDLDNAYKKFFKEKAGFPKFKSKKINRFSYKTNFTNGNIMYCGQYIKLPKLGMVKIRDKQVPQGRILNATISKEPSGRYYVSLCCTDVDIEVFENTNNHIGLDLGIKEFCISSCGDFIENPKYLKKSLNKLAKLQRELSRKTIGSLNRNKARLKVAGLQEHIANQRNDFLQKLSTKLIKENDIICIEDLQVKNMIRNRKLSRLISDVSWSEFIRQLEYKANWYGRQIVKVGKFFASSQICNKCGYKNEEVKDLNIREWICPSCNETHDRDINASINILKEGLRLITIQNK

SEQ ID NO: 3287 - protein, 372 aa, unidentified
MIAVEKAYKFRMYPNKKQQELINKTFGCCRFVYNKYLAKRIDVYKNDKETFTYKQCSSDLTNLKKELNWLKEPDKFSLQNALKDLDNAYKKFFKEKAGFPKFKSKKINRFSYKTNFTNGNIMYCGQHIKLPKLGMVKIRDKQVPQGRILNATISKEPSGRYYVSLCCTDVDIEVFENTNNHIGLDLGIKEFCISSCGEFIENPKYLKKSLNKLAKLQRELSRKTIGSLNRNKARLKVARFQEHIANQRNDFLQKLSTKLIKENDIICIEDLQVKNMIRNRKLSRLISDVSWSEFIRQLEYKANWYGRQIVKVGKFFASSQICNKCGYKNEEVKDLNIREWICPSCNETHDRDINASINILKEGLRLITIQNK

SEQ ID NO: 3288 - protein, 372 aa, unidentified
MIAVEKAYKFRVYPNKKQQELINKTFGCCRFVYNKYLAKRIDVYKSDKETFTYKQCSSDLTNLKKELKWLKEPDKFSLQNALKDLDNAYKKFFKEKAGFPKFKSKKINRFSYKTNFTNGNIMYCGQHIKLPKLGMVKVRDKQVPQGRILNATISKEPSGRYYVSLCCTDVDIEVFENTNNHIGLDLGIKEFCISSCGDFIENPKYLKKSLNKLAKLQRELSRKTIGSLNRNKARLKVAGLQEHIANQRNDFLQKLSTKLIKENDIICIEDLQVKNMIRNRKLSRLISDVSWSEFIRQLEYKANWYGRKIVKVGKFFASSQICNKCGYKNEEVKDLNIREWICPSCNETHDRDINASINILKEGLRLITIQNK

SEQ ID NO: 3289 - protein, 372 aa, unidentified
MIAVKKAYKFRMYPNKKQQELINKTFGCCRFVYNKYLAKRIDVYKSDKETFTYKQCSSDLTNLKKELKWLKEPDKFSLQNALKDLDNAYKKFFKEKAGFPKFKSKKINRFSYKTNFTNGNIMYCGQHIKLPKLGMVKIRDKQVPQGRILNATISKEPSGRYYVSLCCTDVDIEVFENTNNHIGLDLGIKEFCISSCGDFIENPKYLKKSLNKLAKLQRELSRKTIGSLNRNKARLKVAGLQEHIANQRNDFLQKLSTKLIKENDIICIEDLQVKNMIKNHKLSRLISDVSWSEFIRQLEYKANWYGRKIVKVGKFFASSQICNKCGYKNEEVKDLNIREWICPSCNETHDRDINASINILKEGLRLITIQNK

SEQ ID NO: 3290 - protein, 370 aa, unidentified
MIAVKKAYKFRMYPNKKQQELINKTFGCCRFVYNKYLAKRIDVYKSDKETFTYKQCSSDLTNLKKELKWLKEPDKFSLQNALKDLDNAYKKFFKEKAGFPKFKSKKINRFSYKTNFTNGNIMYCGQYIKLPKLGMVKIRDKQVPQGRILNATISKEPSGRYYVSLCCTDVDIEVFENTNNHIGLDLGIKEFCISSCGDFIENPKYLKKSLNKLAKLQRELSRKTIGSLNRNKARLKVAGLQEHIANQRNDFLQKLSTKLIKENDIICIEDLQVKNMIRNRKLSRLISDVSWSEFIRQLEYKANWYGRKIVKVGKFFASSQICNKCGYKNEEVKDLNIREWICPSCNETHDRDINASINILKEGLRLITIQ

SEQ ID NO: 3291 - protein, 372 aa, unidentified
MIAVEKAYKFRMYPNKKQQELINKTFGCCRFVYNKYLAKRIEVYKNDKETFTYKQCSSDLTNLKKELKWLKEPDKFSLQNALKDLDNAYKKFFKKKAGFPKFKSKKINRFSYKTNFTNGNIVYCGQHIKLPKLGMVKVRDKQVPKGRILNATISKEPSGRYYVSLCCTDVDIEAFENTNNHIGLDLGIKEFCISSCGEFIENPKYLKKSLNKLAKLQRELSRKTIGSLNRNKARLKVARLQEHIANQRNDFLQKLSTKLIKENDIICIEDLQVKNMIRNRKLSRSISDVSWSEFIRQLEYKANWYGRKIVKVGKFFASSQICNKCGYKNEEVKDLNIREWICPSCNETHDRDINASINILKEGLRLITIQNK

SEQ ID NO: 3292 - protein, 372 aa, unidentified
MIVVEKAYKFRMYPNKKQQELINKTFGCCRFVYNKYLAKRIDVYKKHKETFTYKQCSSDLTNLKKELKWLKEPDKFSLQNALRDLDNAYKKFFKEKAGFPKFKSKKINRFSYKTNFTNGNIMYCGQHIKLPKLGMVKIRDKQVPQGRILNATISKEPSGRYYVSLCCTDVDIEVFENTNNHIGLDLGIKEFCISSCGEFIENPKYLKKSLNKLAKLQRELSRKTIGSLNRNKARLKVARFQEHIANQRKDFLQKLSTKLIKENDIICIEDLQVKNMIRNRKLSRLISDVSWSEFIRQLEYKANWHGRQIVKVGKFFASSQICNKCGYKNEEVKDLNIREWICPSCNETHDRDINASINILKEGLRLITIQNK

SEQ ID NO: 3293 - protein, 372 aa, unidentified
MIAVEKAYKFRVYPNKKQQELINKTFGCCRFVYNKYLAKRIDVYKNDKETFTYKQCSSDLTNLKKELKWLKEPDKFSLQNALKDLDNAYKKFFKEKAGFPKFKSKKINRFSYKTNFTNGNIMYCGQHIKLPKLGMVKVRDKQVPKGRILNATISKEPSGRYYVSLCCTDVDIEAFENTNNQIGLDLGIKEFCISSCGEFIENPKYLKKSLNKLVKLQSELSRKTIGSLNRNKARLKVARLQEHIANQRKDFLQKLSTKLIKENDIICIEDLQVKNMIKNHKLSRSISDVSWSEFIRQLEYKANWYGRQIVKVGKFFASSQICNKCGYKNEEVKDLNIREWICPSCNETHDRDINASINILKEGLRLITIQNK

SEQ ID NO: 3294 - protein, 372 aa, unidentified
MIAVKKAYKFRLYPNKKQQELINKTFGCCRFVYNKYLAKRIDVYKNNKETFTYKQCSSDLTNLKKELKWLKEPDKFSLQNALKDLDNAYKKFFKEKAGFPKFKSKKINRFSYKTNFTNGNIMYCGQHIKLPKLGMVKVRDKQVPKGRILNATISKEPSGRYYVSLCCTDVDIEAFENTNNQIGLDLGIKEFCISSCGEFIENPKYLKKSLNKLVKLQSELSRKTIGSLNRNKARLKVARLQEHIANQRKDFLQKLSTKLIKENDIICIEDLQVKNMIKNHKLSRSISDVSWSEFIRQLEYKANWYGRQIVKVGKFFASSQICNKCGYKNEEVKDLNIREWICPSCNETHDRDINASRNILKEGLRLITIQNK

SEQ ID NO: 3295 - protein, 372 aa, unidentified
MIAVEKAYKFRMYPNKKQQELINKTFGCCRFVYNKYLAKRIDVYKNDKETFTYKQCSSDLTNLKKELKWLKEPDKFSLQNALKDLDNAYKKFFKEKAGFPKFKSKKINRFSYKTNFTNGNIMYCGQHIKLPKLGMVKIRDKQVPQGRILNATISKEPSGRYYVSLCCTDVDIEVFENTNNHIGLDLGIKEFCISSCGEFIENPKYLKKSLNKLAKLQRELSRKTIGSLNRNKARLKVAGLQEHIANQRKDFLQKLSTKLIKENDIICIEDLQVKNMIRNRKLSRLISDVSWSEFIRQLEYKANWHGRQIVKVGKFFASSQICNKCGYKNEEVKDLNIREWICPSCNETHDRDINASINILKEGLRLITIQNK

SEQ ID NO: 3296 - protein, 372 aa, unidentified
MIAVKKAYKFRMYPNKKQQELINKTFGCCRFVYNKYLAKRIEVYKNDKETFTYKQCSSDLTNLKKELKWLKEPDKFSLQNALKDLDNAYKKFFKEKAGFPKFKSKKINRFSYKTNFTNGNIMYCGQYIKLPKLGMVKIRDKQVPQGRILNATISKEPSGRYYVSLCCTDVDIEAFENTNNHIGLDLGIKEFCISSCGDFIENPKYLKKSLNKLAKLQRELSRKTIGSLNRNKARLKVARLQEHIANQRNDFLQKLSTKLIKENDIICIEDLQVKNMIRNRKLSRLISDVSWSEFIRQLEYKANWHGRQIVKVGKFFASSQICNKCGYKNEEVKDLNIREWICPSCNETHDRDINASINILKEGLRIITIQNK

SEQ ID NO: 3297 - protein, 263 aa, unidentified
MIAVKKAYKFRMYPNKKQQELINKTFGCCRFVYNKYLAKRIDVYKNDKETFTYKQCSSDLTNLKKELKWLKEPDKFSLQNALKDLDNAYKKFFKEKAGFPKFKSKKINRFSYKTNFTNGNIMYCGQHIKLPKLGMVKIRDKQVPKGRILNATISKEPSGRYYVSLCCIDVDIEVFENTNNHIGLDLGIKEFCISSCGEFIENPKYLKKSLNKLAKLQRELSRKTIGSLNRNKARLKVARLQEHIANQRNDFLQKLSTKLIKEN

SEQ ID NO: 3298 - protein, 372 aa, unidentified
MIAVKKAYKFRMYPNKKQQELINKTFGCCRFVYNKYLAKRIDVYKSDKETFTYKQCSSDLTNLKKELKWLKEPDKFSLQNALKDLDNAYKKFFKEKAGFPKFKSKKINRFSYKTNFTNGNIMYCGQHIKLPKLGMVKIRDKQVPKGRILNATISKEPSGRYYVSLCCTDVDIEVFENTNNHIGLDLGIKEFCISSCGDFIENPKYLKKSLNKLAKLQRELSRKTIGSLNRNKARLKVAGLQEHIANQRNDFLQKLSTKLIKENDIICIEDLQVKNMIRNRKLSRLISDVSWSEFIRQLEYKANWYGRKIVKVGKFFASSQICNKCGYKNEEVKDLNIREWICPSCNETHDRDINASRNILKEGLRLITIQNK

SEQ ID NO: 3299 - protein, 372 aa, unidentified
MIAVKKAYKFRMYPNKKQQELINKTFGCCRFVYNKYLAKRIDVYKSDKETFTYKQCSSDLTNLKKELKWLKEPDKFSLQNALKDLDNAYKKFFKEKAGFPKFKSKKINRFSYKTNFTNGNIMYCGQHIKLPKLGMVKIRDKQVPQGRILNATISKEPSGRYYVSLCCTDVDIEAFENTNNHIGLDLGIKEFCISSCGEFIENPKYLKKSLNKLAKLQRELSRKTIGSLNRNKARLKVARFQEHIANQRNDFLQKLSTKLIKENDIICIEDLQVKNMIRNRKLSRLISDVSWSEFIRQLEYKANWYGRQIVKVGKFFASSQICNKCGYKNEEVKDLNIREWICPSCNETHDRDINASINILKEGLRLITIQNK

SEQ ID NO: 3300 - protein, 294 aa, unidentified
MIAVKKAYKFRIYPNKKQQELINKTFGCCRFVYNKYLAKRIDVYKNDKETFTYKQCSSDLTNLKKELKWLKEPDKFSLQNALKDLDNAYKKFFKEKAGFPKFKSKKINRFSYKTNFTNGNIMYCGQHIKLPKLGMVKIRDKQVPKGRILNATISKEASGRYYVSLCCTDVDIEVFENTNNQIGLDLGIKEFCISSCGEFIENPKYLKKSLNKLAKLQRELSRKTIGSLNRNKARLKVARLQEHIANQRNDFLKKLSTKLIKENDIICIEDLQVKNMIRNRKLSRLISDVSWSEF

SEQ ID NO: 3301 - protein, 372 aa, unidentified
MIAVKKAYKFRIYPNKKQQELINKTFGCCRFVYNKYLAKRIDVYKNDKETFTYKQCSSDLTNLKKELNWLKEPDKFSLQNALKDLENAYNKFFKEKAGFPKFKSKKTNRFSYKTNFTNGNIVYCGQHIKLPKLGMVKIRDKQVPKGRILNATISKEPSGRYYVSLCCTDVDIEVFENTNNQIGLDLGIKEFCISSCGDFIENPKYIKKSLNKLAKLQRELSRKTIGSLNRNKARLKVARLQEHIANQRKDFLQKLSTKLIKENDIICIEDLQVKNMIKNHKLSRSISDVSWSEFIRQLEYKANWYGRKIVKVGKFFASSQICNKCGYKNEEVKDLSIREWICPSCNETHDRDINASINILKEGLRLITIQNK

SEQ ID NO: 3302 - protein, 265 aa, unidentified
MIAVEKAYKFRMYPNKKQQELINKTFGCCRFVYNKYLAKRIEVYKNDKETFTYKQCSSDLTNLKKELKWLKEPDKFSLQNALKDLDNAYKKFFKKKAGFPKFKSKKINRFSYKTNFTNGNIVYCGQHIKLPKLGMVKVRDKQVPKGRILNATISKEPSGRYYVSLCCTDVDIEAFENTNNHIGLDLGIKEFCISSCGEFIENPKYLKKSLNKLAKLQRELSRKTIGSLNRNKARLKVARLQEHIANQRKDFLQKLSTKLIKENDI

SEQ ID NO: 3303 - protein, 372 aa, unidentified
MIVVEKAYKFRMYPNKKQQELINKTFGCCRFVYNKYLAKRIDVYKKHKETFTYKQCSSDLTNLKKELKWLKEPDKFSLQNALRDLDNAYKKFFKEKAGFPKFKSKKINRFSYKTNFTNGNIMYCGQYIKLPKLGMVKIRDKQVPQGRILNATISKEPSGRYYVSLCCTDVDIEAFENTNNHIGLDLGIKEFCISSCGDFIENPKYLKKSLNKLAKLQRELSRKTIGSLNRNKARLKVARFQEHIANQRNDFLQKLSTKLIKENDIICIEDLQVKNMIRNRKLSRLISDVSWSEFIRQLEYKANWYGRQIVKVGKFFASSQICNKCGYKNEEVKDLNIREWICPSCNETHDRDINASINILKEGLRLITIQNK

SEQ ID NO: 3304 - protein, 372 aa, unidentified
MIVVEKAYKFRMYPNKKQQELINKTFGCCRFVYNKYLAKRIDVYKKHKETFTYKQCSSDLTNLKKELKWLKEPDKFSLQNALRDLDNAYKKFFKEKAGFPKFKSKKINRFSYKTNFTNGNIMYCGQYIKLPKLGMVKIRDKQVPQGRILNATISKEPSGRYYVSLCCTDVDIGAFENTNNHIGLDLGIKEFCISSCGDFIENPKYLKKSLNKLAKLQRELSRKTIGSLNRNKARLKVARFQEHIANQRKDFLQKLSTKLIKENDIICIEDLQVKNMIRNRKLSRSISDVSWSEFIRQLEYKANWHGRQIVKVGKFFASSQICNKCGYKNEEVKDLNIREWICPSCNETHDRDINASINILKEGLRLITIQNK

SEQ ID NO: 3305 - protein, 372 aa, unidentified
MIAVKKAYKFRIYPNKKQQELINKTFGCCRFVYNKYLAKRIDVYKNDKETFTYKQCSSDLTNLKKELKWLKEPDKFSLQNALKDLDNAYKKFFKEKAGFPKFKSKKINRFSYKTNFTNGNIMYCGQHIKLPKLGMVKIRDKQVPKGRILNATISKEASGRYYVSLCCTDVDIEVFENTNNQIGLDLGIKEFCISSCGEFIENPKYLKKSLNKLAKLQRELSRKTIGSLNRNKARLKVARLQEHIANQRNDFLKKLSTKLIKENDIICIEDLQVKNMIRNRKLSRLISDVSWSEFIRQLEYKANWHGRQIVKVGKFFASSQICNKCGYKNEEVKDLNIREWICPSCNETHDRDINASINILKEGLRIITIQNK

SEQ ID NO: 3306 - protein, 372 aa, unidentified
MIAVKKAYKFRMYPNKKQQELINKTFGCCRFVYNKYLAKRIEVYKNDKETFTYKQCSSDLTNLKKELKWLKEPDKFSLQNALKDLDNAYKKFFKEKAGFPKFKSKKINRFSYKTNFTNGNIMYCGQHIKLPKLGMVKIRDKQVPQGRILNATISKEPSGRYYVSLCCTDVDIEAFENTNNQIGLDLGIKEFCISSCGEFIENPKYLKKSLNKLAKLQRELSRKTIGSLNRNKARLKVARLQEHIANQRNDFLQKLSTKLIKENDIICIEDLQVKNMIRNRKLSRLISDVSWSEFIRQLEYKANWYGRQIVKVGKFFASSQICNKCGYKNEEVKDLNIREWICPSCNETHDRDINASINILKEGLRLITIQNK

SEQ ID NO: 3307 - protein, 372 aa, unidentified
MIAVKKAYKFRMYPNKKQQELINKTFGCCRFVYNKYLAKRIDVYKNDKETFTYKQCSSDLTNLKKELKWLKEPDKFSLQNALKDLDNAYKKFFKEKAGFPKFKSKKINRFSYKTNFTNGNIMYCGQHIKLPKLGMVKIRDKQVPKGRILNATISKEPSGRYYVSLCCTDVDIEAFENTNNHIGLDLGIKEFCISSCGEFIENPKYLKKSLNKLVKLQSELSRKTIGSLNRNKARLKVARLQEHIANQRKDFLQKLSTKLIKENDIICIEDLQVKNMIKNHKLSRSISDVSWSEFIRQLEYKANWYGRQIVKVGKFFASSQICNKCGYKNEEVKDLNIREWICPSCNETHDRDINASINILKEGLRLITIQNK

SEQ ID NO: 3308 - protein, 372 aa, unidentified
MIAVKKAYKFRMYPNKKQQELINKTFGCCRFVYNKYLAKRIDVYKNDKETFTYKQCSSDLTNLKKELKWLKEPDKFSLQNALKDLDNAYKKFFKEKAGFPKFKSKKINRFSYKTNFTNGNIMYCGQHIKLPKLGMVKIRDKQVPQGRILNATISKEPSGRYYVSLCCTDVDIEAFENTNNQIGLDLGIKEFCISSCGEFIENPKYLKKSLNKLAKLQRELSRKTIGSLNRNKARLKVARLQEHIANQRNDFLQKLTTKLIKENDIICIEDLQVKNMIKNHKLSRLISDVSWSEFIRQLEYKANWHGRQIVKVGKFFASSQICNKCGYKNEEVKNLNIREWICPSCNETHDRDINASRNILKEGLRLITIQNK

SEQ ID NO: 3309 - protein, 372 aa, unidentified
MIAVKKAYKFRIYPNKKQQELINKTFGCCRFVYNKYLAKRIDVYKNDKETFTYKQCSSDLTNLKKELNWLKEPDKFSLQNALKDLENAYNKFFKEKAGFPKFKSKKTNRFSYKTNFTNGNIVYCGQHIKLPKLGMVKIRDKQVPKGRILNATISKEPSGRYYVSLCCTDVDIEVFENTNNQIGLDLGIKEFCISSCGDFIENPKYIKKSLNKLAKLQRELSRKTIGSLNRNKARLKVARLQEHIANQRKDFLQKLSTKLIKENDIICIEDLQVKNMIKNHKLSRSISDVSWSEFIRQLEYKANWYGRKIVKVGKFFASSQICNKCGYKNEEVKDLSIREWICPSCNETNDRDINASINILKEGLRLITIQNK

SEQ ID NO: 3310 - protein, 372 aa, unidentified
MIAVKKAYKFRIYPNKKQQELINKTFGCCRFVYNKYLAKRIDVYKNDKETFTYKQCSSDLTNLKKELNWLKEPDKFSLQNALKDLENAYNKFFKEKAGFPKFKSKKTNRFSYKTNFTNGNIVYCGQHIKLPKLGMVKIRDKQVPKGRILNATISKEPSGRYYVSLCCTDVDIEVFENTNNHIGLDLGIKEFCISSCGDFIENPKYIKKSLNKLAKLQRELSRKTIGSLNRNKARLKVARLQEHIANQRKDFLQKLSTKLIKENDIICIEDLQVKNMIKNHKLSRSISDVSWSEFIRQLEYKANWYGRKIVKVGKFFASSQICNKCGYKNEEVKDLSIREWICPSCNETHDRDINASINILKEGLRLITIQNK

SEQ ID NO: 3311 - protein, 372 aa, unidentified
MIAVKKAYKFRIYPNKKQQELINKTFGCCRFVYNKYLAKRIDVYKNDKETFTYKQCSSDLTNLKKELNWLKEPDKFSLQNALKDLENAYNKFFKEKAGFPKFKSKKTNRFSYKTNFTNGNIVYCGQHIKLPKLGMVKIRDKQVPKGRILNATISKEPSGRYYVSLCCTDVDIEVFENTNNHIGLDLGIKEFCISSCGDFIENPKYLKKSLNKLAKLQSELSRKTIGSLNRNKARLKVARLQEHIANQRKDFLQKLSTKLIKENDIICIEDLQVKNMIKNHKLSRSISDVSWSEFIRQLEYKANWYGRKIVKVGKFFASSQICNKCGYKNEEVKDLNIREWICPSCNETHNRDINASINILKEGLRLITIQNK

SEQ ID NO: 3312 - protein, 372 aa, unidentified
MIAVKKAYKFRLYPNKKQQELINKTFGCCRFVYNKYLAKRIDVYKNNKETFTYKQCSSDLTNLKKELKWLKEPDKFSLQNALKDLDNAYKKFFKEKAGFPKFKSKKINRFSYKTNFTNGNIMYCGQHIKLPKLGMVKVRDKQVPKGRILNATISKEPSGRYYVSLCCTDVDIEAFENTNNHIGLDLGIKEFCISSCGEFIENPKYLKKSLNKLAKLQRELSRKTIGSLNRNKARLKVARLQEHIANQRKDFLQKLSTKLIKENDIICIEDLQVKNMIKNHKLSRSISDVSWSEFIRQLEYKANWYGRQIVKVGKFFASSQICNKCGYKNEEVKDLNIREWICPSCNETHDRDINASINILKEGLRLITIQNK

SEQ ID NO: 3313 - protein, 372 aa, unidentified
MIAVEKAYKFRMYPNKKQQELINKTFGCCRFVYNKYLAKRIEAYKNNKETFTYKQCSSDLTNLKKELKWLKEPDKFSLQNALKDLDNAYKKFFKEKAGFPKFKSKKINRFSYKTNFTNGNIMYCGQHIKLPKLGMVKVRDKQVPKGRILNATISKEPSGRYYVSLCCTDVDIEAFENTNNQIGLDLGIKEFCISSCGDFIENPKYLKKSLSKLAKLQRELSRKTIGSLNRNKARLKVARLQEHIANQRKDFLQKLSTKLIKENDIICIEDLQVKNMIRNHKLSRLISDVSWSEFIRQLEYKANWYGRQIVKVGKFFASSQICNKCGYKNEEVKDLNIREWICPSCNETHDRDINASINILKEGLRLITIQNK

SEQ ID NO: 3314 - protein, 369 aa, unidentified
MEKAYKFRMYPNKKQQELINKTFGCCRFVYNKYLAKRIDVYKNDKETFTYKQCSSDLTNLKKELNWLKEPDKFSLQNALKDLENAYNKFFKEKAGFPKFKSKKINRFSYKTNFTNGNIMYFSQHIKLPKLGMVKIRDKQVPKGRILNATISKEPSGRYYVSLCCTDVDIEAFENTNNQIGLDLGIKEFCISSCGEFIENPKYLKKSLNKLAKLQRELSRKTIGSLNRNKARLKVARLQEHIANQRNDFLQKLSTKLIKENDIICIEDLQVKNMIRNRKLSRLISDVSWSEFIRQLEYKANWYGRQIVKVGKFFASSQICNKCGYKNEEVKNLNIREWICPSCNETHDRDINASINILKEGLRLITIQNK

SEQ ID NO: 3315 - protein, 369 aa, unidentified
MEKAYKFRMYPNKKQQELINKTFGCCRFVYNKYLSKRIDVYKNDKETFTYKQCSSDLTNLKKELKWLKEPDKFSLQNALKDLDNAYEKFFKEKAGFPKFKSKKINRFSYKTNFTNGNIMYCGQHIKLPKLGMVKIRDKQVPQGRILNATISKEPSGRYYVSLCCTDVDIEAFENTNNQIGLDLGIKEFCISSCGEFIENPKYLKKSLNKLAKLQRELSRKTIGSLNRNKARLKVARLQEHIANQRNDFLQKLSTKLIKENDIICIEDLQVKNMIRNRKLSRLISNVSWSEFIRQLEYKANWHGRQIVKVGKFFASSQICNKCGYKNEEVKDLNIREWICPSCNETHDRDINASINILKEGLRLITIQNK

SEQ ID NO: 3316 - protein, 369 aa, unidentified
MEKAYKFRMYPNKKQQELINKTFGCCRFVYNKYLAKRIDVYKNDKETFTYKQCSSDLTNLKKELNWLKEPDKFSLQNALKDLENAYNKFFKEKAGFPKFKSKKINRFSYKTNFTNGNIMYCGQHIKLPKLGMVKIRDKQVPKGRILNATISKEPSGRYYVSLCCTDVDIEAFENTNNQIGLDLGIKEFCISSCGEFIENPKYLKKSLNKLAKLQRELSRKTIGSLNRNKARLKVARLQEHIANQRNDFLQKLSTKLIKENDIICIEDLQVKNMIRNRKLSRLISDVSWSEFIRQLEYKANWYGRQIVKVGKFFASSQICNKCGYKNEEVKNLNIREWICPSCNETHDRDINASINILKEGLRLITIQNK

SEQ ID NO: 3317 - protein, 372 aa, unidentified
MVVVEKAYKFRMYPNKKQQELINKTFGCCRFVYNKYLAKRIEVYKNDKETFTYKQCSSDLTNLKKELNWLKEPDKFSLQNALKDLDNAYEKFFKKKAGFPKFKSKKINRFSYKTNFTNGNIMYCGQHIKLPKLGMVKIRDKQVPKGRILNATIPKEPSGRYYVSLCCTDVDIEVFENTNNQIGLDLGIKEFCISSCGDFIENPKYLKKSLNKLAKLQRELSRKTIGSLNRNKARLKVARLQEHIANQRNDFLQKLSTKLIKENDIICIEDLQVKNMIRNHKLSRLISDVSWSEFIRQLEYKANWYGRQIVKVGKFFASSQICNKCGYKNEEVKNLNIREWICPSCNETHDRDINASINILKEGLRLITIQNK

SEQ ID NO: 3318 - protein, 372 aa, unidentified
MIAVKKAYKFRLYPNKKQQELINKTFGCCRFVYNKYLAKRIDVYKNNKETFTYKQCSSDLTNLKKELKWLKEPDKFSLQNALKDLDNAYKKFFKEKAGFPKFKSKKINRFSYKTNFTNGNIMYCGQHIKLPKLGMVKVRDKQVPKGRILNATISKEPSGRYYVSLCCTDVDIEAFENTNNQIGLDLGIKEFCISSCGEFIENPKYLKKSLNKLVKLQSELSRKTIGSLNRNKARLKVARLQEHIANQRKDFLQKLSTKLIKENDIICIEDLQVKNMIKNHKLSRSISDVSWSEFIRQLEYKANWYGRKIVKVGKFFASSQICNKCGYKNEEVKDLNIREWICPSCNETHDRDINASRNILKEGLRLITIQNK

SEQ ID NO: 3319 - protein, 372 aa, unidentified
MVVVEKAYKFRMYPNKKQQELINKTFGCCRFVYNKYLAKRIDVYKNDKETFTYKQCSSDLTNLKKELNWLKEPDKFSLQNALKDLENAYNKFFKEKAGFPKFKSKKINRFSYKTNFTNGNIMYCGQHIKLPKLGMVKIRDKQVPKGRILNATISKEPSGRYYVSLCCTDVDIEAFENTNNQIGLDLGIKEFCISSCGEFIENPKYLKKSLNKLAKLQRELSRKTIGSLNRNKARLKVARLQEHIANQRNDFLQKLSTKLIKENDIICIEDLQVKNMIRNRKLSRLISDVSWSEFIRQLEYKANWYGRQIVKVGKFFASSQICNKCGYKNEEVKNLNIREWICPSCNETHDRDINASINILKEGLRLITIQNK

SEQ ID NO: 3320 - protein, 372 aa, unidentified
MIAVEKAYKFRVYPNKKQQELINKTFGCCRFVYNKYLAKRIDVYKSDKETFTYKQCSSDLTNLKKELKWLKEPDKFSLQNALKDLDNAYKKFFKEKAGFPKFKSKKINRFSYKTNFTNGNIMYCGQYIKLPKLGMVKIRDKQVPQGRILNATISKEPSGRYYVSLCCTDVDIEVFENTNNHIGLDLGIKEFCISSCGDFIENPKYLKKSLNKLAKLQRELSRKTIGSLNRNKARLKVARLQEHIANQRNDFLQKLSTKLIKENDIICIEDLQVKNMIRNRKLSRSISDVSWSEFIRQLEYKSNWYGRKIVKVGKFFASSQICNKCGYKNEEVKDLNIREWICPSCNETHDRDINASINILKEGLRLITIQNK

SEQ ID NO: 3321 - protein, 372 aa, unidentified
MVVVEKAYKFRMYPNKKQQELINKTFGCCRFVYNKYLAKRIDVYKNDKETFTYKQCSSDLTNLKKELNWLKEPDKFSLQNALKDLENAYNKFFKEKAGFPKFKSKKINRFSYKTNFTNGNIMYFSQHIKLPKLGMVKIRDKQVPKGRILNATISKEPSGRYYVSLCCTDVDIEAFENTNNQIGLDLGIKEFCISSCGEFIENPKYLKKSLNKLAKLQRELSRKTIGSLNRNKARLKVARLQEHIANQRNDFLQKLSTKLIKENDIICIEDLQVKNMIRNRKLSRLISDVSWSEFIRQLEYKANWYGRQIVKVGKFFASSQICNKCGYKNEEVKNLNIREWICPSCNETHDRDINASINILKEGLRLITIQNK

SEQ ID NO: 3322 - protein, 372 aa, unidentified
MIAVKKAYKFRMYPNKKQQELINKTFGCCRFVYNKYLAKRIEVYKNDKETFTYKQCSSDLTNLKKELKWLKEPDKFSLQNALKDLDNAYKKFFKEKAGFPKFKSKKINRFSYKTNFTNGNIMYCGQYIKLPKLGMVKIRDKQVPQGRILNATISKEPSGRYYVSLCCTDVDIEAFENTNNHIGLDLGIKEFCISSCGEFIENPKYLKKSLNKLAKLQRELSRKTIGSLNRNKARLKVARLQEHIANQRNDFLQKLSTKLIKENDIICIEDLQVKNMIRNRKLSRLISDVSWSEFIRQLEYKANWHGRQIVKVGKFFASSQICNKCGYKNEEVKDLNIREWICPSCNETHDRDINASINILKEGLRLITIQNK

SEQ ID NO: 3323 - protein, 335 aa, unidentified
MIAVKKAYKFRIYPNKKQQELINKTFGCCRFVYNKYLAKRIDVYKNDKETFTYKQCSSDLTNLKKELNWLKEPDKFSLQNALKDLENAYNKFFKEKAGFPKFKSKKTNRFSYKTNFTNGNIVYCGQHIKLPKLGMVKIRDKQVPKGRILNATISKEPSGRYYVSLCCTDVDIEVFENTNNQIGLDLGIKEFCISSCGDFIENPKYLKKSLNKLAKLQSELSRKTIGSLNRNKARLKVARLQEHIANQRKDFLQKLSTKLIKENDIICIEDLQVKNMIKNHKLSRSISDVSWSEFIRQLEYKANWYGRKIVKVGKFFASSQICNKCGYKNEEVKDL

SEQ ID NO: 3324 - protein, 372 aa, unidentified
MIAVEKAYKFRMYPNKKQQELINKTFGCCRFVYNKYLAKRIEVYKNDKETFTYKQCSSDLTNLKKELKWLKEPDKFSLQNALRDLDNAYKKFFKEKAGFPKFKSKKINRFSYKTNFTNGNIVYCGQHIKLPKLGMVKIRDKQVPKGRILNATISKEPSGRYYVSLCCTDVDIEVFENTNNHIGLDLGIKEFCISSCGEFIENPKYLKKSLNKLAKLQRELSRKTIGSLNRNKARLKVARLQEHIANQRKDFLQKLSTKLIKENDIICIEDLQVKNMIRNRKLSRLISDVSWSEFIRQLEYKANWHGRQIVKVGKFFASSQICNKCGYKNEEVKNLNIREWICPSCNETHDRDINASINILKEGLRLITIQNK

SEQ ID NO: 3325 - protein, 369 aa, unidentified
MEKAYKFRMYPNKKQQELINKTFGCCRFVYNKYLAKRIEVYKNDKETFTYKQCSSDLTNLKKELKWLKEPDKFSLQNALRDLDNAYKKFFKEKAGFPKFKSKKINRFSYKTNFTNGNIMYCGQHIKLPKLGMVKIRDKQVPKGRILNATISKEPSGRYYVSLCCTDVDIEVFENTNNHIGLDLGIKEFCISSCGEFIENPKYLKKSLNKLAKLQRELSRKTIGSLNRNKARLKVARLQEHIANQRNDFLQKLSTKLIKENDIICIEDLQVKNMIKNRRLSRLISDVSWSEFIRQLEYKANWHGRKIVKVGKFFASSQICNKCGYKNEEVKDLNIREWICPSCNETHDRDINASINILKEGLRLITIQNK

SEQ ID NO: 3326 - protein, 369 aa, unidentified
MKKAYKFRMYPNKKQQELINKTFGCCRFVYNKYLAKRIDVYKNNKETFTYKQCSSDLTNLKKELNWLKEPDKFSLQNALKDLDNAYKKFFKEKAGFPKFKSKKINRFSYKTNFTNGNIMYLGQHIKLPKLGMVKVRDKQVPKGRILNATISKEPSGRYYVSLCCTDVDIEAFENTNNQIGLDLGIKEFCISSCGDFIENPKYLKKSLNKLAKLQRELSRKTIGSLNRNKARLKVARLQEHIANQRKDFLQKLSTKLIKENDIICIEDLQVKNMIKNHKLSRLISDVSWSEFIRQLEYKANWYGRQIVKVGKFFASSQICNKCGYKNEEVKDLNIREWICPSCNETHDRDINAGMNILKEGLRLITIQNK

SEQ ID NO: 3327 - protein, 369 aa, unidentified
MKKAYKFRMYPNKKQQELINKTFGCCRFVYNKYLAKRIDVYKNDKETFTYKQCSSDLTNLKKELKWLKEPDKFSLQNALKDLDNAYKKFFKEKAGFPKFKSKKINRFSYKTNFTNGNIMYCGQHIKLPKLGMVKIRDKQVPQGRILNATISKEPSGRYYVSLCCTDVDIEVFENTNNQIGLDLGIKEFCISSCGEFIENPKYFKKSLNKLAKLQRELSRKTIGSLNRNKARLKVARLQEHIANQRNDFLQKLSTKLIKENDIICIEDLQVKNMIKNHKLSRLISDVSWSEFIRQLEYKANWYGRQIVKVGKFFASSQICNKCGYKNEEVKNLNIREWICPSCNETHDRDINASRNILKEGLRLITIQNK

SEQ ID NO: 3328 - protein, 301 aa, unidentified
MEKAYKFRMYPNKKQQELINKTFGCCRFVYNKYLAKRIDVYKNNKETFTYKQCSSDLTNLKKELNWLKEPDKFSLQNALKDLDNAYKKFFKEKAGFPKFKSKKINRFSYKTNFTNGNIMYCGQHIKLPKLGMVKIRDKQVPKGRILNATISKEPSGRYYVSLCCTDVDIEVFENTNNQIGLDLGIKEFCISSCGEFIENPKYLKKSLKKLAKLQRELSRKTIGSLNRNKARLKVARLQEHIANQRNDFLQKLSTKLIKENDIICIEDLQVKNMIKNRXEYLMLLYLKNQVVDIMYHYAVLM

SEQ ID NO: 3329 - protein, 372 aa, unidentified
MAVVEKAYKFRMYPNKKQQELINKTFGCCRFVYNKYLAKRIEVYKNNKETFTYKQCSSDLTNLKKELKWLKEPDKFSLQNALKDLDNAYKKFFKEKAGFPKFKSKKINRFSYKTNFTNGNIMYCGQHIKLPKLGMVKIRDKQVPKGRILNATISKEPSGRYYVSLCCIDVDIEVFENTNNHIGLDLGIKEFCISSCGEFIENPKYLKKSLNKLAKLQRELSRKTIGSLNRNKARLKVARLQEHIANQRNDFLQKLSTKLIKENDIICIEDLQVKNMIRNRKLSRLISDVSWSEFIRQLEYKANWYGRQIVKVGKFFASSQICNKCGYKNEEVKNLNIREWICPSCNETHDRDINASINILKEGLRLITIQNK

SEQ ID NO: 3330 - protein, 372 aa, unidentified
MVVVEKAYKFRMYPNKKQQELINKTFGCCRFVYNKYLAKRIDVYKNNKETFTYKQCSSDLTNLKKELKWLKEPDKFSLQNALKDLDNAYKKFFKEKAGFPKFKSKKINRFSYKTNFTNGNIMYCGQHIKLPKLGMVKIRDKQVPKGRILNATISKEPSGRYYVSLCCTDVDIEAFENTNNHIGLDLGIKEFCISSCGEFIENPKYLKKSLNKLAKLQRELSRKTIGSLSRNKARLKVARLQEHIANQRNDFLQKLSTKLIKENDIICIEDLQVKNMIRNRKLSRSISDVSWSEFIRQLEYKANWYGRQIVKVGKFFASSQICNKCGYKNEEVKDLNIREWICPSCNETHDRDINASINILKEGLRLITIQNK

SEQ ID NO: 3331 - protein, 372 aa, unidentified
MIAVKKAYKFRMYPNKKQQELINKTFGCCRFVYNKYLAKRIEVYKNDKETFTYKQCSSDLTNLKKELNWLKEPDKFSLQNALKDLDNAYKKFFKEKAGFPKFKSKKINRFSYKTNFTNGNIMYCGQYIKLPKLGMVKIRDKQVPQGRILNATISKEPSGRYYVSLCCIDVDIEVFENTNNHIGLDLGIKEFCISSCGEFIENPKYLKKSLNKLAKLQRELSRKTIGSLNRNKARLKVARLQEHIANQRNDFLQKLSTKLIKENDIICIEDLQVKNMIRNRKLSRSISDVSWSEFIRQLEYKANWHGRQIVKVGKFFASSQICNKCGYKNEEVKDLNIREWICPSCNETHDRDINASINILKEGLRLITIQNK

SEQ ID NO: 3332 - protein, 372 aa, unidentified
MIAVKKAYKFRMYPNKKQQELINKTFGCCRFVYNKYLAKRIDVYKNDKETFTYKQCSSDLTNLKKELKWLKEPDKFSLQNALKDLDNAYKKFFKEKAGFPKFKSKKINRFSYKTNFTNGNIMYCGQHIKLPKLGMVKIRDKQVPQGRILNATISKEPSGRYYVSLCCTDVDIEAFENTNNHIGLDLGIKEFCISSCGEFIENPKYLKKSLNKLAKLQRELSRKTIGSLNRNKARLKVAGLQEHIANQRNDFLQKLSTKLIKENDIICIEDLQVKNMIRNRKLSRLISDVSWSEFIRQLEYKANWYGRKIVKVGKFFASSQICNKCGYKNEEVKDLNIREWICPSCNETHDRDINASINILKEGLRLITIQNK

SEQ ID NO: 3333 - protein, 372 aa, unidentified
MIAVKKAYKFRMYPNKKQQELINKTFGCCRFVYNKYLAKRIEVYKNDKETFTYKQCSSDLTNLKKELKWLKEPDKFSLQNALKDLDNAYKKFFKEKAGFPKFKSKKINRFSYKTNFTNGNIMYCGQYIKLPKLGMVKIRDKQVPQGRILNATISKEPSGRYYVSLCCTDVDIEAFENTNNHIGLDLGIKEFCISSCGEFIENPKYLKKSLNKLAKLQRELSRKTIGSLNRNKARLKVARLQEHIANQRNDFLQKLSTKLIKENDIICIEDLQVKNMIRNRKLSRLISDVSWSEFIRQLEYKANWYGRKIVKVGKFFASSQICNKCGYKNEEVKDLNIREWICPSCNETHDRDINASINILKEGLRLITIQNK

SEQ ID NO: 3334 - protein, 331 aa, unidentified
MAVVEKAYKFRMYPNKKQQELINKTFGCCRFVYNKYLAKRIEVYKNNKETFTYKQCSSDLTNLKKELKWLKEPDKFSLQNALKDLDNAYKKFFKEKAGFPKFKSKKINRFSYKTNFTNGNIMYCGQYIKLPKLGMVKVRDKQVPQGRILNATISKEPSGRYYVSLCCTDVDIEVFENTNNHIGLDLGIKEFCISSCGEFIENPKYLKKSLNKLAKLQRELSRKTIGSLNRNKARLKVARLQEHIANQRNDFLQKLSTKLIKENDIICIEDLQVKNMIRNRKLSRLISDVSWSEFVRQLKYKANWHGRQIVKVGKFFASSQICNKCGYKNEE

SEQ ID NO: 3335 - protein, 372 aa, unidentified
MIAVKKAYKFRMYPNKKQQELINKTFGCCRFVYNKYLAKRIEVYKNDKETFTYKQCSSDLTNLKKELKWLKEPDKFSLQNALKDLDNAYKKFFKEKAGFPKFKSKKINRFSYKTNFTNGNIMYCGQYIKLPKLGMVKIRDKQVPQGRILNATISKEPSGRYYVSLCCTDVDIEVFENTNNHIGLDLGIKEFCISSCGEFIENPKYLKKSLNKLAKLQRELSRKTIGSLNRNKARLKVARLQEHIANQRNDFLQKLSTKLIKENDIICIEDLQVKNMIRNRKLSRLISDVSWSEFIRQLEYKANWHGRQIVKVGKFFASSQICNKCGYKNEEVKDLNIREWICPSCNETHDRDINASINILKEGLRLITIQNK

SEQ ID NO: 3336 - protein, 372 aa, unidentified
MVVVEKAYKFRMYPNKKQQELINKTFGCCRFVYNKYLAKRIEVYKNDKETFTYKQCSSDLTNLKKELKWLKEPDKFSLQNALKDLDNAYKKFFKEKAGFPKFKSKKINRFSYKTNFTNGNIMYCGQYIKLPKLGMVKIRDKQVPQGRILNATISKEPSGRYYVSLCCTDVDIEVFENTNNHIGLDLGIKEFCISSCGEFIENPKYLKKSLNKLAKLQRELSRKTIGSLNRNKARLKVARLQEHIANQRNDFLQKLSTKLIKENDIICIEDLQVKNMIRNRKLSRLISDVSWSEFVRQLKYKANWHGRQIVKVGKFFASSQICNKCGYKNEEVKDLNIREWICPSCNETHDRDINASINILKEGLRLITIQNK

SEQ ID NO: 3337 - protein, 372 aa, unidentified
MIAVKKAYKFRIYPNKKQQELINKTFGCCRFVYNKYLAKRIDVYKNDKETFTYKQCSSDLTNLKKELNWLKEPDKFSLQNALKDLENAYNKFFKEKAGFPKFKSKKTNRFSYKTNFTNGNIVYCGQHIKLPKLGMVKIRDKQVPKGRILNATISKEPSGRYYVSLCCTDVDIEVFENTNNHIGLDLGIKEFCISSCGDFIENPKYLKKSLNKLAKLQSELSRKTIGSLNRNKARLKVARLQEHIANQRKDFLQKLSTKLIKENDIICIEDLQVKNMIKNHKLSRSISDVSWSEFIRQLEYKANWYGRKIVKVGKFFASSQICNKCGYKNEEVKDLSIREWICPSCNETHDRDINASINILKEGLRLITIQNK

SEQ ID NO: 3338 - protein, 372 aa, unidentified
MIEVKKAYKFRMYPNKKQQELINKTFGCCRFVYNKYLAKRIEVYKNDKETFTYKQCSSDLTNLKKELKWLKEPDKFSLQNALKDLDNAYKKFFKEKAGFPKFKSKKINRFSYKTNFTNGNIVYCGQHIKLPKLGMVKVRDKQVPKGRILNATISKEPSGRYYVSLCCTDVDIEVFENTNNQIGLDLGIKEFCISSCGEFIENPKYLKKSLNKLAKLQRELSRKTIGSLNRNKARLKVARLQEHIANQRNDFLQKLSTKLIKENDIICIEDLQVKNMIRNRKLSRLISDVSWSEFVRQLEYKANWHGRQIVKVGKFFASSQICNKCGYKNEEVKDLNIREWICPSCNETHDRDINASINILKEGLRLITIQNK

SEQ ID NO: 3339 - protein, 372 aa, unidentified
MIAVEKAYKFRVYPNKKQQELINKTFGCCRFVYNKYLAKRIDVYKNDKETFTYKQCSSDLTNLKKELKWLKEPDKFSLQNALKDLDNAYKKFFKEKAGFPKFKSKKINRFSYKTNFTNGNIMYCGQHIKLPKLGMVKVRDKQVPKGRILNATISKEPSGRYYVSLCCTDVDIEAFENTNNQIGLDLGIKEFCISSCGEFIENPKYLKKSLNKLVKLQSELSRKTIGSLNRNKARLKVARLQEHIANQRNDFLQKLSTKLIKENDIICIEDLQVKNMIKNHKLSRSISDVSWSEFIRQLEYKANWYGRQIVKVGKFFASSQICNKCGYKNEEVKDLNIREWICPSCNETHDRDINASINILKEGLRLITIQNK

SEQ ID NO: 3340 - protein, 372 aa, unidentified
MIAVKKAYKFRLYPNKKQQELINKTFGCCRFVYNKYLAKRIDVYKNNKETFTYKQCSSDLTNLKKELKWLKEPDKFSLQNALKDLDNAYKKFFKEKAGFPKFKSKKINRFSYKTNFTNGNIMYCGQHIKLPKLGMVKVRDKQVPKGRILNATISKEPSGRYYVSLCCTDVDIEAFENTNNHIGLDLGIKEFCISSCGEFIENPKYLKKSLNKLVKLQSELSRKTIGSLNRNKARLKVARLQEHIANQRKDFLQKLSTKLIKENDIICIEDLQVKNMIKNHKLSRSISDVSWSEFIRQLEYKANWYGRQIVKVGKFFASSQICNKCGYKNEEVKDLNIREWICPSCNETHDRDINASRNILKEGLRLITIQNK

SEQ ID NO: 3341 - protein, 372 aa, unidentified
MIAVKKAYKFRIYPNKKQQELINKTFGCCRFVYNKYLAKRIDVYKNDKETFTYKQCSSDLTNLKKELNWLKEPDKFSLQNALKDLENAYNKFFKEKAGFPKFKSKKTNRFSYKTNFTNGNIVYCGQHIKLPKLGMVKIRDKQVPKGRILNATISKEPSGRYYVSLCCTDVDIEVFENTNNQIGLDLGIKEFCISSCGEFIENPKYLKKSLNKLAKLQSELSRKTIGSLNRNKARLKVARLQEHIANQRKDFLQKLSTKLIKENDIICIEDLQVKNMIKNRKLSRLISDVSWSEFIHQLKYKANWYGRQIVKVGKFFASSQICNKCGYKNEEVKDLNIREWICPSCNETHDRDINASINILKEGLRLITIQNK

SEQ ID NO: 3342 - protein, 369 aa, unidentified
MEKAYKFRIYPNKKQQELINKTFGCCRFVYNKYLAKRIDVYKSDKETFTYKQCSSDLTNLKKELKWLKEPDKFSLQNALKDLDNAYKKFFKEKAGFPKFKSKKINRFSYKTNFTNGNIMYCGQHIKLPKLGMVKVRDKQIPQGRILNATISKEPSGRYYVSLCCTDVDIEVFENTNNQIGLDLGIKEFCISSCGEFIENPKYLKRSLNKLAKLQRELSRKTIGSLNRNKARLKVAGLQEHIANQRNDFLQKLSTKLIKENDIICIEDLQVKNMIRNRKLSRLISDVSWSEFVRQLEYKANWHGRQIVKVGKFFASSQICNKCGYKNEEVKNLNIREWICPSCNETHDRDINASINILKEGLRLITIQNK

SEQ ID NO: 3343 - protein, 369 aa, unidentified
MEKAYKFRIYPNKKQQELINKTFGCCRFVYNKYLAKRIDVYKSDKETFTYKQCSSDLTNLKKELKWLKEPDKFSLQNALKDLDNAYKKFFKEKAGFPKFKSKKINRFSYKTNFTNGNIMYCGQHIKLPKLGMVKVRDKQIPQGRILNATISKEPSGRYYVSLCCTDVDIEVFENTNNQIGLDLGIKEFCISSCGEFIENPKYLKRSLNKLAKLQRELSRKTIGSLNRNKARLKVAGLQEHIANQRNDFLQKLSTKLIKENDIICIEDLQVKNMIKNRKLSRLISDVSWSEFVRQLEYKANWHGRQIVKVGKFFASSQICNKCGYKNEEVKDLNIREWICPSCNETHDRDINASINILKEGLRLITIQNK

SEQ ID NO: 3344 - protein, 310 aa, unidentified
MEKAYKFRMYPNKKQQELINKTFGCCRFVYNKYLAKRIEVYKNDKETFTYKQCSSDLTNLKKELKWLKEPDKFSLQNALKDLDNAYKKFFKEKAGFPKFKSKKINRFSYKTNFTNGNIMYFSQHIKLPKLGMVKIRDKQVPKGRILNATISKEPSGRYYVSLCCTDVDIEAFENTNNQIGLDLGIKEFCISSCGEFIENPKYFKKSLNKLAKLQRELSRKTIGSLNRNKARLKVARLQEHIANQRNDFLQKLSTKLIKENDIICIEDLQVKNMIKNRKLSRLISDVSWSEFIHQLKYKANWYGRQIVKVG

SEQ ID NO: 3345 - protein, 367 aa, unidentified
MEKAYKFRIYPNKKQQELINKTFGCCRFVYNKYLAKRIDVYKSDKETFTYKQCSSDLTNLKKELKWLKEPDKFSLQNALKDLDNAYKKFFKEKAGFPKFKSKKINRFSYKTNFTNGNIMYCGQHIKLPKLGMVKVRDKQIPQGRILNATISKEPSGRYYVSLCCTDVDIEVFENTNNQIGLDLGIKEFCISSCGEFIENPKYLKRSLNKLAKLQRELSRKTIGSLNRNKARLKVAGLQEHIANQRNDFLQKLSTKLIKENDIICIEDLQVKNMIRNCKLSRLISDVSWSEFIRQLEYKANWHGRQIVKVGKFFASSQICNKCGYKNEEVKDLSIREWICPSCNETHDRDINASINILKEGLRLITXX

SEQ ID NO: 3346 - protein, 369 aa, unidentified
MEKAYKFRMYPNKKQQELINKTFGCCRFVYNKYLAKRIEVYKNDKETFTYKQCSSDLTNLKKELKWLKEPDKFSLQNALKDLDNAYKKFFKEKAGFPKFKSKKINRFSYKTNFTNGNIMYCGQHIKLPKLGMVKVRDKQIPQGRILNATISKEPSGRYYVSLCCTDVDIEVFENTNNQIGLDLGIKEFCISSCGEFIENPKYLKKSLNKLAKLQRELSRKTIGSLNRNKARLKVARLQEHIANQRNDFLQKLSTKLIKENDIICIEDLQVKNMIRNRKLSRLISDVSWSEFVRQLEYKANWHGRQIVKVGKFFASSQICNKCGYKNEEVKDLNIREWICPSCNETHDRDINASINILKEGLRLITIQNK

SEQ ID NO: 3347 - protein, 369 aa, unidentified
MEKAYKFRMYPNKKQQELINKTFGCCRFVYNKYLAKRIEVYKNDKETFTYKQCSSDLTNLKKELKWLKEPDKFSLQNALRDLDNAYKKFFKEKAGFPKFKSKKINRFSYKTNFTNGNIMYCGQHIKLPKLGMVKVRDKQVPKGRILNATISKEPSGRYYVSLCCTDVDIEAFENTNNHIGLDLGIKEFCISSCGEFIENPKYLKKSLNKLAKLQRELSRKTIGSLNRNKARLKVARLQEHIANQRNDFLQKLSTKLIKENDIICIEDLQVKNMIKNRRLSRLISDVSWSEFIRQLEYKANWHGRKIVKVGKFFASSQICNKCGYKNEEVKNLNIREWICPSCNETHDRDINASINILKEGLRLITIQNK

SEQ ID NO: 3348 - protein, 369 aa, unidentified
MEKAYKFRIYPNKKQQELINKTFGCCRFVYNKYLAKRIDVYKSDKETFTYKQCSSDLTNLKKELKWLKEPDKFSLQNALKDLDNAYKKFFKEKAGFPKFKSKKINRFSYKTNFTNGNIMYCGQHIKLPKLGMVKVRDKQIPQGRILNATISKEPSGRYYVSLCCTDVDIEVFENTNNQIGLDLGIKEFCISSCGEFIENPKYLKRSLNKLAKLQRELSRKTIGSLNRNKARLKVAGLQEHIANQRNDFLQKLSTKLIKENDIICIEDLQVKNMIRNRKLSRLISDVSWSEFIRQLEYKANWHGRQIVKVGKFFASSQICNKCGYKNEEVKNLNIREWICPSCNETHDRDINASINILKEGLRLITIQNK

SEQ ID NO: 3349 - protein, 309 aa, unidentified
MEKAYKFRIYPNKKQQELINKTFGCCRFVYNKYLAKRIDVYKNDKETFTYKQCSSDLTNLKKELNWLKEPDKFSLQNALKDLENAYNKFFKEKAGFPKFKSKKTNRFSYKTNFTNGNIVYCGQHIKLPKLGMVKIRDKQVPKGRILNATISKEPSGRYYVSLCCTDVDIEVFENTNNQIGLDLGIKEFCISSCGEFIENPKYLKKSLNKLAKLQRELSRKTIGSLNRNKARLKVARLQEHIANQRNDFLQKLSTKLIKENDIICIEDLQVKNMIRNCKLSRLISDVSWSXXXXKKLISLEYIQIKNNKS

SEQ ID NO: 3350 - protein, 372 aa, unidentified
MIEVKKAYKFRMYPNKKQQELINKTFGCCRFVYNKYLAKRIEVYKNDKETFTYKQCSSDLTNLKKELKWLKEPDKFSLQNALKDLDNAYKKFFKEKAGFPKFKSKKINRFSYKTNFTNGNIVYCGQHIKLPKLGMVKVRDKQVPKGRILNATISKEPSGRYYVSLCCTDVDIEAFENTNNHIGLDLGIKEFCISSCGEFIENPKYLKKSLNKLAKLQRELSRKTIGSLNRNKARLKVARLQEHIANQRNDFLQKLSTKLIKENDIICIEDLQVKNMIRNRKLSRLISDVSWSEFVRQLEYKANWHGRQIVKVGKFFASSQICNKCGYKNEEVKDLNIREWICPSCNETHDRDINASINILKEGLRLITIQNK

SEQ ID NO: 3351 - protein, 372 aa, unidentified
MIAVKKAYKFRIYPNKKQQELINKTFGCCRFVYNKYLAKRIDVYKNDKETFTYKQCSSDLTNLKKELNWLKEPDKFSLQNALKDLENAYNKFFKEKAGFPKFKSKKTNRFSYKTNFTNGNIVYCGQHIKLPKLGMVKIRDKQVPKGRILNATISKEPSGRYYVSLCCTDVDIEVFENTNNQIGLDLGIKEFCISSCGEFIENPKYLKKSLNKLAKLQSELSRKTIGSLNRNKARLKVARLQEHIANQRKDFLQKLSTKLIKENDIICIEDLQVKNMIKNHKLSRSISDVSWSEFIRQLEYKANWYGRKIVKVGKFFASSQICNKCGYKNEEVKDLSIREWICPSCNETHDRDINASINILKEGLRLITIQNK

SEQ ID NO: 3352 - protein, 372 aa, unidentified
MIEVKKAYKFRMYPNKKQQELINKTFGCCRFVYNKYLAKRIEVYKNDKETFTYKQCSSDLTNLKKELKWLKEPDKFSLQNALKDLDNAYKKFFKEKAGFPKFKSKKINRFSYKTNFTNGNIMYCGQHIKLPKLGMVKVRDKQVPKGRILNATISKEPSGRYYVSLCCTDVDIEVFENTNNQIGLDLGIKEFCISSCGEFIENPKYLKKSLNKLAKLQRELSRKTIGSLNRNKARLKVARLQEHIANQRNDFLQKLSTKLIKENDIICIEDLQVKNMIRNRKLSRLISDVSWSEFIRQLEYKANWYGRQIVKVGKFFASSQICNKCGYKNEEVKDLNIREWICPSCNETHDRDINASINILKEGLRLITIQNK

SEQ ID NO: 3353 - protein, 372 aa, unidentified
MIAVKKAYKFRIYPNKKQQELINKTFGCCRFVYNKYLAKRIDVYKNDKETFTYKQCSSDLTNLKKELNWLKEPDKFSLQNALKDLENAYNKFFKEKAGFPKFKSKKTNRFSYKTNFTNGNIVYCGQHIKLPKLGMVKIRDKQVPKGRILNATISKEPSGRYYVSLCCTDVDIEVFENTNNQIGLDLGIKEFCISSCGDFIENPKYLKKSLNKLAKLQSELSRKTIGSLNRNKARLKVARLQEHIANQRKDFLQKLSTKLIKENDIICIEDLQVKNMIKNHKLSRSISDVSWSEFIRQLEYKANWYGRKIVKVGKFFASSQICNKCGYKNEEVKNLNIREWICPSCNETHDRDINASINILKEGLRLITIQNK

SEQ ID NO: 3354 - protein, 372 aa, unidentified
MIAVKKAYKFRIYPNKKQQELINKTFGCCRFVYNKYLAKRIDVYKNDKETFTYKQCSSDLTNLKKELNWLKEPDKFSLQNALKDLENAYNKFFKEKAGFPKFKSKKTNRFSYKTNFTNGNIVYCGQHIKLPKLGMVKIRDKQVPKGRILNATISKEPSGRYYVSLCCTDVDIEVFENTNNQIGLDLGIKEFCISSCGDFIENPKYIKKSLNKLAKLQRELSRKTIGSLNRNKARLKVARLQEHIANQRNDFLQKLSTKLIKENDIICIEDLQVKNMIKNHKLSRSISDVSWSEFIRQLEYKANWYGRKIVKVGKFFASSQICNKCGYKNEEVKNLNIREWICPSCNETHDRDINASINILKEGLRLITIQNK

SEQ ID NO: 3355 - protein, 372 aa, unidentified
MIAVKKAYKFRIYPNKKQQELINKTFGCCRFVYNKYLAKRIDVYKNDKETFTYKQCSSDLTNLKKELNWLKEPDKFSLQNALKDLENAYNKFFKEKAGFPKFKSKKTNRFSYKTNFTNGNIMYCGQHIKLPKLGMVKIRDKQVPKGRILNATISKEPSGRYYVSLCCTDVDIEVFENTNNQIGLDLGIKEFCISSCGDFIENPKYLKKSLNKLAKLQSELSRKTIGSLNRNKARLKVARLQEHIANQRKDFLQKLSTKLIKENDIICIEDLQVKNMIKNHKLSRSISDVSWSEFIRQLEYKANWYGRKIVKVGKFFASSQICNKCGYKNEEVKNLNIREWICPSCNETHDRDINASINILKEGLRLITIQNK

SEQ ID NO: 3356 - protein, 372 aa, unidentified
MIAVKKAYKFRMYPNKKQQELINKTFGCCRFVYNKYLAKRIEVYKNDKETFTYKQCSSDLTNLKKELKWLKEPDKFSLQNALKDLDNAYKKFFKEKAGFPKFKSKKINRFSYKTNFTNGNIMYCGQYIKLPKLGMVKIRDKQVPQGRILNATISKEPSGRYYVSLCCTDVDIEAFENTNNHIGLDLGIKEFCISSCGDFIENPKYLKKSLNKLAKLQRELSRKTIGSLNRNKARLKVARLQEHIANQRNDFLQKLSTKLIKENDIICIEDLQVKNMIRNRKLSRLISDVSWSEFIRQLEYKANWHGRQIVKVGKFFASSQICNKCGYKNEEVKDLNIREWICPSCNETHDRDINASINILKEGLRLITIQNK

SEQ ID NO: 3357 - protein, 346 aa, unidentified
MIVVEKAYKFRMYPNKKQQELINKTFGCCRFVYNKYLAKRIDVYKKHKETFTYKQCSSDLTNLKKELKWLKEPDKFSLQNALRDLDNAYKKFFKEKAGFPKFKSKKINRFSYKTNFTNGNIMYCGQYIKLPKLGMVKIRDKQVPQGRILNATISKEPSGRYYVSLCCTDVDIGAFENTNNHIGLDLGIKEFCISSCGDFIENPKYLKKSLNKLAKLQRELSRKTIGSLNRNKARLKVARFQEHIANQRKDFLQKLSTKLIKENDIICIEDLQVKNMIRNRKLSRLISDVSWSEFIRQLEYKANWHGRQIVKVGKFFASSQICNKCGYKNEEVKDLNIREWICPSCN

SEQ ID NO: 3358 - protein, 254 aa, unidentified
MIVVEKAYKFRMYPNKKQQELINKTFGCCRFVYNKYLAKRIDVYKKHKETFTYKQCSSDLTNLKKELKWLKEPDKFSLQNALRDLDNAYKKFFKEKAGFPKFKSKKINRFSYKTNFTNGNIMYCGQHIKLPKLGMVKIRDKQVPQGRILNATISKEPSGRYYVSLCCTDVDIEVFENTNNHIGLDLGIKEFCISSCGEFIENPKYLKKSLNKLAKLQRELSRKTIGSLNRNKARLKVAGLQEHIANQRKDFLQK

SEQ ID NO: 3359 - protein, 372 aa, unidentified
MIVVEKAYKFRMYPNKKQQELINKTFGCCRFVYNKYLAKRIDVYKNDKETFTYKQCSSDLTNLKKELKWLKEPDKFSLQNALKDLDNAYKKFFKEKAGFPKFKSKKINRFSYKTNFTNGNIMYCGQHIKLPKLGMVKIRDKQVPQGRILNAAISKEPSGRYYVSLCCTDVDIEAFENTNNQIGLDLGIKEFCISSCGEFIENPKYLKKSLNKLAKLQRELSRKTIGSLNRNKARLKVARLQEHIANQRNDFLQKLSTKLIKENDIICIEDLQVKNMIRNSKLSRLISDVSWSEFIRQLEYKANWYGRQIVKVGKFFASSQICNKCGYKNEEVKDLNIREWICPSCNETHDRDINASINILKEGLRLITIQNK

SEQ ID NO: 3360 - protein, 372 aa, unidentified
MIAVEKAYKFRMYPNKKQQELINKTFGCCRFVYNKYLAKRIDVYKNDKETFTYKQCSSDLTNLKKELKWLKEPDKFSLQNALKDLDNAYKKFFKEKAGFPKFKSKKINRFSYKTNFTNGNIMYCGQYIKLPKLGMVKIRDKQVPQGRILNATISKEPSGRYYVSLCCTDVDIEAFENTNNHIGLDLGIKEFCISSCGEFIENPKYLKKSLNKLAKLQRELSRKTIGSLNRNKARLKVAGLQEHIANQRNDFLQKLSTKLIKENDIICIEDLQVKNMIRNRKLSRLISDVSWSEFIRQLEYKANWYGRKIVKVGKFFASSQICNKCGYKNEEVKDLNIREWICPSCNETHDRDINASINILKEGLRLITIQNK

SEQ ID NO: 3361 - protein, 372 aa, unidentified
MIAVEKAYKFRMYPNKKQQELINKTFGCCRFVYNKYLAKRIEVYKNDKETFTYKQCSSDLTNLKKELKWLKEPDKFSLQNALKDLDNAYKKFFKEKAGFPKFKSKKINRFSYKTNFTNGNIVYCGQHIKLPKLGMVKVRDKQVPKGRILNATISKEPSGRYYVSLCCTDVDIEAFENTNNQIGLDLGIKEFCISSCGEFIENPKYLKKSLNKLAKLQRELSRKTIGSLNRNKARLKAARLQEHIANQRNDFLQKLSTKLIKENDIICIEDLQVKNMIRNRKLSRLISDVSWSEFIRQLEYKANWYGRQIVKVGKFFASSQICNKCGYKNEEVKDLNIREWICPSCNETHDRDINASINILKEGLRLITIQNK

SEQ ID NO: 3362 - protein, 372 aa, unidentified
MIAVKKAYKFRMYPNKKQQELINKTFGCCRFVYNKYLAKRIDVYKNDKETFTYKQCSSDLTNLKKELKWLKEPDKFSLQNALKDLDNAYKKFFKEKAGFPKFKSKKINRFSYKTNFTNGNIMYCGQHIKLPKLGMVKIRDKQVPQGRILNATISKEPSGRYYVSLCCTDVDIEAFENTNNQIGLDLGIKEFCISSCGEFIENPKYFKKSLNKLAKLQRELSRKTIGSLNRNKARLKVARLQEHIANQRNDFLQKLTTKLIKENDIICIEDLQVKNMIKNHKLSRLISDVSWSEFIRQLEYKANWHGRQIVKVGKFFASSQICNKCGYKNEEVKNLNIREWICPSCNETHDRDINASRNILKEGLRLITIQNK

SEQ ID NO: 3363 - protein, 372 aa, unidentified
MIAVKKAYKFRMYPNKKQQELINKTFGCCRFVYNKYLAKRIDVYKSDKETFTYKQCSSDLTNLKKELKWLKEPDKFSLQNALKDLDNAYKKFFKEKAGFPKFKSKKINRFSYKTNFTNGNIMYCGQHIKLPKLGMVKIRDKQVPQGRILNATISKEPSGRYYVSLCCTDVDIEVFENTNNHIGLDLGIKEFCISSCGDFIENPKYLKKSLNKLAKLQRELSRKTIGSLNRNKARLKVAGLQEHIANQRNDFLQKLSTKLIKENDIICIEDLQVKNMIRNRKLSRLISDVSWSEFIRQLEYKANWYGRKIVKVGKFFASSQICNKCGYKNEEVKDLNIREWICPSCNETHDRDINASRNILKEGLRLITIQNK

SEQ ID NO: 3364 - protein, 372 aa, unidentified
MAVVEKAYKFRMYPNKKQQELINKTFGCCRFVYNKYLAKRIEVYKNDKETFTYKQCSSDLTNLKKELKWLKEPDKFSLQNALKDLDNAYKKFFKEKAGFPKFKSKKINRFSYKTNFTNGNIMYCGQYIKLPKLGMVKIRDKQVPQGRILNATISKEPSGRYYVSLCCTDVDIEAFENTNNHIGLDLGIKKFCISSCGEFIENPKYLKKSLNKLAKLQRELSRKTIGSLNRNKARLKVARLQEHIANQRNDFLQKLSTKLIKENDIICIEDLQVKNMIKNRKLSRLISDVSWSEFVRQLEYKANWYGRQIVKVGKFFASSQICNKCGHKNEEVKDLNIREWICPSCNETHDRDINASINILKEGLRLITIQNK

SEQ ID NO: 3365 - protein, 369 aa, unidentified
MEKAYKFRMYPNKKQQELINKTFGCCRFVYNKYLAKRIEVYKNDKETFTYKQCSSDLTNLKKELKWLKEPDKFSLQNALKDLENAYNKFFKEKAGFPKFKSKKTNRFSYKTNFTNGNIMYCGQHIKLPKLGMVKIRDKQVPKGRILNATISKEPSGRYYVSLCCTDVDIEVFENTNNQIGLDLGIKEFCISSCGEFIENPKYLKKSLNKLAKLQRELSRKTIGSLNRNKARLKVARLQEHIANQRNDFLQKLSTKLIKENDIICIEDLQVKNMIKNRRLSRLISDVSWSEFIRQLEYKANWHGRKIVKVGKFFASSQICNKCGYKNEEVKNLNIREWICPSCNETHDRDINASINILKEGLRLITIQNK

SEQ ID NO: 3366 - protein, 321 aa, unidentified
MIVVEKAYKFRMYPNKKQQELINKTFGCCRFVYNKYLAKRIDVYKKHKETFTYKQCSSDLTNLKKELKWLKEPDKFSLQNALRDLDNAYKKFFKEKAGFPKFKSKKINRFSYKTNFTNGNIMYCGQYIKLPKLGMVKIRDKQVPQGRILNATISKEPSGRYYVSLCCTDVDIGAFENTNNHIGLDLGIKEFCISSCGDFIENPKYLKKSLNKLAKLQRELSRKTIGSLNRNKARLKVARFQEHIANQRKDFLQKLSTKLIKENDIICIEDLQVKNMIRNRKLSRLISDVSWSEFIRQLEYKANWHGRQIVKVGKFFASSQI

SEQ ID NO: 3367 - protein, 372 aa, unidentified
MIAVEKAYKFRIYPNKKQQELINKTFGCCRFVYNKYLAKKIDVYKNNKETFTYKQCSSDLTNLKKELKWLKEPDKFSLQNALKDLDNAYKKFFKKKAGFPKFKSKKINRFSYKTNFTNGNIMYCGQHIKLPKLGMVKIRDKQVPQGRILNATISKEPSGRYYVSLCCTDVDIEVFENTNNHIGLDLGIKEFCISSCGEFIENPKYLKKSLNKLAKLQRELSRKTIGSLNRNKARLKVARFQEHIANQRNDFLQKLSTKLIKENDIICIEDLQVKNMIRNRKLSRLISDVSWSEFIRQLEYKANWYGRQIVKVGKFFASSQICNKCGYKNEEVKDLNIREWICPSCNETHDRDINASINILKEGLRLITIQNK

SEQ ID NO: 3368 - protein, 372 aa, unidentified
MIAVEKAYKFRIYPNKKQQELINKTFGCCRFVYNKYLAKKIDVYKNNKETFTYKQCSSDLTNLKKELKWLKEPDKFSLQNALKDLDNAYKKFFKKKAGFPKFKSKKINRFSYKTNFTNGNIMYCGQHIKLPKLGMVKIRDKQVPQGRILNATISKEPSGRYYVSLCCTDVDIEAFENTNNHIGLDLGIKEFCISSCGEFIENPKYLKKSLNKLAKLQRELSRKTIGSLNRNKARLKVARLQEHIANQRNDFLQKLSTKLIKENDIICIEDLQVKNMIRNRKLSRLISDVSWSEFIRQLEYKANWYGRQIVKVGKFFASSQICNKCGYKNEEVKDLNIREWICPSCNETHDRDINASINILKEGLRLITIQNK

SEQ ID NO: 3369 - protein, 372 aa, unidentified
MIAVKKAYKFRLYPNKKQQELINKTFGCCRFVYNKYLAKRIDVYKNNKETFTYKQCSSDLTNLKKELKWLKEPDKFSLQNALKDLDNAYKKFFKEKAGFPKFKSKKINRFSYKTNFTNGNIMYCGQHIKLPKLGMVKIRDKQVPQGRILNATISKEPSGRYYVSLCCTDVDIEAFENTNNHIGLDLGIKEFCISSCGEFIENPKYLKKSLNKLAKLQSELSRKTIGSLNRNKARLKVARLQEHIANQRKDFLQKLSTKLIKENDIICIEDLQVKNMIKNHKLSRSISDVSWSEFIRQLEYKANWHGRQIVKVGKFFASSQICNKCGYKNEEVKNLNIREWICPSCNETHDRDINASINILKEGLRLITIQNK

SEQ ID NO: 3370 - protein, 372 aa, unidentified
MIVVEKAYKFRMYPNKKQQELINKTFGCCRFVYNKYLAKRIEVYKNDKETFTYKQCSSDLTNLKKELKWLKEPDKFSLQNALKDLDNAYKKFFKEKAGFPKFKSKKINRFSYKTNFTNGNIMYCGQYIKLPKLGMVKIRDKQVPQGRILNATISKEPSGRYYVSLCCTDVDIEVFENTNNQIGLDLGIKEFCISSCGDFIENPKYLKKSLNKLAKLQRELSRKTIGSLNRNKARLKVARLQEHIANQRNDFLQKLSTKLIKENDIICIEDLQVKNMIRNRKLSRLISDVSWSEFIRQLEYKANWYGRQIVKVGKFFASSQICNKCGYKNEEVKDLNIREWICPSCNETHDRDINASINILKEGLRLITIQNK

SEQ ID NO: 3371 - protein, 372 aa, unidentified
MAVVEKAYKFRMYPNKKQQELINKTFGCCRFVYNKYLAKRIEVYKNDKETFTYKQCSSDLTNLKKELKWLKEPDKFSLQNALKDLDNAYKKFFKEKAGFPKFKSKKINRFSYKTNFTNGNIMYCGQHIKLPKLGMVKIRDKQVPQGRILNATISKEPSGRYYVSLCCTDVDIEVFENTNNQIGLDLGIKEFCISSCGEFIENPKYLKKSLNKLAKLQRELSRKTIGSLNRNKARLKVARLQEHIANQRNDFLQKLSTKLIKENDIICIEDLQVKNMIRNRKLSRLISDVSWSEFVRQLEYKANWHGRQIVKVGKFFASSQICNKCGYKNEEVKDLNIREWICPSCNEIHDRDINASINILKEGLRLITIQNK

SEQ ID NO: 3372 - protein, 330 aa, unidentified
MIVVEKAYKFRMYPNKKQQELINKTFGCCRFVYNKYLAKRIDVYKNDKETFTYKQCSSDLTNLKKELKWLKEPDKFSLQNALKDLDNAYEKFFKEKAGFPKFKSKKINRFSYKTNFTNGNIMYCGQHIKLPKLGMVKIRDKQVPQGRILNATISKEPSGRYYVSLCCTDVDIEAFENTNNHIGLDLGIKEFCISSCGDFIENPKYLKKSLSKLAKLQRELSRKTIGSLNRNKARLKVARLQEHIANQRNDFLQKLSTKLIKENDIICIEDLQVKNMIRNRKLSRLISDVSWSEFIRQLEYKANWHGRQIVKVGKFFASSQICNKCGYKNE

SEQ ID NO: 3373 - protein, 324 aa, unidentified
MIVVEKAYKFRMYPNKKQQELINKTFGCCRFVYNKYLAKRIDVYKNDKETFTYKQCSSDLTNLKKELKWLKEPDKFSLQNALKDLDNAYEKFFKEKAGFPKFKSKKINRFSYKTNFTNGNIMYCGQHIKLPKLGMVKIRDKQVPQGRILNATISKEPSGRYYVSLCCTDVDIEAFENTNNHIGLDLGIKEFCISSCGDFIENPKYLKKSLSKLAKLQRELSRKTIGSLNRNKARLKVARLQEHIANQRNDFLQKLSTKLIKENDIICIEDLQVKNMIRNRKLSRLISDVSWSEFIRQLEYKANWHGRQIVKVGKFFASSQICNK

SEQ ID NO: 3374 - protein, 372 aa, unidentified
MIAVKKAYKFRMYPNKKQQELINKTFGCCRFVYNKYLAKRIDVYKNDKETFTYKQCSSDLTNLKKELKWLKEPDKFSLQNALKDLDNAYKKFFKEKAGFPKFKSKKINRFSYKTNFTNGNIMYCGQHIKLPKLGMVKVRDKQVPKGRILNATISKEPSGRYYVSLCCTDVDIEAFENTNNHIGLDLGIKEFCISSCGEFIENPKYLKKSLNKLVKLQSELSRKTIGSLNRNKARLKVARLQEHIANQRKDFLQKLSTKLIKENDIICIEDLQVKNMIKNHKLSRSISDVSWSEFIRQLEYKANWYGRQIVKVGKFFASSQICNKCGYKNEEVKDLNIREWICPSCNETHDRDINASINILKEGLRLITIQNK

SEQ ID NO: 3375 - protein, 372 aa, unidentified
MIAVEKAYKFRMYPNKKQQELINKTFGCCRFVYNKYLAKRIEVYKNDKETFTYKQCSSDLTNLKKELKWLKEPDKFSLQNALKDLENAYEKFFKEKAGFPKFKSKKTNRFSYKTNFTNGNIMYCGQHIKLPKLGMVKIRDKQVPKGRILNATISKEPSGRYYVSLCCTDVDIEAFENTNNQIGLDLGIKEFCISSCGEFIENPKYLKKSLNKLAKLQRELSRKTIGSLNRNKARLKVARLQEHIANQRNDFLQKLSTKLIKENDIICIEDLQVKNMIRNHKLSRLISDVSWSEFIRQLEYKANWYGRQIVKVGKFFASSQICNKCGYKNEEVKDLNIRDWICPSCNETHDRDINASINILKEGLRLITIQNK

SEQ ID NO: 3376 - protein, 292 aa, unidentified
MIVVEKAYKFRIYPNKKQQELINKTFGCCRFVYNKYLAKRIDVYKNDKETFTYKQCSSDLTNLKKELNWLKEPDKFSLQNALKDLENAYNKFFKEKAGFPKFKSKKTNRFSYKTNFTNGNIVYCGQHIKLPKLGMVKIRDKQVPKGRILNATISKEPSGRYYVSLCCTDVDIEVFENTNNQIGLDLGIKEFCISSCGEFIENPKYLKKSLNKLAKLQRELSRKTIGSLNRNKARLKVARLQEHIANQRNDFLQKLSTKLIKENDIICIEDLQVKNMIRNCKLSRLISDVSWS

SEQ ID NO: 3377 - protein, 372 aa, unidentified
MVVVEKAYKFRMYPNKKQQELINKTFGCCRFVYNKYLAKRIEVYKNDKETFTYKQCSSDLTNLKKELKWLKEPDKFSLQNALKDLDNAYKKFFKEKAGFPKFKSKKINRFSYKTNFTNGNIMYFSQHIKLPKLGMVKIRDKQVPQGRILNATISKEPSGRYYVSLCCTDVDIEAFENTNNHIGLDLGIKEFCISSCGEFIENPKYLKKSLNKLAKLQRELSRKTIGSLNRNKARLKVARLQEHIANQRKDFLQKLSTKLIKENDIICIEDLQVKNMIRNHKLSRSISDVSWSEFIRQLEYKANWYGRKIVKVGKFFASSQICNKCGYKNEEVKNLNIREWICPSCNETHDRDINASINILKEGLRLITIQNK

SEQ ID NO: 3378 - protein, 372 aa, unidentified
MIAVEKAYKFRMYPNKKQQELINKTFGCCRFVYNKYLAKRIDVYKNDKETFTYKQCSSDLTNLKKELKWLKEPDKFSLQNALKDLENAYEKFFKEKTGFPKFKSKKTNRFSYKTNFTNGNIMYCGQHIKLPKLGMVKIRDKQVPKGRILNATISKEPSGRYYVSLCCTDVDIEAFENTNNQIGLDLGIKEFCISSCGEFIENPKYLKKSLSKLAKLQRELSRKTIGSLNRNKARLKVARLQEHIANQRNDFLQKLSTKLIKENDIICIEDLQVKNMIRNHKLSRLISDVSWSEFIRQLEYKANWHGRQIVKVGKFFASSQICNKCGYKNEEVKDLNIRDWICPSCNETHDRDINASINILKEGLRLITIQNK

SEQ ID NO: 3379 - protein, 372 aa, unidentified
MVVVEKAYKFRIYPNKKQQELINKTFGCCRFVYNKYLAKRVDAYKNDKETFTYKQCSSDLTNLKKELNWLKEPDKFSLQNALKDLENAYEKFFKKKAGFPKFKSKKINRFSYKTNFTNGNIMYCGQHIKLPKLGMVKIRDKQVPKGRILNATISKEQSGRYYVSLCCTDVDIEVFENTNNQIGLDLGIKEFCISSCGDFIENPKYLKKSLSKLAKLQKELSRKTIGSLNRNKARLKVARLQEHIANQRNDFLQKLSTKLIKENDIICIEDLQVKNMIKNHKLSRLISDVSWSEFIRQLEYKANWYGRQIVKVGKFFASSQICNKCGYKNEEVKDLNIREWICPSCNETHDRDINASINILKEGLRLITIQNK

SEQ ID NO: 3380 - protein, 372 aa, unidentified
MIAVKKAYKFRLYPNKKQQELINKTFGCCRFVYNKYLAKRIDVYKNNKETFTYKQCSSDLTNLKKELKWLKEPDKFSLQNALKDLDNAYKKFFKEKAGFPKFKSKKINRFSYKTNFTNGNIMYCGQHIKLPKLGMVKIRDKQVPQGRILNATISKEPSGRYYVSLCCTDVDIEAFENTNNHIGLDLGIKEFCISSCGEFIENPKYLKKSLNKLAKLQRELSRKTIGSLNRNKARLKVARLQEHIANQRKDFLQKLSTKLIKENDIICIEDLQVKNMIKNHKLSRLISDVSWSEFIRQLEYKANWYGRQIVKVGKFFASSQICNKCGYKNEEVKNLNIREWICPSCNETHDRDINASINILKEGLRLITIQNK

SEQ ID NO: 3381 - protein, 372 aa, unidentified
MIVVEKAYKFRMYPNKKQQELINKTFGCCRFVYNKYLAKRIDVYKKHKETFTYKQCSSDLTNLKKELKWLKEPDKFSLQNALRDLDNAYKKFFKEKAGFPKFKSKKINRFSYKTNFTNGNIMYCGQHIKLPKLGMVKIRDKQVPKGRILNATISKEPSGRYYVSLCCTDVDIEAFENTNNQIGLDLGIKEFCISSCGEFIENPKYLKKSLNKLAKLQRELSRKTIGSLNRNKARLKVARLQEHIANQRKDFLQKLSTKLIKENDIICIEDLQVKNMIRNRKLSRLISDVSWSEFIRQLEYKANWHGRQIVKVGKFFASSQICNKCGYKNEEVKDLNIREWICPSCNETHDRDINASINILKEGLRLITIQNK

SEQ ID NO: 3382 - protein, 372 aa, unidentified
MIAVEKAYKFRMYPNKKQQELINKTFGCCRFVYNKYLAKRIDVYKNDKETFTYKQCSSDLTNLKKELKWLKEPDKFSLQNALKDLENAYEKFFKEKAGFPKFKSKKTNRFSYKTNFTNGNIMYCGQHIKLPKLGMVKIRDKQVPKGRILNATISKEPSGRYYVSLCCTDVDIEAFENTNNQIGLDLGIKEFCISSCGEFIENPKYLKKSLNKLAKLQRELSRKTIGSLNRNKARLKVARLQEHIANQRNDFLQKLSTKLIKENDIICIEDLQVKNMIRNHKLSRLISDVSWSEFIRQLEYKANWHGRQIVKVGKFFASSQICNKCGYKNEEVKNLNIREWICPSCNETHDRDINASINILKEGLRLITIQNK

SEQ ID NO: 3383 - protein, 372 aa, unidentified
MIVVEKAYKFRMYPNKKQQELINKTFGCCRFVYNKYLAKRIEVYKNDKETFTYKQCSSDLTNLKKELKWLKEPDKFSLQNALKDLDNAYKKFFKEKAGFPKFKSKKINRFSYKTNFTNGNIMYCGQHIKLPKLGMVKIRDKQVPKGRILNATISKEPSGRYYVSLCCTDVDIEVFENTNNQIGLDLGIKEFCISSCGDFIENPKYLKKSLNKLAKLQRELSRKTIGSLNRNKARLKVARLQEHIANQRNDFLQKLSTKLIKENDIICIEDLQVKNMIKNRRLSRLISDVSWSEFVRQLEYKANWYGRKIVKVGKFFASSQICNKCGYKNEEVKDLNIREWICPSCNETHDRDINASINILKEGLRLITIQNK

SEQ ID NO: 3384 - protein, 372 aa, unidentified
MVVVEKAYKFRMYPNKKQQELINKTFGCCRFVYNKYLAKRIDVYKNDKETFTYKQCSSDLTNLKKELKWLKEPDKFSLQNALKDLENAYEKFFKEKAGFPNFKSKKINRFSYKTNFTNGNIMYCGQHIKLPKLGMVKIRDKQVPKGRILNATISKEPSGRYYVSLCCTDVDIEAFENTNNQIGLDLGIKEFCISSCGEFIENPKYLKKSLNKLAKLQRELSRKTIGSLNRNKARLKVARLQEHIANQRNDFLQKLSTKLIKENDIICIEDLQVKNMIRNHKLSRLISDVSWSEFIRQLEYKANWYDRQIVKVGKFFASSQICNKCGYKNEEVKNLNIREWICPSCNETHDRDINASINILKEGLRLITIQNK

SEQ ID NO: 3385 - protein, 372 aa, unidentified
MIAVEKAYKFRMYPNKKQQELINKTFGCCRFVYNKYLAKRIDVYKNDKETFTYKQCSSDLTNLKKELKWLKEPDKFSLQNALKDLENAYNKFFKEKAGFPKFKSKKTNRFSYKTNFTNGNIMYCGQHIKLPKLGMVKIRDKQVPQGRILNATISKEPSGRYYVSLCCTDVDIEAFENTNNQIGLDLGIKEFCISSCGEFIENPKYLKKSLNKLAKLQRELSRKTIGSLNRNKARLKVARLQEHIANQRNDFLQKLSTKLIKENDIICIEDLQVKNMIRNRKLSRLISDVSWSEFVRQLEYKANWHGRQIVKVGKFFASSQICNKCGYKNEEVKNLNIREWICPSCNETHDRDINASMNILKEGLRLITIQNK

SEQ ID NO: 3386 - protein, 369 aa, unidentified
MIAVKKAYKFRMYPNKKQQELINKTFGCCRFVYNKYLAKRIDVYKNDKETFTYKQCSSDLTNLKKELKWLKEPDKFSLQNALKDLENAYNKFFKEKTGFPKFKSKKTNRFSYKTNFTNGNIMYCGQHIKLPKLGMVKIRDKQVPQGRILNATISKEPSGRYYVSLCCTDVDIEVFENTNNQIGLNLGIKEFCISSCGEFIENPKYLKKSLNKLAKLQRELSRKTIGSLNRNKARLKVARLQEHIANQRNDFLQKLSTKLIKENDIICIEDLQVKNMIRNRKLSRLISDVSWSEFIRQLEYKANWHGRQIVKVGKFFASSQICNKCGYKNEEVKDLNIREWICPSCNETHDRDINASMNILKEGLRLITV

SEQ ID NO: 3387 - protein, 372 aa, unidentified
MVVVEKAYKFRMYPNKKQQELINKTFGCCRFVYNKYLAKRIDVYKKHKETFTYKQCSSDLTNLKKELKWLKEPDKFSLQNALKDLDNAYKKFFKEKTGFPKFKSKKINRFSYKTNFTNGNIMYCGQHIKLPKLGMVKIRDKQVPQGRILNATISKEPSGRYYVSLCCTDVDIEAFENTNNHIGLDLGIKEFCISSCGEFIENPKYLKKSLNKLAKLQRELSRKTIGSLNRNKARLKVARLQEHIANQRKDFLQKLSTKLIKENDIICIEDLQVKNMIKNHKLSRSISDVSWSEFIRQLEYKANWHGRQIVKVGKFFASSQICNKCGYKNEEVKNLNIREWICPSCNETHDRDINASINILKEGLRLITIQNK

SEQ ID NO: 3388 - protein, 372 aa, unidentified
MIAVKKAYKFRLYPNKKQQELINKTFGCCRFVYNKYLAKRIDVYKNDKETFTYKQCSSDLTNLKKELKWLKEPDKFSLQNALKDLDNAYKKFFKEKVGFPKFKSKKINRFSYKTNFTNGNIMYCGQHIKLPKLGMVKIRDKQVPQGRILNATISKEPSGRYYVSLCCTDVDIEAFENTNNHIGLDLGIKEFCISSCGEFIENPKYLKKSLNKLAKLQRELSRKTIGSLNRNKARLKVARLQEHIANQRKDFLQKLSTKLIKENDIICIEDLQVKNMIRKRKLSRLISDVSWSEFIRQLEYKANWHGRQIVKVGKFFASSQICNKCGYKNEEVKNLNIREWICPSCNETHDRDINASRNILKEGLRLITIQNK

SEQ ID NO: 3389 - protein, 372 aa, unidentified
MAVVEKAYKFRMYPNKKQQELINKTFGCCRFVYNKYLAKRIEVYKNDKETFTYKQCSSDLTNLKKELKWLKEPDKFSLQNALKDLDNAYKKFFKEKAGFPKFKSKKINRFSYKTNFTNGNIMYCGQHIKLPKLGMVKVRDKQIPQGRILNATISKEPSGRYYVSLCCTDVDIEVFENTNNQIGLDLGIKEFCISSCGEFIENPKYLKKSLNKLAKLQRELSRKTIGSLNRNKARLKVARLQEHIANQRNDFLQKLSTKLIKENDIICIEDLQVKNMIRNRKLSRLISDVSWSEFIRQLEYKANWHGRQIVKVGKFFASSQICNKCGYKNEEVKDLNIREWICPSCNEIHDRDINASINILKEGLRLITIQNK

SEQ ID NO: 3390 - protein, 372 aa, unidentified
MIVVEKAYKFRMYPNKKQQELINKTFGCCRFVYNKYLAKRIEVYKNDKETFTYKQCSSDLTNLKKELKWLKEPDKFSLQNALKDLDNAYKKFFKKKAGFPKFKSKKINRFSYKTNFTNGNIVYCGQHIKLPKLGMVKIRDKQVPKGRILNATISKEPSGRYYVSLCCTDVDIEAFENTNNQIGLDLGIKEFCISSCGEFIENPKYLKKSLNKLAKLQRELSRKTIGSLNRNKARLKVARLQEHIANQRNDFLQKLSTKLIKENDIICIEDLQVKNMIKNRRLSRLISDVSWSEFIRQLEYKANWYGRQIVKVGKFFASSQICNKCGYKNEEVKNLNIREWICPSCNETHDRDINASINILKEGLRLITIQNK

SEQ ID NO: 3391 - protein, 372 aa, unidentified
MVVVEKAYKFRMYPNKKQQELINKTFGCCRFVYNKYLAKRIEVYKNDKETFTYKQCSSDLTNLKKELKWLKEPDKFSLQNALRDLDNSYKKFFKKKAGFPKFKSKKINRFSYKTNFTNGNIMYCGQHIKLPKLGMVKVRDKQVPQGRILNATISKEPSGRYYVSLCCTDVDIEVFENTNNQIGLDLGIKEFCISSCGDFIENPKYLKKSLNKLAKLQRELSRKTIGSLNRNKARLKVARLQEHIANQRNDFLQKLSTKLIKENDIICIEDLQVKNMIKNRKLSRLISDVSWSEFIRQLKYKANWHGRQIVKVGKFFASSQICNKCGYKNEEVKDLSIREWICPSCNETHDRDINASINILKEGLRLITIQNK

SEQ ID NO: 3392 - protein, 372 aa, unidentified
MIAVEKAYKFRMYPNKKQQELINKTFGCCRFVYNKYLAKRIEVYKNDKETFTYKQCSSDLTNLKKELKWLKEPDKFSLQNALKDLDNAYKKFFKEKAGFPKFKSKKINRFSYKTNFTNGNIMYCGQHIKLPKLGMVKVRDKQVPQGRILNATISKEPSGRYYVSLCCTDVDIETFENTNNHIGLDLGIKEFCISSCGEFIENPKYLKKSLNKLAKLQRELSRKTIGSLNRNKARLKVARLQEHIANQRKDFLQKLSTKLIKENDIICIEDLQVKNMIRNRKLSRLISDVSWSEFIRQLEYKANWHGRQIVKVGKFFASSQICNKCGYKNEEVKDLNIREWICPSCNETHDRDINASINILKEGLILITIQNK

SEQ ID NO: 3393 - protein, 372 aa, unidentified
MIVVEKAYKFRMYPNKKQQELINKTFGCCRFVYNKYLAKRIEVYKNDKETFTYKQCSSDLTNLKKELKWLKEPDKFSLQNALKDLDNAYKKFFKEKAGFPKFKSKKINRFSYKTNFTNGNIMYFSQHIKLPKLGMVKIRDKQVPQGRILNATISKEPSGRYYVSLCCTDVDIEAFENTNNQIGLDLGIKEFCISSCGDFIENPKYLKKSLNKLAKLQRELSRKTIGSLNRNKARLKVAGLQEHIANQRNDFLQKLSTKLIKENDIICIEDLQVKNMIKNHKLSRLISDVSWSEFIRQLEYKANWYGRQIVKVGKFFASSQICNKCGYKNEEMKDLNIREWICPSCNETHDRDINASINILKEGLRLITIQNK

SEQ ID NO: 3394 - protein, 372 aa, unidentified
MVVVEKAYKFRIYPNKKQQELINKTFGCCRFVYNKYLAKRIDVYKNDKETFTYKQCSSDLTNLKKELKWLKEPDKFSLQNALRDLDNAYKKFFKEKAGFPKFKSKKINRFSYKTNFTNGNIMYCGQHIKLPKLGMVKIRDKQVPKGRILNATISKEQSGRYYVSLCCTDVDIEVFENTNNQIGLDLGIKEFCISSCGDFIENPKYLKKSLSKLAKLQKELSRKTIGSLNRNKARLKVARLQEHIANQRNDFLQKLSTKLIKENDIICIEDLQVKNMIKNHKLSRSISDVSWSEFIRQLEYKANWYGRQIVKVGKFFASSQICNKCGYKNEEVKDLNIREWICPSCNETHDRDINASINILKEGLRLITIQNK

SEQ ID NO: 3395 - protein, 372 aa, unidentified
MIAVEKAYKFRVYPNKKQQELINKTFGCCRFVYNKYLAKRIDVYKSDKETFTYKQCSSDLTNLKKELKWLKEPDKFSLQNALKDLDNAYKKFFKEKAGFPKFKSKKINRFSYKTNFTNGNIMYCGQYIKLPKLGMVKIRDKQVPQGRILNATISKEPSGRYYVSLCCTDVDIEAFENTNNHIGLDLGIKEFCISSCGDFIENPKYLKKSLNKLAKLQRELSRKTIGSLNRNKARLKVAGLQEHIANQRNDFLQKLSTKLIKENDIICIEDLQVKNMIKNHKLSRLISDVSWSEFIRQLEYKANWYGRQIVKVGKFFASSQICNKCGYKNEEVKDLNIREWICPSCNETHDRDINASINILKEGLRLITIQNK

SEQ ID NO: 3396 - protein, 372 aa, unidentified
MIAVEKAYKFRMYPNKKQQELINKTFGCCRFVYNKYLAKRIDVYKNDKETFTYKQCSSDLTNLKKELKWLKEPDKFSLQNALKDLDNAYKKFFKEKAGFPKFKSKKINRFSYKTNFTNGNIMYCGQHIKLPKLGMVKIRDKQVPQGRILNATISKEPSGRYYVSLCCTDVDIEVFENTNNHIGLDLGIKEFCISSCGDFIENPKYLKKSLNKLAKLQRELSRKTIGSLNRNKARLKVAGLQEHIANQRNDFLQKLSTKLIKENDIICIEDLQVKNMIRNRKLSRLISDVSWSEFIRQLEYKANWYGRQIVKVGKFFASSQICNKCGYKNEEVKDLNIREWICPSCNETHDRDINASINILKEGLRLITIQNK

SEQ ID NO: 3397 - protein, 372 aa, unidentified
MIAVKKAYKFRIYPNKKQQELINKTFGCCRFVYNKYLAKRIDVYKNDKETFTYKQCSSDLTNLKKELNWLKEPDKFSLQNALKDLDNAYKKFFKEKAGFPKFKSKKINRFSYKTNFTNGNIMYCGQHIKLPKLGMVKIRDKQVPQGRILNATISKEPSGRYYVSLCCTDVDIEAFENTNNHIGLDLGIKEFCISSCGEFIENPKYLKKSLNKLAKLQRELSRKTIGSLNRNKARLKVARLQEHIANQRNDFLQKLSTKLIKENDIICIEDLQVKNMIKNHKLSRLISDVSWSEFIRQLEYKANWHGRQIVKVGKFFASSQICNKCGYKNEEVKNLNIREWICPSCNETHDRDINASINILKEGLRLITIQNK

SEQ ID NO: 3398 - protein, 372 aa, unidentified
MIVVEKAYKFRMYPNKKQQELINKTFGCCRFVYNKYLAKRIDVYKKHKETFTYKQCSSDLTNLKKELKWLKEPDKFSLQNALRDLDNAYKKFFKEKAGFPKFKSKKINRFSYKTNFTNGNIMYCGQYIKLPKLGMVKIRDKQVPQGRILNATISKEPSGRYYVSLCCTDVDIEAFENTNNHIGLDLGIKEFCISSCGEFIENPKYLKKSLNKLAKLQRELSRKTIGSLNRNKARLKVARLQEHIANQRNDFLQKLSTKLIKENDIICIEDLQVKNMIKNRKLSRLISDVSWSEFIRQLEYKANWHGRQIVKVGKFFASSQICNKCGYKNEEVKDLNIREWICPSCNETHDRDINASINILKEGLRLITIQNK

SEQ ID NO: 3399 - protein, 372 aa, unidentified
MVVVEKAYKFRIYPNKKQQELINKTFGCCRFVYNKYLAKRVDAYKNDKETFTYKQCSSDLTNLKKELNWLKEPDKFSLQNALKDLENAYEKFFKKKAGFPKFKSKKINRFSYKTNFTNGNIMYCGQHIKLPKLGMVKIRDKQVPKGRILNATISKEPSGRYYVSLCCTDVDIEAFENTNNHIGLDLGIKEFCISSCGEFIENPKYLKKSLNKLAKLQRELSRKTIGSLNRNKARLKVARLQEHIANQRNDFLQKLSTKLIKENDIICIEDLQVKNMIKNHKLSRLISDVSWSEFIRQLEYKANWYGRQIVKVGKFFASSQICNKCGYKNEEVKDLNIREWICPSCNETHDRDINASINILKEGLRLITIQNK

SEQ ID NO: 3400 - protein, 372 aa, unidentified
MIAVKKAYKFRMYPNKKQQELINKTFGCCRFVYNKYLAKRIDVYKNDKETFTYKQCSSDLTNLKKELKWLKEPDKFSLQNALKDLDNAYKKFFKEKAGFPKFKSKKINRFSYKTNFTNGNIMYCGQHIKLPKLGMVKIRDKQVPQGRILNAAISKEPSGRYYVSLCCTDVDIEAFENTNNQIGLDLGIKEFCISSCGEFIENPKYLKKSLNKLAKLQRELSRKTIGSLNRNKARLKVARLQEHIANQRNDFLQKLTTKLIKENDIICIEDLQVKNMIKNHKLSRLISDVSWSEFIRQLEYKANWHGRQIVKVGKFFASSQICNKCGYKNEEVKNLNIREWICPSCNETHDRDINASRNILKEGLRLITIQNK

SEQ ID NO: 3401 - protein, 248 aa, unidentified
MIAVKKAYKFRIYPNKKQQELINKTFGCCRFVYNKYLAKRIDVYKNDKETFTYKQCSSDLTNLKKELNWLKEPDKFSLQNALKDLDNAYKKFFKEKAGFPKFKSKKINRFSYKTNFTNGNIMYCGQHIKLPKLGMVKVRDKQVPKGRILNATISKEPSGRYYVSLCCTDVDIEAFENTNNHIGLDLGIKEFCISSCGEFIENPKYLKKSLNKLAKLQRELSRKTIGSLNRNKARLKVARLQEHIANQR

SEQ ID NO: 3402 - protein, 369 aa, unidentified
MIVVEKAYKFRMYPNKKQQELINKTFGCCRFVYNKYLAKKIEVYENNKETFTYKQCSSDLTNLKKELEWLKEPDKFSLQNTLKDLENAYKKFFKENTGFPKFKSKKTNRFSYRTNFTNGNIMHLGQYIKLPKLGMVKVRDKQVPQGRILNATVSKEPSGKYYVSLCCTDIDIEAFENTNNQIGLDLGIKEFCISSCGEFIENPKYLQKSLNKLAKLQRELSRKTIGSLNRNKARLKVARLQEHIANQRKDFLQKLSTKLIRENDIICIEDLQVKNMTKNRKLSRLISDVSWSEFVCQLEYKANWYGRQIVKVGKFFASSQICNKCGYKNEEIKDLNIREWICPYCNETHNRDINASINILKEGLRLIRV

SEQ ID NO: 3403 - protein, 277 aa, unidentified
MIAVKKAYKFRMYPNKKQQELINKTFGCCRFVYNKYLAKRIDVYKSDKETFTYKQCSSDLTNLKKELKWLKEPDKFSLQNALKDLDNAYKKFFKEKAGFPKFKSKKINRFSYKTNFTNGNIMYCGQHIKLPKLGMVKIRDKQVPQGRILNATISKEPSGRYYVSLCCTDVDIEVFENTNNHIGLDLGIKEFCISSCGDFIENPKYLKKSLNKLAKLQRELSRKTIGSLNRNKARLKVAGLQEHIANQRNDFLQKLSTKLIKENDIICIEDLQVKNMI

SEQ ID NO: 3404 - protein, 458 aa, unidentified
MEKAYKFRMYPNKKQQELINKTFGCCRFVYNKYLAKRIEVYKNDKETFTYKQCSSDLTNLKKELKWLKEPDKFSLQNALKDLDNAYKKFFKEKAGFPKFKSKKINRFSYKTNFTNGNIMYFSQHIKLPKLDMVKIRDKQVPQGRILNATISKEPSGRYYVSLCCTDVDIEAFENTNNQIGLDLGIKEFCISSCGEFIENPKYLKKSLNKLAKLQRELSRKTIGSLNRNKARLKVARLQEHIANQRNDFLQKLSTKLIKENDIICIEDLQVKNMIKNRKLSRLISDVSWSEFVRQLEYKANWYGRQIVKVGKFFASSQICKLKVARLQEHIANQRNDFLQKLSTKLIKENDIICIEDLQVKNMIKNRKLSRLISDVSWSEFVRQLEYKANWYGRQIVKVGKFFASSQICNKCGYKNEEVKDLNIREWICPSCNETHDRDINASINILKEGLRLITIQNK

SEQ ID NO: 3405 - protein, 368 aa, unidentified
MIAVKKAYKFRMYPNKKQQELINKTFGCCRFVYNKYLAKRIDVYKNDKETFTYKQCSSDLTNLKKELNWLKEPDKFSLQNALKDLENAYNKFFKEKAGFPKFKSKKTNRFSYKTNFTNGNIVYCGQHIKLPKLGMVKVRDKQVPQGRILNATISKEPSGRYYVSLCCTDVDIEVFENTNNQIGLDLGIKEFCISSCGDFIENPKYLKKSLSKLAKLQRELSRKTIGSLNRNKARLKVARLQEHIANQRNDFLQKLSTKLIKENDIICIEDLQVKNMIRNHKLSRSISDVSWSEFIRQLEYKANWYGRQIVKVGKFFASSQICNKCGYKNEEVKNLNIREWICPSCNETHDRDINASINILKEGLRLIK

SEQ ID NO: 3406 - protein, 372 aa, unidentified
MAVVEKAYKFRMYPNKKQQELINKTFGCCRFVYNKYLAKRIEVYKNNKETFTYKQCSSDLTNLKKELKWLKEPDKFSLQNALKDLDNAYKKFFKEKAGFPKFKSKKINRFSYKTNFTNGNIMYCGQHIKLPKLGMVKIRDKQVPKGRILNATISKEPSGRYYVSLCCIDVDIEVFENTNNHIGLDLGIKEFCISSCGEFIENPKYLKKSLNKLAKLQRELSRKTIGSLNRNKARLKVARLQEHIANQRNDFLQKLSTKLIKENDIICIEDLQVKNMIRNRKLSRSISDVSWSEFIRQLEYKANWHGRQIVKVGKFFASSQICNKCGYKNEEVKDLNIREWICPSCNETHDRDINASINILKEGLRLITTQNK

SEQ ID NO: 3407 - protein, 372 aa, unidentified
MIAVKKAYKFRMYPNKKQQELINKTFGCCRFVYNKYLAKRIDVYKNDKETFTYKQCSSDLTNLKKELNWLKEPDKFSLQNALKDLENAYNKFFKEKAGFPKFKSKKTNRFSYKTNFTNGNIVYCGQHIKLPKLGMVKVRDKQVPQGRILNATISKEPSGRYYVSLCCTDVDIEVFENTNNQIGLDLGIKEFCISSCGDFIENPKYLKKSLSKLAKLQRELSRKTIGSLNRNKARLKVARLQEHIANQRKDFLQKLSTKLIKENDIICIEDLQAKNMIKNRKLSRLISDVSWSEFVRQLEYKANWYGRQIVKVGKFFASSQICNKCGYKNEEVKNLNIREWICPSCNETHDRDINASINILKEGLRLITIQNK

SEQ ID NO: 3408 - protein, 372 aa, unidentified
MIAVEKAYKFRMYPNKKQQELINKTFGCCRFVYNKYLAKRIDVYKNDKETFTYKQCSSDLTNLKKELKWLKEPDKFSLQNALKDLENAYEKFFKEKAGFPKFKSKKINRFSYKTNFTNGNIMYCGQHIKLPKLGMVKIRDKQVPQGRILNATISKEPSGRYYVSLCCTDVDIEAFENTNNQIGLDLGIKEFCISSCGEFIENPKYLKKSLNKLAKLQRELSRKTIGSLNRNKARLKVARLQEHIANQRNDFLQKLSTKLIKENDIICIEDLQVKNMIKNRKLSRLISDVSWSEFIRQLKYKANWYGRKIVKVGKFFASSQICNKCGYKNEEVKNLNIREWICPSCNETHDRDINASINILKEGLRLITIQNK

SEQ ID NO: 3409 - protein, 366 aa, unidentified
MEKAYKFRMYPNKKQQELISKTFGCCRFVYNKYLSKKIEVYENDKETFTYKQCSSDLTNLKKELEWLKEPDKFSLQNTLKDLENAYKKFFKENTGFPKFKSKKTNRFSYRTNFTNGNIMYFSQYIKLPKLGMVKVRDKQVPQGRILNATVSKEPSGKYYVSLCCTDIDIEAFENTNNQIGLDLGVKEFCISSCGQFIENPKYLKKSLSKLAKLQRELSRKTIGSLNRNKARLKVARLQEHIANQRKDFLQKLSTKLIQENDIICIEDLQVKNMIRNHKLSRLISDVSWSEFVHQLEYKANWYGRQIVKVGKFFASSQICNKCGHKNEEIKNLNIREWICPCCNATHNRDINASINILKEGLRLIMV

SEQ ID NO: 3410 - protein, 372 aa, unidentified
MIAVEKAYKFRMYPNKKQQELINKTFGCCRFVYNKYLAKRIDVYKNDKETFTYKQCSSDLTNLKKELKWLKEPDKFSLQNALKDLENAYNKFFKEKAGFPKFKSKKTNRFSYKTNFTNGNIMYCGQHIKLPKLGMVKIRDKQVPQGRILNATISKEPSGRYYVSLCCTDVDIEAFENTNNQIGLDLGIKEFCISSCGEFIENPKYLKKSLSKLAKLQRELSRKTIGSLNRNKARLKVARLQEHIANQRNDFLQKLSTKLIKENDIICIEDLQVKNMVRNHKLSRLISDVSWSEFVRQLKYKANWHGRQIVKVGKFFSSSQICNKCGYKNEEVKDLNIREWICPSCNETHDRDINASINILKEGLRLITIQNK

SEQ ID NO: 3411 - protein, 372 aa, unidentified
MVVVEKAYKFRMYPNKKQQELINKTFGCCRFVYNKYLAKRIDVYKNDKETFTYKQCSSDLTNLKKELKWLKEPDKFSLQNALKDLENAYEKFFKEKAGFPKFKSKKINRFSYKTNFTNGNIMYCGQHIKLPKLGMVKIRDKQVPQGRILNATISKEPSGRYYVSLCCTDVDIEAFENTNNQIGLDLGIKEFCISSCGDFIENPKYLKKSLNKLAKLQRELSRKTIGSLNRNKARLKVARLQEHIANQRNDFLQKLSTKLIKENDIICIEDLQVKNMIRNRKLSRLISDMSWSEFIRQLKYKANWHGRQIVKVGKFFASSQICNKCGYKNEEVKNLNIREWICPSCNETHDRDINASINILKEGLRLITIQNK

SEQ ID NO: 3412 - protein, 372 aa, unidentified
MVVVEKAYKFRMYPNKKQQELINKTFGCCRFVYNKYLAKRIDVYKNDKETFTYKQCSSDLTNLKKELKWLKEPDKFSLQNALKDLENAYEKFFKEKAGFPKFKSKKINRFSYKTNFTNGNIMYCGQHIKLPKLGMVKIRDKQVPKGRILNATISKEPSGRYYVSLCCTDVDIEAFENTNNHIGLDLGIKEFCISSCGDFIENPKYLKKSLNKLAKLQRELSRKTIGSLNRNKARLKVARLQEHIANQRNDFLQKLSTKLIKENDIICIEDLQVKNMIRNRKLSRLISDVSWSEFVRQLEYKANWYGRKIVKVGKFFASSQICNKCGYKNEEVKDLNIRDWICPSCNETHDRDINASINILKEGLRLIIIQNK

SEQ ID NO: 3413 - protein, 372 aa, unidentified
MIAVKKAYKFRMYPNKKQQELINKTFGCCRFVYNKYLAKRIDVYKNDKETFTYKQCSSDLTNLKKELKWLKEPDKFSLQNALKDLENAYNKFFKKKAGFPKFKSKKTNRFSYKTNFTNGNIMYCGQHIKLPKLGMVKIRDKQVPKGRILNATISKEPSGRYYVSLCCTDVDIEAFENTNNQIGLDLGIKEFCISSCGDFIENPKYLKKSLNKLAKLQRELSRKAIGSLNRNKARLKVARLQEHIANQRNDFLQKLSTKLIKENDIICIEDLQVKNMIRNHKLSRLISDVSWSEFIRQLEYKANWYDRQIVKVGKFFASSQICNKCGYKNEEVKNLNIREWICPSCNETHDRDINASMNILEEGLRLITIQNK

SEQ ID NO: 3414 - protein, 372 aa, unidentified
MIAVEKAYKFRMYPNKKQQELINKTFGCCRFVYNKYLAKRIDVYKNDKETFTYKQCSSDLTNLKKELKWLKEPDKFSLQNALKDLDNAYEKFFKEKAGFPKFKSKKINRFSYKTNFTNGNIMYCGQHIKLPKLGMVKIRDKQIPKGRILNATISKEPSGRYYVSLCCTDVDIEAFENTNNQIGLDLGIKEFCISSCGDFIENPKYLKKSLSKLAKLQRELSRKTIGSLNRNKARLKVARLQEHIANQRNDFLQKLSTKLIKENDIICIEDLQVKNMIRNRKLSRLISDASWSEFIRQLEYKANWYGRQIVKVGKFFASSQICNKCGYKNEEVKDLNIREWICPSCNETHDRDINASMNILKEGLRLITIQNK

SEQ ID NO: 3415 - protein, 372 aa, unidentified
MIAVKKAYKFRMYPNKKQQELINKTFGCCRFVYNKYLAKRIEVYKNDKETFTYKQCSSDLTNLKKELNWLKEPDKFSLQNALKDLDNAYKKFFKEKAGFPKFKSKKINRFSYKTNFTNGNIMYCGQHIKLPKLGMVKVRDKQVPKGRILNATISKEPSGRYYVSLCCTDVDIEVFENTNNHIGLDLGIKEFCISSCGEFIENPKYLKKSLNKLAKLQRELSRKTIGSLNRNKARLKVARLQEHIANQRNDFLQKLSTKLIKENDIICIEDLQVKNMIRNRKLSRLISDVSWSEFIRQLEYKANWYGRQIVKVGKFFASSQICNKCGYKNEEVKNLNIREWICPSCNETHDRDINASINILKEGLRLITIQNK

SEQ ID NO: 3416 - protein, 369 aa, unidentified
MEKAYKFRMYPNKKQQELINKTFGCCRFVYNKYLAKRIDVYKNDKETFTYKQCSSDLTNLKKELKWLKEPDKFSLQNALKDLENAYEKFFKEKAGFPKFKSKKINRFSYKTNFTNGNIMYCGQHIKLPKLGMVKIRDKQVPKGRILNATISKEPSGRYYVSLCCTDVDIEAFENTNNQIGLDLGIKEFCISSCGEFIENPKYLKKSLSKLAKLQRELSRKTIGSLNRNKARLKVARLQEHIANQRNDFLQKLSTKLIKENDIICIEDLQVKNMIRNRKLSRLISDVSWSEFIRQLEYKANWYGRQIVKVGKFFASSQICNKCGYKNEEVKNLNIREWICPSCNETHDRDINASINILKEGLRLIAIQNK

SEQ ID NO: 3417 - protein, 372 aa, unidentified
MAVVEKAYKFRMYPNKKQQELINKTFGCCRFVYNKYLAKRIDVYKNDKETFTYKQCSSDLTNLKKELNWLKEPDKFSLQNALKDLDNAYKKFFKEKAGFPKFKSKKINRFSYKTNFTNGNIMYCGQHIKLPKLGMVKVRDKQVPKGRILNATISKEPSGRYYVSLCCTDVDIKAFENTNNQIGLDLGIKEFCISSCGDFIENPKYLKKSLSKLAKLQRELSRKTIGSLNRNKARLKVARLQEHIANQRNDFLQKLSTKLIKENDIICIEDLQVKNMIKNHKLSRSISDVSWSEFIRQLEYKANWYGRQIVKVGKFFASSQICNKCGYKNEEVKDLNIREWICPSCNETHDRDINASINILKEGLRLITIQNK

SEQ ID NO: 3418 - protein, 372 aa, unidentified
MIAVEKAYKFRMYPNKKQQELINKTFGCCRFVYNKYLAKRIDVYKNDKETFTYKQCSSDLTNLKKELNWLKEPDKFSLQNALKDLDNAYKKFFKEKAGFPKFKSKKINRFSYKTNFTNGNIMYCGQHIKLPKLGMVKIRDKQVPKGRILNATISKEPSGRYYVSLCCTDVDIEAFENTNNQIGLDLGIKEFCISSCGEFIENPKYLKKSLNKLAKLQRELSRKTIGSLNRNKARLKVARFQEHIANQRNDFLQKLSTKLIKENDIICIEDLQVKNMIRNRKLSRLISDVSWSEFIRQLEYKANWYGRQIVKVGKFFASSQICNKCGYKNEEVKDLNIREWICPSCNETHDRDINASINILKEGLRLITIQNK

SEQ ID NO: 3419 - protein, 372 aa, unidentified
MIAVEKAYKFRMYPNKKQQELINKTFGCCRFVYNKYLAKRIEVYKNDKETFTYKQCSSDLTNLKKELKWLKEPDKFSLQNALKDLENAYNKFFKEKTGFPKFKSKKTNRFSYKTNFTNGNIMYCGQHIKLPKLGMVKIRDKQVPKGRILNATISKEPSGRYYVSLCCTDVDIEAFENTNNQIGLDLGIKEFCISSCGEFIENPKYLKKSLSKLAKLQRELSRKTIGSLNRNKARLKVARLQEHIANQRNDFLQKLSTKLIKENDIICIEDLQVKNMIRNSKLSRLISDVSWSEFIRQLEYKANWHGRQIVKVSKFFASSQICNKCGYKNDEVKNLNIREWICPSCNETHDRDINASINILKEGLRLITIQNK

SEQ ID NO: 3420 - protein, 372 aa, unidentified
MIVVEKAYKFRMYPNKKQQELINKTFGCCRFVYNKYLAKRIDVYKNDKETFTYKQCSSDLTNLKKELKWLKEPDKFSLQNALKDLENAYNKFFKEKTGFPKFKSKKTNRFSYKTNFTNGNIMYCGQHIKLPKLGMVKIRDKQVPQGRILNATISKEPSGRYYVSLCCTDVDIEAFENTNNQIGLDLGIKEFCISSCGEFIENPKYLKKSLNKLAKLQRELSRKTIGSLNRNKARLKVARLQEHIANQRNDFLQKLSTKLIKENDIICIENLQVKNMIRNRKLSRLISDVSWSEFIRQLEYKANWHGRQIVKVGKFFASSQICNKCRYKNEEVKNLNIREWICPSCNETHDRDINASINILKEGLRLITIQNK

SEQ ID NO: 3421 - protein, 372 aa, unidentified
MIAVKKAYKFRMYPNKKQQELINKTFGCCRFVYNKYLAKRIEVYKNDKETFTYKQCSSDLTNLKKELKWLKEPDKFSLQNALKDLENAYNKFFKEKTGFPKFKSKKTNRFSYKTNFTNGNIMYCGQHIKLPKLGMVKIRDKQLPKGRILNATISKEPSGRYYVSLCCTDVDIEAFENTNNQIGLDLGIKEFCISSCGEFIENPKYLKKSLNKLAKLQRELSRKTIGSLNRNKARLKVARLQEHIANQRNDFLQKLSTKLIKENDIICIEDLQVKNMIRNRKLSRLISDVSWSEFVRQLEYKANWHGRQIIKVGKFFASSQICNKCGYKNEEVKNLNIREWICPSCNETHDRDINASINILKEGLRLITIQNK

SEQ ID NO: 3422 - protein, 369 aa, unidentified
MIVVEKAYKFRMYPNKKQQELINKTFGCCRFVYNKYLAKRIEVYENNKETFTYKQCSSDLTNLKKELEWLKEPDKFSLQNTLKDLENAYKKFFKENAGFPKFKSKKTNRFSYRTNFTNENIMYIGQYIKLPKLGMVKVRDKQVPQGRILNATVSKEPSGKYYVSLCYTDIDIEAFENTNNQVGLDLGIKEFCISSCGQFIENPKYLLKSLNKLAKLQRELSRKTIGSLNRNKARLKVARLQEHIANQRKDFLQKLSTKLIKENDIICIEDLQVKDMTRNRKLSRLISDVSWSEFVRQLEYKANWYGRQIVKVGKFFASSQICNKCGYKNEAIKNLNIREWICPCCNITHDRDINASINILKEGLRLITV

SEQ ID NO: 3423 - protein, 369 aa, unidentified
MIVVEKAYKFRMYPNKKQQELINKTFGCCRFVYNKYLFKKIEVYENYKETFTYKQCSSDLTNLKKELDWLKEPDKFSLQNTLKDLENAYKKFFKENAGFPKFKSKKTNRFSYRTNFTNENIMYIGQYIKLPKLGMVKVRDKQVPQGRILNATISKEPSGKYYVSLCCTDIDIEALENTNNQVGLDLGIKEFCISSCGQFIENPKYLLKSLNKLAKLQRELSRKTIGSLNRNKARLKVARLQEHIANQRKDFLQKLSTKLIKENDIICIEDLQVKDMTRNRKLSRLISDVSWSEFVRQLEYKANWYGRQIVKVGKFFASSQICNRCEYKNEAIKDLNIREWICPCCNVTHDRDINASINILKEGLRLITV

SEQ ID NO: 3424 - protein, 369 aa, unidentified
MIVVEKSYKFRMYPNKKQQELINKTFGCCRFVYNKYLSKKIEVYENDKETFTYKQCSSDLTNLKKELDWLKEPDKFSLQNTLKDLENAYKKFFKENAGFPKFKSKKTNRFSYRTNFTNGNIMYCGQYIKLPKLGMVKVRDKQVPQGRMLNATVSKEPSGKYYVSLCCTDVDIDAFENTNNQIGLDLGIKEFCISSCGQFIENPKYLLKSLNKLAKLQRELSRKTIGSLNRNKARLKVARLQEHIANQRKDFLQKLSTKLIQENDIICIEDLQVKNMTRNRKLSRLISDVSWSEFVRQLEYKANWYGRQIVKVGKFFASSQICNKCGYKNEEIKNLNIREWICSCCNVTYNRDINASINILKEGLRLITV

SEQ ID NO: 3425 - protein, 369 aa, unidentified
MIVLEKAYKFRMYPNKKQQELINKTFGCCRFVYNKYLSKKIEVYENDKETFTYKQCSSDLTNLKKELDWLKEPDKFSLQNTLKDLENAYKKFFKENAGFPKFKSKKTNRFSYRTNFTNGNIMYCGQYIKLPKLGMVKVRDKQVPQGRMLNATVSKEPSGKYYVSLCCTDVDIDAFENTNNQIGLDLGIKEFCISSCGQFIENPKYLLKSLNKLAKLQRELSRKTIGSLNRNKARLKVARLQEHIANQRKDFLQKLSTKLIQENDIICIEDLQVKNMTRNRKLSRLISDVSWSEFVRQLEYKANWYGRQIVKVGKFFASSQICNKCGYKNEEIKNLNIREWICSCCNVTYNRDINASINILKEGLRLITV

SEQ ID NO: 3426 - protein, 369 aa, unidentified
MVVVEKAYKFRMYPNKKQQELINKTFGCCRFVYNKYLSKKIEVYENDKETFTYKQCSSDLTNLKKELDWLKEPDKFSLQNTLKDLENAYKKFFKENVGFPKFKSKKTNRFSYRTNFTNENIMYCGQYIKLPKLGMVKVRDKQVPQGRILNATVSKEPNGKYYVSLCCTDVDIEAFENTNNQIGLDLGIKEFCISSCGQFIENPKYLQKSLNKLAKLQRELSRKTIGSFNRNKARLKVARLQEHIANRRKDFLQKLSTKLIQENDIICIEDLQVKNMTRNRKLSRLISDVSWSEFVRQLEYKANWYGKQIVKVGKFFASSQICNKCGYKNEEVKNLNIREWICPCCNVTHDRDINASINILKEGLRLITV

SEQ ID NO: 3427 - protein, 369 aa, unidentified
MIVVEKSYKFRMYPNKKQQELINKTFGCCRFVYNKYLSKKIEVYENDKETFTYKQCSFDLTNLKKELDWLKEPDKFSLQNTLKDLENAYRKFFKENAGFPKFKSKKTNRFSYRTNFTNGNIMYCGQYIKLPKLGMVKVRDKQVPQGRILNATVSKEPSGKYYVSLCCTDVDIKAFENTNNQIGLDLGIKEFCISSCGQFIENPKYLLKSLNKLAKLQRELSRKIIGSLNRNKARLKVARLQEHIANQRKDFLQKLSTKLIQENDIICIEDLQVKNMTRNRKLSRLISDVSWSEFVRQLEYKANWYDRQIVKVGKFFASSQICNKCWYKNEEVKNLNIREWICPCCNVTHDRDINASINILKEGLRLITV

SEQ ID NO: 3428 - protein, 369 aa, unidentified
MKKAYKFRMYPNKKQQELINKTFGCCRFVYNKYLAKRIDVYKNDKETFTYKQCSSDLTNLKKELKWLKEPDKFSLQNALKDLDNAYKKFFKEKSGFPKFKSKKINRFSYKTNFTNGNIMYCGQHIKLPKLGMVKIRDKQVPQGRILNATISKEPSGRYYVSLCCTDVDIEAFENTNNHIGLDLGIKEFCISSCGEFIENPKYLKKSLNKLAKLQRELSRKTIGSLNRNKARLKVARLQEHIANQRNDFLQKLSTKLIKENDIICIEDLQVKNMIRNRKLSRLISDVSWSEFIRQLEYKANWHGRQIVKVGKFFASSQICNKCGYKNEEVKNLNIREWICPSCNETHDRDINASINILKEGLRLITIQNK

SEQ ID NO: 3429 - protein, 372 aa, unidentified
MIAVEKAYKFRVYPNKKQQELINKTFGCCRFVYNKYLAKRIDVYKNNKETFTYKQCSSDLTNLKKELKWLKEPDKFSLQNALKDLDNAYKKFFKEKAGFPKFKSKKINRFSYKTNFTNGNIMYCGQHIKLPKLGMVKVRDKQVPKGRILNATISKEPSGRYYVSLCCTDVDIEAFENTNNHIGLDLGIKEFCISSCGEFIENPKYLKKSLNKLVKLQSELSRKTIGSLNRNKARLKVARLQEHIANQRNDFLQKLSTKLIKENDIICIEDLQVKNMIRNRKLSRLISDVSWSEFIRQLEYKANWYGRQIVKVGKFFASSQICNKCGYKNEEVKDLNIREWICPSCNETHDRDINASINILKEGLRLITIQNK

SEQ ID NO: 3430 - protein, 372 aa, unidentified
MVVVEKAYKFRMYPNKKQQELINKTFGCCRFVYNKYLAKRIDVYKNDKETFTYKQCSSDLTNLKKELKWLKEPDKFSLQNALKDLDNAYKKFFKKKAGFPKFKSKKINRFSYKTNFTNGNIVYCGQHIKLPKLGMVKVRDKQVPKGRILNATISKEPSGRYYVSLCCTDVDIEAFENTNNHIGLDLGIKEFCISSCGEFIENPKYLKKSLNKLAKLQRELSRKTIGSLNRNKARLKVARLQEHIANQRNDFLQKLSTKLIKENDIICIEDLQVKNMIRNRKLSRSISDVSWSEFIRQLEYKANWYGRKIVKVGKFFASSQICNKCGYKNEEVKDLNIREWICPSCNETHDRDINASINILKEGLRLITIQNK

SEQ ID NO: 3431 - protein, 345 aa, unidentified
MIAVKKAYKFRLYPNKKQQELINKTFGCCRFVYNKYLAKRIDVYKNNKETFTYKQCSSDLTNLKKELKWLKEPDKFSLQNALKDLDNAYKKFFKEKAGFPKFKSKKINRFSYKTNFTNGNIMYCGQHIKLPKLGIVKVRDKQVPKGRILNATISKEPSGRYYVSLCCTDVDIEAFENTNNHIGLDLGIKEFCISSCGEFIENPKYLKKSLNKLVKLQSELSRKTIGSLNRNKARLKVARLQEHIANQRKDFLQKLSTKLIKENDIICIEDLQVKNMIKNHKLSRSISDVSWSEFIRQLEYKANWYGRQIVKVGKFFASSQICNKCGYKNEEVKDLNIREWICPSC

SEQ ID NO: 3432 - protein, 351 aa, unidentified
MIAVKKAYKFRLYPNKKQQELINKTFGCCRFVYNKYLAKRIDVYKNNKETFTYKQCSSDLTNLKKELKWLKEPDKFSLQNALKDLDNAYKKFFKEKAGFPKFKSKKINRFSYKTNFTNGNIMYCGQHIKLPKLGIVKVRDKQVPKGRILNATISKEPSGRYYVSLCCTDVDIEAFENTNNHIGLDLGIKEFCISSCGEFIENPKYLKKSLNKLVKLQSELSRKTIGSLNRNKARLKVARLQEHIANQRKDFLQKLSTKLIKENDIICIEDLQVKNMIKNHKLSRSISDVSWSEFIRQLEYKANWYGRQIVKVGKFFASSQICNKCGYKNEEVKDLNIREWICPSCNETHDR

SEQ ID NO: 3433 - protein, 372 aa, unidentified
MIEVKKAYKFRMYPNKKQQELINKTFGCCRFVYNKYLAKRIEVYKNDKETFTYKQCSSDLTNLKKELKWLKEPDKFSLQNALKDLDNAYKKFFKEKAGFPKFKSKKINRFSYKTNFTNGNIMYCGQYIKLPKLGMVKIRDKQVPQGRILNATISKEPSGRYYVSLCCTDVDIEVFENTNNQIGLDLGIKEFCISSCGDFIENPKYLKKSLNKLAKLQRELSRKTIGSLNRNKARLKVARLQEHIANQRNDFLQKLSTKLIKDNDIICIEDLQVKNMIRNRKLSRLISDVSWSEFIRQLEYKANWYGRQIVKVGKFFASSQICNKCGYKNEEVKDLNIREWICPSCNETHDRDINASINILKEGLRLITIQNK

SEQ ID NO: 3434 - protein, 372 aa, unidentified
MIEVKKAYKFRMYPNKKQQELINKTFGCCRFVYNKYLAKRIEVYKNDKETFTYKQCSSDLTNLKKELKWLKEPDKFSLQNALKDLDNAYKKFFKEKAGFPKFKSKKINRFSYKTNFTNGNIVYCGQHIKLPKLGMVKVRDKQVPKGRILNATISKEPSGRYYVSLCCTDVDIEAFENTNNQIGLDLGIKEFCISSCGEFIENPKYLKKSLNKLAKLQRELSRKTIGSLNRNKARLKVARLQEHIANQRNDFLQKLSTKLIKDNDIICIEDLQVKNMIRNRKLSRLISDVSWSEFIRQLEYKANWYGRQIVKVGKFFASSQICNKCGYKNEEVKDLNIREWICPSCNETHDRDINASINILKEGLRLITIQNK

SEQ ID NO: 3435 - protein, 372 aa, unidentified
MIAVEKAYKFRMYPNKKQQELINKTFGCCRFVYNKYLAKRIEVYKNDKETFTYKQCSSDLTNLKKELKWLKEPDKFSLQNALKDLDNAYKKFFKEKAGFPKFKSKKINRFSYKTNFTNGNIMYCGQHIKLPKLGMVKIRDKQVPKGRILNATISKEPSGRYYVSLCCTDVDIEVFENTNNQIGLDLGIKEFCISSCGEFIENPKYIKKSLNKLAKLQRELSRKTIGSLNRNKARLKVARLQEHIANQRNDFLQKLSTKLIKENDIICIEDLQVKNMIRNCKLSRLISDVSWSEFIRQLEYKANWHGRQIVKVGKFFASSQICNKCGYKNEEVKDLSIREWICPSCNETHDRDINASINILKEGLRLITTQNK

SEQ ID NO: 3436 - protein, 372 aa, unidentified
MIVVEKAYKFRMYPNKKQQELINKTFGCCRFVYNKYLAKRIEVYKNDKETFTYKQCSSDLTNLKKELKWLKEPDKFSLQNALKDLDNAYKKFFKEKAGFPKFKSKKINRFSYKTNFTNGNIMYCGQHIKLPKLGMVKIRDKQVPKGRILNATISKEPSGRYYVSLCCTDVDIEVFENTNNQIGLDLGIKEFCISSCGEFIENPKYIKKSLNKLAKLQRELSRKTIGSLNRNKARLKVARLQEHIANQRNDFLQKLSTKLIKENDIICIEDLQVKNMIKNRRLSRLISDVSWSEFVRQLEYKANWYGRKIVKVGKFFASSQICNKCGYKNEEVKDLNIREWICPSCNETHNRDINASINILKEGLRLITIQNK

SEQ ID NO: 3437 - protein, 372 aa, unidentified
MIAVEKAYKFRMYPNKKQQELINKTFGCCRFVYNKYLAKRIDVYKNDKETFTYKQCSSDLTNLKKELKWLKEPDKFSLQNALKDLENAYNKFFKEKTGFPKFKSKKTNRFSYKTNFTNGNIMYCGQHIKLPKLGMVKIRDKQVPKGRILNATISKEPSGRYYVSLCCTDVDIEAFENTNNQIGLDLGIKEFCISSCGEFIENPKYLKKSLSKLAKLQRELSRKTIGSLNRNKARLKVARLQEHIANQRNDFLQKLSTKLIKENDIICIEDLQVKNMIRNRKLSRLISDVSWSEFIRQLEYKANWHGRQIVKVGKFFASSQICNKCGYKNEEVKDLNIRDWICPSCNETHDRDINASINILKEGLRLITIQNK

SEQ ID NO: 3438 - protein, 372 aa, unidentified
MIAVEKAYKFRMYPNKKQQELINKTFGCCRFVYNKYLAKRIDVYKNDKETFTYKQCSSDLTNLKKELKWLKEPDKFSLQNALKDLENAYEKFFKEKTGFPKFKSKKTNRFSYKTNFTNGNIMYCGQHIKLPKLGMVKIRDKQVPKGRILNATISKEPSGRYYVSLCCTDVDIEAFENTNNQIGLDLGIKEFCISSCGEFIENPKYLKKSLSKLAKLQRELSRKTIGSLNRNKARLKVARLQEHIANQRNDFLQKLSTKLIKENDIICIEDLQVKNMIRNRKLSRLISDVSWSEFVRQLEYKANWHGRQIVKVGKFFASSQICNKCGHKNEEVKNLNIREWICPSCNETHDRDINASINILKEGLRLITIQNK

SEQ ID NO: 3439 - protein, 372 aa, unidentified
MIAVEKAYKFRMYPNKKQQELINKTFGCCRFVYNKYLAKRIDVYKNDKETFTYKQCSSDLTNLKKELKWLKEPDKFSLQNALKDLENAYEKFFKEKAGFPKFKSKKINRFSYKTNFTNGNIMYCGQHIKLPKLGMVKIRDKQVPKGRILNATISKEPSGRYYVSLCCTDVDIEAFENANNQIGLDLGIKEFCISSCGEFIENPKYLKKSLNKLAKLQRELSRKTIGSLNRNKARLKVARLQEHIANQRNDFLQKLSTKLIKENDIICIEDLQVKNMIRNRKLSRLISDVSWSEFVRQLEYKANWHGRQIVKVGKFFASSQICNKCGHKNEEVKNLNIREWICPSCNETHDRDINASINILKEGLRLITIQNK

SEQ ID NO: 3440 - protein, 372 aa, unidentified
MIAVEKAYKFRMYPNKKQQELINKTFGCCRFVYNKYLAKRIDVYKNDKETFTYKQCSSDLTNLKKELKWLKEPDKFSLQNALKDLENAYEKFFKEKTGFPKFKSKKTNRFSYKTNFTNGNIMYCGQHIKLPKLGMVKIRDKQVPKGRILNATISKEPSGRYYVSLCCTDVDIEAFENTNNQIGLDLGIKEFCISSCGEFIENPKYLKKSLSKLAKLQRELSRKTIGSLNRNKARLKVARLQEHIANQRNDFLQKLSTKLIKENDIICIEDLQVKNMIRNRKLSRLISDVSWSEFIRQLEYKANWHGRQIVKVGKFFASSQICNKCGYKNEEVKDLNIRDWICPSCNETHDRDINASINILKEGLRLITIQNK

SEQ ID NO: 3441 - protein, 372 aa, unidentified
MIAVKKAYKFRMYPNKKQQELINKTFGCCRFVYNKYLAKRIDVYKNDKETFTYKQCSSDLTNLKKELKWLKEPDKFSLQNALKDLENAYEKFFKEKAGFPKFKSKKTNRFSYKTNFTNGNIMYCGQHIKLPKLGMVKIRDKQVPKGRILNATISKEPSGRYYVSLCCTDVDIEAFENANNQIGLDLGIKEFCISSCGEFIENPKYLKKSLSKLAKLQRELSRKTIGSLNRNKARLKVARLQEHIANQRNDFLQKLSTKLIKENDIICIEDLQVKNMIRNRKLSRLISDVSWSEFVRQLEYKANWHGRQIVKVGKFFASSQICNKCGYKNEEVKNLNIREWICPSCNETHDRDINASINILKEGLRLITIQNK

SEQ ID NO: 3442 - protein, 372 aa, unidentified
MIAVEKAYKFRVYPNKKQQELINKTFGCCRFVYNKYLAKRIDVYKNDKETFTYKQCSSDLTNLKKELNWLKEPDKFSLQNALKDLDNAYKKFFKEKAGFPKFKSKKINRFSYKTNFTNGNIMYCGQHIKLPKLGMVKVRDKQVPKGRILNATISKEPSGRYYVSLCCTDVDIEAFENTNNHIGLDLGIKEFCISSCGEFIENPKYLKKSLNKLAKLQRELSRKTIGSLNRNKARLKVARLQEHIANQRNDFLQKLSTKLIKENDIICIEDLQVKNMIKNHKLSRLISDVSWSEFIRQLEYKANWHGRQIVKVGKFFASSQICNKCGYKNEEVKNLNIREWICPSCNETHDRDINASINILKEGLRLITIQNK

SEQ ID NO: 3443 - protein, 372 aa, unidentified
MVVVEKAYKFRMYPNKKQQELIDKTFGCCRFVYNKYLAKRIDVYKNDKETFTYKQCSSDLTNLKKELKWLKEPDKFSLQNALKDLENAYEKFFKEKAGFPKFKSKKINRFSYKTNFTNGNIMYCGQHIKLPKLGMVKIRDKQVPKGRILNATISKEPSGRYYVSLCCTDVDIEAFENTNNQIGLDLGIKEFCISSCGEFIENPKYLKKSLNKLAKLQRELSRKTIGSLNRNKARLKVARLQEHIANQRNDFLQKLSTKLIKENDIICIEDLQVKNMIRNHKLSRLISDVSWSEFIRQLEYKANWYGRKIVKVGKFFASSQICNKCGYKNEEVKNLNIREWICPSCNETHDRDINASINILKEGLRLITIQNK

SEQ ID NO: 3444 - protein, 372 aa, unidentified
MIAVEKAYKFRMYPNKKQQELINKTFGCCRFVYNKYLAKRIDVYKNDKETFTYKQCSSDLTNLKKELKWLKEPDKFSLQNALKDLENAYNKFFKEKTGFPKFKSKKTNRFSYKTNFTNGNIMYCGQHIKLPKLGMVKIRDKQVPKGRILNATISKEPSGRYYVSLCCTDVDIEAFENTNNQIGLDLGIKEFCISSCGEFIENPKYLKKSLNKLAKLQRELSRKTIGSLNRNKARLKVARLQEHIANQRNDFLQKLSTKLIKENDIICIEDLQVKNMIRNHKLSRLISDVSWSEFIRQLEYKANWYGRQIVKVGKFFASSQICNKCGYKNEEVKDLNIRDWICPSCNETHDRDINASINILKEGLRLITIQNK

SEQ ID NO: 3445 - protein, 372 aa, unidentified
MIAVEKAYKFRMYPNKKQQELINKTFGCCRFVYNKYLAKRIDVYKNDKETFTYKQCSSDLTNLKKELKWLKEPDKFSLQNALKDLENAYNKFFKEKTGFPKFKSKKTNRFSYKTNFTNGNIMYCGQHIKLPKLGMVKIRDKQVPKGRILNATISKEPSGRYYVSLCCTDVDIEAFENTNNQIGLDLGIKEFCISSCGEFIENPKYLKKSLSKLAKLQRELSRKTIGSLNRNKARLKVARLQEHIANQRNDFLQKLSTKLIKENDIICIEDLQVKNMIRNHKLSRLISDVSWSEFIRQLEYKANWHGRQIVKVGKFFASSQICNKCGYKNEEVKDLNIRDWICPSCNETHDRDINASINILKEGLRLITIQNK

SEQ ID NO: 3446 - protein, 372 aa, unidentified
MVVVEKAYKFRMYPNKKQQELINKTFGCCRFVYNKYLAKRIDVYKNDKETFTYKQCSSDLTNLKKELKWLKEPDKFSLQNALKDLENAYEKFFKEKAGFPKFKSKKINRFSYKTNFTNGNIMYCGQHIKLPKLGMVKIRDKQVPKGRILNATISKEPSGRYYVSLCCTDVDIEAFENTNNQIGLDLGIKEFCISSCGEFIENPKYLKKSLNKLAKLQRELSRKTIGSLNRNKARLKVARLQEHIANQRNDFLQKLSTKLIKENDIICIEDLQVKNMIRNHKLSRLISDVSWSEFIRQLEYKANWYDRQIVKVGKFFASSQICNKCGYKNEEVKNLNIREWICPSCNETHDRDINASINILKEGLRLITIQNK

SEQ ID NO: 3447 - protein, 372 aa, unidentified
MVVVEKAYKFRMYPNKKQQELINKTFGCCRFVYNKYLAKRIDVYKNNKETFTYKQCSSDLTNLKKELNWLKEPDKFSLQNALKDLDNAYEKFFKEKAGFPKFKSKKINRFSYKTNFTNGNIMYCGQHIKLPKLGMVKIRDKQVPKGRILNATISKEPSGRYYVSLCCTDVDIEAFENTNNYIGLDLGIKEFCISSCGEFIENPKYLKKSLNKLAKLQRELSRKTIGSLNRNKARLKVARLQEHIANQREDFLQKLSTKLIKENDIICIEDLQVKNMIRNRKLSRLISDVSWSEFIRQLKYKANWHGRQIVNVGKFFASSQICNKCGYKNEEVKNLNIREWICPSCNETHDRDINASINILKEGLRLITIQNK

SEQ ID NO: 3448 - protein, 408 aa, unidentified
MMARFEVPEGWCVQAFRFTLDPTEDQARALARHFGARRKAYNWAVATLKADIEAWRVTGIGTVKPSLRVLRKRWNTVKDEVCVNAETGAVWWPECSKEAYADGIGGAVDAYWNWQNSRSGKREGKTMGFPRFKKKGRDQDRVTFTTGAMRVEPDRRHLTLPVVGTVRTHENTRRIERLIATGRARVLAISVRRNGTRLDASVRVLVQRPQQPNVAQPGSRVGVDVGVRRLATVANEAGAVLEEVPNPRPLDTALKELRYASRARSRCTKGSRRYRERTTEISRLHRRVNDVRTHHLHVLTTRLAQTHGHIVVEGLDAAGMLRQKGLPGARARRRGLSDSALGTPRRHLSYKTGWYGSALVVADRWFPSLSVEPTVRPGLARLVAVKRGREAAAWLPNNPETGCKSRDH

SEQ ID NO: 3449 - protein, 408 aa, unidentified
MMARFEVPEGWCVQAFRFTLDPTEDQARALARHFGARRKAYNWAVATLKADIEAWRVTGIGTVKPSLRVLRKRWNTVKDEVCVNAETGAVWWPECSKEAYADGIGGAVDAYWNWQNSRSGKREGKTMGFPRFKKKGRDQDRVTFTTGAMRVEPDRRHLTLPVVGTVRTHENTRRIERLIATGRARVLAISVRRNGTRLDASVRVLVQRPQQPNVAQPGSRVGVDVGVRRLATVANEAGAVLEEVPNPRPLDAALKELRYASRARSRCTKGSRRYRERTTEISRLHRRVNDVRTHHLHVLTTRLAQTHGHIVVEGLDAAGMLRQKGLPGARARRRGLSDSALGTPRRHLSYKTGWYGSALVVADRWFPSLSVEPTVRPGLARLVAVKRGREAAAWLPNNPETGCKSRDH

SEQ ID NO: 3450 - protein, 407 aa, unidentified
MARFEVPEGWCVQAFRFTLDPTEDQARALARHFGARRKAYNWAVATLKADIEAWRVTGIGTVKPSLRVLRKRWNTVKDEVCVNAETGAVWWPECSKEAYADGIGGAVDAYWNWQNSRSGKREGKTMGFPRFKKKGRDQDRVTFTTGAMRVEPDRRHLTLPVVGTVRTHENTRRIERLIATGRARVLAISVRRNGTRLDASVRVLVQRPQQPNVAQPGSRVGVDVGVRRLATVANEAGAVLEEVPNPRPLDAALKELRYASRARSRCTKGSRRYRERTTEISRLHRRVNDVRTHHLHVLTTRLAQTHGHIVVEGLDAAGMLRQKGLPGARARRRGLSDSALGTPRRHLSYKTGWYGSALVVADRWFPSLSVEPTVRPGLARLVAVKRGREAAAWLPNNPETGCKSRDH

SEQ ID NO: 3451 - protein, 402 aa, unidentified
MLLGPLFGAAVGRALAARTHPVPSAALGAAPAVGLAPGRAGQRCFPRWKKRGKARDGFRYTTGAYGPAGEAYVKLPRIGRVKVGEPMGALTARLADGRARRLGATVSRTADRWFVSFTIEVERDVPARPSRRQRTGGPVGVDLGVKHLAVLSTGQSVANPKHCQRAERKLRRASRAHARSKPGSAGRRQRAATLAQVQNRIADQRRDGLHKITTAYRSVSPLAFRDPQVSLLAEPVPRSGCPSSCRGRRVRAGSARRRSVAPGEFTATLLPRDRADGGLTLEHSFFLFESPSSSFITTSPANTRIRCGTRSTRRGPRGRRTADRQSSGRRRCPAPPPGRARMPRPRRGRWCSRRYPIPAWARATGPEPRCRSGYPAAICVTVFRSALTRYFTVTPALVPTTR

SEQ ID NO: 3452 - protein, 372 aa, unidentified
MIAVEKAYKFRMYPNKKQQELINKTFGCCRFVYNKYLAKRIDVYKNDKETFTYKQCSSDLTNLKKELKWLKEPDKFSLQNALKDLDNAYKKFFKEKAGLPKFKSKKINRFSYKTNFTNGNIMYCGQHIKLPKLGMVKIRDKQVPQGRILNATISKEPSGRYYVSLCCTDVDIEVFENTNNQIGLDLGIKEFCISSCGEFIENPKYLKKSLNKLAKLQRELSRKTIGSLNRNKARLKVAGLQEHIANQRKDFLQKLSTKLIKENDIICIEDLQVKNMIRNRKLSRLISDVSWSEFIRQLEYKANWHGRQIVKVGKFFASSQICNKCGYKNEEVKDLNIREWICPSCNETHDRDINASINILKEGLRLITIQNK

SEQ ID NO: 3453 - protein, 372 aa, unidentified
MIAVKKAYKFRIYPNKKQQELINKTFGCCRFVYNKYLAKRIDVYKNDKETFTYKQCSSDLTNLKKELNWLKEPDKFSLQNALKDLDNAYKKFFKEKAGFPKFKSKKINRFSYKTNFTNGNIMYCGQHIKLPKLGMVKVRDKQVPKGRILNATISKEPSGRYYVSLCCTDVDIEVFENTNNHIGLDLGIKEFCISSCGEFIENPKYLKKSLNKLAKLQRELSRKTIGSLNRNKTRLKVARLQEHIANQRNDFLQKLSTKLIKENDIICIEDLQVKNMIRNRKLSRLISDVSWSEFIRQLEYKANWHGRQIVKVGKFFASSQICNKCGYKNEEVKDLNIREWICPSCNETHDRDINASRNILKEGLRLITIQNK

SEQ ID NO: 3454 - protein, 407 aa, unidentified
MARFEVPEGWCVQAFRFTLDPTEDQARALARHFGARRKAYNWAVATLKADIEAWRVTGIGTVKPSLRVLRKRWNTVKDEVCVNAETGAVWWPECSKEAYADGIGGAVDAYWNWQNSRSGKREGKTMGFPRFKKKGRDQDRVTFTTGAMRVEPDRRHLTLPVVGTVRTHENTRRIERLIATGRARVLAISVRRNGTRLDASVRVLVQRPQQPNVAQPGSRVGVDVGVRRLATVANEAGAVLEEVPNPRPLDTALKELRYASRARSRCTKGSRRYRERTTEISRLHRRVNDVRTHHLHVLTTRLAQTHGHIVVEGLDAAGMLRQKGLPGARARRRGLSDSALGTPRRHLSYKTGWYGSALVVADRWFPSLSVEPTVRPGLARLVAVKRGREAAAWLPNNPETGCKSRDH

SEQ ID NO: 3455 - protein, 407 aa, unidentified
MARFEVPEGWCVQAFRFTLDPTEDQARALARHFGARRKAYNWAVATLKADIEAWRVTGIGTVKPSLRVLRKRWNTVKDEVCVNAETGAVWWPECSKEAYADGIGGAVDAYWNWQNSRSGKREGKTMGFPRFKKKGRDQDRVTFTTGAMRVEPDRRHLTLPVVGTVRTHENTRRIERLIATGRARVLAISVRRNGTRLDASVRVLVQRPQQPNVAQPGSRVGVDVGVRRLATVANEAGAVLEEVPNPRPLDAALKELRYASRARSRCTKGSRHYRERTTEISRLHRRVNDVRTHHLHVLTTRLAQTHGHIVVEGLDAAGMLRQKGLPGARARRRGLSDSALGTPRRHLSYKTGWYGSALVVADRWFPSLSVEPTVRPGLARLVAVKRGREAAAWLPNNPETGCKSRDH

SEQ ID NO: 3456 - protein, 363 aa, unidentified
MHRAYKFRLYPNKEQTTLINKTIGCTRFVFNHFLAKRKDAYEQENKTLNYNDCSALLTQLKKEIEWLKEVDSTALQSTLKDLDSSYKKFFKEKKGYPKFKSKKNPKQSYTCKMNIKIEDNRIKLPKLGWVSFAKSREVEGRILSATIRCNPSGKYFVSVLCETESKLLPQVERTVGIDLGIKDFAILSTGERVANPKYYRKYEKQLVKWQRIQSRRQKGSNNRNKARTKVARLHEKIANTRNDFLHKLSTKLINESQVICLEDLQVENMVKNHKLAKSIADASWSMFRTMLEYKAEWYGRKVSIVGKQFPSSQLCSTPNCGYRNKEVKSLNLRSWICPHCGVQHDRDQNAAINIEQEGLRLLA

SEQ ID NO: 3457 - protein, 369 aa, unidentified
MEKAYKFRMYPNKKQQELINKTFGCCRFVYNKYLAKRIEVYKNDKETFTYKQCSSDLTNLKKELKWLKEPDKFSLQNALKDLDNAYKKFFKEKAGFPKFKSKKINRFSYKTNFTNGNIMYCGQHIKLPKLGMVKIRDKQVPKGRILNATISKEPSGRYYVSLCCTDVDIEVFENTNNQIGLDLGIKEFCISSCGEFIENPKYLKKSLNKLAKLQRELSRKTIGSLNRNKARLKVARLQEHIANQRNDFLQKLSTKLIKENDIICIEDLQVKNMIRNCKLSRLISDVSWSEFIRQLEYKANWHGRQIVKVGKFFASSQICNKCGYKNEEVKDLSIREWICPSCNETHDRDINASINILKEGLRLITTQNK

SEQ ID NO: 3458 - protein, 408 aa, unidentified
MMARFEVPEGWCVQAFRFTLDPTEDQARALARHFGARRKAYNWAVATLKADIEAWRVTGIGTVKPSLRVLRKRWNTVKDEVCVNAETGAVWWPECSKEAYADGIGGAVDAYWNWQNSRSGKREGKTMGFPRFKKKGRDQDRVTFTTGAMRVEPDRRHLTLPVVGTVRTHENTRRIERLIATGRARVLAISVRRNGTRLDASVRVLVQRPQQPNVAQPGSRVGVDVGVRRLATVANEAGAVLEEVPNPRPLDAALKELRYASRARSRCTKGSRHYRERTTEISRLHRRVNDVRTHHLHVLTTRLAQTHGHIVVEGLDAAGMLRQKGLPGARARRRGLSDSALGTPRRHLSYKTGWYGSALVVADRWFPSLSVEPTVRPGLARLVAVKRGREAAAWLPNNPETGCKSRDH

SEQ ID NO: 3459 - protein, 367 aa, unidentified
MLKAYKYRIYPSKEQEIQLAKTFGCCRFVYNQTLAYRKDAYEKEKNSISKTDCNNYCNRELKKVYEWLKEVDKFALTNAIYHMDSAYQKFFKEHAGCPKFKSKHDRHKSYTTNFTNGNITVDFDRERIKLPKLKEIKAKIHRNFAGQIKSATISQLPSGKYYVAILVETENVKKQETRGKIGLDLGIKDLCITSDGRKYENPKTIKNYERNLTKLQRQLAHKIKGSRNYQKKRKQIALCHEKITNTRKDYLHKISSEIISENQVIVSENLQIKNMIKNHKLAKSISDVSWYELTRQLEYKAKWNNRIYVKVDSFYASSQLCSCCGCQNKNIKDLSVRQWKCPNCGEIHDRDVNAAKNILAEGLRQIA

SEQ ID NO: 3460 - protein, 367 aa, unidentified
MLKAYKYRIYPSKEQEIQLAKTFGCCRFVYNQTLAYRKDAYEKEKNSISKTDCNNYCNRELKKVYKWLKEVDKFALTNAIYHMDSAYQKFFKEHAGCPKFKSKHDRHKSYTTNFTNGNITVDFDRERIKLPKLKEIKAKIHRNFAGQIKSATISQLPSGKYYVAILVETENVKKQETRGKIGLDLGIKDLCITSDGRKYENSKTIKNYERNLTKLQRQLAHKIKGSRNYQKKRKQIALCHEKITNTRKDYLHKISSEIISENQVIVSENLQIKNMIKNHKLAKSISDVSWYELTRQLEYKAKWNNRIYVKVDSFYASSQLCSCCGCQNKNIKDLSVRQWKCPNCGEIHDRDVNAAKNILAEGLRQIA

SEQ ID NO: 3461 - protein, 377 aa, unidentified
MNRAFKYRLYPTTEQRELFMKTFGCCRKVYNLMLAEKIESYKQTGKFAMVTPAKYKKEYPYLKEVDSLALANKQLDLQKAFKNHFDKSRKKKTGFPKFKSAKHSRKSYTTNNQGTTIRLFENGIKLPKAGIVKAKIHRQPEPDWIIKSATVSQDSDGKFYVSVLFEYQAPVCTYVPDTVNAIGLDYASNGLYVDDNGNVGTEHKYYRESHEKLAKAQRKLSRMVGSRKGETKSKNYIKQLQKVNKIQRHIANQRLDNLHKISTEIANQYDVVCVETLNMRAMANKGFGNGKATMDNGNGMFLTMLEYKLSERGKIFVKVNKWYPSSQLCHRCGTIHPEMKDIHNRTMRCSCGLVMNRDHNAAINIKKEGLRLLMSAA

SEQ ID NO: 3462 - protein, 289 aa, unidentified
MLKAYRYRIYPNKEQEIQLVKTFGCCRFVYNQTLAYRKDAYEKEKKSVSKTDCNNYCNRELKKVYEWLKEVDKFALTNAIYDMDNAYQKFFKEHAGYPKFKSKHSNRKSYTTNFTNGNITVDFDRERIKLPKLKRVKIKLHRKFSGQIKAATISKVPSGKYYVSVLVETEHSPLVKTNGKIGLDLGIKDLCITSDGKKYENPKTIKKYEKKLTKLQRQLANKTKGSRNYQKKRKQTALYYEKITNTRKDYLHKISSEIINENQVIVSENLQIKNMVKNHNLAKSISDVS

SEQ ID NO: 3463 - protein, 367 aa, unidentified
MLKAYRYRIYPNKEQEIQLAKTFGCCRFVYNQTLAYRKDAYEKEKKSVSKTDCNNYCNRELKKVYEWLKEVDKFALTNAIYNMDSAYQKFFKEHAGYPKFKSKHSNRQSYTTNFTNGNITVDFDRGRIKLPKLKMVKIKLHRKFSGWIKAATISKVPSGKYYVSVLVETEHSPLVKINGKIGLDLGIKDLCITSDGKKYENPKTIKKYEKKLVKLQRQLANKIKGSGNYQKKRKQIALCHEKITNTRRDYLHKISSEIINENQVIVSENLQIKNMVKNYNLAKSINDVSWYELTRQLEYKSKWNGRNYIKIDRFYASSQLCFSCGYKNKNVKDLKVRDWICPFCNTKHDRDINAAKNILEEGLRQVV

SEQ ID NO: 3464 - protein, 367 aa, unidentified
MQKAYRFRLYPNQKQQTLIHKTFGCCRFVFNHFLAKRKEVYEAERKTLGYNACSSMLTQLKKELEWLKEPDATALQTELRHLDDAFKKFFLKKHGFPRFKSRKNPVQSYTSKNNNGSITIQGNRIRLPKLGWVKFAKSREVEGRIISATIRKNPSGKYFVSVLVETEIHPLPACDRKVGIDLGVKDFAALSTREVIPNPKYLRQYEQNLIRWQRILSRRKQGGSNWHKARIKVARLHEKVVNCRKDFLHKLSTRLIHENQVICLEDLQVKNMQKNRHLAKSIADASWSMFRTMLEYKAKWYGRTIVVVDKTFPSSQLCSTPGCGYRYREVKNLGLREWTCPSCGTLHDRNINAARNILQEGLRLLAV

SEQ ID NO: 3465 - protein, 383 aa, unidentified
MKIHRAYRYELAPNRMQRVLLAKHAGAARFAYNWGLARRIALYEETGQSTNAIEQHRELNRLKKTDFPWMYEVSKCAPQEALRDLDRAFQHFFRGLKEGRRVGFPRFKKKGRDDSFRLTGSIRVLDNAIQLPRLGRIRLKRKPHVEGRILSATVKREADRWYVSLSAETEIPDPVPPSGEPVGVDLGISCFLALSDGTKIEAPKPLARYLRRLKRLSKRHSRKKPGSRNRRKSALALARLHRKIRNIRQDFLHKVTTELAKTKRAIAMEDLHVRGMVQNRALARAISDVGFGEFRRMLTYKCAWYGSELIVAPRFYPSSKTCSACGYVISELPLSAREWTCPACSTRHDRDINAAKNLLRISTASSAGSDACGDPSGGAALGC

SEQ ID NO: 3466 - protein, 367 aa, unidentified
MLKVYRYRIYPNKEQEIQLAKTFGCCRFVYNQTLAYRKDTYEKEKKSISKTGCNNYCNRELKKVYEWLKEVDKFALTNAIYNMDSAYQKFFKEHTGYPKFKSKHDNHKSYTTNFTNGNITVDFDRGRIKLPKLKRVKIKLHRKFSGRIKAATISKVPSGKYYVSVLVETEHSPLVKTNGQIGLDLGIKDLCITSDGKKYENPKTIKKYEKKLVKLQRQLANKTKGSRNYQKKRKQTALCYEKIVNARKDYLHKISSEIINENQVIVSENLQIKNMVKNHNLAKSISDASWYELTRQLEYKSKWNGRTYIKIDTFYASSQLCCSCGYKNTNVKDLKVRDWICPFCNTKHDRDINAAKNILSEGLRKVV

SEQ ID NO: 3467 - protein, 382 aa, unidentified
MEQLKAYKFRIYPTEEQEIFFAKSFGCVRKVYNLMLDDRKKAYEEVKNDSSKKMTFPTPAKYKKEFPFLKEIDSLALANAQLNLDKAYKNFFRDKSVGFPRFKSKKNPVQSYTTNNQNGTVALIDSKFIKVPKLKSLVRIKLHRQPKGIIKSATISRHSSGKYYISLLCKEEVRELPKSNSAVGIDLGIIDFAILSDGQKIDNNKFTSKMEKKLKREQRKLSRRALLAKQKGINLFEARNYQTQKRKVARLHEKVMNQRTDFLNKLSTEIIKNHDIICIEDLNTKGMLRNHKLAKSISDVSWSSFVSKLQYKADWYGRKIIKVDKWFPSSQICSNCGHKDGKKSLEIREWTCPICHTHHDRDINASINILTEGLRLHSMGLA

SEQ ID NO: 3468 - protein, 380 aa, unidentified
MEQLKAYNFRIYPTEEQAIFFAKTFGCVRKVYNLLLDERIKAYEIMKKDPSQKLKKPTPAKFKNDYPYLKEVDSLSLANAQLNLDKAYNNFFRNKSVGFPKFKSKSHPIQSYTTNNQHGTISLVDNKYIKLPKLKSLVRIKLHRQPQGELRSATISRHASGKYYLSLLCKEEIQKLPKTNTFVGIDLGITDFAILSDGQKINNQRFTSEMEQKLKREQRKLSRRGMRAKKAGKKLSEAKNYQKQKCKVARVHEKVKNQRNDFLNKLSTDLIKNHDVICIEDLHTKGLLRNHKLSKNISDVSWSSFVTKLQYKANWYGREIIKVDRWYPSSQICSSCEHKDGKKALSIREWTCPVCHTHHDRDINASINILNEGLRLQALV

SEQ ID NO: 3469 - protein, 424 aa, unidentified
MPFLFRETVQLKNDKKLLLRDFPHDILIGEQMFVYSELKKGVDLMEQLKAYKYRIYPTEEQVVFFAKTFGCVRKVYNLMLDERIKAYAAMKNVPSKKLKKPTPAKYKNDYPYLKEVDSLALANAQLNLDKAYNNFFRDKRVGFPKFKSKSSTVQSYTTNNQHGTISLVENNYIKLPKLKSLVCIKRHRHPKGEIRSATISYHSSGKYYLSLLCKEEIPKLPKTNTAIGIDLGITDFAILSDGQKIDNHRFTAEMERKVIREQRKLSRRGLQAKKAGKKLSEAKNYQKQKRKVARLHEKVKNQRNDFLNKLSTELIKNHDVICIEDLHTKGLLRNHKLAKSISDVSWSSFVAKLQYKADWYGREMIQVARWYPSSQLCSDCGHKDGKKPLQIRAWTCPVCHTHHDRDINASINILNEGLRMRAFA

SEQ ID NO: 3470 - protein, 404 aa, unidentified
MARFEVPEGWCVQAFRFTLDPTEDQARALARHFGARRKAYNWAVATLKADIEAWRVTGIGTVKPSLRVLRKRWNTVKDEVCVNAETGAVWWPECSKEAYADGIGGAVDAYWNWQNSRSGKREGKTMGFPRFKKKGRDQDRVTFTTGAMRVEPDRRHLTLPVVGTVRTHENTRRIERLIATGRARVLAISVRRNGTRLDASVRVLVQRPQQPNVAQPGSRVGVDVGVRRLATVANEAGAVLEEVPNPRPLDAALKELRYASRARSRCTKGSRRYRERTTEISRLHRRVNDVRTHHLHVLTTRLAQTRGHIVVEGLDAAGMLRQKGLPGGGARRRGRGLGPGHSAPALVLQDGLVRVGAGGRRPLVPVVKRGADRKTGPCPAGGCEARKGGSRMAAEQPRDGVQVA

SEQ ID NO: 3471 - protein, 310 aa, unidentified
MLKAYKFRIYPTNEQKEFLIQTFGCVRFTYNTLLKHHQQSGGGKSKKLTPASLKKEFLFLKVTDSLALANAQQNLKRAFQNYYQGRSGYPKLKLKKSVWQSYTTNNQKQTIWLKDDLLKVPKLKQPIAVHCHRPVTGQIKSATIMAKNGQQFFVSLLCEEQITPLPKTNVTTTLHFSPDQLVSGSDLVFFRTLCQKNVENKLTKAKRKLEIKAKSAQQRGVKLSAAQNYQKQKVKVQQLYHHKQQQKKAWMDELSLHLIKKYDFLYIKVPHNIQEGVFTLTDWQHFLVKLQYKATWYDKKVIFAAAEKVI

SEQ ID NO: 3472 - protein, 363 aa, unidentified
MHRAYKFRLYPNKEQATLINKTIGCTRFVFNHFLAKRKDAYEQENKTLNYNDSSALLTQLKKEIEWLKEVDSTALQTTLKDLDSSYKKFFKEKKGYPKFKSKNNPKQSYTCKMNIKIEGNRIKLPKLGWVSFAKSREVEGRILSATIRRNPSGKYFVSVLCETESQLLPKVEQTVGIDLGIKDFAILSTGEKVANPKYYRKYEKQLAKWQRIQSRRQKGSNNRNKARTKVARLHEKIANTRNDFLHKLSTKLINESQVICLEDLQVENMVKNHKLAKSIADASWSMFRTMLEYKAEWYGRKVSIVGKQFPSSQLCSTPNCGYRNKEVKSLNLRSWICPHCGVQHDRDQNAAINIEKEGLRLLA

SEQ ID NO: 3473 - protein, 367 aa, unidentified
MLKAYKYRIYPNNEQKVQIEKTFGCCRFVYNQTLAYRKERYEKEKKSVSKTDCNNYCNRELKKEYEWLKEVDKFALTNAIYNMDSSYQKFFREHAGYPKFKSKHDNHKSYTTNFTNGNITVDFDGNKVKLPKLKGVKVKLHRKFSGQIKSATISQVPSGKYYVSVLVETEHVELPHTTQNTGIDLGIKDLCITSGGKKYENPKIIRKNEKKLEKLQRQLAHKEKKSQNYYKTKKKIALCHEKITNTRKDYLHKISHEIISENQVIVSENLQIKNMVKNHHLAKSISDVSWYELTRQLEYKAKWNGREYVKIDTFYASSQLCSVCGYQNTETKNLTVREWICPVCGTNHDRDINAAKNILEEGLRQIA

SEQ ID NO: 3474 - protein, 367 aa, unidentified
MLKAYKYRIYPNMEQRVQIAKTFGCCRFVYNRTLAYRKEMYEKEKKSVSKTDCNNYCNRELKKENEWLKEVDKFALTNAIYNMDSAYQKFFKEHAGYPKFKSKHDSHRSYTTNFTNGNIAADFERNKVKLPKLKEVKAKLHRNFSGQIKSAAVSQVPSGKYYVSLLVETEHEELQHTSHSIGLDLGIKDLCITSAGKKYINPQIIRKHEKKLIKLQRQLAHKEKRSQNYYKIRKKIALCHEKITNTRKDYLHKISHELISENQVIVSEDLQIKNMVKNHHLAKSISDVSWYELTRQLEYKAKWNGREYVKTDTFYASSQLCSACGYQNTETKDLSVREWICPVCGTKHDRDINAAKNILAEGLRKTA

SEQ ID NO: 3475 - protein, 369 aa, unidentified
MKKAYKFRIYPNKKQQELINKTFGCCRFVYNKYLAKRIDVYKNDKETFTYKQCSSDLTNLKKELNWLKEPDKFSLQNALKDLDNAYKKFFKEKAGFPKFKSKKINRFSYKTNFTNGNIMYCGQHIKLPKLGMVKVRDKQVPKGRILNATISKEPSGRYYVSLCCTDVDIEVFENTNNHIGLDLGIKEFCISSCGEFIENPKYLKKSLNKLAKLQRELSRKTIGSLNRNKTRLKVARLQEHIANQRNDFLQKLSTKLIKENDIICIEDLQVKNMIRNRKLSRLISDVSWSEFIRQLEYKANWHGRQIVKVGKFFASSQICNKCGYKNEEVKDLNIREWICPSCNETHDRDINASRNILKEGLRLITIQNK

SEQ ID NO: 3476 - protein, 369 aa, unidentified
MEKACKFRIYPNKKQQELINKTFGCCRFVYNKYLAKRIEVYKNDRETFTYKQCSSDLTNLKKELKWLKEPDKFSLQNALKDLDNAYKKFFKEKAGFPKFKSKKINRFSYKTNFTNGNIMYCGQHIKLPKLGMVKIRDKQVPQGRILNATISKEPSGRYYVSLCCTDVDIEVFENTNNQIGLDLGIKEFCISSCGEFIENPKYLKKSLNKLAKLQRELSRKTIGSLNRNKARLKVARFQEHIANQRNDFLQKLSTKLIKENDIICIEDLQVKNMIRNRKLSRLISDVSWSEFIRQLEYKANWYGRKIVKVGKFFASSQICNKCGYKNEEVKDLNIREWICPSCNETHDRDINASINILKEGLRLITIQNK

SEQ ID NO: 3477 - protein, 380 aa, unidentified
MNKALKYRLYPTKTQMQMFAKTFGCCRKVWNLMLSDKIESYKTTGKFASVTPAKYKSDYPYLKEVDSLALANTQLNLQKAFRNCFSKTRKKSNAFPKYKSAKRCRKSYTTNNQKGTVAILGNSIRLPKVGAVKAVIHRMPDQDWRLKSATISQDSDGKYYASVLFEYESTPTDSVLCAENAIGLDYSSKSLYVDSDGDHGSHHKYYRESQKRLAKEQRRLSRKTGSRKGESKSSNYLKQLHKINKIHKHISNQRKDQLHKLSTGIANRYDIVCVESLNMKSLANRSFGNGRSTLDNGYGMFLDMLEYKLSDRGKCLVRVDKWFPSSQLCHCCGAINPLTKKLEVRKWTCPACGETHDRDINAAQNILTEGLRIYKQQFVA

SEQ ID NO: 3478 - protein, 396 aa, unidentified
MSKFEIPEGWTVQAFRFTLDPTEDQARALARHFGARRKAFNWTVATLKADIAAWHATGTETAKPSFRVMRARWNQAKDGVCVNDETGQVWWRECSKEAYADGVAGAVDAYWNWQQSRAGTRAGKRVGFPRFKKKGRDADRVCFTTGAMRVEPDRRHLTLPVIGTVRTHENTRRVQRLIAKGRARVLAISVRRNGTRLDASVRVLVQRPQQPTLARPDSRVGVDVGVRRLATVADADGNVIERVPNPRPLDAALTKLRHVSRARSRCTRGSRQYRERTNEMSRLHRRVNDVRTHHLHVLTTRLAKTHGRIAVERLDAAGMLRRKGLPGARARRRGLSDAALGTPRRHLSYKRLVRVGIGRRRPLVCLVENLPRLPACSGHRLGRNLALRPMRSTSSA

SEQ ID NO: 3479 - protein, 408 aa, unidentified
MMARFEVPEGWCVQAFRFTLDPTEDQARALARHFGARRKAYNWAVATLKADIEAWRVTGIGTVKPSLRVLRKRWNTVKDEVCVNAETGAVWWPECSKEAYADGIGGAVDAYWNWQNSRSGKREGKTMGFPRFKKKGRDQDRVTFTTGAMRVEPDRRHLTLPVVGTVRTHENTRRIERLIATGRARVLAISVRRNGTRLDASVRVLVQRPQQPNVAQPGSRVGVDVGVRRLATVANEAGAVLEEVPNPRPLDAALKELRYASRARSRCTKGSRRYRERTTEISRLHRRVNDVRTHHLHVLTTRLAQTRGHIVVEGLDAAGMLRQKGLPGARARRRGLSDSALGTPRRHLSYKTGWYGSALVVADRWFPSLSVEPTVRPGLARLVAVKRGREAAAWLPNNPETGCKSRDH

SEQ ID NO: 3480 - protein, 408 aa, unidentified
MMARFEVPEGWCVQAFRFTLDPTEDQARALARHFGARRKAYNWAVATLKADIEAWRVTGIGTVKPSLRVLRKRWNTVKDEVCVNAETGAVWWPECSKEAYADGIGGAVDAYWNWQNSRSGKREGKTMGFPRFKKKGRDQDRVTFTTGAMRVEPDRRHLTLPVVGTVRTHENTRRIERLIATGRARVLAISVRRNGTRLDASVRVLVQRPQQPNVAQPGSRVGVDVGVRRLATVANEAGAVLEEVPNPRPLDAALKELRYASRARSRCTKGSRCYRERTTEISRLHRRVNDVRTHHLHVLTTRLAQTHGHIVVEGLDAAGMLRQKGLPGARARRRGLSDSALGTPRRHLSYKTGWYGSALVVADRWFPSLSVEPTVRPGLARLVAVKRGREAAAWLPNNPETGCKSRDH

SEQ ID NO: 3481 - protein, 408 aa, unidentified
MMARFEVPEGWCVQAFRFTLDPTEDQARALARHFGARRKAYNWAVATLKAYIEAWRVTGIGTVKPSLRVLRKRWNTVKDEVCVNAETGAVWWPECSKEAYADGIGGAVDAYWNWQNSRSGKREGKTMGFPRFKKKGRDQDRVTFTTGAMRVEPDRRHLTLPVVGTVRTHENTRRIERLIATGRARVLAISVRRNGTRLDASVRVLVQRPQQPNVAQPGSRVGVDVGVRRLATVANEAGAVLEEVPNPRPLDAALKELRYASRARSRCTKGSRRYRERTTEISRLHRRVNDVRTHHLHVLTTRLAQTHGHIVVEGLDAAGMLRQKGLPGARARRRGLSDSALGTPRRHLSYKTGWYGSALVVADRWFPSLSVEPTVRPGLARLVAVKRGREAAAWLPNNPETGCKSRDH

SEQ ID NO: 3482 - protein, 408 aa, unidentified
MMARFEVPEGWCVQAFRFTLDPTEDQARALARHFGARRKAYNWAVATLKADIEAWRVTGIGTVKPSLRVLRKRWNTVKDEVCVNAETGAVWWPECSKEAYADGIGGAVDAYWNWQNSRSGKREGKTMGFPRFKKKGRDQDRVTFTTGAMRVEPDRRHLTLPVVGTVRTHENTRRIERLIATGRARVLAISVRRNGTRLDASVRVLVQRPQQPNVAQPGSRVGVDVGVRRLATVANEAGAVLEEVPNPRPLDAALKELRYASRARSRCTKGSRRYRERTTEISRLHRRVNDVRTHHLHVLTTRLAQTHGHIVVEGLDAAGMLRQKGLPGARARRRGLSDSALSTPRRHLSYKTGWYGSALVVADRWFPSLSVEPTVRPGLARLVAVKRGREAAAWLPNNPETGCKSRDH

SEQ ID NO: 3483 - protein, 408 aa, unidentified
MMARFEVPEGWCVQAFRFTLDPTEDQARALARHFGARRKAYNWAVATLKADIEAWRVTGIGTVKPSLRVLRKRWNTVKDEVCVNAETGAVWWPECSKEAYADGIGGAVDAYWNWQNSRSGKREGKTMGFPRFKKKGRDQDRVTFTTGAMRVEPDRRHLTLPVVGTVRTHENTRRIERLIATGRARVLAISVRRNGTRLDASVRVLVQRPQQPNVAQPGSRVGVDVGVRRLATVANEAGAVLEEVPNPRPLDAALKELRYASRARSRCTKGSRRYRERTTQISRLHRRVNDVRTHHLHVLTTRLAQTHGHIVVEGLDAAGMLRQKGLPGARARRRGLSDSALGTPRRHLSYKTGWYGSALVVADRWFPSLSVEPTVRPGLARLVAVKRGREAAAWLPNNPETGCKSRDH

SEQ ID NO: 3484 - protein, 408 aa, unidentified
MMARFEVPEGWCVQAFRFTLDPTEDQARALARHFGARRKAYNWAVATLKADIEAWRVTGIGTVKPSLRVLRKRWNTVKDEVCVNAETGAVWWPECSKEAYADGIGGAVDAYWNWQNSRSGKREGKTMGFPRFKKKGRDQDRVTFTTGAMRVEPDRRHLTLPVVGTVRTHENTRRIERLIATGRARVLAISVRRNGTRLDASVRVLVQRPQQPNVAQPGSRVGVDVGVRRLATVANEAGAVLEEVPNPRPLDAALKELRYASRARSRCPKGSRRYRERTTEISRLHRRVNDVRTHHLHVLTTRLAQTHGHIVVEGLDAAGMLRQKGLPGARARRRGLSDSALGTPRRHLSYKTGWYGSALVVADRWFPSLSVEPTVRPGLARLVAVKRGREAAAWLPNNPETGCKSRDH

SEQ ID NO: 3485 - protein, 408 aa, unidentified
MMARFEVPEGWCVQAFRFTLDPTEDQARALARHFGARRKAYNWAVATLKADIEAWRVTGIGTVKPSLRVLRKRWNTVKDEVCVNAETGAVWWPECSKEAYADGIGGAVDAYWNWQNSRSGKREGKTMGFPRFKKKGRDQDRVTFTTGAMRVEPDRRHLTLPVVGTVRTHENTRRIERLIATGRARVLAISVRRNGTRLDASVRVLVQRPQQPNVAQPGSRVGVGVGVRRLATVANEAGAVLEEVPNPRPLDAALKELRYASRARSRCTKGSRRYRERTTEISRLHRRVNDVRTHHLHVLTTRLAQTHGHIVVEGLDAAGMLRQKGLPGARARRRGLSDSALGTPRRHLSYKTGWYGSALVVADRWFPSLSVEPTVRPGLARLVAVKRGREAAAWLPNNPETGCKSRDH

SEQ ID NO: 3486 - protein, 408 aa, unidentified
MMARFEVPEGWCVQAFRFTLDPTEDQARALARHFGARRKAYNWAVATLKADIEAWRVTGIGTVKPSLRVLRKRWNTVKDEVCVNAETGAVWWPECSKEAYADGIGGAVDAYWNWQNSRSGKREGKTMGFPRFKKKGRDQDRVTFTTGAMRVEPDRRHLTLPVVGTVRTHENTRRIERLIATGRARVLAISVRCNGTRLDASVRVLVQRPQQPNVAQPGSRVGVDVGVRRLATVANEAGAVLEEVPNPRPLDAALKELRYASRARSRCTKGSRRYRERTTEISRLHRRVNDVRTHHLHVLTTRLAQTHGHIVVEGLDAAGMLRQKGLPGARARRRGLSDSALGTPRRHLSYKTGWYGSALVVADRWFPSLSVEPTVRPGLARLVAVKRGREAAAWLPNNPETGCKSRDH

SEQ ID NO: 3487 - protein, 408 aa, unidentified
MMARFEVPEGWCVQAFRFTLDPTEDQARALARHFGARRKAYNWAVATLKADIEAWRVTGIGTVKPSLRVLRKRWNTVKDEVCVNAETGAVWWPECSKEAYADGIGGAVDAYWNWQNSRSGKREGKTMGFPRFKKKGRDQDRVTFTTGAMRVEPDRRHLTLPVVGTVRTHENTRRIERLIATGRARVLAISVRRNGTRLDASVRVLVQRPQQPNVAQPGSRVGVDVGVRRLATVANEAGAGLEEVPNPRPLDAALKELRYASRARSRCTKGSRRYRERTTEISRLHRRVNDVRTHHLHVLTTRLAQTHGHIVVEGLDAAGMLRQKGLPGARARRRGLSDSALGTPRRHLSYKTGWYGSALVVADRWFPSLSVEPTVRPGLARLVAVKRGREAAAWLPNNPETGCKSRDH

SEQ ID NO: 3488 - protein, 408 aa, unidentified
MMARFEVPEGWCVQAFRFTLDPTEDQARALARHFGARRKAYNWAVATLKADIEAWRVTGIGTVKPSLRVLRKRWNTVKDEVCVNAETGAVWWPECSKEAYADGIGGAVDAYWNWQNSRSGKREGKTMGFPRFKKKGRDQDRVTFTTGAMRVEPDRRHLTLPVVGTVRTHENTRRIERLIATGRARVLAISVRRNGTRLDASVRVLVQRPQQPNVAQPCSRVGVDVGVRRLATVANEAGAVLEEVPNPRPLDAALKELRYASRARSRCTKGSRRYRERTTEISRLHRRVNDVRTHHLHVLTTRLAQTHGHIVVEGLDAAGMLRQKGLPGARARRRGLSDSALGTPRRHLSYKTGWYGSALVVADRWFPSLSVEPTVRPGLARLVAVKRGREAAAWLPNNPETGCKSRDH

SEQ ID NO: 3489 - protein, 408 aa, unidentified
MMARFEVPEGWCVQAFRFTLDPTEDQARALARHFGARRKAYNWAVATLKADIEAWRVTGIGTVKLSLRVLRKRWNTVKDEVCVNAETGAVWWPECSKEAYADGIGGAVDAYWNWQNSRSGKREGKTMGFPRFKKKGRDQDRVTFTTGAMRVEPDRRHLTLPVVGTVRTHENTRRIERLIATGRARVLAISVRRNGTRLDASVRVLVQRPQQPNVAQPGSRVGVDVGVRRLATVANEAGAVLEEVPNPRPLDAALKELRYASRARSRCTKGSRRYRERTTEISRLHRRVNDVRTHHLHVLTTRLAQTHGHIVVEGLDAAGMLRQKGLPGARARRRGLSDSALGTPRRHLSYKTGWYGSALVVADRWFPSLSVEPTVRPGLARLVAVKRGREAAAWLPNNPETGCKSRDH

SEQ ID NO: 3490 - protein, 408 aa, unidentified
MMARFEVPEGWCVQAFRFTLDPTEDQARALARHFGARRKAYNWAVATLKADIEAWRVTGIGTVKPSLRVLRKRWNTVKDEVCVNAETGAVWWPECSKEAYADGIGGAVDAYWNWQNSRSGKREGKTMGFPRFKKKGRDQDRVTFTTGAMRVEPDRRHLTLPVVGTVRTHENTRRIERLIATGRARVLAISVRRNGTRLDASVRVLVQRPQQPNVAQPGSRVGVDVGVRRLATVANEAGAVLEEVPNPRPLDAALKELRYASRARSRCTKGSRRYRERTTEISRLHRRVNDVRTHHLHVLTTRLAQTHGHIVVEGLDAAGMLRQKGLPGARARRRGLSDSALGTPRRHLSYKTGWYGSALVVADRWFPSLSVEPAVRPGLARLVAVKRGREAAAWLPNNPETGCKSRDH

SEQ ID NO: 3491 - protein, 408 aa, unidentified
MMARFEVPEGWCVQAFRFTLDPTEDQARALARHFGARRKAYNWAVATLKADIEAWRVTGIGTVKPSLRVLRKRWNTVKDEVCVNAETGAVWWPECSKEAYADGIGGAVDAYWNWQNSRSGKREGKTMGFPRFKKKGRDQDRVTFTTGAMRVEPDRRHLTLPVVGTVRTHENTRRIERLIATGRARVLAISVRRNGTRLDASVRVLVQRPQQPNVAQPGSRVGVDVGVRRLATVANEAGAVLEEVPNPRPLDAALKELRYASRARSRCTKGSRRYRERTTEISRLHRRVNDVRTHHLHVLTTRLAQTHGHIVVEGLDAAGMLRQKGLPGARARRRGLSDSARGTPRRHLSYKTGWYGSALVVADRWFPSLSVEPTVRPGLARLVAVKRGREAAAWLPNNPETGCKSRDH

SEQ ID NO: 3492 - protein, 408 aa, unidentified
MMARFEVPEGWCVQAFRFTLDPTEDQARALARHFGARRKAYNWAVATLKADIEAWRVTGIGTVKPSLRVLRKRWNTVKDEVCVNAETGAVWWPECSKEAYADGIGGAVDAYWNWQNSRSGKREGKTMGFPRFKKKGRDQDRVTFTTGAMRVEPDRRHLTLPVVGTVRTHENTRRIERLIATGRARVLAISVRRNGTRLDASVRVLVQRPQQPNVAQPGSRVGVDVGVRRLATVANEAGAVLEEVPNPRPLDAALKELRYASRARSRCTKGSRRYRERTTEISRLHRRVNDVRTHHLHVLTTRLAQTHGHIVVEGLDAAGMLRQKGLPGARARRRGLSDSALGTPRRHLSYKTGWYGSALVVADRWFPSLSVEPTVRPGLARLVAVKRGREAAVWLPNNPETGCKSRDH

SEQ ID NO: 3493 - protein, 408 aa, unidentified
MMARFEVPEGWCVQAFRFTLDPTEDQARALARHFGARRKAYNWAVATLKADIEAWRVTGIGTVKPSLRVLRKRWNTVKDEVCVNAETGAVWWPECSKEAYADGIGGAVDAYWNWQNSRSGKREGKTMGFPRFKKKGRDQDRVTFTTGAMRVEPDRRHLTLPVVGTVRTHENTRRIERLIATGRARVLAISVRRNGTRLDASVRVLVQRPQQPNVAQRGSRVGVDVGVRRLATVANEAGAVLEEVPNPRPLDAALKELRYASRARSRCTKGSRRYRERTTEISRLHRRVNDVRTHHLHVLTTRLAQTHGHIVVEGLDAAGMLRQKGLPGARARRRGLSDSALGTPRRHLSYKTGWYGSALVVADRWFPSLSVEPTVRPGLARLVAVKRGREAAAWLPNNPETGCKSRDH

SEQ ID NO: 3494 - protein, 408 aa, unidentified
MMARFEVPEGWCVQAFRFTLDPTEDQARALARHFGARRKAYNWAVATLKADIEAWRVTGIGTVKPSLRVLRKRWNTVKDEVCVNAETGAVWWPECSKEAYADGIGGAVDAYWNWQNSRSGKREGKTMGFPRFKKKGRDQDRVTFTTGAMRVEPDRRHLTLPVVGTVRTHENTRRIERLIATGRARVLAISVRRNGTRLDASVRVLVQRPQQPNVAQPGSRVGVDVGVRRLATVANEAGAVLEEVPNPRPLDAALKELRYASRARSRCTKGSRRYRERTTEISRLHRRVNDVRTHHLHVLTTRLAQTHGHIVVEGLDAAGMLRQKGLPGARARRRGPSDSALGTPRRHLSYKTGWYGSALVVADRWFPSLSVEPTVRPGLARLVAVKRGREAAAWLPNNPETGCKSRDH

SEQ ID NO: 3495 - protein, 408 aa, unidentified
MMARFEVPEGWCVQAFRFTLDPTEDQARALARHFGARRKAYNWAVATLKADIEAWRVTGIGTVKPSLRVLRKRWNTVKDEVCVNAETGAVWWPECSKEAYADGIGGAVDAYWNWQNSRFGKREGKTMGFPRFKKKGRDQDRVTFTTGAMRVEPDRRHLTLPVVGTVRTHENTRRIERLIATGRARVLAISVRRNGTRLDASVRVLVQRPQQPNVAQPGSRVGVDVGVRRLATVANEAGAVLEEVPNPRPLDAALKELRYASRARSRCTKGSRRYRERTTEISRLHRRVNDVRTHHLHVLTTRLAQTHGHIVVEGLDAAGMLRQKGLPGARARRRGLSDSALGTPRRHLSYKTGWYGSALVVADRWFPSLSVEPTVRPGLARLVAVKRGREAAAWLPNNPETGCKSRDH

SEQ ID NO: 3496 - protein, 408 aa, unidentified
MMARFEVPEGWCVQAFRFTLDPTEDQARALARHFGARRKAYNWAVATLKADIEAWRVTGIGTVKPSLRVLRKRWNTVKDEVCVNAETGAVWWPECSKEAYADGIGGAVDAYWNWQNSRSGKREGKTMGFPRFKKKGRDQDRVTFTTGAMRVEPDRRHLTLPVVGTVRTHENTRRIERLIATGRARVLAISVRRNGTRLDASVRVLVQRPQQPNVAQPGSRVGVDVGVRRLATVANEAGAVLEEVPNPRPLDAALKELRYASRARSRCTKGSRRYRERTTEISRLHRRVNDVRTHHLHVLTTRLAQTHGHIVVEGLDAAGMLRQKGLPGARSRRRGLSDSALGTPRRHLSYKTGWYGSALVVADRWFPSLSVEPTVRPGLARLVAVKRGREAAAWLPNNPETGCKSRDH

SEQ ID NO: 3497 - protein, 408 aa, unidentified
MMARFEVPEGWCVQAFRFTLDPTEDQARALARHFGARRKAYNWAVATLKADIEAWRVTGIGTVKPSLRVLRKRWNTVKDEVCVNAETGAVWWPECSKEAYADGIGGAVDAYWNWQNSRSGKREGKTMGFPRFKKKGRDQDRVTFTTGAMRVEPDRRHLTLPVVGTVRTHENTRRIERLIATGRARVLAISVRRNGTRLDASVRVLVQRPQQPNVAQPGSRVGVDVGVRRLATVANEAGAVLEEVPNPRPLDAALKELRYASRARSRCTKGSRRYRERTTEISRLHRRVNDVRTHHLHVLTTRLAQTHGHIVVEGLDAAGMLRQKGLPGARARRRGLSDSALGTPRRHLSYKTGWYGSALVVADRWFPSLSVEPTVRPGLARLVAVKRGREAAPWLPNNPETGCKSRDH

SEQ ID NO: 3498 - protein, 407 aa, unidentified
MARFEVPEGWCVQAFRFTLDPTEDQARALARHFGARRKAYNWAVATLKADIEAWRVTGIGTVKPSLRVLRKRWNTVKDEVCVNAETGAVWWPECSKEAYADGIGGAVDAYWNWQNSRSGKREGKTMGFPRFKKKGRDQDRVTFTTGAMRVEPDRRHLTLPVVGTVRMHENTRRIERLIATGRARVLAISVRRNGTRLDASVRVLVQRPQQPNVAQPGSRVGVDVGVRRLATVANEAGAVLEEVPNPRPLDAALKELRYASRARSRCTKGSRRYRERTTEISRLHRRVNDVRTHHLHVLTTRLAQTHGHIVVEGLDAAGMLRQKGLPGARARRRGLSDSALGTPRRHLSYKTGWYGSALVVADRWFPSLSVEPTVRPGLARLVAVKRGREAAAWLPNNPETGCKSRDH

SEQ ID NO: 3499 - protein, 381 aa, unidentified
MTNRAIKYRAYPTTEQSVMFAKTFGCCRKVYNLMLSDKIESYKSTGKFVTVTPAKYKKDYLYLKEVDSLALANVQLNLQSAFKNRFSKSRKKNNGFPKFKSAKHSRKSYTTNNQHGTVAITDNSIRLPKIGHVKTVIHRKPNDSWIVKSATVSQESDGKFYISVLFEIADSINTYVADTNNCIGLDYASDGLYVDNNGNVGTNHKYYRESHDKLAKSQRRLSRMQGSKKHEIKSNNYLKQLRKINKIHRHIANQRSDNLHKISTEIANQYDVVCVESLNMKSMSNKGFGNGKATLDNGYGMFLSMLEYKLSERNKYLVKVDKWFPSSQICHCCGKIHPEMKNLTIRTMKCDCGLTLSRDQNAAINILREGLRILNESFAVA

SEQ ID NO: 3500 - protein, 375 aa, unidentified
MVNRAIKYRAYPTTEQEVIFAKTFGCCRKVWNLMLSDKITYYRTTGESLQTTPAMYKKDYVFLKEVDSLALANVQMNLQKAYKNCFDKKRKKRNGFPKFKSRKHTRKSYTTNNQKGTVAIVDNKYIKLPKIGLVKAVIHRQPEADWIIKSATVSQESDGTFYISILFEYEKNIVKISKSNNVIGLDYKSDGLYMDSNGNIGSNHKYYKESHKKLAREQRKLSRKVGSKKNQIKSNNYLKQLKKVNKIHRHIANQRLDNLHKLSTEIANQYDVVCVESLDMKAMSNKGFGNGKATLDNGYGLFLNMLEYKLFDKGKYFIKVDKWYPSSQLCSCCGNRKKLTLTDRVYKCDCGFKLDRDYNAAINIKNEGLRLLEVA

SEQ ID NO: 3501 - protein, 373 aa, unidentified
MNKAIKYRVYPTTEQEIFFAKTFGCCRKVYNLMLADKIAYFKATGESLQTTPAQYKKDYPFLKEVDSLALANAQLNLQAAYKNFFDKKRKVRNGFPKFKSRKARNSYTTNNQKGTVSIINDKYVKLPKIGKVKAIIHRTPDADWKIKSATVSRERDGSYYISILFEFDKVIIKVAKSDNAIGLDYKSDGLYMDSNGNIGSNHKYYRQSHKKLAKAQSRLSRMKGSKKNEVKSNNYLKQLQKVNKIHRHISNQRLDNLHKKSAEIANQYDVVCVESLNMRAMSNKGFGNGKATLDNGYGMFLSMLEYKLNDRGKYFIKVDKWYPSSQLCSCCGKKKKITLVDRIYKCDCGFTIDRDLNAAINIKNEGLRLLEVA

SEQ ID NO: 3502 - protein, 367 aa, unidentified
MLKAYKYRIYPSKEQEIQLAKTFGCCRFVYNQTLAYRKDAYEKEKNSISKTDCNNYCNRELKKVYEWLKEVDKFALTNAIYHMDSAYQKFFKEHAGCPKFKSKHDRHKSYTTNFTNGNITVDFDRERIKLPKLKEIKAKIHRNFAGQIKSATISQLPSGKYYVAILVETENVKKQETRGKIGLDLGIKDLCITSDGRKYENSKTIKNYERNLTKLQRQLAHKIKGSRNYQKKRKQIALCHEKITNTRKDYLHKISSEIISENQVIVSENLQIKNMIKNHKLAKSISDVSWYELTRQLEYKAKWNNRIYVKVDSFYASSQLCSCCGCQNKNIKDLSVRQWKCPNCGEIHDRDVNAAKNILAEGLRQIA

SEQ ID NO: 3503 - protein, 400 aa, unidentified
MILAHKIALDPNNAQATYFARACGVARFAYNWALAEWKRQYEATKADSALPKPSQMSLRRQLNAIKREQFPWMLEVTKNAPQMAIIQLGEAFNNFFKKHARYPTFRRKGVHDRFTLTNDQFSVEGSRIRIPALGWVRMREPLRFEGKITSATVSRVADRWFASIAVETQDTSHLAQAENQGMVGVDLGIQALATLSTGEVVHGPKALAMLLARLRRTSRSLSRKVKGSANRRKARAKLAKLHARIANVRQDGLQKLSADLTRRFSTIVLEDLNVRGMVRNRHLARAVSDMGFAEFRRQVEYKAAMRGGEVILADRFYPSSKTCSGCGHVLDVLPLSVREWTCPACGAAHDRDHNAAVNLKNLAASSAVSACGEEGSGARRKARVKPASTKQEVSFDHVCA

SEQ ID NO: 3504 - protein, 381 aa, unidentified
MANKAIKYRVYPTTEQSVMFAKTFGCCRKVYNLMLSDKIESYKSTGKFVTVTPAKYKKDYLYLKEVDSLALANVQLNLQSAFKNRFSKSRKKNNGFPKFKSAKRSRKSYTTNNQHGTVAITDNSIRLPKIGHVKTVIHRKPNDSWIVKSATVSQESDGKFYISVLFEIADSINTYVADTNNCIGLDYASDGLYVDNNGNVGTNHKYYRESHDKLAKSQRRLSRMQGSKKHEIKSNNYLKQLRKVNKIHRHIANQRLDNLHKISTEIANQYDVVCVESLNMKSMSNKGFGNGKATLDNGYGMFLSMLEYKLLERNKYLVKVDKWFQSSQICHCCGKIHPEMKNLTIRTMKCDCGLTISRDQNAAINILREGLRILNESFAVA

SEQ ID NO: 3505 - protein, 380 aa, unidentified
MERLKAYKFRLYPNEEQELFFAKSFGCVRKVYNLMLNDRIIGYEETKNDSSKKRIFPTPAKYKKEFPYLKEVDSLALANAQRNLDKAYKNFFRDKSIGFPRFKSKKNPVQSYTTNNQNGTVALLNNKFIKVPKLKSLIRIKLHRQPKGMIKSATISRHSSGKYYISLLCKEEIIELPKVNSAIGIDLGITDFAILSNGQKIDNNKFTSKMAKKLKREQRKLSRRALLAKQKSINLYDARNYQKQKRKVARLHEKVVNQRTDFLNKLSTAIIKNHDIICIEDLNTKGMLRNPKLAKSISDVSWSSFVTKLQYKADWYGREIIKIDKWFPSSQICSECGHKDGKKSLKIREWACPICHTCHDRDINASINILTEGLRIKSLS

SEQ ID NO: 3506 - protein, 407 aa, unidentified
MARFEVPEGWCVQAFRFTLDPTEDQARALARHFGARRKAYNWAVATLKADIEAWRVTGIGTVKPSLRVLRKRWNTVKDEVCVNAETGAVWWPECSKEAYADGIGGAVDAYWNWQNSRSGKREGKTMGFPRFKKKGRDQDRVTFTTGAMRVEPDRRHLTLPVVGTVRTHENTRRIERLIATGRARVLAISVRRNGTRLDASVRVLVQRPQQPNVAQPGSRVGVDVGVRRLATVANEAGAVLEEVPNPRPLDAALKELRYASRARSRCTKGSRRYRERTTEISRLHRRVNDVRTHHLHVLTTRLAQTHGHIVVEGLDAAGMLRQKGLPGARARRRGLSDSALSTPRRHLSYKTGWYGSALVVADRWFPSLSVEPTVRPGLARLVAVKRGREAAAWLPNNPETGCKSRDH

SEQ ID NO: 3507 - protein, 407 aa, unidentified
MARFEVPEGWCVQAFRFTLDPTEDQARALARHFGARRKAYNWAVATLKADIEAWRVTGIGTVKPSLRVLRKRWNTVKDEVCVNAETGAVWWPECSKEAYADGIGGAVDAYWNWQNSRSGKREGKTMGFPRFKKKGRDQDRVTFTTGAMRVEPDRRHLTLPVVGTVRTHENTRRIERLIATGRARVLAISVRRNGTRLDASVRVLVQRPQQPNVAQPGSRVGVDVGVRRLATVANEAGAVLEEVPNPRPLDAALKELRYASRARSRCTKGSRRYRERTTEISRLHRRVNDVRTHHLHVLTTRLAQTHGHIVVEGLDAAGMLRQKGLPGARARRRGLSDSALGTPRRHLSYKTGWYGSALVVADRWFPSLSVEPTVRPGLARLVAVKRGREAAPWLPNNPETGCKSRDH

SEQ ID NO: 3508 - protein, 459 aa, unidentified
MKTMQAYRFALDLTPGQEREVLAHAGAARVAHNWALARVKAVMDQRSAERSYGVPQERLTPPLSWSLAALRKAWNQAKCDVAPWWGEVSKEAFNTGLDALARGLKNWADSRKGLRAGRPVGFPRFKSRRRTTPSVRFTTGAIRVEPDRTHVVLPRIGRLKLHESARKLARRLEAGTARIMSATVRRDGGRWHVSFTVEVERAARSPARPQSVVGVDVGITHLAVLSTGELVGNPRHLAAAQQRMRTLGRALSRKTGPDRRTGRRPSKRWEQAAARLGRAHARVANLRRDGLHKITTRLTRAHGTIVVEDLNVAGMLANRRLARHVADAGFAEIRRQLTYKTSWSNGRLLVADRWYPSSKTCSACGTVKTKLALHERQYRCEVCGLVIDRDLNASHNLAALAAEYDTAGSGPVAARGADQKTRVRGQVAMKREPGTTSVGQTGTVLPQGRTTNRALVKAY

SEQ ID NO: 3509 - protein, 456 aa, unidentified
MQAYRFALDLTAGQECDVLAHAGAARVAHNWALAKVKAIMDQRAAERSYGLPDELLTPSLSWSLAGLRKAWNAAKPDVAPWWAEVSKEAFNTGLDALARGLKNWADSRKGTRAGRPVGFPRFKSRRRTTPSVRFTTGAIRVEPDRMHVVLPRLGRLKLHESARKLARRLDNGTARIMSATVRRDGGRWHVSFTVEVERAERVPARPDTVVGVDVGIKHLAVLSTAELVDNPRHLVAAQQRMRALGRALSRKIGPDRRTGRRASKRWQRAAARIGRAHARVANLRRDGLHKLTTRLATTYGTVVVEDLNVTGMLANRRLARHIADAGFAEIRRQLAYKTGWNGGRLLTADRWYPSSKTCSGCGAVKTKLALHERQFVCEVCGLVLDRDRNAALNLAALAAEFDTAGSGPAAARGADRKTRVRGQVAEKREPGTTPVGQTGTVLPQGRTIDRVLTKAH

SEQ ID NO: 3510 - protein, 372 aa, unidentified
MIAVEKAYKFRMYPNKKQQKLINKTFGCCRFVYNKYLAKRIDVYKNDKETFTYKQCSSDLTNLKKELKWLKEPDKFSLQNALKDLENAYEKFFKEKTGFPKFKSKKTNRFSYKTNFTNGNIMYCGQHIKLPKLGMVKIRDKQVPKGRILNATISKEPSGRYYVSLCCTDVDTEAFENTNNQIGLDLGIKEFCISSCGEFIENPKYLKKSLSKLAKLQRELSRKTIGSLNRNKARLKVARLQEHIANQRNDFLQKLSTKLIKENDIICIEDLQVKNMIRNHKLSRLISDVSWSEFIRQLEYKANWHGRQIVKVGKFFASSQICNKCGYKNEEVKDLNIRDWICPSCNETHDRDINASINILKEGLRLITIQNK

SEQ ID NO: 3511 - protein, 373 aa, unidentified
MLKAYKYRLYPNEIQKEQLAKAFGCVRFVYNYYLAKKIKLYEDRQESLSKIDCNNHLNRELKKELVWLKEVDKFALTNSIYNLDTAFQNFFRRVKQGNKQAGFPKFKSKHINKFSYTTNFTNNNIEVNFSEKRIKLPKLKWVEAKVHREFDGKIKSATISKNPSGRYFVSILVDTEIAELPRVNKNIGFDLGISDFLIDSDGNKISNPKNLSKYERKLAKLQIQLSKKQKGSNNRNKMRIKIARLHEKILDARKDFLHKLSSQIINENQVIVSEDLNVSGMTKNSKLAKSISDASWSEFVRQLEYKANWYSRTYIKIGRFFPSSQLCSSCRVKNTEVKYLLIREWACDNCGTHHDRDVNSSKNILQEGLRKLA

SEQ ID NO: 3512 - protein, 376 aa, unidentified
MNKAIKYRIYPTTEQAVMFLKTFGCCRKVYNLMLSDKIESYKSTGKFAVVTPAKYKKDYPYLKEVDSLALANVQLNLQDAFGSCFSKSRKTNNGFPKFKSAKRSRKSYTTNCQYPKTSNKLKQPTIRLDDKSIILPKVGVVKAVIHRKPLDGWMLKSATVSMDGDGKFYVSCLFEYEGLITLNSSTDKVLGLDYKSDGLYMDSDGNVGSNHKYYRESHVKLAKAQRKLKHKTIGSNNYRKQQLRINRIHKHIVNQRLENLHILSTKIANSYDVVCVESLGIRSMSNKGFGNGKATMDNGYGMFLKMLEYKLTDRGKRYIKVDKWFPSTQLCSCCGSRKKLALNERIYKCSCGLTINRDLNAAINIRNEGLRILQSA

SEQ ID NO: 3513 - protein, 369 aa, unidentified
MEKAYKFRMYPNKKQQELINKTFGCCRFVYNKYLAKRIDVYKNDKETFTYKQCSSDLTNLKKELNWLKEPDKFSLQNALKDLDNAYKKFFKEKAGFPKFKSKKINRFSYKTNFTNGNIMYCGQHIKLPKLGMVKVRDKQVPKGRILNATISKEPSGRYYVSLCCTDVDIEVFENTNNHIGLDLGIKEFCISSCGEFIENPKYLKKSLNKLAKLQRELSRKTIGSLNRNKTRLKVARLQEHIANQRNDFLQKLSTKLIKENDIICIEDLQVKNMIRNRKLSRLISDVSWSEFIRQLEYKANWHGRQIVKVGKFFASSQICNKCGYKNEEVKDLNIREWICPSCNETHDRDINASRNILKEGLRLITIQNK

SEQ ID NO: 3514 - protein, 408 aa, unidentified
MIARFEVPEGWCVQAFRFTLDPTEDQARALARHFGARRKAYNWAVATLKADIEAWRVTGIGTVKPSLRVLRKRWNTVKDEVCVNAETGAVWWPECSKEAYADGIGGAVDAYWNWQNSRSGKREGKTMGFPRFKKKGRDQDRVTFTTGAMRVEPDRRHLTLPVVGTVRTHENTRRIERLIATGRARVLAISVRRNGTRLDASVRVLVQRPQQPNVAQPGSRVGVDVGVRRLATVANEAGAVLEEVPNPRPLDAALKELRYASRARSRCTKGSRRYRERTTEISRLHRRVNDVRTHHLHVLTTRLAQTHGHIVVEGLDAAGMLRQKGLPGARARRRGLSDSALGTPRRHLSYKTGWYGSALVVADRWFPSLSVEPTVRPGLARLVAVKRGREAAAWLPNNPETGCKSRDH

SEQ ID NO: 3515 - protein, 459 aa, unidentified
MRTIQAYRFALDLTSGQERNVLAHAGAARVAHNWALAKVKAVMDQRAAERSYGVQDDLLTPSLSWSLAGLRKAWNHAKGDVAPWWGEVSKEAFNTGLDALARGLKNWADSRNGKRAGKPVGFPRFKSRRRATPSVRFTTGAIRVEPDRKHVVLPRLGRLKLHESARKLARRLDNGTARIMSATVRRDGGRWHVSFTVEVERTERQPAHPSSVVGVDVGIKHLAVLSTGEMVDNPRHLLAAQQRMRVLGRALSRKTGPDRRTGRRVSKRWEQAATRLGRAHARVANLRRDGLHKLTTRLAREHGTVVVEDLNVTGMLANRRLARHIADAGFAEIRRQLTYKTEWNGGRLLLADRWYPSSKTCSGCGAVKTKLALHEREYECEACGLVIDRDRNAARNLAALAAEFDTAGSGPVAGRGDDRKTRIRGQVSVKRQPGTASAGQTGTVLPQGRTTIRAFARAH

SEQ ID NO: 3516 - protein, 407 aa, unidentified
MARFEVPEGWCVQAFRFTLDPTEDQARALARHFGARRKAYNWAVATLKADIEAWRVTGIGTVKPSLRVLRKRWNTVKDEVCVNAETGAVWWPECSKEAYADGIGGAVDAYWNWQNSRSGKREGKTMGFPRFKKKGRDQDRVTFTTGAMRVEPDRRHLTLPVVGTVRTHENTRRIERLIATGRARVLAISVRRNGTRLDASVRVLVQRPQQPNVAQPGSRVGVDVGVRRLATVANEAGAVLEEVPNPRPLDAALKELRYASRARSRCTKGSRRYRERTTEISRLHRRVNDVRTHHLHVLTTRLAQTHGHIVVEGLDAAGMLRQKGLPGARARRRGLSDSALGTPRRHLSYKTGWYGSALVVADRWFPSLSVEPTVRPGLARLVAVKRGREAAAWLPKNPETGCKSRDH

SEQ ID NO: 3517 - protein, 397 aa, unidentified
MPKFEVPDGWTVQAFRFTLDPTEDQAKALARHFGARRKAYNWTVATLKADIQAWHASGTVTAKPSLRVLRKRWNTVKDDVCVNTETGVAWWPECSKEAYADGIAGAVEAYWNWQTSRAGKRAGKRVGFPRFKRKGRDQDRVSFTTGAMRVEPDRRHLTLPVIGTVRTHENTRRIERLIKAGRARVLAISVRRNGTRLDASVRVLVQRPQQPKVVHPGSRVGVDVGVRRLATVATADGTAIEQVENPRPLGAALRELRHVCRARSRCTKGSRRYRERTTQISRLHRRVNDVRTHHLHVLTTRLAQTHGRIVVEGLDATEMLRQKGLPGARARRRGLSDAALGTPRRHLSYKTVWYGSALVVAAPLVPFVKTLPRLPACARHRLGRTMAMRPMLSGPSA

SEQ ID NO: 3518 - protein, 407 aa, unidentified
MARFEVPEGWCVQAFRFTLDPTEDQARALARHFGARRKAYNWAVATLKADIEAWRVTGIGTVKPSLRVLRKRWNTVKDEVCVNAETGAVWWPECSKEAYADGIGGAVNAYWNWQNSRSGKREGKTMGFPRFKKKGRDQDRVTFTTGAMRVEPDRRHLTLPVVGTVRTHENTRRIERLIATGRARVLAISVRRNGTRLDASVRVLVQRPQQPNVAQPGSRVGVDVGVRRLATVANEAGAVLEEVPNPRPLDAALKELRYASRARSRCTKGSRRYRERTTEISRLHRRVNDVRTHHLHVLTTRLAQTHGHIVVEGLDAAGMLRQKGLPGARARRRGLSDSALGTPRRHLSYKTGWYGSALVVADRWFPSLSVEPTVRPGLARLVAVKRGREAAAWLPNNPETGCKSRDH

SEQ ID NO: 3519 - protein, 407 aa, unidentified
MARFEVPEGWCVQAFRFTLDPTEDQARALARHFGARRKAYNWAVATLKADIEAWRVTGIGTVKPSLRVLRKRWNTVKDEVCVNAETGAVWWPECSKEAYADGIGGAVDAYWNWQNSRSGKREGKTMGFPRFKKKGRDQDRVTFTTGAMRVEPDRRHLTLPVVGTVRTHENTRRIERLIATGRARVLAISVRRNGTRLDASVRVLVQRPQQPNVAQPGSRVGVDVGVRRLATVANEAGAVLEEVPNPRPLDAALKELRYASRARSRCTKGSRRYRERTTEISRLHRRVNDVRTHHLHVLTTRLAQTHGHIVVEGLDAAGMLRQKGLPGARARRRGLSDSALGTPRRHLSYKTGWYGSALVVADRWFPSLSVEPTVRPGLARLVAVKRGREAAAWLPNNPETGCKSSDH

SEQ ID NO: 3520 - protein, 407 aa, unidentified
MARFEVPEGWCVQAFRFTLDPTEDQARALARHFGARRKAYNWAVATLKADIEAWRVTGIGTVKPSLRVLRKRWNTVKDEVCVNAETGAVWWPECSKEAYADGIGGAVDAYWNWQTSRSGKREGKTMGFPRFKKKGRDQDRVTFTTGAMRVEPDRRHLTLPVVGTVRTHENTRRIERLIATGRARVLAISVRRNGTRLDASVRVLVQRPQQPNVAQPGSRVGVDVGVRRLATVANEAGAVLEEVPNPRPLDAALKELRYASRARSRCTKGSRRYRERTTEISRLHRRVNDVRTHHLHVLTTRLAQTHGHIVVEGLDAAGMLRQKGLPGARARRRGLSDSALGTPRRHLSYKTGWYGSALVVADRWFPSLSVEPTVRPGLARLVAVKRGREAAAWLPNNPETGCKSRDH

SEQ ID NO: 3521 - protein, 407 aa, unidentified
MARFEVPEGWCVQAFRFTLDPTEDQARALARHFGARRKAYNWAVATLKADIEAWRVTGIGTVKPSLRVLRKRWNTVKDEVCVNAETGAVWWPECSKEAYADGIGGAVDAYWNWQNSRSGKREGKTMGFPRFKNKGRDQDRVTFTTGAMRVEPDRRHLTLPVVGTVRTHENTRRIERLIATGRARVLAISVRRNGTRLDASVRVLVQRPQQPNVAQPGSRVGVDVGVRRLATVANEAGAVLEEVPNPRPLDAALKELRYASRARSRCTKGSRRYRERTTEISRLHRRVNDVRTHHLHVLTTRLAQTHGHIVVEGLDAAGMLRQKGLPGARARRRGLSDSALGTPRRHLSYKTGWYGSALVVADRWFPSLSVEPTVRPGLARLVAVKRGREAAAWLPNNPETGCKSRDH

SEQ ID NO: 3522 - protein, 407 aa, unidentified
MARFEVPEGWCVQAFRFTLDPTEDQARALARHFGARRKAYNWAVATLKADIEAWRVTGIGTVKPSLRVLRKRWNTVKDEVCVNAETGAVWWPECSKEAYADGIGGAVDAYWNWQNSRSGKREGKTMGFPRFKKKGRDQDRVTFTTGAMRVEPDRRHLTLPVVGTVRTHENTRRIERLIATGRARALAISVRRNGTRLDASVRVLVQRPQQPNVAQPGSRVGVDVGVRRLATVANEAGAVLEEVPNPRPLDAALKELRYASRARSRCTKGSRRYRERTTEISRLHRRVNDVRTHHLHVLTTRLAQTHGHIVVEGLDAAGMLRQKGLPGARARRRGLSDSALGTPRRHLSYKTGWYGSALVVADRWFPSLSVEPTVRPGLARLVAVKRGREAAAWLPNNPETGCKSRDH

SEQ ID NO: 3523 - protein, 447 aa, unidentified
MSTATVMQAYRFALDPSAAQARDLERHAGAARFAFNWALAQVKANIGQRTAERSYGVDGEDLTASLGWNLPALRRAWNAAKSEIAPWWSECSKEAFNTGLDGVARSLKNWADSKSGKRAGRKVGFPRFKARRRTTPSVRFTTGVIRVETDRKHVTLPRIGAIKTHESTRKLARRLETGTARVLSATVRRDAGRWYCAFTVEVARHVSAPARPDATVGVDLGIKALAVLSTGEPVPNPRHLNRALKALRTASRTLSRRVGPDRRTGQRPSARWETARREVTRIHTRVANLRKDAIHKLTTDLATTYGTVVVEDLNVSSMLKNHKLARHIADASFGEIRRQLDYKTGWNGGQLAVADRWFPSSKTCSGCGTVKPKLGLADRIFTCDACGLVIDRDLNAALNLKQYVDLEWPGDAKQGVEPTRRPSPAWQVAVKRQPRTISVGKTGTADR

SEQ ID NO: 3524 - protein, 439 aa, unidentified
MKAVQAYRFALDLTPGQERDVLAHAGAARVAHNWALARAKAVMDQRTAESSYGVPGELLTPPLSWSLAGLRKAWNQAKPQVAPWWPEVSKEAFNTGLDALARGLKNWAGSRTGTRAGRPVGFPRFKSRRRTTPSVRFTTGSIRVEPDRMHVVLPRLGRLKLHESARKLARRLDLGTARIMSATVRRDRGRWHVSFTVEVERAEHIPARPASVVGVDVGIKTLAVLSTGELIDNPRHLVAAQQRMRSLARALSRKTGPDRRTGRRPSKRWEQAAARLGGAHTRVSNLRRDGLHKLTTRLTREHHTIVVEDLNVTGMLRNRRLARHIADAGFAEIRRQLAYKTGWNGGRLLIADRWYASSKTCSACGTVKAKLALSEREYHCQACGLIIDRDRNAALNLAALAAQFDTAGSGPVAGRGADQKPRTRGQVATKRQPGTTPVG

SEQ ID NO: 3525 - protein, 313 aa, unidentified
MIVTHAYRFALDPTPGQVGALLRHAGAARVAFNWGITQVKANLGQREAERSYGIAEAGLTPSFGWSMYSLRKAWNAAKAEVAPWWAECSKEAYATGLDQLARDWSGSRRGKRKGPRMGFPRYKSKRKTTPSVRFTTGTIRLEDDRRHVTLPVLGTIRAHESTRKLHRRIAAGTAVVKSATVRREAGRWFVSFTCDVERTDRTPSRADTVIGVDLGIKHLAVFSEGRPTAENPRHYDTARRKLGRLSRTAARRLGPDRRTGQQPSKRWQRADAARNRVHYRTANLRRDALHKLTTPLAREYGTVVVEDLNVSGM

SEQ ID NO: 3526 - protein, 368 aa, unidentified
MNIAYHFRIYPNREQEVLLAKTFGCCRFLYNQMLNDKIREYEATKKMLRNTPAMYKKAYPFLKEVDSLALANVQMHLEKAYKNFFRDPKIGFPKFKSKHRSRKSYTTNVVNGNIQVEDHQIKLPKLKWIRMKKHRDIPEKYCLKSVTISMEPSGKYYASLLYEKTDCENQAEELDYEDAKILGIDYAMHGMAVFSEDIQKENEGYFRKSEERLAREQRKLSHCVKGSNNYYRQKKRVALCHEKIRNQRKDFLHKLSHEMAETYDVVAVEDIDMKAMSQCMHFGKSVMDNGYGKFRELLEYKLTWRGKKLVRVDRFFPSSKKCCKCGSVKKELKLSDRVYFCTCGNRIDRDLNAAINIREEARRMLLAG

SEQ ID NO: 3527 - protein, 368 aa, unidentified
MNIAYRFRIYPNREQEVLLAKTFGCCRFLYNQMLNDKIREYEASKKMLRNTPAMYKKAYPFLKEVDSLALANVQLHLEKAYKNFFRDPKIGFPKFKSKHRSRKSYTTNVVNGNIQVADHRIKLPKLKWIRMKKHRDIPEKYCLKSVTISMEPSGKYYASLLYEKSDCENQAEEFDYEDAKILGIDYAMHGMAVFSEDIQRENEGYFRKSEERLAREQRKLSHCVKGSNNYYRQKNRVALCHEKIRNQRKDFLHKLSQEIAEVYDVVAVEDIDMKAMSQCMHFGKSVMDNGYGKFRELLEYKLTWRGKRLVCVDRFFPSSKKCCKCGNIKKELKLSDRVYLCTCGNRIDRDLNAAINIREEAHRVLLAG

SEQ ID NO: 3528 - protein, 368 aa, unidentified
MNIAYRFRIYPNREQEVLLAKTFGCCRFLYNQMLNDKIREYEASKKMLRNTPAMYKKAYPFLKEVDSLALANVQLHLEKAYKNFFRDPKIGFPKFKSKHRIRKSYTTNVVNGNIQVEDYRIKLPKLKWIRMKKHRDIPEKYCLKSVTISMEPSGKYYASLLYEKSDCENQAEEFDYEDAKILGIDYAMHGMAVFSEDIQKENEGYFRKSEERLAREQRKLSHCVKGSNNYNRQKKRVALCHEKIRNQRKDFLHKLSHEIAEAYDVVAVEDIDMKAMSQCMHFGKSVMDNGYGKFRELLEYKLTWRGKKLVRVDRFFPSSKKCCKCGNIKKELKLSDRVYLCTCGNRIDRDLNAAINIREEARRMLLAG

SEQ ID NO: 3529 - protein, 368 aa, unidentified
MNIAYRFRIYPNREQEVLLAKTFGCCRFLYNQMLNDKIREYEASKKMLRNTPAMYKKAYPFLKEVDSLALANVQLHLEKAYKNFFRDPKIGFPKFKSKHKSRKSYTTNVVNGNIQAEDHRIKLPKLKWIRMKKHRDIPAEYCLKSVTISMEPSGKYYASLLYEKSDCENQAEEFDYENAKILGIDYAMHGMAVFSEDIQKENEGYFRKSEERLAREQRKLSHCVKGSNNYYRQKKRVALCHEKVRSQRKDFLHKLSHEIAEAYDVVAVEDIDMKAMSQCMHFGKSVMDNGYGKFRELLEYKLTWRGKKLVRVDRFFPSSKKCCKCGHIKKELKLSDRVYLCTCGNRIDRDLNAAINIREEARRMLLAG

SEQ ID NO: 3530 - protein, 367 aa, unidentified
MLKAYKYRIYPNNEQRAQIAKTFGCCRFVYNHTLAYRREIYEKEKKSVSKTDCNNYCNRELKKNYEWLKEVDKFALTNAIYNMDSAYQKFFKEHAGYPKFKSKHDSHKSYTTNFTNGNIAVDFENVKIKLPKLKEVKAKLHRNFSGQIKSATVSQTPSGKYYVSILVETEHEELQHTNHNTGLDLGIKDLCITSDGKKYENPKTIKKYEKKLVKLQRQLAHKEKRSQNYYKTKKKIALCHEKITNTRKDYLHKMSHEIISENQVIVSENLQIKNMVKNHHLAKSITDVSWYELTRQLEYKAKWNGREYVKIDTFYASSQLCSTCGHQNTETKKLSVREWVCPVCGTKHDRDINAAKNILAEGLRKIA

SEQ ID NO: 3531 - protein, 437 aa, unidentified
MIVTHAYRFALDPTPGQVGALLRHAGAARVAFNWGIAQVKANLGQREAERSYGIAEAGLTPSFGWSMYSMRKAWNAAKTEVAPWWAECSKEAYATGLDQLARALKNWSDSRRGKRKGPRMGFPRYKSKRKTTPSVRFTTGTIRLEDDRRHVTLPVLGTIRAHESTRKLHRRIAAGTAVVKSATVRREAGRWFVSFTCEVERTDRTPSRADTVIGVDLGIKHLAVFSDGRPTAENPKHYDTARRKLGRLSRTVARRLGPDRRTGQQPSKRWQRADAARNRVHYRTANLRRDALHKLTTSLAREYGTIVVEDLNVSGMLKNRKLARVVADAGFGEIRRQLAYKTRWNGGTLEAADRWFPSSKTCSGCQAVTPKLPLRIRMYVCEHCGLVLDRDENAALNLAALVKRHVAGSGPETENGRGADRKTPSCGAGGIEASTPH

SEQ ID NO: 3532 - protein, 371 aa, unidentified
MNKAYKIRIYPNKEQIQTIEKTFGCSRFIYNYFLAQRIDLYKNQGKSIGYIDQQNQLPILKKEFIWLKEVDSTSLQMSLRNLDKAFKNFFRDKSIGFPKFKNKKNNKKTYTVNYVNNNIQIKKNTIKLPKLQWIEAKVHRYVQGRIISTTISKSPTGKYFVSIITEANIKPTDKKAKAKGKIGIDLGITHFATLSSGEKIENPKYLKKTLEKLAREQRSLSHKQKYSNNWYKAKKKVAKLHEKVKQQRADSLHKLSKRIIDENQIIILEDLVIKNMIKNHKLSKDIADASWYKFYSFLEYKAKWYGKTIHKIDRWYPSSKTCYYCCHVLDEIPLNTRKWDCPNCHTKDIDRDKNASLNILKQGLLEIAEIA

SEQ ID NO: 3533 - protein, 367 aa, unidentified
MLKAYKYRIYPDNVQKVQIAKTFGCCRFVYNQTLAYRKERYEKEKRYVSKTDCNNYCNRELKKEYEWLRDVDKFALTNAIYNMDSAYQKFFKEHRGYPKFKSKHDNHKSYTTNFTNGNIAVDFEKGKVKLPKLKEVKAKLHRDFSGQIKSVTVSQVPSGKYYVSILVETEHGELPHTKKEIGLDLGIKNLCITSDGRKYENPKIIKKYEKKLAKLQRQLAHKEKGSSNYYKTKKKIALCHEKITNIRKDHLHRITHEIISENQVIVSENLRIKNMVKNHHLAKSIIDVSWYELTRQLEYKAKWNGRRYIKIDTYYASSQLCSVCGYQNRDIKNLSVRKWVCPKCGEMHDRDINAAKNILAEGLRQIA

SEQ ID NO: 3534 - protein, 367 aa, unidentified
MLKAYKYRIYPNSGQRTQIAKTFGCCRFVYNRTLEYRKELYEKEKKSMSKTDCNNYCNRELKSQYEWLREVDKFALTNAIYNMDSAYQKFFREHAGYPKFRSKHDSHRSYTTNYTNGNIAVDFENGKVKLPKLKEVKAKLHREFRGQIKSATVSQAPSGKYYVSILVETEHKELAHTKDSIGIDLGIKDLCITSDGKNYENPRIIRKYERQLAKLQRQLSHKEKGSKNYYKTKKKIALCHEKIRNTRKDYLHKISHEIISENQVIVSENLQIKNMVKDHHLAKGISDVSWYELTRQLEYKAKWNGREYIKIDTFYASSQLCFVCGYQNPDIKDLSVRTWICPQCGAIHDRDINAAKNILAEGLRQIA

SEQ ID NO: 3535 - protein, 369 aa, unidentified
MEKAYKFRMYPNKKQQELINKTFGCCRFVYNKYLAKRIEVYKNDKETFTYKQCSSDLTNLKKELKWLKEPDKFSLQNALKDLDNAYKKFFKEKAGFPKFKSKKINRFSYKTNFTNGNIMYCGQHIKLPKLGMVKIRDKQVPKGRILNATISKEPSGRYYVSLCCTDVDIEVFENTNNQIGLDLGIKEFCISSCGEFIENPKYLKKSLNKLAKLQRELSRKTIGSLNRNKARLKVARLQEHIANQRNDFLQKLTTKLIKENDIICIEDLQVKNMIKNRKLSRLISDVSWSEFIRQLEYKANWYGRQIVKVGKFFASSQICNKCGYKNEEVKDLNIREWICPSCNETHNRDINASINILKEGLRLITIQNK

SEQ ID NO: 3536 - protein, 459 aa, unidentified
MKTIQAYRFALDLNRRQERVILTHTGAARVAHNWALAKVKAVMDQRCAERSYGVPDELLTPPQSWSLAGLRKAWNQAKPEAAPWWTEVSKEAFNTGLDALARGLKNWADFRKGTRAGRPVGFPRFKSRRRSTPSVRFTTGAIRVEPDRKHVVLPRLGRLKPHESARKLARRVDNGTARIMSATVRCDGGRWHVSFTVEVERADRTPARPQLMVGVDVGIKYLAVLSTGEMVDNPRHLVAAQQRMRSLGRALSRKTGPDRRTGRRASKRWERAATRLGRAHARVANLRRDGLHKLTSRLAAEYGSVVAENLNVTGMLANRKLARHIADAGFAEIRRQLAYKTNWNGGRLLLADRWYPSSKTCSGCGAAKTKLPLSERTYHCQTCGLILDRDANAARNLAALAAEFDTAGSGPVAGRGADRKTPPAGLVAAKRQPGTTLVGQTGTVPPQGRTTKRVLTKAR

SEQ ID NO: 3537 - protein, 459 aa, unidentified
MKVVQAYRYALDLTPCQERAVLAHAGAARVAYNWALARVKAVMDQRAAERSYGVPEESLTPTVGWNLAALRKAWNQAKTDVAPWWQECSKEAFNTGLDALARGLKNWSDSRSGKRAGPRVGFPRFKSRRRATPSVRFTTGAIRVEPDRQHVVLPRLGRLKLHESARKLARRLEAGTARILSATVRRDGGRWHVAFCVEVERAERTPTRPDAVVGVDVGITHLAVLSTGEMEPNPRHLDEAAQRMRRLARQMSRRVGPDRRTGQRPSNRWERARRQVARAHARVTNLRRDNLHKLTTRLAREYGTIVVEDLNVAGMLRNRRLARRVADAGFGEIRRQVEYKVKWNGGRRIVADRWYPSSKTCSGCGTVKAKLALSARTYKCTTCGLVLDRDVNAARNLAAIAREAITAGSGPVAGRGADHKTRPGGQVAMKRQPGTAQAGKTGTVPPQGGTANRALTKAH

SEQ ID NO: 3538 - protein, 459 aa, unidentified
MKVVQAYRYALDLTPCQERAVLAHAGAARVAYNWALARVKAVMDQRAAERSYGVPEESLTPTVGWNLAALRKAWNQAKTDVAPWWQECSKEAFNTGLDALARGLKNWSDSRSGKRAGPRVGFPRFKSRRRATPSVRFTTGAIRVEPDRQHVVLPRLGRLKLHESARKLARRLEAGTARILSATVRRDGGRWHVAFCVEVERAERTPTRPQAVIGVDVGITHLAVLSTGEMEPNPRHLDEAAQRMRRLARQMSRRVGPDRRTGQRPSNRWERARRQVARAHARVTNLRRDNLHKLTTRLAREYGTIVVEDLNVAGMLRNRRLARRVADAGFGEIRRQVEYKVKWNGGRRIVADRWYPSSKTCSGCGTVKAKLALSARTYKCTTCGLVLDRDVNAARNLAAIAREATTAGSGPVAGRGADRKTRPGGQVAMKRQPGTAQAGKTGTVPPQGGTANRALTKAH

SEQ ID NO: 3539 - protein, 456 aa, unidentified
MQAYRFALDLTPGQERDVLAHAGAARVAYNWALARVKAVMDQRAAERSYGVPEELLTPAVSWSLAGLRKAWNQAKPDVAPWWAECSKEAFNTGLDALARGLKNWSDSRSGKRAGRRVGFPRFKSRRHSTPSIRFTTGAIRVEPDRQHVVLPRLGRLKLHESARKLARRLEAATARILSATVRRDGGRWHVAFCVEVDRAERTPTRPQAVIGVDVGITHLAVLSTGKLEPNPRHLDEAAQRMRRLARQMSRRIGPDRRTGQRPSNRWERARRQVARAHARVANLRRDNLHKLTTRLAREYGTIVVEDLNVAGMLRNRRLARRVADAGFGEIRRQVEYKVKWNGGRRIVADRWYPSSKTCSGCGTVKAKLALSARTYKCTACGLVLDRDVNAARNLAAIAAEATTAGSGPVAGRGADHKTRPGGQVAMKRQPGTAQAGKTGTVPPQGGTADHALTRAH

SEQ ID NO: 3540 - protein, 459 aa, unidentified
MKTMQAYRFALDLNPRQERAVLAHAGAARVAHNWALARVKAVMDQRAAERTYGIPDDQLTAAMSWSLPALRKAWNAAKADVAPWWAECSKEAFNTGLDALARALKNWADSRTGKRHGRTVGFPRYKSRRRTTPSVRFTTGTIRVEPDRTHVVLPRLGRLKLHESARKLARRLEAGTARILSATVRRDGGRWHVAFCVEADRADRRPNRPASVVGVDVGITHLAVLSTGELINNPRHFAAGQYRLRQLGRALSRKTGPDRRTGRRPSRRWQQAAARLGRAHARVANLRRDGLHKLTTRLAREHGTVVVEDLNVTGMLANRRLARRIADAGFAEIRRQLTYKTSWNGGRLLVADRWYPSSKTCSGCGTVKAKLALSEREYHCQTCGLIRDRDGNAAANLAALADQYDTAGSGPVAGRGADRKTHIGGQVATKRQPGTASAGQTGTVPPQGETANRVLTRAH

SEQ ID NO: 3541 - protein, 470 aa, unidentified
MKTIQAYRFALDLTPGQERDVLAHAGAARVAHNWALARVKAVMDQRAAERTYGVSEEMLTPTLSWTLPALRKAWNVAKPDVAPWWRECSKEAFNTGLDALARALKNWADSRSGKRAGRPVGFPGFKSRRRTIASVRFTTGTIRVESDRKHVVLPRLGRLKLHESARKLARRIDNGTARIMSACVRRDGGRWHVAFCVQVERPERLPARPGAVLGVDVGIRHLAVLSTGELIDNPRYLTTAQQRMRALGRALARKTGPDRRTGRRASKRWERAAARLGRAHARVANLRRDALHKLTTRLTREYGTVVIEDLNVTGMLRNRKLARHIADAGFAEIRRQLTYKTGWNGGRLILADRWYPSSKTCSGCGAVKTKLALSEREYQCESCGLVLDRDLNAACNLAALAADATTAGSGPAPGRGADRKTPLAGLVALKRQPGTAPAGQTGTVSPQGETANRALARAHREATALVTLAQ

SEQ ID NO: 3542 - protein, 463 aa, unidentified
MKTLQAYRFALDLSPRQERAVLAHAGAARVAHNWALARVKAVMSQRAAERTYGVPDGLLSPPISWSLPSLRKAWNAAKDEVAPWWAECSKEAFNSGLDALARALKNWSDSRKGARKGRAVGFPRFKSRRRSTPTVRFTTGVMRIEADRRHVVLPRLGALRLHESARKLARRLEAGTARIMSATVRREGGRWFVSFTCEVERAVRAPARPGSMVGVDLGKKHLAVLSTGERMANPRHLVVAARRMRRLARAVSRCVTPDRRVRRVGSNRWARAQQELSRAHARVVGLRRDGLHQFTTRLTREHGTVVVEDLNVAGMLRNRRLARHVADASFAEVRRQLTYKSEWNGGRLVTAGRWYPSSKTCSGCGAVKTKLTLAERTYICTACGLSLDRDLNAALNLAALAREVTDDRSGRESLNGRGADQKTRSRGQVAVKRLPGTARAGHAGTVPPQGGTTAQRSLLSTRR

SEQ ID NO: 3543 - protein, 459 aa, unidentified
MRTIQAYRFALDLSPAQERAVLAHAGAARVAHNWALVRVKAVMDQRVAERTYGTPDELLTPAVSWSLPGLRRAWNAAKGDVAPWWRECSKEAFNTGLDALARALKNWADSRSGKRAGRPVGFPRFKSRRRSMPSVRFTTGAIRVEPDRMHVVLPRLGRLKLHECARKLARRLDNGTARIMSATVRRDGGRWHVAFTCEVERVERNPARPESVVGVDIGIKHLAVLSTGELVDNPRHLAAARARLRTLGRALSRKTGPDRRTGRRPSKRWERAAARVGSAHARVANLRRDGLHKLTTRLAREHGTIVVEDLNVSGMLRNRRLARHIADAGFAEIRRQLTYKTEWNGGRLLIADRWYPSSKTCSGCGTVKAKLALSEREYHCEACGLIMDRDRNAALNLAALAAEFDTAGSGPVAARGADQKTRVRGQVAVKREPGTASAGKTGTVLPQGRTTNRVLARAH

SEQ ID NO: 3544 - protein, 459 aa, unidentified
MKTIQAYRFALDLTPGQERGVLAHAGAARVAHNWALARVKAVMDQRAAERTYGVPEELLTPSLPWSLPALRKAWNAAKADVAPWWRECSKEAFNTGLDALARALKNWADCRSGKRAGRPVGFPRFKSRRRTTPSVRFTTGAIRVEPDRKHVVLPRLGRLKLHESARKLARRLDNGTARIMSATLRRDGSRWHVAFCVEVQRADCRPRRPGSVVGVDLGVKRLAVLSTGELVPNPRHLVTAQQRMRALGRALARKTGPDRRTGQHASKRWQRAAARLSRVHARVANLRRDGLHKLTTRLAREHGTVVVEDLNVAGMLRNRKLARHVADAGFAEIRRQLAYKTTWNGGRLLVADRWYPSSKTCSGCGAVKTKLTLSDREYLCEACGLALDRDHNASLNLAALAAQFDTAGSGPVAGRGADRKTPLAGPVAVKRQPGTAPAGQTGTVPPQGGTTTRVLTKAQ

SEQ ID NO: 3545 - protein, 469 aa, unidentified
MVLGVAGRERLGVVQAYRFALDLTPRQERVVLAHAGAARVAHNWALARVKAVMDQRAAERTYGIDDEHLTPAIGWSLPALRRAWNQAKSDVAPWWAECSKEAFNTGLDALARGLKNWSESRTGKRAGRRVGFPRFKSRRRSTPSVRFTTGAIRVEPDRRHVVLPRLGRLKLHESARKLARRLEAGTARIVSATVRRDGGRWYVSFTCAVQRARGAAACPDATVGVDLGVTHLAVLSTGEVEPNPRHLDGAARRMRRLARRMSRGVGPDRRTGRRASKRWERASARLGRAHARVAHLRRDGLHKLTTRLAGEYGTLVVEDLNVAGMLANRRLARSVADAGFAELRRQLAYKTSWRGGRLVVADRWYPSSKTCSSCGAVKTKLALSERTYTCTLCGLVLDRDVNAARNLAALAVTVAGSGPETRNGRGADRKTRPGGLVAVKRQPGTATAGKTGTVPPQGRTSNHELTHAS

SEQ ID NO: 3546 - protein, 367 aa, unidentified
MLKAYKYRIYPNKEQEMQIAKTFGCCRFVYNQTLAYRKDKYEQERKFVSKTDCNNYCNRELKKMYEWLKEVDKFALTNAIYNMDSAYQKFFKEHAGYPKFKSKHDNHKSYTTNFTNGNILVDFENGKIKLPKLGKVKAKLHRGFAGQIKSATVSQISSGKYYASVLVETEHEKMPNTTEKIGLDLGIKELCITSDGRKYENPKILRKYEKKLAKLQRQLAHKEKRSKNYHKAKKQIALCHEKITNTRKDYLHKISHEIVSENQVIVSEKLQIKNMVKNHHLAKSISDVSWYELTRQLEYKSKWNDREYVKIDAFYASSQLCSACGYQNTETKDLSVREWICPNCGVKHDRDINAAKNILAEGLRQLA

SEQ ID NO: 3547 - protein, 368 aa, unidentified
MNIAYHFRIYPNREQEVLFAKTFGCCRFLYNQMLNDKIREYKATKKMLRNTPAMYKKAYPFLKEVDSLALANVQMHLEKAYKNFFRDPKIGFPKFKSKHRSRKSYTTNVVNGNIQVEDHRIKLPKLKWIRMKKHRDIPEKYCLKSVTISMEPSGKYYASLLYEKSDCENQAEEFDYEDAKILGIDYAMHGMAVFSEDIQKENEGYFRKSEERLAREQRKLSHCVKGSNNYYRQKKRVALCHEKIRNQRKDFLHKLSHEMVEAYDVVAVEDIDMKAMSQCMHFGKSVMDNSYGKFRELLEYKLTWRGKKLVRVDRFFPSSKKCCKCGSVKKELKLSDRVYLCTCGNRIDRDLNAAINIREEARRMLCAG

SEQ ID NO: 3548 - protein, 367 aa, unidentified
MLKAYKYRIYPNNEQKIQIAKTFGCCRFVYNQTLAYRKEVYEKEKKSVSKTDCNNYCNRQLKKEYEWLKEVDKFALTNAIYNMDAAYQKFFKEHAGYPKFKSKHDNHKSYTTNFTNCNIAVDFEDNRVKLPKLKNVKAKLHRNFSGQIKSATISQVPSGKYYVSILVETEHVELPHTNQNTGIDLGVKELCITSDGKKYENPKIIRKYEKKLKKLQRQLAHKEKRSQNYYKVKKKIALCHEKITNTRKDYLHKMSHEIISENQVIVSENLQIKNMVKNHHLAKSISDVSWYELTRQLEYKAKWNGRKYIKINTFYASSQLCSACGYQNTETKNLSVREWICPVCGTNHDRDINAAKNILEEGLREIA

SEQ ID NO: 3549 - protein, 367 aa, unidentified
MLKAYKYRIYPNNEQKIQIAKTFGCCRFVYNQTLAYRKEVYEKEKKSVSKTDCNNYCNRQLKKEYEWLKEVDKFALTNAIYNMDAAYQKFFKEHAGYPKFKSKHDNHKSYTTNFTNCNIAVDFEGNRVKLPKLKNVKAKLHRNFSGQIKSATISQVPSGKYYVSILVETEHVELPHVNQNTGIDLGIKELCITSAGKKYKNPKIIRKYEKKLIKLQRQLAHKEKRSQNYCKTKKKIALCHEKITNTRKDYLHKMSHEIISENQVIVSENLQIKNMVKNHHLAKSISDVSWYELTRQLEYKAKWNGRKYIKINTFYASSQLCSACGYQNTETKNLSVREWICPVCGTNHDRDINAAKNILEEGLRQIA

SEQ ID NO: 3550 - protein, 367 aa, unidentified
MLKAYKYRIYPSKEQEIQLEKTFGCCRFVYNQTLAYRKDAYEKEKNSISKTDCNNYCNRELKKVYEWLKEVDKFALTNAIHHMDSAYQKFFKEHAGYPKFKSKHDRHKSYTTNFTNGNITVDFDRERIKLPKLKEIKAKIHRNFAGQIKSATISQLPSGKYYVAILVETENVKKQETRGKIGLDLGIKDLCITSDGRKYENPKTIKKYERNLTKLQRQLAHKIKGSRNYQKKRKQIALCHEKITNTRKDYLHKISSEIISENQVIVSENLQIKNMIKNHKLAKSISDVSWYELTRQLEYKAKWNNRIYVKVDSFYASSQLCSCCGCQNKNIKDLSVRQWKCPNCGEIHDRDVNAAKNILAEGLRQIA

SEQ ID NO: 3551 - protein, 367 aa, unidentified
MLKAYKYRIYPSKEQEIQLEKTFGCCRFVYNQTLAYRKDAYEKEKNSISKTDCNNYCNRELKKVYEWLKEVDKFALTNAIHHMDSAYQKFFKEHAGYPKFKSKHDRHKSYTTNFTNGNITVDFDRERIKLPKLKEIKAKIHRNFAGQIKSATISQLPSGKYYVAILVETENVKKQDTRGKIGLDLGIKDLCITSDGRKYENPKTIKKYERNLTKLQRQLAHKIKGSSNYQKKRKQIALCHEKITNTRKDYLHKISSEIISENQVIVSENLQIKNMIKNHKLAKSISDVSWYELTRQLEYKAKWNNRIYVKVDSFYASSQLCSCCGCQNKNIKDLSVRQWKCPNCGEIHDRDVNAAKNILAEGLRQIA

SEQ ID NO: 3552 - protein, 459 aa, unidentified
MKTFQAYRFALDLTSRQELDVLAHAGAARVAHNWALARVKAVMDQRSAERSYGVPDELLTPSLHWSLAGLRKAWNAAKPAVAPWWGEVSKEAFNTGLDALARGLKNWADSRQGVRAGRPAGFPRFKSRRRTAPSVRFTTGAIRVEPDRMHVVLPRLGRLKLHESARRLARRLDNGTARIMSATVRRDGGRWHVSFTVEVERAERVPARPQSVVGVDVGITHLAVLSTGEMVGNPRHLLDAQQRVRSWGRALPRKTGPDRRTGRRASKRWERAAARLGRAHARVANVRRDGLHKLTTRLAREHATIVVEDLNVAGMLRNRRLARNIADAAFAEIRWYLTYKTLWNGGRLVVADRWYPSSKTCSGCGAVKAKLALSEREYECEACGLVLDRDHNAALNLAALAADLDTAGSGPVAARGADQKTRIRGQVAKKREPGTASVGQTGTVLPQGRTTNRVLTKTH

SEQ ID NO: 3553 - protein, 461 aa, unidentified
MKTIQAYRFALDLTPGQERDVLAHAGAARVAHNWALAKVKAVMDQRTAERSYGVPDDLLTPSLSWSLAGLRKAWNQAKVDVAPWWGEVSKEAFNTGLDALARGLKNWADFRPGKRAGRPVGFPRFTSRRRTTPSVRFTTGAIRVEPDRMHVVLPRLGRLKLHESARKLARRLDNDTARIMSATVRRDGGRWHVSFTVEVERTERAPDRPESVVGVDVGIKHLAVLSTGELVDNPRHLVTAQQRMRALGRALSRKTGPDRRTGRRASKRWERAAARLGRAHGRVVNLRRDGLHKLTTRLAREHGTVVVEDLNVTGMLANRKLARHIADAGFAEIRRQLAYKTGWNGGRLLLADRWYPSSKTCSGCGTVKAKLALSEREFTCEACGLVIDRGRNAALNLAALAAEFDTAGSGPVAARGADQKTRVRGQVAVKREPGTTPLGQTGTVPPQGRTIDRVLTKRTER

SEQ ID NO: 3554 - protein, 469 aa, unidentified
MVLGVAHRERVSVVQAYRFALDLTPRQERVVLAHAGAARLAHNWALARVKAVMDQRAAERTYGIDEADLTPTQGWPLPALRRAWNQAKPVVAPWWRDYSKEAFNTGLDALARALKNWSDSRSGKRAGRPVGFPRFKSRRRSTPSVRFTTGAIRVEPDRKHVLLPRLGRLKLHESARKLARRLDAGTARILSATVRRDGGRWHVAFCVEVDRAARTPHQPQAVVGVDLGVRHLAVLSTGEVEPNPRHLDVAGRRLRRLARRMSRRVGPDRRTGRRASKRWERAQAALGRAHARVANLRRDGLHKLTTRLARACGTIVVEDLNVAGMLRNRRLARCIADAGFAELRRQLGYKTAWNGGRLVVADRWYPSSKTCSGCGAVKTKLALSERTYTCTLCGLVLDRDVNAARNLAALAVTVAGSGPETRNGRGADRKTPLAGPVTVKRQPGTATAGKTGTVPPQGRTSDHMLTKAS

SEQ ID NO: 3555 - protein, 475 aa, unidentified
MSYRVVIVLGVADRVRLSVVQAYRFALDLTPRQERAVLAHAGAARVAHNWTLARVKAVMDQRAAERTYGIDEADLTPTQGWSLPALRKSWNAAKSDVAPWWAECSKEAYNTGLDALARALKNWSDSRSGKRAGRPVGFPRFKSRRRSTPSVRFTTGAIRVEPDRKHVVLPRLGRLKLHESARKLARRLDAGTARILSATVRRDGGRWFVAFCVEVDRAARTPNQPQVVVGVDLGVRHLAVLSTGEVEPNPRHLDAAGRRLRRLARRASRRVGPDRRTGRRASKRWERARAQLGRAHARVANLRRDGLHKLTTRLAREFGTIVVEDLNVAGMLRNRRLARCIADAGFAELRRQLAYKTGWNGGRLVVADRWYPSSKTCSGCGAVKTKLALFERTYTCAMCGLVLDRDVNAARNLAALAVTVAGSGSETRNGRGADRKTRPGGPVAVKRQPGTAKAGKTGTVPPQGRTSNHVPAYAS

SEQ ID NO: 3556 - protein, 369 aa, unidentified
MNRAIKYRIYPTNEQKIMFARTFGCCRKVWNLMLADKIAYYQEHQKTLQTTPAQYKKEYPFLKEVDSLALANVQMNLQTAYKNFFRGKKIGFPKYKSAKHSRKSYTTNNQKGTVAILDKTIKLPKIGIVKAKIHRQPNKDWMIKSATVSQERDGVYYISILFEYEVKELYAPVTSMSTLGLDYKSDGLYVDSEGNDCNMPHYYRLSQDKLAKSQRKLRHKTIGSNNYCKQQKKIAKIHRHVANQRKDFLHKKSTEIANQYTCVCVENLNMRSMANKSFGNGKATLDNGYGMFINFLEYKLKDRGGYLIKVDKWFPSSQLCHWCGYRSPNLKDLRIRRWDCPYCGHTGIDRDWNAAINIKVEGLRSLESA

SEQ ID NO: 3557 - protein, 459 aa, unidentified
MKTIQAYRFALDLTPVQERDVLAHAGAARVAHNWALARVKAVMGQRTAERSYGVPDELLTPSLSWSLAGLRKAWNAAKPGVAPWWGEVSKEAFNTGLDALARALRNWADSRTGKRAGRPVGFPRFKSRRRTTPSVRFTTGAIRIEPDRMHVVLPRLGRLKLHESARKLARRVDDGTARIMSATVRRDGRRWHVSFTAEVERTERTPARPGSVVGVDVGIKHLAVLSTGELVDNPRHLAAARQRMRALGRALSRKTGPDRRTGRRASKRWERTAARLGRTHARVANLRRDGLHKLTTRLATTYATVVVEDLNVTGMLANRRLARHIADAGFADIRRQLAYKTSWNGGRLLVADRWYPSSKTCSDCGTVKTKLALSEREFNCEACGLVIDRDRNAALNLAALAAEFDTAGSGPVAARGANQKTRARGQVAVKRESGTTPVGQTGTVPPQGRTIDRVLTKAH

SEQ ID NO: 3558 - protein, 459 aa, unidentified
MKTIQAYRFALDLTPVQERDVLAHAGAARVAHNWALARVKAVMGQRTAERSYGVPDELLTPSLSWSLAGLRKAWNAAKPGVAPWWGEVSKEAFNTGLDALCRALKNWADSRTGKRAGRPVGFPRFKSRRRTTPSVRFTTGAIRIEPDRMHVVLPRLGRLKLHESARKLARRVDDGTARIMSATVRRDGRRWHVSFTAEVERTERTPARPGSVVGVDVGIKHLAVLSTGELVDNPRHLAAARQRMRALGRALSRKTGPDHRTGRRASKRWERTAARLGRTHARVANLRRDGLHKLTTRLATTYGTVVVEDLNVTGMLANRRLARHIADAGFADIRRQLAYKTSWNGGRLLVADRWYPSSKTCSDCGTVKTKLALSEREFNCEACGLVIDRDRNAALNLAALAAEFDTAGSGPVAARGANQKTRGRGQVAVKRESGTTPVGQTGTVPPQGRTIDRVLTKAH

SEQ ID NO: 3559 - protein, 379 aa, unidentified
MTNRAIKYRVYPTTEQSIMFAKTFGCCRKVYNLMLSDKIESYKSTGKFVAVTPAKYKKDYPYLKEVDSLALANKQLDLQEAFRNRFSKSRKKKNGFPKFKSAKHSRKSYTTNNQHGTVAIIDNKYIKLPKIGKVKAVIHRIPDSDWIVKSATVSQESDGKYYISILFEFENAINPYVADKTNAIGLDYASDGLYVDSNGNVGTNHKYYRESHDKLAKAQRKLSRRQGSKKHEAKSNNYIKQLRKVNRIHRHIANQRLDNLHKISTEIANRYDVVCVESLNMKSMSNKGFGNGKATLDNGYGMFLSMLEYKLSERNKYLIKVDKWFPSSQICHCCGTLHPEMKDLAIRKMICDCGLTISRDQNAAINILNEGLRLLTEEA

SEQ ID NO: 3560 - protein, 459 aa, unidentified
MKTIQAYRFALDLTAGQERDVLAHAGAARVAHNWALARVKAVMDQRAAERSYGVPDEQLTPSLSWSLAGLRKAWNAAKPQVAPWWGEVSKEAFNTGLDALARGLKNWAGSRKGTRAGRPVGFPRFKSRRRTTPSVRFTTGAIRVEPDQIHVVLPRLGRLKLHESARKLARRLDNDTARIMSATVRRDGGRWHVSFTVEVERAERTPARPGSVVGVDVGIKHLAVLSTGELVDNPRHLVAAQRRMRALGRALSRKTGPDRRTGRRASKRWERSAARLGRAHARVASLRRDGLHKLTTRLAAEHGTVVVEDLNVTGMLANRKLARHIADAGFAEIRRQLAYKTSWNGGRLLVADRWYPSSKTCSACGTVKTKLAQHEREYQCAACGLVIDRDRNAALNLAALAAEFDTAGSGPVAARGADQKTRASGQVAVKREPGTAPAGQTGTVLPQGRTTNRVLTKAH

SEQ ID NO: 3561 - protein, 315 aa, unidentified
MWDISVLKAYKFRIYPTNEQKEFLIQTFGCVRFTYNTLLKHHQQSGGGKSKKLTPASLKKEFLFLKVTDSLALANAQQNLKRAFQNYYQGRSGYPKLKLKKSVWQSYTTNNQKQTIWLKDDLLKVPKLKQPIAVHCHRPVTGQIKSATIMAKNGQQFFVSLLCEEQITPLPKTNVTTTLHFSPDQLVSGSDLVFFRTLCQKNVENKLTKAKRKLEIKAKSAQQRGVKLSAAQNYQKQKVKVQQLYHHKQQQKKAWMDELSLHLIKKYDFLYIKVPHNIQEGVFTLTDWQHFLVKLQYKATWYDKKVIFAAAEKVI

SEQ ID NO: 3562 - protein, 393 aa, unidentified
MFVYSELKKGVDLMEQLKAYKYRIYPTEEQVVFFAKTFGCVRKVYNLMLDERIKAYAAMKNVPSKKLKKPTPAKYKNDYPYLKEVDSLALANAQLNLDKAYNNFFRDKRVGFPKFKSKSSTVQSYTTNNQHGTISLVENNYIKLPKLKSLVCIKRHRHPKGEIRSATISYHSSGKYYLSLLCKEEIPKLPKTNTAIGIDLGITDFAILSDGQKIDNHRFTAEMERKVIREQRKLSRRGLQAKKAGKKLSEAKNYQKQKRKVARLHEKVKNQRNDFLNKLSTELIKNHDVICIEDLHTKGLLRNHKLAKSISDVSWSSFVAKLQYKADWYGREMIQVARWYPSSQLCSDCGHKDGKKPLQIRAWTCPVCHTHHDRDINASINILNEGLRMRAFA

SEQ ID NO: 3563 - protein, 323 aa, unidentified
MKRLKAYKFRLYPTEEQEIYFAKSFGCVRKVYNLMLDDRMKTYEETKNDPSKKMSFPTPAKYKKDFPFLKEVDSLALANAQLNLDKAYKNFFRDKTVGFPQFKSKKNPVQSYTTNNQNGTIALIDNKLIKIPKLKSLVRIKLHRQPQGLIKSATISRHASGKYYVSILCEEEIIEHPKTNSAIGIDLGITDFAILSDGQKIDNNKFTSKMAKKLKREQRKLSRRALLAKKKGINLFEAKNYQKQKRKVARLHEKVMNQRTDFLNKLSTEIIKNHDIICIEDLNIKGMLRNHKLAKSISDVSWSKFVTKLQYKADWYGREIIKI

SEQ ID NO: 3564 - protein, 347 aa, unidentified
MKILKAYKFRIYPDEAQQEFFIKTFGCVRFTYNTLLKLRQQNPSDESTLPEKMTGVWEKKTTATPAKLKRDYPFLKETDSLALANAQRNLTKAFQNYYRGRASYPKLKSKKNAWQSYTTNNQGHTIYLTNEGLKLPKLKSKVPIHQHRQVCGKIRSATISAKNRQEFYVSLLCEEEITALPKTGFDITITYDPIKLIGTSKVLSDRPNFCQQRLLVQLKNAQRKLYCRGKSAQRRNVKLEQAKNYQKQKLRLQKLYIHQIKQKEDFMEQLSIALLRQFDLVTVTMPKAFESLSANHSAAIHQDCSANYKNTAVNFTIRDWNRFVLKLKYKANWYGKKLIFTDQEKVI

SEQ ID NO: 3565 - protein, 381 aa, unidentified
MTNRAIKYRAYPTTEQSVMFAKTFGCCRKVYNLMLSDKIESYKSTGKFVTVTPAKYKKDYPYLREVDSLALANKQMDLQEAFRNCFSKSRKKNNGFPKFKSAKHTRKSYTTNNQHGTVDITDNSIRLPKIGHVKAIIHRKPDDNWIIKSATVSQESDGKFYISVLFEIADTINTYVADTTNAIGLDYASDGLYVDNNGNVGTNHKYYRESHDKLAKAQRKLSRMQGSRKHEIKSNNYIKQLRKLNKIHRHISNQRLDNLHQISTKIANLYDIVCVESLNMKSMSNKGFGNGKATLDNGYGMFLSMLEYKLSERNKYLVKVDKWFPSSQICHCCGKIHPEMKNLTIRTMKCDCGLTISRDQNAAINILREGLRILNESFVVA

SEQ ID NO: 3566 - protein, 458 aa, unidentified
MKVIQAYRFALDLTPFQERAVLAHAGAARVAYNWALARVKAVMDQRAAERSYGVPEELLTPTVGWSLAKLRKAWNQAKPEVAPWWPECSKEAYNTGLDNLACGLKNWSDSRAGKRAGRRVGFPRFKSRRRATPSVRFTTGAIRVEADRKHVVLPRLGRLKLHESARKLARRLEAGTARILSATVRRDGGRWHVAFCVEVERAERTPKRPQAVVGVDVGITHLAVLSTGKLVPNPRHLDEAAQRMRRLARQMSRRVGPDRRTGQRPSNRWEHARQQVARAHARVANLRRDGLHKLTTRLAGKYGTIVVEDLNVAGMLRNRRLARQIADAGFGEIRRQVAYKAERNGGRRILADRWYPSSKTCSDCGAVKAKLPLRVRTYICDSCGLTLDRDLNAARNLAAIAREATTAGSGPVAGRGADRKTRPGGSVATKRQPGPAQADKTGTVPPQGGTCRSVATTH

SEQ ID NO: 3567 - protein, 409 aa, unidentified
MLIQRAYRYELDPNNIQRTSLSQHAGVARFAYNWGLEQRINRYRNNQGNDRFTDAMRQHKLLNSLKKDQFPWMYETSKCAPQEALRNLHRAFQNFYRGLKSGKRVGFPRFKRRGVRDSFRLTGTIRFEGQKIQLPRIGKVKIKEKRKSYFSGRILSATVQRRANRWFVSVTVKENLADPSPIKGSSVGVDIGVKTLATLSDGTTFANPRALGRRLRKLKRLSKSLSRKKKGSKNREKAKLRLAKMYLKIFNIRQDTLHKLSTHLAKSHSKVIIEDLCVSGMMKNRRLARVIADVGFFKFRRQLEYKCQWYGSELVVASRTFPSSKMCSRCGHRKKELSLSEREYHCEECGLVIDRDFNAALNLVAVSLPETENACGEEVRLLTDSLNLQRAASMKQEPNIISGSVSRNV

SEQ ID NO: 3568 - protein, 369 aa, unidentified
MEKAYKFRMYPNKKQQELINKTFGCCRFVYNKYLAKRIEVYKNDKETFTYKQCSSDLTNLKKELKWLKEPDKFSLQNALKDLDNAYKKFFKEKAGFPKFKSKKINRFSYKTNFTNGNIMYCGQHIKLPKLGMIKVRDKQVPKGRILNATISKEPSGRYYVSLCCTDVDIKAFENTNNQIGLDLGIKEFCISSCGDFIENPKYLKKSLSKLAKLQRELSRKTIGSLNRNKARLKVARLQEHIANQRNDFLQKLSTKLIKENDIICIEDLQVKNMIRNRKLSRLISDVSWSEFIRQLEYKANWYGRQIVKVGKFFASSQICNKCGYKNEEVKNLNIREWICPSCNETHDRDINASINILKEGLRLITIQNK

SEQ ID NO: 3569 - protein, 369 aa, unidentified
MEKAYKFRMYPNKKQQELINKTFGCCRFVYNKYLAKRIEVYKNDKETFTYKQCSSDLTNLKKELKWLKEPDKFSLQNALKDLDNAYEKFFKEKAGFPKFKSKKINRFSYKTNFTNGNIMYFSQHIKLPKLGMVKIRDKQVPKGRILNATISKEPSGRYYVSLCCTDVDIEAFENTNNQIGLDLGIKEFCISSCGDFIENPKYLKKSLNKLAKLQRELSRKTIGSLNRNKARLKVARLQEHIANQRNDFLQKLSTKLIKENDIICIEDLQVKNMIRNRKLSRLISDVPWSEFIRQLEYKANWYGRQIVKVGKFFASSQICNKCGYKNEEVKNLNIREWICPSCNETHDRDINASINILKEGLRLITIQNK

SEQ ID NO: 3570 - protein, 369 aa, unidentified
MEKAYKFRMYPNKKQQELINKTFGCCRFVYNKYLAKRIDVYKNDKETFTYKQCSSDLTNLKKELKWLKEPDKFSLQNALKDLDNAYEKFFKEKAGFPKFKSKKINRFSYKTNFTNGNIMYCGQHIKLPKLGMVKIRDKQVPQGRILNATISKEPSGRYYVSLCCTDVDIEAFENTNNHIGLDLGIKEFCISSCGDFIENPKYLKKSLSKLAKLQRELSRKTIGSLNRNKARLKVARLQEHIANQRNDFLQKLSTKLIKENDIICIEDLQVKNMIRNRKLSRLISDVSWSEFIRQLEYKANWHGRQIVKVGKFFASSQICNKCGYKNEEVKDLNIREWICPSCNETHDRDINASINILKEGLRLITIQNK

SEQ ID NO: 3571 - protein, 369 aa, unidentified
MEKAYKFRMYPNKKQQELINKTFGCCRFVYNKYLAKRIDVYKNNKETFTYKQCSSDLTNLKKELKWLKEPDKFSLQNALKDLDNAYKKFFKEKAGFPKFKSKKINRFSYKTNFTNGNIMYCGQHIKLPKLGMVKIRDKQVPKGRILNATISKEPSGRYYVSLCCTDVDIEAFENTNNHIGLDLGIKEFCISSCGEFIENPKYLKKSLNKLAKLQRELSRKTIGSLNRNKARLEVAGLQEHIANQRKDFLQKLSTKLIKENDIICIEDLQVKNMIRNRKLSRLISDVSWSEFIRQLEYKANWHGRQIVKVGKFFASSQICNKCGYKNEEVKDLNIREWICPSCNETHDRDINASINILKEGLRLITTQNK

SEQ ID NO: 3572 - protein, 369 aa, unidentified
MKKAYKFRMYPNKKQQELINKTFGCCRFVYNKYLAKRIDVYKNDKETFTYKQCSSDLTNLKKELKWLKEPDKFSLQNALKDLDNAYKKFFKEKAGFPKFKSKKINRFSYKTNFTNGNIMYCGQHIKLPKLGMVKIRDKQVPKGRILNATISKEPSGRYYVSLCCIDVDIEVFENTNNHIGLDLGIKEFCISSCGEFIENPKYLKKSLNKLAKLQRELSRKTIGSLNRNKARLKVARLQEHIANQRNDFLQKLSTKLIKENDIICIEDLQVKNMIRNRKLSRLISDVSWSEFIRQLEYKANWYGRQIVKVGKFFASSQICNKCGYKNEEVKNLNIREWICPSCNETHDRDINASINILKEGLRLITIQNK

SEQ ID NO: 3573 - protein, 369 aa, unidentified
MKKAYKFRLYPNKKQQELINKTFGCCRFVYNKYLAKRIDVYKNNKETFTYKQCSSDLTNLKKELKWLKEPDKFSLQNALKDLDNAYKKFFKEKAGFPKFKSKKINRFSYKTNFTNGNIMYCGQHIKLPKLGMVKIRDKQVPQGRILNATISKEPSGRYYVSLCCTDVDIEAFENTNNQIGLDLGIKEFCISSCGEFIENPKYLKKSLNKLAKLQRELSRKTIGSLNRNKARLKVARLQEHIANQRKDFLQKLSTKLIKENDIICIEDLQVKNMIKNHKLSRLISDVSWSEFIRQLEYKANWYGRQIVKVGKFFASSQICNKCGYKNEEVKNLNIREWICPSCNETHDRDINASINILKEGLRLITIQNK

SEQ ID NO: 3574 - protein, 437 aa, unidentified
MIVTHAYRFALDPTPGQARALLRHAGAARVAFNWGIAQVKANLGQREAERSYGIAEADLTPSFGWSMYSMRKAWNAAKREVAPWWAECSKEAYATGLDQLARALKNWSDSKRGKRKGPRMGFPRYKSKRKTTPSVRFTTGTIRLEDDRRHVTLPVLGTIRAHESTRKLHRRIAAGTAVVKSATVRREAGRWFVSFTCEVERADRTPSRTDTVIGVDLGIKHLAVFSDGRLTAENPRHYDTARRKLGRLSRTVARRLGPDRRTGQQPSKRWQRADAARNRVHYRTANLRRDALHKLTTSLAREYGTIVVEDLNVSGMLRNRRLARVVADAGFGEIRRQLAYKTRWNGGTLEVADRWFPSSKTCSGCQAVTPKLPLRIRMYACEHCGLVLDRDENAALNLAALVKRHVAGSGPETENGRGADRKTPPCGAGGIEASTPH

SEQ ID NO: 3575 - protein, 372 aa, unidentified
MIAVKKAYKFRIYPNKKQQELINKTFGCCRFVYNKYLAKRIDVYKNDKETFTYKQCSSDLTNLKKELNWLKEPDKFSLQNALKDLDNAYKKFFKEKAGFPKFKSKKINRFSYKTNFTNGNIMYCGQHIKLPKLGMVKVRDKQVPKGRILNATISKEPSGRYYVSLCCTDVDIEALENTNNHIGLDLGIKEFCISSCGEFIENPKYLKKSLNKLAKLQRELSRKTIGSLNRNKARLKVARLQEHIANQRNDFLQKLSTKLIKENDIICIEDLQVKNMIKNRKLSRSISDVSWSEFIRQLEYKANWYGRQIVKVGKFFASSQICNKCGYKNEEVKDLNIREWICPSCNETHDRDINASINILKEGLRLITTQNK

SEQ ID NO: 3576 - protein, 372 aa, unidentified
MIAVEKAYKFRMYPNKKQQELINKTFGCCRFVYNKYLAKRIDVYKNDKETFTYKQCSSDLTNLKKELKWLKEPDKFSLQNALKDLENAYEKFFKEKTGFPKFKSKKTNRFSYKTNFTNGNIMYCGQHIKLPKLGMVKIRDKQVPKGRILNATISKEPSGRYYVSLCCTDVDIEAFENANNQIGLDLGIKEFCISSCGEFIENPKYLKKSLSKLAKLQRELSRKTIGSLNRNKARLKVARLQEHIANQRNDFLQKLSTKLIKENDIICIEDLQVKNMIRNRKLSRLISDVSWSEFVRQLEYKANWHGRQIVKVGKFFASSQICNKCGHKNEEVKNLNIREWICPSCNETHDRDINASINILKEGLRLITIQNK

SEQ ID NO: 3577 - protein, 372 aa, unidentified
MIAVKKAYKFRMYPNKKQQELINKTFGCCRFVYNKYLAKRIEVYKNDKETFTYKQCSSDLTNLKKELKWLKEPDKFSLQNALKDLENAYNKFFKEKTGFPKFKSKKTNRFSYKTNFTNGNIMYCGQHIKLPKLGMVKIRDKQVPKGRILNATISKEPSGRYYVSLCCTDVDIEAFENTNNQIGLDLGIKEFCISSCGDFIENPKYLKKSLNKLAKLQRELLRKTIGSLNRNKARLKVARLQEHIANQRNDFLQKLSTKLIKENDIICIEDLQVKNMIRNRKLSRLISDVSWSEFVRQLEYKANWHGRQIVKVGKFFASSQICNKCGYKNEEVKNLNIRDWICPSCNETHDRDINASINILKEGLRLITIQNK

SEQ ID NO: 3578 - protein, 407 aa, unidentified
MARFEVPEGWCVQAFRFTLDPTEDQARALARHFGARRKAYNWAVATLKADIEAWRVTGIGTVKPSLRVLRKRWNTVKDEVCVNAETGAVWWPECSKEAYADGIGGAVDAYWNWQNSRSGKREGKTMGFPRFKKKGRDQDRVTFTTGAMRVEPDRRHLTLPVVGTVRTHENTRRIERLIATGRARVLAISVRRNGTRLDASVRVLVQRPQQPNVAQPGSRVGVDVGVRRLATVANEAGAVLEEVPNPRPLDAALKELRYASRARSRCTKGSRRYRERTTEISRLHRRVNDVRTHHLHVLTTRLAQTHGHIVVEGLDAAGMLRQKGLPGARARRRGLSDSALGTPRRHLSYKPGWYGSALVVADRWFPSLSVEPTVRPGLARLVAVKRGREAAAWLPNNPETGCKSRDH

SEQ ID NO: 3579 - protein, 251 aa, unidentified
MEKAYKFRMYPNKKQQELINKTFGCCRFVYNKYLAKRIDVYKNNKETFTYKQCSSDLTNLKKELKWLKEPDKFSLQNALKDLDNAYKKFFKEKAGFPKFKSKKINRFSYKTNFTNGNIMYCGQHIKLPKLGMVKIRDKQVPKGRILNATISKEPSGRYYVSLCCTDVDIEAFENTNNHIGLDLGIKEFCISSCGEFIENPKYLKKSLNKLAKLQRELSRKTIGSLNRNKARLEVAGLQEHIAXXXXDNAEG

SEQ ID NO: 3580 - protein, 369 aa, unidentified
MEKAYKFRMYPNKKQQELINKTFGCCRFVYNKYLAKRIDVYKNNKETFTYKQCSSDLTNLKKELKWLKEPDKFSLQNALKDLDNAYKKFFKEKAGFPKFKSKKINRFSYKTNFTNGNIMYCGQHIKLPKLGMVKIRDKQVPKGRILNATISKEPSGRYYVSLCCTDVDIEAFENTNNHIGLDLGIKEFCISSCGEFIENPKYLKKSLNKLAKLQRELSRKTIGSLNRNKARLEVAGLQEHIANQRKDFLQKLSTKLIKENDIICIEDLQVKNMIRNRKLSRLISDVSWSEFIRQLEYKANWHGRQIVKVGKFFASSQICNKCGYKNEEVKDLNIREWICPSCNETHDRDINASINILKEGLRLITIQNK

SEQ ID NO: 3581 - protein, 369 aa, unidentified
MKKAYKFRIYPNKKQQELINKTFGCCRFVYNKYLAKRIDVYKNDKETFTYKQCSSDLTNLKKELNWLKEPDKFSLQNALKDLDNAYKKFFKEKAGFPKFKSKKINRFSYKTNFTNGNIMYCGQHIKLPKLGMVKVRDKQVPKGRILNATISKEPSGRYYVSLCCTDVDIEVFENTNNHIGLDLGIKEFCISSCGEFIENPKYLKKSLNKLAKLQRELSRKTIGSLNRNKARLKVARLQEHIANQRNDFLQKLSTKLIKENDIICIEDLQVKNMIKNRKLSRSISDVSWSEFIRQLEYKANWYGRQIVKVGKFFASSQICNKCGYKNEEVKDLNIREWICPSCNETHDRDINASINILKEGLRLITTQNK

SEQ ID NO: 3582 - protein, 369 aa, unidentified
MKKAYKFRMYPNKKQQELINKTFGCCRFVYNKYLAKRIDVYKNDKETFTYKQCSSDLTNLKKELKWLKEPDKFSLQNALKDLDNAYKKFFKEKAGFPKFKSKKINRFSYKTNFTNGNIMYCGQHIKLPKLGMVKIRDKQVPKGRILNATISKEPSGRYYVSLCCIDVDIEVFENTNNHIGLDLGIKEFCISSCGEFIENPKYLKKSLNKLAKLQRELSRKTIGSLNRNKARLKVARLQEHIANQRNDFLQKLSTKLIKENDIICIEDLQVKNMIRNRKLSRLISDVSWSEFIRQLEYKANWYGRQIVKVGKFFASSQICNKCGYKNEEVKDLNIREWICPSCNETHDRDINASINILKEGLRLITIQNK

SEQ ID NO: 3583 - protein, 369 aa, unidentified
MKKAYKFRLYPNKKQQELINKTFGCCRFVYNKYLAKRIDVYKNNKETFTYKQCSSDLTNLKKELKWLKEPDKFSLQNALKDLDNAYKKFFKEKAGFPKFKSKKINRFSYKTNFTNGNIMYCGQHIKLPKLGMVKIRDKQVPQGRILNATISKEPSGRYYVSLCCTDVDIEAFENTNNQIGLDLGIKEFCISSCGEFIENPKYLKKSLNKLAKLQRELSRKTIGSLNRNKARLKVARLQEHIANQRKDFLQKLSTKLIKENDIICIEDLQVKNMIKNHKLSRLISDVSWSEFIRQLEYKANWYGRQIVKVGKFFASSQICNKCGYKNEEVKDLNIREWICPSCNETHDRDINASINILKEGLRLITIQNK

SEQ ID NO: 3584 - protein, 369 aa, unidentified
MEKAYKFRMYPNKKQQELINKTFGCCRFVYNKYLAKRIEVYKNDKETFTYKQCSSDLTNLKKELKWLKEPDKFSLQNALKDLDNAYKKFFKEKAGFPKFKSKKINRFSYKTNFTNGNIMYFSQHIKLPKLGMVKIRDKQVPKGRILNATISKEPSGRYYVSLCCTDVDIEAFENTNNQIGLDLGIKEFCISSCGEFIENPKYLKKSLSKLAKLQRELSRKTIGSLNRNKARLKVARLQEHIANQRNDFLQKLSTKLIKENDIICIEDLQVKNMIRNRKLSRLISDVSWSEFIRQLKYKANWHGRQIVKVGKFFASSQICNKCGYKNEEIKDLNIREWICPSCNETHDRDINASINILKEGLRLITIQNK

SEQ ID NO: 3585 - protein, 369 aa, unidentified
MKKAYKFRIYPNKKQQELINKTFGCCRFVYNKYLAKRIDVYKNDKETFTYKQCSSDLTNLKKELNWLKEPDKFSLQNALKDLDNAYKKFFKEKAGFPKFKSKKINRFSYKTNFTNGNIMYCGQHIKLPKLGMVKVRDKQVPKGRILNATISKEPSGRYYVSLCCTDVDIEAFENTNNHIGLDLGIKEFCISSCGEFIENPKYLKKSLNKLAKLQRELSRKTIGSLNRNKTRLKVARLQEHIANQRNDFLQKLSTKLIKENDIICIEDLQVKNMIRNRKLSRLISDVSWSEFIRQLEYKANWHGRQIVKVGKFFASSQICNKCGYKNEEVKDLNIREWICPSCNETHDRDINASRNILKEGLRLITIQNK

SEQ ID NO: 3586 - protein, 369 aa, unidentified
MEKAYKFRMYPNKKQQELINKTFGCCRFVYNKYLAKRIEVYKNDKETFTYKQCSSDLTNLKKELKWLKEPDKFSLQNALKDLDNAYKKFFKEKAGFPKFKSKKINRFSYKTNFTNGNIMYFSQHIKLPKLGMVKIRDKQVPKGRILNATISKEPSGRYYVSLCCTDVDIEVFENTNNHIGLDLGIKEFCISSCGEFIENPKYLKKSLNKLAKLQRELSRKTIGSLNRNKARLKVARLQEHIANQRNDFLQKLSTKLIKENDIICIEDLQVKNMIRNRKLSRLISDVSWSEFIRQLEYKANWHGRQIVKVGKFFASSQICNKCGYKNEEVKDLNIREWICPSCNETHDRDINASINILKEGLRLITIQNK

SEQ ID NO: 3587 - protein, 372 aa, unidentified
MIVVEKAYKFRMYPNKKQQELINKTFGCCRFVYNKYLAKRIDVYKKHKETFTYKQCSSDLTNLKKELKWLKEPDKFSLQNALRDLDNAYKKFFKEKAGFPKFKSKKINRFSYKTNFTNGNIMYCGQHIKLPKLGMVKIRDKQVPQGRILNATISKEPSGRYYVSLCCTDVDIGAFENTNNHIGLDLGIKEFCISSCGDFIENPKYLKKSLNKLAKLQRELSRKTIGSLNRNKARLKVARFQEHIANQRKDFLQKLSTKLIKENDIICIEDLQVKNMIRNRKLSRLISDVSWSEFIRQLEYKANWHGRQIVKVGKFFASSQICNKCGYKNEEVKNLNIREWICPSCNETHDRDINASINILKEGLRLITIQNK

SEQ ID NO: 3588 - protein, 372 aa, unidentified
MIAVKKAYKFRMYPNKKQQELINKTFGCCRFVYNKYLAKRIDVYKNDKETFTYKQCSSDLTNLKKELKWLKEPDKFSLQNALKDLDNAYKKFFKEKTGFPKFKSKKINRFSYKTNFTNGNIMYCGQHIKLPKLGMVKIRDKQVPQGRILNATISKEPSGRYYVSLCCTDVDIEAFENTNNHIGLDLGIKEFCISSCGEFIENPKYLKKSLNKLAKLQRELSRKTIGSLNRNKARLKVARLQEHIANQRNDFLQKLTTKLIKENDIICIEDLQVKNIIRNRKLSRLISDVSWSEFIRQLEYKANWHGRQIVKVDKFFASSQICNKCGYKNEEVKNLNIREWICPSCNETHDRDINASINILKEGLRLITIQNK

SEQ ID NO: 3589 - protein, 372 aa, unidentified
MIAVKKAYKFRIYPNKKQQELINKTFGCCRFVYNKYLAKRIDVYKNDKETFTYKQCSSDLTNLKKELNWLKEPDKFSLQNALKDLDNAYKKFFKEKAGFPKFKSKKINRFSYKTNFTNGNIMYCGQHIKLPKLGMVKVRDKQVPKGRILNATISKEPSGRYYVSLCCTDVDIEALENTNNHIGLDLGIKEFCISSCGEFIENPKYLKKSLNKLAKLQRELSRKTIGSLNRNKARLKVARLQEHIANQRNDFLQKLSTKLIKENDIICIEDLQVKNMIKNHKLSRLISDVSWSEFIRQLEYKANWYGRQIVKVGKFFASSQICNKCGYKNEEVKNLNIREWICPSCNETHDRDINASINILKEGLRLITIQNK

SEQ ID NO: 3590 - protein, 372 aa, unidentified
MIAVKKAYKFRMYPNKKQQELINKTFGCCRFVYNKYLAKRIDVYKSDKETFTYKQCSSDLTNLKKELKWLKEPDKFSLQNALKDLDNAYKKFFKEKAGFPKFKSKKINRFSYKTNFTNGNIMYCGQYIKLPKLGMVKIRDKQVPQGRILNATISKEPSGRYYVSLCCTDVDIEVFENTNNHIGLDLGIKEFCISSCGEFIENPKYLKKSLNKLAKLQRELSRKTIGSLNRNKARLKVARLQEHIANQRNDFLQKLSTKLIKENDIICIEDLQVKNMIRNRKLSRLISDVSWSEFIRQLEYKANWYGRKIVKVGKFFASSQICNKCGYKNEEVKDLNIREWICPSCNETHDRDINASINILKEGLRLITIQNK

SEQ ID NO: 3591 - protein, 245 aa, unidentified
MVVVEKAYKFRMYPNKKQQELINKTFGCCRFVYNKYLAKRIDVYKNNKETFTYKQCSSDLTNLKKELKWLKEPDKFSLQNALKDLDNAYKKFFKEKAGFPKFKSKKINRFSYKTNFTNGNIMYCGQHIKLPKLGMVKIRDKQVPKGRILNATISKEPSGRYYVSLCCTDVDIEAFENTNNHIGLDLGIKEFCISSCGEFIENPKYLKKSLNKLAKLQRELSRKTIGSLNRNKARLEVAGLQEHIA

SEQ ID NO: 3592 - protein, 372 aa, unidentified
MIAVKKAYKFRMYPNKKQQELINKTFGCCRFVYNKYLAKRIDVYKNDKETFTYKQCSSDLTNLKKELKWLKEPDKFSLQNALKDLDNAYKKFFKEKAGFPKFKSKKINRFSYKTNFTNGNIMYCGQYIKLPKLGMVKIRDKQVPQGRILNATISKEPSGRYYVSLCCTDVDIEAFENTNNHIGLDLGIKEFCISSCGEFIENPKYLKKSLNKLAKLQRELSRKTIGSLNRNKARLKVARLQEHIANQRNDFLQKLTTKLIKENDIICIEDLQVKNIIRNRKLSRLISDVSWSEFIRQLEYKANWHGRQIVKVDKFFASSQICNKCGYKNEEVKNLNIREWICPSCNETHDRDINASINILKEGLRLITIQNK

SEQ ID NO: 3593 - protein, 372 aa, unidentified
MIAVKKAYKFRMYPNKKQQELINKTFGCCRFVYNKYLAKRIDVYKSDKETFTYKQCSSDLTNLKKELKWLKEPDKFSLQNALKDLDNAYKKFFKEKAGFPKFKSKKINRFSYKTNFTNGNIMYCGQYIKLPKLGMVKIRDKQVPQGRILNATISKEPSGRYYVSLCCTDVDIEVFENTNNHIGLDLGIKEFCISSCGEFIENPKYLKKSLNKLAKLQRELSRKTIGSLNRNKARLKVAGLQEHIANQRNDFLQKLSTKLIKENDIICIEDLQVKNMIRNRKLSRLISDVSWSEFIRQLEYKANWYGRQIVKVGKFFASSQICNKCGYKNEEIKDLNIREWICPSCNETHDRDINASINILKEGLRLITIQNK

SEQ ID NO: 3594 - protein, 372 aa, unidentified
MIAVKKAYKFRIYPNKKQQELINKTFGCCRFVYNKYLAKRIDVYKNDKETFTYKQCSSDLTNLKKELNWLKEPDKFSLQNALKDLDNAYKKFFKEKAGFPKFKSKKINRFSYKTNFTNGNIMYCGQHIKLPKLGMVKVRDKQVPKGRILNATISKEPSGRYYVSLCCTDVDIEALENTNNHIGLDLGIKEFCISSCGEFIENPKYLKKSLNKLAKLQRELSRKTIGSLNRNKARLKVARLQEHIANQRNDFLQKLSTKLIKENDIICIEDLQVKNMIRNRKLSRLISDVSWSEFIRQLEYKANWHGRQIVKVGKFFASSQICNKCGYKNEEVKDLNIREWICPSCNETHDRDINASINILKEGLRLITIQNK

SEQ ID NO: 3595 - protein, 372 aa, unidentified
MIAVKKAYKFRMYPNKKQQELINKTFGCCRFVYNKYLAKRIDVYKNDKETFTYKQCSSDLTNLKKELKWLKEPDKFSLQNALKDLDNAYKKFFKEKTGFPKFKSKKINRFSYKTNFTNGNIMYCGQYIKLPKLGMVKIRDKQVPQGRILNATISKEPSGRYYVSLCCTDVDIEAFENTNNHIGLDLGIKEFCISSCGEFIENPKYLKKSLNKLAKLQRELSRKTIGSLNRNKARLKVARLQEHIANQRNDFLQKLTTKLIKENDIICIEDLQVKNIIRNRKLSRLISDVSWSEFIRQLEYKANWHGRQIVKVDKFFASSQICNKCGYKNEEVKNLNIREWICPSCNETHDRDINASINILKEGLRLITIQNK

SEQ ID NO: 3596 - protein, 408 aa, unidentified
MMARFEVPEGWCVQAFRFTLDPTEDQARALARHFGARRKAYNWAVATLKADIEAWRVTGIGTVKPSLRVLRKRWNTVKDEVCVNAETGAVWWPECSKEAYADGIGGAVDAYWNWQNSRSGKREGKTMGFPRFKKRGRDQDRVTFTTGAMRVEPDRRHLTLPVVGTVRTHENTRRIERLIATGRARVLAISVRRNGTRLDASVRVLVQRPQQPNVAQPGSRVGVDVGVRRLATVANEAGAVLEEVPNPRPLDAALKELRYASRARSRCTKGSRRYRERTTEISRLHRRVNDVRTHHLHVLTTRLAQTHGHIVVEGLDAAGMLRQKGLPGARARRRGLSDSALGTPRRHLSYKTGWYGSALVVADRWFPSLSVEPTVRPGLARLVAVKRGREAAAWLPNNPETGCKSRDH

SEQ ID NO: 3597 - protein, 459 aa, unidentified
MKTIQAYRYALDLTPGQERDVYAHAGAARVAHNWALARVKAVMDQRTAERSYGIADDQLTASMSWTLPALRKAWNAVKADVAPWWGEVSKEAFSTGLDALARGLKNWADSRTGKRAGRPVGFPRFKSRRRTTPSVRFTTGAIRIEPDRMHIVLPRLGRLKLHESARKLARRVEADTARIMSATVRRGGGRWHVAFTVEVERAECVPARPASVVGVDVGIKHLAVLSTGEVVDNPRHLVAAQARLRSLGRALARKTGPDRRAGRRPSKRWDRAAARLGRAHTRVANLRRDGLHKLTTRLAGTHATVVVEDLNVIGMLANRRLARHIADAGFAELRRQLAYKAGWNGGRLLMADRWYPSSKTCSGCGAVKTKLALHEREYTCDACGLVIDRDRNASLNLAALAAEYDTAGSGPVAARGADQKTRARGQVAVKREPGTTTVGQTGTVPPQGRTTDHALTRAH

SEQ ID NO: 3598 - protein, 459 aa, unidentified
MRTLQAYRYALDLTPSQERAVLAHAGAARVAHNWALARVKAVMAQRAAERTYGVSDELLTPGLGWSLPALRKAWNAAKEDVAPWWRECSKEAFNTGLDALARALKNWSDSRGGQRAGRTVRFPRFKSRRRTTPSVRFTTGAIRVEPDRKHVVLPRLGPLKLHESARKLARRIDNGTARIMSASVRRDGERWHVSFTVQVERADRAPARPASVVGVDVGVKHLAVLSTGEMVPNPRHLVDAQQRLRRLGRALSRRTGPDRRTGQQPSNRWRRASARLGRAHARIANLRRDGLHKLTTRLAREHGTVVVEDLNVTGMLRNRRLARHIADASLGELRRQLAYKTEWNGGQLVVADRWYPSSKTCSDCGAVKTKLALSEREYRCQECGMVLDRDLNAARNLAALATEYDPAGSGPVAGRGADRKTLPAGLVAVKRQPGPAHAGQTGTVPPQGETADRVLAEAH

SEQ ID NO: 3599 - protein, 367 aa, unidentified
MLKAYKYRIYPNKEQEMQIAKTFGCCRFVYNQTLAYRKDKYEQERKFVSKTDCNNYCNRELKKMYEWLKEVDKFALTNAIYNMDSAYQKFFKEHAGYPKFKSKHDNHKSYTTNFTNGNILVDFENGKIKLPKLGKVKAKLHRGFAGQIKSATVSQVPSGKYYASVLAEIEHEKMPNTTEKIGLDLGIKELCITSDGRKYENPKILRKYEKKLAKLQRQLAHKEKRSKNYHKAKKQIALCHEKITNTRKDYLHKISHEIVSENQVIVSEKLQIKNMVKNHHLAKSISDVSWYELTRQLEYKSKWNDREYVKTDAFYASSQLCSACGYQNTETKDLSVREWICPNCGVKHDRDINAAKNILAEGLRQLA

SEQ ID NO: 3600 - protein, 437 aa, unidentified
MIVTHAYRFALDPTPGQVGALLRHAGAARVAFNWGIAQVKANLGQREAERSYGMAEAGLTPSFGWSMYSLRKAWNAAKREVAPWWAECSKEAYATGLDQLARALENWSASKRGKRKGPRMGFPRYKSKRKTTPSVRFTTGTIRLEDDRRHVTLPVLGTIRTHESTRKLHRRIAAGTAVVKSATVRREAGRWFVSFTCEVERTDRTPSRADTVIGVDLGIKHLAVFSDGRPTAENPRHYDTARRKLGRLSRTAARRLGPDRRTGQQPSKRWQRADAARNRVHYRTANLRRDALHKLTTSLAREYGTIVVEDLNVSGMLKNRRLARVVADAGFGEIRRQLAYKTRWNGGTLEVADRWFPSSKTCSRCQAVTPKLPLRIRMYVCDHCGLVLDRDENAALNLAALVKRHVAGSGPETENGRGADRKTPSCGAGGIEASTPH

SEQ ID NO: 3601 - protein, 372 aa, unidentified
MIAVEKAYKFRMYPNKKQQELINKTFGCCRFVYNKYLAKRIEVYKNDKETFTYKQCSSDLTNLKKELKWLKEPDKFSLQNALKDLDNAYKKFFKEKAGFPKFKSKKINRFSYKTNFTNGNIMYCGQHIKLPKLGMVKIRDKQVPQGRILNATISKEPSGRYYVSLCCTDVDIEVFENTNNQIGLDLGIKEFCISSCGEFIENPKYLKKSLNKLAKLQRELSRKTIDSLNRNKARLKVAGLQEHIANQRKDFLQKLSTKLIKENDIIFIEDLQVKNMIKNHKLSRLISDVSWSEFIRQLEYKANWHGRQIVKVGKFFASSQICNKCGYKNEEVKDLNIREWICPSCNETHDRDINASINILKEGLRLITIQNK

SEQ ID NO: 3602 - protein, 372 aa, unidentified
MIAVEKAYKFRMYPNKKQQELINKTFGCCRFVYNKYLAKRIDVYKNDKETFTYKQCSSDLTNLKKELKWLKEPDKFSLQNALKDLENAYEKFFKEKTGFPKFKSKKTNRFSYKTNFTNGNIMYCGQHIKLPKLGMVKIRDKQVPKGRILNATISKEPSGRYYVSLCCTDVDTEAFENTNNQIGLDLGIKEFCISSCGEFIENPKYLKKSLSKLAKLQRELSRKTIGSLNRNKARLKVARLQEHIANQRNDFLQKLSTKLIKENDIICIEDLQVKNMIRNHKLSRLISDVSWSEFIRQLEYKANWHGRQIVKVGKFFASSQICNKCGYKNEEVKDLNIRDWICPSCNETHDRDINASINILKEGLRLITIQNK

SEQ ID NO: 3603 - protein, 310 aa, unidentified
MVVVEKAYKFRMYPNKKQQELINKTFGCCRFVYNKYLAKRIEVYKNDKETFTYKQCSSDLTNLKKELKWLKEPDKFSLQNALKDLDNAYKKFFKEKAGFPKFKSKKINRFSYKTNFTNGNIVYCGQHIKLPKLGMVKIRDKQVPQGRILNATISKEPSGRYYVSLCCTDVDIEVFENTNNQTGLDLGIKEFCISSCGEFIENPKYLKKSLNKLAKLQRELSRKTIGSLNRNKARLKVARLQEHIANQRNDFLQKLSTKLIKENDIICIEDLQVKNMIKNHKLSRLISDVSWSEFIRQLEYKANWYGRQIV

SEQ ID NO: 3604 - protein, 372 aa, unidentified
MIAVKKAYKFRMYPNKKQQELINKTFGCCRFVYNKYLAKRIDVYKSDKETFTYKQCSSDLTNLKKELKWLKEPDKFSLQNALKDLDNAYKKFFKEKAGFPKFKSKKINRFSYKTNFTNGNIMYCGQHIKLPKLGMVKIRDKQVPQGRILNATISKEPSGRYYVSLCCTDVDIEVFENTNNQIGLDLGIKEFCISSCGEFIENPKYFKKSLNKLAKLQRELSRKTIGSLNRNKARLKVARLQEHIANQRNDFLQKLSTKLIKENDIICIEDLQVKNMIKNHKLSRLISDVSWSEFIRQLEYKANWHGRQIVKVGKFFASSQICNKCGYKNEEVKNLNIREWICPSCNETHDRDINASINILKEGLRLITIQNK

SEQ ID NO: 3605 - protein, 399 aa, unidentified
MKANLGQREAERSYGIAEAGLTPSFGWSMYSLRKAWNAAKREVAPWWAECSKEAYATGLDQLARALKNWSDSRRGKRKGPRMGFPRYKSKRKTTPSVRFTTGTIRLEDDRRHVTLPVLGTIRAHESTRKLHRRIAAGTAVVKSATVRREAGRWFVSFTCEVERADRTPSRADTVIGVDLGIKHLAVFSDGRPTAENPRHYDTARRKLGRLSRTAARRLGPDRRTGQQPSKRWQRADAARNRVHYRTANLRRDALHKLTTSLAREYGTIVVEDLNVSGMLRNRRLARVVADAGFGEIRRQLAYKTRWNGGTLEVADRWFPSSKTCSGCRAVTPKLPLRIRRYVCEHCGLVLDRDENAALNLAALVKRHVAGSGPETENGRGADRKTPSCGAGGIEASTPH

SEQ ID NO: 3606 - protein, 400 aa, unidentified
MLIAHKITLDPNNVQVTYFARTCGVARFAYNWALAEWQRQYEAHKADASLPKPSQMALRRQLNRIKGEQFPWMLDVTKNAPQMAIIQLGAAFKNFFAGRAKYPKFRKKGLHDRFSLTNDQFSVDASRIRIPNLGWVRMRESLRFTGKIMSATVSRVADRWFVSITVDTPNDLPLPNAENQGAVGVDLGVSALATLSTGEVVAGPKAHKALLSRMQRLSRGLSRKVKGSENRKKAKAKLARLHARISNIRKDALHQLTTDLTRRFHTIGIEDLNVRGMVKNRHLSRAVSDMGFFEFRRQLEYKAAQRGGMIVVADRWYPSSKTCSGCDHKLGVLPLSARGWTCPACGFVHDRDVNAAINLRNLAVSSTVSACGEEGSGLGRKPKAKPASVKQESSSKATCG

SEQ ID NO: 3607 - protein, 372 aa, unidentified
MIVLRAFKTELDLNNKQRTACVRHAGAARFAYNWGMARKQEAFANGGKSPSAIDLHRELNVLKKSELSWMYAVSKCAPQEALRDLDKAFANFFRRVKQKKAGRNIKAGFPRFKSKKHGLGGFRLTGAIHVFEKAIQLPRLGLLRLKERGYLPAGGVHILSATVSEKAGRWFVSLQVEMEVADPLMEERPVAGVDLGINRMAQVSDGMYFENPRALKSALTKLKRLQRVVSRRQKGSANRQKAVKQLARAHFRVANLRKNALHQATTTLTKTKSAIVLENLNVSGMMKNHHLAQAIADVGMYEFRRQMQYKGQWYGCKVLLADRFFPSTKRCSQCGNEKAIGLAERVYCCEHCGQVMDRDLNAAINLEQLLYC

SEQ ID NO: 3608 - protein, 459 aa, unidentified
MNTIQAYRFALDLSPGQERAVLAHSGAARVAHNWALARVKAVMDQRAAERTYGVPDDLLTPSMSWTLPALRKAWNAVKERVAPWWRECSKEAFNTGLDALARGLRNWADCRSGRRTGRPVGFPRFKSRRRTTASVRFTTGAIRVEPGRKHVVLPRLGRLKLHESARKLARRLEAGTARIMSATVRRDGGRWHVAFCVEVQRCERTPARPDSVVGVDVGITHLAVLSTGEPVDNPRHLTVAQARLRMLGRALSRKQGPDRRIGRRPSTRWERAAARLGRAHARVANLRRDGVHKLTTRLAREHGTIVVEDLNVAGMLANRRLARHITDAGFAEIRRQLTYKTQWNGGRLIIADRWYPSSKMCSGCGAVKAKLALSEREYHCQACGLVMERDHNASLNLAALAAEFDPAGSGPVAARGADRKTRERGQVAVKREPGTATAGQTGTVPPQGRTTDHVFTKAH

SEQ ID NO: 3609 - protein, 380 aa, unidentified
MKQLKAYKFRISPTEEQEIFFAKSFGCVRKVYNLMLDDRMKSYEETKDDTSKKMKFPTPAKYKKEFPFLKEVDSLALANAQLNLDKAYRNFFRDKSIGFPRFKSKKNPVQSYTTNNQNGTITLVDGKFIKLPKLKSLVRIKLHRQIKGIIKSATISRLASGKYFVSILCEEDIQELPKTNSTIGIDLGISHFAILSDGQKIDNHKFTSKMEQKLKREQRKLSKRCLMAKKKGIKLSDAKNYQKQKNKVAKLHEKVMNQREDFLNKLSTSIVKNHDTICIEDLNIKGMLRNHKLAKSISDVSWSRFVTKLEYKANWYGRKVIKVDKWYPSSQICSNCGHNDGKKELTIREWTCSNCNTNHDRDINASINIKTEGIRLLEIS

SEQ ID NO: 3610 - protein, 459 aa, unidentified
MKTIQAYRFALDLTPGQERDVLAHAGAARVAHNWALAKVKAVMDQRSAERSYGVPDEELTPSLSWSLAGLRKAWNAAKPDVAPWWGEVSKEAFNTGLDALARGLKNWAGSRRGTRAGRPVGFPRFKSRRRTTPSVRFTTGAIRVEPDRMHVVLPRLGRLKLHESARKLARRLDNGTARIMSATVRRDGGRWHVSFTVEVDRAERIPARPASVVGVDVGIKHLAVLSTGELVDNPRHLVAAQQRMRALGRALSRKTGPDRRTGRRVSKRWERAAARLGRAHARVANLRRDGLHKLTTRLAREHGTVVVEDLNVTGMLRNRKLARHIADAGFAEIRRQLAYKTGWNGGRLLAADRWYPSSKTCSGCGAVKAKLALSEREYQCEACGLVLDRDRNASLNLAALAAEFDTAGSGPVAARGADQKTRVRGQVAVKRESGTASAGQTGTVLPQGRTTDRVLAKAH

SEQ ID NO: 3611 - protein, 367 aa, unidentified
MLKVYKYRIYPSKEQEIQLAKTFGCCRFVYNQTLAYRKDAYEKEKNSISKTDCNNYCNRELKKVYEWLKEVDKFALTNAIYHMDSAYQKFFKEHAGCPKFKSKHDRHKSYTTNFTNGNITVDFDRERIKLPKLKEIKAKIHRNFAGQIKSATISQLPSGKYYVAILVETENVKKQETRGKIGLDLGIKDLCITSDGRKYENSKTIKNYERNLTKLQRQLAHKIKGRRNYQKKRKQIALCHEKITNTRKDYLHKISSEIISENQVIVSENLQIKNMIKNHKLAKSISDVSWYELTRQLEYKAKWNNRIYVKVDSFYASSQLCSCCGCQNKNIKDLSVRQWKCPNCGEIHDRDVNAAKNILAEGLRQIA

SEQ ID NO: 3612 - protein, 363 aa, unidentified
MHRAYKFRLYPNKEQTTLINKTIGCTRFVFNHFLAKRKDAYEQEKKTLGYHDCSAMLTQLKKEIEWLKEVDSTALQSTLKDLDFSYKKFFNEKKGYPKFKSKQNPKQSYTCKMNIKVEGNRIKLPKLGWVAFAKSREVDGRILSATIRRNSSGKYFVSVLCETEVLLLPQVEQTVGIDLGIKDFAILSTGEKVENPKYYRKYEKQLAKWQRIQSRRQKGSKNRNKARSKVARLHEKIANTRNDFLHKLSTKLINENQVICLEDLQVENMVKNHKVAKSIADASWSMFRTMLEYKAEWYGRKVSIVGKQFPSSQLCSTPNCGYRNKDVKNLNLRSWICPNCGVQHDRDQNAAINIEQEGLRLLA

SEQ ID NO: 3613 - protein, 380 aa, unidentified
MERLKAYKFRLYPTEEQEIFFAKSFGCVRKVYNLMLDDRIKAYQEKANNPSEKMRFPTPAKYKKEFPFLKEVDSLALANAQLHLDKAYKNFFRNKSIGFPRFKSKKNPVQSYTTNNQNGTVALIDDKFVKVPKLKSLIRIKLHRQPKGIIKSATISRRTSGKYYISLLCKEEINELPKSYSAIGIDLGITNFAIFSDGQKIDNHKFTAKMEKKLRREQRKLSKRALLAKKRGVNLFEAKNYQKQKRKVARLHEKVMNQRTDFLNKLSTEIIKNHDVICIEDLNTKGMLRNHKLAKSISDVSWSRFVTQLQYKADWYGRKIIKVDQWFASSQICSKCGYKDGKKSLEIREWTCPICSTHHDRDINASRNILTEGLRIMAFA

SEQ ID NO: 3614 - protein, 398 aa, unidentified
MILAHKIALAPNNKQATYFSRAAGVARFAYNWALAEWKRQYEASKTDSQAPKPSQTALRRQLNAIKREQFPWMLEVTKNAPQMAIIQLGGAFKNFFAGRAKYPKFRKKGVHDRFTLTNDQFKIVGCRIRIPSLGWVRMRESLRFDGKIMSATISLVDERWFVSIAVETTDTSHLPQAENQGAVGVDLGVSALATLSTGEVITGPKSYKKLLSRVRRLSRSLSRKQKGSSNRKKAKIKLAKLHARIAFIRSNALHQFTTDLTRRFHTIGIENLNVRGMVKNYYLARSIADMGFFELRRQLEYKTAMRGSQLVIADRFYPSSKMCSDCGYKLDELPLSVREWTCPSCGTHHDRDVNAAINLKNMAVSSTVSVCGEEGSGCIRKNAVKPASMKQEANSRFS

SEQ ID NO: 3615 - protein, 367 aa, unidentified
MLKAYRYRIYPNKEQEIQLAKTFGCCRFVYNQTLAYRKDAYEKEKKSVSKTDCNNYCNRELKKAYEWLKEVDKFALTNAIYNMDSAYQKFFKEHAGYPKFKSKHSNRKSYTTNFTNGNITVDFDRGRIKLPKLKRVKIKLHRKFSGRIKTATISKVPSGKYYVSVLVETEHSPLVKTNGQIGLDLGIKDLCITSDGKKYENPKTIKKYEKKLTKLQRQLANKTKGSRNYQKKRKQIALCHEKIANTRKDYLHKISSEIINENQVIVSENLQIKNMVKNHNLAKTISDVSWYELTRQLEYKSKWNGRNYIKIDTFYASSQLCFSCGYKNTNVKDLKVRDWMCPFCNTKHDRDINAAKNILAEGLRQVV

SEQ ID NO: 3616 - protein, 362 aa, unidentified
MLKAYRYRIYPNKEQEIQLAKTFGCCRFVYNQTLAYRKDAYEKEKKSVSKTDCNNYCNRELKKAYEWLKEVDKFALTNAIYNMDSAYQKFFKEHAGYPKFKSKHSNRKSYTTNFTNGNITVDFDRGRIKLPKLKRVKIKLHRKFSGRIKTATISKVPSGKYYVSVLVETEHSPLVKTNGQIGLDLGIKDLCITSDGKKYENPKTIKKYEKKLTRLQRQLANKTKGSRNYQKKRKQIALCHEKIANTRKDYLHKISSEIINENQVIVSENLQIKNMVKNHNLAKTISDVSWYELTRQLEYKSKWNGRNYIKIDTFYASSQLCFSCGYKNTNVKDLKVRDWMCPFCNTKHDRDINAAKIYWQKD

SEQ ID NO: 3617 - protein, 367 aa, unidentified
MLKAYRYRIYPNKEQEIQLAKTFGCCRFVYNQTLAYRKDAYEKEKKSVSKTDCNNYCNRELKKAYEWLKEVDKFALTNAIYNMDSAYQKFFKEHAGYPKFKSKHSNHKSYTTNFTNGNITVDFDRGRIKLPKLKRVKIKLHRKFSGRIKTATISKVPSGKYYVSVLVETEHSPLVKTNGQIGLDLGIKDLCITSDGKKYENPKTIKKYEKKLTRLQRQLANKTKGSRNYQKKRKQIALCHEKIANTRKDYLHKISSEIINENQVIVSENLQIKNMVKNHNLAKTISDVSWYELTRQLEYKSKWNGRNYIKIDTFYASSQLCFSCGYKNTNVKDLKVRDWMCPFCNTKHDRDINAAKNILAEGLRQVV

SEQ ID NO: 3618 - protein, 367 aa, unidentified
MLKAYRYRIYPNKEQEIQLAKTFGCCRFVYNQTLAYRKDAYEKEKKSVSKTDCNNYCNRELKKAYEWLKEVDKFALTNAIYNMDSAYQKFFKEHAGYPKFKSKHSNRKSYTTNFTNGNITVDFDRGRIKLPKLKRVKIKLHRKFSGRIKTATISKVPSGKYYVSVLVETEHSPLVKTNGQIGLDLGIKDLCITSDGKKYENPKTIKKYEKKLTRLQRQLANKTKGSRNYQKKRKQIALCHEKIANTRKDYLHKISSEIINENQVIVSENLQIKNMVKNHNLAKTISDVSWYELTRQLEYKSKWNGRNYIKIDTFYASSQLCFSCGYKNTNVKDLKVRDWMCPFCNTKHDRDINAAKNILAEGLRQVV

SEQ ID NO: 3619 - protein, 374 aa, unidentified
MNISIKYRLYPDEEQKVYFAKTFGCCRKIYNLMLADKISLYKATKTFGRQTPAMYKDTYPYLKEVDSLALANVQMHLQTAFKNYFSKKRKAKNGFPKFKSAKRSKKSYTTNNQNGTVDLGKNCIRLPKVGKVKAVIHRVPEDDWILKSATVSQDSAGDYFVSVLFEYEKEITWVSKNSTNVLGVDYKSDGLYMDSNGNKAMVHKYYRESRNRLAKEQRKLSRKIGSKRNEIKSNNYIKQLKRVNRIHRHIANQRLDGLHKKSTEIANQYDIVCIEDLNMKAIGNKGFGNGKATFDNGYGMFINMLDYKLSGRGKYLVKVDRWFPSSQICHCCGSIKKLSLKDRVYRCECGYTGDRDHNAAINILNEGLRILQDS

SEQ ID NO: 3620 - protein, 459 aa, unidentified
MGVVQAYRFALDLTPRQERAVLAHAGAARVAHNWALARVKAVMDQRAVERTYGTPDEQLTPTIGWSLPALRRAWNAAKADVAPWWTECSKEAFNTGLDALARGLKNWSDSRTGKRAGHPVGFPRFKSRRRSTPSVRFTTGAIRVEPDRRHVVLPRLGRLKLHESARKLARRLEAGTARIVSATVRRDGGRWYVAFCVDVDRAARTPNQPEVVVGVDLGVKHLAVLSTGEVEPNPRHLHTAARRMRRLARRASRRVGPDRRTGRRGSRRWERASVRLGRAHARVAHLRRDGLHKLTTRLAREYGTVVVEDLNVAGMLANRRLARHIADAGFAELRRQLAYKTSWGGGRLVVADRWYPSSKTCSGCGTVKTKLALSERTYTCTTCGLVLDRDVNAARNLAALAVTVAGSGPETRNGRGADRKTPLAGLVAVKRQPGTAKAGNTGTVPPQGRTSNHELTHAS

SEQ ID NO: 3621 - protein, 459 aa, unidentified
MKTVQAYRFALDLTAGQERDVYAHAGAARVAHNWALARVKAVMDQRAAERTYGLSDDQLTPTVSWTLPALRKAWNASKEQVAPWWRECSKEAFNTGLDALARALRNWVDSRNGKRAGRPVGFPRFKSRRRSTPSVRFTTGVIRVEPGRMHVVLPRLGRLKLHESARKLARRLDNGTARIMSATVRRDGGRWHVAFCVEVERAERTPARPDAVVGVDVGIKHLAVLSTGELVDNPRHLLVAQAQLRALSRTLSRKIGPDRRTGRRASNRWQRAASWLGRAHARVANLRRDGLHKLTTRLAREYGTVVVEDLNVAGMLANRRLARHIADAGFAEIRRQLAYKTEWNGGRLLVADRWYPSSKTCSGCGAAKAKLALSEREYHCQACGLVIDRDRNAALNLAALTAEFDTAGSGPVAARGADQKTRVRGQVAVKREPGTALAGQTGTVPPQGGATNRVLTRAH

SEQ ID NO: 3622 - protein, 475 aa, unidentified
MSDRVVIVPAVEHRDRRSVTQAYRFALDLTSAQQRAVLAHAGAARVAHNWALARVKAVMDQRAAERTYGIGEADLTRTQGWSLPALRRAWNAAKGDVAPWWTGCSKEAFNTGLDALARALKNWSDSRLSKRAGRPVGFPRFKSRRRSTPSVRFTTGAIRVEPDRKHVVLPRLGRLKLHESARKLARRLEAGTARVVSATVRRDGGRWYVSFTCAVERVGRMPARPGATVGVDLGVKYLAVLSTGELQPNPRYLDAAARRLRRLGRHASRRIGPDRRTGRRASKRWERARAQLGRAHARVANLRRDGLHKLTTRLAREYGTIVVEDLNVSGMLRNRRLARHIADAGFAELRRQLAYKTSWNGGRLAVADRWYPSSKTCSGCGAVKTKLALSERTYTCTICGLVLDRDANAARNLAALAVTVAGSGPETRNGRGADRKTPLAVPVAVKRQPGTATAGKTGTVPPQGRTSNHVLTYAT

SEQ ID NO: 3623 - protein, 459 aa, unidentified
MKTIQAYRFALDLNPAQERAVYAHAGAARVAHNWALARVKAVMDQRAAERTYGVPDEQLTPSLSWSLAGLRKAWNAAKPDVAPWWPEVSKEAFNTGLDALARALKNWADSRSGKRKGRPVGFPRYKSRRRTTPSVRFTTGAIRVERDRKHVVLPRLGRLKVHESTRKLARRVEADTARIMSATLRRDGGRWYVAFCVEVERPDRTPARPESVVGVDVGVRHLAVLSTGDLVPNPRHLTDAQRRLRTLARAVSRKTGPDRRTGQRPSRRWRRACTRLSRAHARVANLRRDGLHKLTTRLATTHGTVVVEDLNVAGMLTNRRLARHIADAGFAEIRRQLAYKTTPNGGKLITADRWYPSSKTCSGCGTVKTKLALSEREYECGTCGLTLNRDLNAARNLAALAAQTTTAGSGPVAARGADRKTRARGQVAEKREPGTAPAGKTGTVPSQGGTTDRALTKAH

SEQ ID NO: 3624 - protein, 659 aa, unidentified; identical to SEQ ID NO: 1508

SEQ ID NO: 3625 - protein, 463 aa, unidentified
MKTLQAYRFALDLSPRQERAVLAHAGAARVAHNWALARVKAVMSQRAAERTYGVPDELLSPPISWSLPSLRKAWNAAKDEVAPWWAECSKEAFNTGLDALARALKNWSDSRKGARKGRAVGFPRFKSRRRSTPTVRFTTGVMRIEADRRHVVLPRLGALRLHESARKLARRLEAGTARIMSATVRREGGRWFVSFTCEVERAVRAPARPGSMVGVDLGVKHLAVLSTGERVANPRHLVVAARRMRRLARAVSRCVTPDRRVRRVGSNRWARAQQELSRAHARVVGLRRDGLHQFTTRLTREHGTVVVEDLNVAGMLRNRRLARHVADASFAEVRRQLTYKSEWNGGRLVTAGRWYPSSKTCSGCGAVKTKLTLAERTYTCTACGLSLDRDLNAALNLAALAREVTDDRSGRESLNGRGADQKTRSRGQVAVKRLPGTARAGQAGTVPPQGGTTAQRSLLSTRR

SEQ ID NO: 3626 - protein, 463 aa, unidentified
MKTLQAYRFALDLSPRQERAVLAHAGAARVAHNWALARVKAVMSQRAAERTYGVPDELLSPPISWSLPSLRKAWNAAKDEVAPWWAECSKEAFNTGLDALARALKNWSDSRKGARKGRAVGFPRFKSRRRSTPTVRFTTGVMRIEADRRHVVLPRLGALRLHESARKLARRLEAGTARIMSATVRREGGRWFVSFTCEVERAVRAPARPGSMVGVDLGVKHLAVLSTGERVANPRHLVVAARRMRRLARAVSRCVTPDRRVRRVGSNRWARAQQELSRAHARVVGLRRDGLHQFTTRLTREHGTVVVEDLNVAGMLRNRRLARHVADASFAEVRRQLTYKSEWNGGRLVTAGRWYPSSKTCSGCGAVKTKLTLAERTYTCTACGLSLDRDLNAALNLAALAREVTDDRSGRESLNGRGADQKTRSRGQVAVKRLPGTARAGQAGTVLPQGGTTAQRSLLSTRR

SEQ ID NO: 3627 - protein, 659 aa, unidentified; identical to SEQ ID NO: 1507

SEQ ID NO: 3628 - protein, 463 aa, unidentified
MKTLQAYRFALDLSPRQERAVLAHAGAARVAHNWALARVKAVMSQRAAERTYGVPDGLLSPPISWSLPSLRKAWNAAKDEVAPWWAECSKEAFNTGLDALARALKNWSDSRKGARKGRAVGFPRFKSRRRSTPTVRFTTGVMRIEADRRHVVLPRLGALRLHESARKLARRLEAGTARIMSATVRREGGRWFVSFTCEVERAVRAPARPGSMVGVDLGVKHLAVLSTGERVANPRHLVVAARRMRRLARAVSRCVTPDRRVRRVGSNRWARAQQELSRAHARVVGLRRDGLHQFTTRLTREHGTVVVEDLNVAGMLRNCRLARHVADASFAEVRRQLTYKSEWNGGRLVTAGRWYPSSKTCSGCGAVKTKLTLAERTYTCTACGLSLDRDLNAALNLAALAREVTDDRSGRESLNGRGADQKTRSRGQVAVKRLSGTARAGQAGTVPPQGGTTAQRSFLSTRR

SEQ ID NO: 3629 - protein, 380 aa, unidentified
MERLKAYKFRLYPTEEQEIFFAKSFGCVRKVYNLMLDDRIKAYQEKANNPSEKMRFPTPAKYKKEFPFLKEVDSLALANAQLHLDKAYKNFFRNKSIGFPRFKSKKNPVQSYTTNNQNGTVALIDDKFIKVPKLKSLIRIKLHRQPKGIIKSATISRRTSGKYYISLLCKEEINELPKSYSAIGIDLGITNFAIFSDGQKIDNHKFTAKMEKKLRCEQRKLSKRALLAKKRGVNLFEAKNYQKQKRKVARLHEKVMNQRTDFLNKLSTEIIKNHDVICIEDLNTKGMLRNHKLAKSISDVSWSRFVTQLQYKADWYGRKIIKVDKWFASSQICSKCGHKDGKKSLEIREWTCPICHTHHDRDINASINILNEGLRIMALA

SEQ ID NO: 3630 - protein, 380 aa, unidentified
MERLKAYKFRLYPTEQQEVFFAKSFGCVRKVYNLMLHDRIKAYQEKANNPSEKMRFPTPAKYKKAFPFLKEVDSLALANAQLNLDKAYKNFFRDKSIGFPRFKSKKNPVQSYTTNNQNGTVALIDDKFIKVPKLKSLIRIKLHRQPKGIIKSATISRRTSGKYYISLLCKEEINELPKSYSAIGIDLGITNFAIFSDGQKIDNHKFTAKMEKKLRREQRKLSKRALLAKKRGVNLFEAKNYQKQKRKVARLHEKVMNQRTDFLNKLSTEIIKNHDVICIEDLNTKGMLRNHKLAKSISDVSWSRFVTQLQYKAEWYGRKIIKVDKWFPSSQICSKCGHKDGKKSLEIREWTCPVCHTHHDRDINASINILTEGLRIMAYA

SEQ ID NO: 3631 - protein, 254 aa, unidentified
MKKAYKFRIYPNKKQQELINKTFGCCRFVYNKYLAKRIDVYKNDKETFTYKQCSSDLTNLKKELNWLKEPDKFSLQNALKDLDNAYKKFFKEKAGFPKFKSKKINRFSYKTNFTNGNIMYCGQHIKLPKLGMVKVRDKQVPKGRILNATISKEPSGRYYVSLCCTDVDIEVFENTNNHIGLDLGIKEFCISSCGEFIENPKYLKKSLNKLAKLQRELSRKTIGSLNRNKTRLKVARLQEHIANQRNDFLQKTIY

SEQ ID NO: 3632 - protein, 459 aa, unidentified
MKTIQAFRFALDMTPRQERDVLAHAGAGRVAHNWALAQVKAVMDQRAAERSYGVQAELLTPSLSWSLAGLRKVWNVAKPEVAPWWGEVSKEAFNTGLDALARGLKNWAESRNGKRAGRPAGFPRFKSRRRTTPSVRFTTGAIRVDPDRMHVVLPRLGRLKLHESARKLARRLDNGTARIMSATVRRDGGRWHVAFCVEVERADRTPALPGSVVGVDVGIKHLVVLSTGELVDNPRHLSVAQTRLRALGQALSRKSGPDRRTGRRPSKRWERAAARVGRAHARVANLRRDGLHKLTTELGATYGTVVVEDLNVIGMLANRRLARYIADAGFAEIRRQLAYKTAWNGGRLLVADRWYPSSKTCSGCGAVKAKLALSERDYHCQACGLVIDRDRNAALNLAALAAKFDTAGSGPVAARGADRKTRARGQVAVKREPGTASAGQAGTVPPQGRTADRVLTRAL

SEQ ID NO: 3633 - protein, 413 aa, unidentified
MQIKRAHVIRLKPNREQESYFRRACGVRRFVFNWALNQWEAWRTLYEKTPGRPRRPGWMKLDKYFNSIKDGVCPWVREVSAHIPARAIRNADDAYQMWFKAMQRADTQWGRPRRAKHGVNERFYVHNQQLRFGDGRVFIGKCGWVRCREDFRFPDAKILGGSIRQRADGWYLSVQCEFDVDDPVEHAGAPVGIDAGVTKNFTLSDGTVLHLPRERMQELERKIKRAQRVASRRWAGKPKKGHEAKALRNEDGKLLPKSNRFQKAQKRIAKLKLKQARIRQHYLHLFSRQIVDNYSTICVEDLTLKNMTKSAKGDAENPGTNVRAKAGLNREMLNVAIGEFRWMLDYKSAATGAMVIAVDPAYTSQTCSQCGHVSAANRRSQSSFCCEACGFADNADVNAARNILKQGTSVESQ

SEQ ID NO: 3634 - protein, 367 aa, unidentified
MLKAYKYRIYPNNEQKIQIAKTFGCCRFVYNKTLAYRKEVYEKEKKSVSKTDCNNYCNRQLKKEYEWLKEVDKFALTNAIYNMDAAYQKFFKEHAGYPKFKSKHDNHKSYTTNFTNCNIAVDFEDNRVKLPKLKNVKAKLHRNFSGQIKSATISQVPSGKYYVSILVETEHVELPHTNQNTGIDLGVKELCITSDGKKYENPKIIRKYEKKLKKLQRQLAHKEKRSQNYYKVKKKIALCHEKITNSRKDYLHKISHEIISENQVIVSENLQIKNMVKNHHLAKSISDVSWYELTRQLEYKAKWNGRKYIKINTFYASSQLCSACGYQNTETKNLSVREWICPVCGTNHDRDINAAKNILEEGLREIA

SEQ ID NO: 3635 - protein, 367 aa, unidentified
MLKAYKYRIYPNNEQKIQIAKTFGCCRFVYNQTLVYRKEVYEKEKKSVSKTDCNNYCNRQLKKEYEWLKEVDKFALTNAIYNMDAAYQKFFKEHAGYPKFKSKHDNRKSYTTNFTNGNITVDFGYNRVKLPKLKGIKAKLHRNFSGQIKSATISQVPSGKYYVSILVETEHTELPHTNQNTGIDLGIKELCITSDGKKYENPKIIRKYEKKLVKLQRQLAHKEKRSQNYYKTKKKIALCHEKITNTRKDYLHKMSHEIISENQVIVSEDLQIKNMVKNHHLAKSISDVSWHELTRQLEYKAKWNGRKYVKIDTFYASSQLCSVCGYQNTETKNLSVREWICPVCGTNHDRDINAAKNILEEGLRQIA

SEQ ID NO: 3636 - protein, 368 aa, unidentified
MNIAYRFRIYPNREQEVLLAKTFGCCRFLYNQMLNDKIREYEATKKMLRNTPAMYKKAYPFLKEVDSLALANVQMHLEKAYKNFFGNPKIGFPKFKSKHRSRKSYTTNVVNGNIQVKDHRIKLPKLKWIRMKKHRDIPEKYCLKSVTISMEPSGKYYASLLYEKSDCENQAEELDYEDAKILGIDYAMHGMAVFSEDIQKENEGYFRKSEERLAREQRKLSHCVKGSNNYYRQKKRVALCHEKIRNQRKDFLHKLSHEMAEAYDVVAVEDIDMKAMSQYMHFGKSVMDNGYGKFRELLEYKLTWRGKKLVRVDRFFPSSKKCCKCGSVKKELKLSDRVYLCTCGNRIDRDLNAAINIREEARRMLLAG

SEQ ID NO: 3637 - protein, 368 aa, unidentified
MNIAYRFRIYPNREQEVLLAKTFGCCRFLYNQMLNDKIREYEATKKMLRNTPAMYKKAYPFLKEVDSLALANVQMHLEKAYKNFFGNPKIGFPKFKSKHRSRKSYTTNVVNGNIQVKDHRIKLPKLKWIRMKKHRDIPEKYCLKSVTISMEPSGKYYASLLYEKSDCENQAEELDYEDAKILGIDYAMHGMAVFSEDIQKENEGYFRKSEERLAREQRKLSHCVKGSNHYYRQKKRVALCHEKIRNQRKDFLHKLSHEMAEAYDVVAVEDIDMKAMSQYMHFGKSVMDNGYGKFRELLEYKLTWRGKKLVRVDRFFPSSKKCCKCGSVKKELKLSDRVYLCTCGNRIDRDLNAAINIREEARRMLLAG

SEQ ID NO: 3638 - protein, 368 aa, unidentified
MNIAYRFRIYPNREQEVLLAKTFGCCRFLYNQMLNDKIREYEASKKMLRNTPALYKKAYPFLKEVDSLALANVQLHLEKAYKNFFRDPKIGFPKFKSKHRSRKSYTTNVVNGNIQVADDRIKLPKLKWIRMKKHRDILEKYCLKSVTISMEPSGKYYASLLYEKSDCENQAEEFDYEDAKILGIDYAMHGMAVFSEDIQRENEGYFRKSEERLAREQRKLSHCVKGSNNYYRQKKRVALCHEKIRNQRKDFLHKLSHEIAEIYDVVAVEDIDMKAMSQCTHFGKSVMDNSYGKFRELLEYKLTWKGKKLVRVDRFFPSSKKCCKCGNIKKELKLSDRVYLCTCGNRIDRDLNAAINIREEARRMLLAG

SEQ ID NO: 3639 - protein, 379 aa, unidentified
MNKAIKYRLYPTTKQATMFANTFGCCRKVYNLMLNDKLESYKLTGKFVSVTPAMYKKDYQFLKEVDSLALANVQLNLQGAFKSCFNKSCKKKTGFPKFKSAKRSRKSYTTNNQKGTVAIIDNTIKLPKIGRVKAVIHRQPNADWVIKSATISQDNDGKYYASVLFEFEQNIISVPISDNAIGLDYASDGLYVDDKGNVGTNHKYYRESHKKLTKEQRKLSRMKGSKKGEAKSNNYIKQLHKVNKIHKHISNQRLDNLQKISTEIANQYDVVCVESLNMKAMSSKGFGNGKSTLDNGYGMFLNMLEYKLADRGKYLVKVDKWYPSSQICHCCGKKHPEMKDLRIRIFTCDCGFTISRDQNAALNIKNEGLRILKSETFAA

SEQ ID NO: 3640 - protein, 367 aa, unidentified
MLKAYKYRIYPNNEQKIQIAKTFGCCRFVYNQTLAYRKEVYEKEKKSVSKTDCNNYCNRQLKKEYEWLKEVDKFALTNAIYNMDAAYQKFFKEHAGYPKFKSKHDNHKSYTTNFTNGNIAVDFEENRVKLPKLKNVKAKLHRNFSGQIKSATISQIPSGKYYVSILVETEHVELPHVNQNTGIDLGIKELCITSAGKKYENPKIIRKYEKKLIKLQRQLAHKEKRSQNYYKTKKKIALCHEKITNTRKDYLHKMSLEIISENQVIVSEDLQIKNMVKNHHLAKSISDVSWYELTRQLEYKAKWNGRKYIKINTFYASSQLCSVCGYQNTETKNLSVREWICPVCGTNHDRDINAAKNILEEGLRQIA

SEQ ID NO: 3641 - protein, 368 aa, unidentified
MNIAYRFRIYPNREQEVLLAKTFGCCRFLYNQMLNDKIREYEATKKMLRNTPAMYKKAYPFLKEVDSLALANVQMHLEKAYKNFFGNPKIGFPKFKSKHRSRKSYTTNVVNGNIQVKDHRIKLPKLKWIRMKKHRHIPEKYCLKSVTISMEPSGKYYASLLYEKSDCENQAEELDYEDAKILGIDYAMHGMAVFSEDIQKENEGYFRKSEERLAREQRKLSHCVKGSNNYYRQKKRVALCHEKIRNQRKDFLHKLSHEMAEAYDVVAVEDIDMKAMSQYMHFGKSVMDNGYGKFRELLEYKLTWRGKKLVRVDRFFPSSKKCCKCGSVKKELKLSDRVYLCTCGNRIDRDLNAAINIREEARRMLLAG

SEQ ID NO: 3642 - protein, 368 aa, unidentified
MNIAYRFRIYPNREQEVLLAKTFGCCRFLYNQMLNDKIREYEATKKMLRNTPAMYKKAYPFLKEVDSLALANVQMHLEKAYKNFFRDPKIGFPKFKSKHRSRKSYTTNVVNGNIQVEDHQIKLPKLKWIRMKKHRDIPEKYCLKSVTISMEPSGKYYASLLYEKTDCENQAEELDYEDAKILGIDYAMHGMAVFSEDIQKENEGYFRKSEERLAREQRKLSHCVKGSNNYYRQKKRVALCHEKIRNQRKDFLHKLSHEMAETYDVVAVEDIDMKAMSQCMHFGKSVMDNGYGKFRELLEYKLTWRGKKLVRVDRFFPSSKKCCKCGSVKKELKLSDRVYFCTCGNRIDRDLNAAINIREEARRMLLAG

SEQ ID NO: 3643 - protein, 326 aa, unidentified
MNIAYHFRIYPNREQEVLLAKTFGCCRFLYNQMLNDKIREYEATKKMLRNTPAMYKKAYPFLKEVDSLALANVQMHLEKAYKNFFRDPKIGFPKFKSKHRSRKSYTTNVVNGNIQVEDHQIKLPKLKWIRMKKHRDIPEKYCLKSVTISMEPSGKYYASLLYEKTDCENQAEELDYEDAKILGIDYAMHGMAVFSEDIQKENEGYFRKSEERLAREQRKLSHCVKGSNNYYRQKKRVALCHEKIRNQRKDFLHKLSHEMAETYDVVAVEDIDMKAMSQCMHFGKSVMDNGYGKFRELLEYKLTWRGKKLVRVDRFFPSSKKCCKCG

SEQ ID NO: 3644 - protein, 367 aa, unidentified
MLKAYKYRIYPNNEQKIQIAKTFGCCRFVYNKTLAYRKEVYEKEKKSVSKTDCNNYCNRQLKKEYEWLKEVDKFALTNAIYNMDAAYQKFFKEHAGYPKFKSKHDNHKSYTTNFTNCNIAVDFEDNRVKLPKLKNVKAKLHRNFSGQIKSATISQVPSGKYYVSILVETEHVELPHTNQNTGIDLGVKELCITSDGKKYENPKIIRKYEKKLKKLQRQLAHKEKRSQNYYKVKKKIALCHEKITNSRKDYLHKISHEIISENQVIVSENLQIKNMVKNHHLAKSINDVSWYELTRQLEYKAKWNGRKYIKINTFYASSQLCSACGYQNTETKNLSVREWICPVCGTNHDRDINAAKNILEEGLREIA

SEQ ID NO: 3645 - protein, 367 aa, unidentified
MLKAYKYRIYPNNEQKIQIAKTFGCCRFVYNQTLAYRKEVYEKEKKSVSKTDCNNYCNRQLKKEYEWLKEVDKFALTNAIYNMDVAYQKFFKEHAGYPKFKSKHDNHKSYTTNFTNGNITVDFGCNRVKLPKLKGIKAKLHRNFSGQIKSVTISQVPSGKYYVSILVETEHTELPHTNQNTGIDLGIKELCITSDGKKYENPKIIRKYEKKLVKLQRQLAHKEKRSQNYYKTKKKIALCHEKITNTRKDYLHKMSHEIISENQVIVSEDLQIKNMVKNHHLAKSISDVSWHELTRQLEYKAKWNGRKYVKIDTFYASSQLCSVCGYQNTETKNLSVREWICPVCGTNHDRDINAAKNILEEGLRQIA

SEQ ID NO: 3646 - protein, 367 aa, unidentified
MLKAYKYRIYPNNEQKIQIAKTFGCCRFVYNQTLAYRKEVYEKEKKSVSKTDCNNYCNRQLKKEYEWLKEVDKFALTNAIYNMDAAYQKFFKEHTGYPKFKSKHDNHKSYTTNFTNGNITVDFVCNRVKLPKLKGIKAKLHRNFSGQIKSATISQVPSGKYYVSILVETEHVELAHTNQNTGIDLGIKELCITSDGKKYENPKIIRKYEKKLIKLQRQLAHKEKRSQNYYKIKEKIALCHEKITNTRKDYLHKMSHEIISENQVIVSENLQIKNMVKNHHLAKSISDVSWYELTRQLEYKAKWNGRKYVKIDTFYASSQLCSVCGYQNTETKKLSVREWICPVCGTNHDRDINAAKNILEEGLRQIA

SEQ ID NO: 3647 - protein, 367 aa, unidentified
MLKAYKYRIYPNNEQKIQIAKTFGCCRFVYNQTLAYRKEVYEKEKKSVSKTDCNNYCNRQLKKEYEWLKEVDKFALTNAIYNMDAAYQKFFKEHAGYPKFKSKHDNHKSYTTNFTNGNITVDFGCNRVKLPKLKGIKAKLHRNFSGQIKSVTISQVPSGKYYVSILVETEHTELPQTNQNTGIDLGIKELCITSDGKKYENPKIIRKYEKKLVKLQRQLAHKEKRSQNYYKTKKKIALCHEKITNTRKDYLHKMSHEIISENQVIVSEDLQIKNMVKNHHLAKSISDVSWHELTRQLEYKAKWNGRKYVKIDTFYASSQLCSVCGYQNTETKNLSVREWICPVCGTNHDRDINAAKNILEEGLRQIA

SEQ ID NO: 3648 - protein, 367 aa, unidentified
MLKAYKYRIYPNNEQKIQIAKTFGCCRFVYNQTLAYRKEVYEKEKKSVSKTDCNNYCNRQLKKEYEWLKEVDKFALTNTIYNMDAAYQKFFKEHAGYPKFKSKHDNHKSYTTNFTNGNIAVDFEENRVKLPKLKNVKAKLHRNFSGQIKSATISQIPSGKYYVSILVETEHVELPHVNQNTGIDLGIKELCITSAGKKYENPKIIRKYEKKLIKLQRQLAHKEKRSQNYYKTKKKIALCHEKITNTRKDYLHKMSLEIISENQVIVSEDLQIKNMVKNHHLAKSISDVSWYELTRQLEYKAKWNGRKYIKINTFYASSQLCSACGYQNTETKNLSVREWICPVCGTNHDRDINAAKNILEEGLRQIA

SEQ ID NO: 3649 - protein, 376 aa, unidentified
MNKAIKYRLYPTTEQCVMFAKTFGCCRKVYNLMLSDKIRSYQETGRFVSVTPAMYKEDHPYLREVDSLALANVQLNLQRAFKACFDKSRKKRNGFPKFKSAKHSRKAYTTNNQHGTVAVMERAIKLPKIGRVKAVIHRVPDTDWILKSVTVSQEPDGRYYASVLFEYRNTVTKVPVSDSVIGLDYASDGLYVDDQGNTGSRHKYYRESHAKLAKAQRRLSHMQGSQKGETKSCNYIKQLRKVNKIHRHIVNQRLDHLHKLSTETANRYDIVCAESLNMRSMANKGFGNGKATLDNGYGLFLDMLEYKLADRGKHLVRVDRWYPSSQICHRCGIRHPEMKDLRIRTMRCSCGLVMNRDQNAAINIRQEGLRMLMEAA

SEQ ID NO: 3650 - protein, 367 aa, unidentified
MIKAYKYRIYPNSEQRMQIAKTFGCCRFVYNQTLAYRKEVYEKEKKSVSKTDCNNYCNRQLKKDYEWLKEVDKFALTNAIYNMDAAYRKFFKEHAGYPKFKSKHDNHKSYTTNITNGNITVDFESNRVKLPKLKDVTAKLHRNFSGQIKSATISQVPSGKYYVSILVETEHMELPHTNQNTGIDLGIKELCITSDGKKYKNPKIIRKYEKKLIKLQRQLAHKEKRSQNYYKIKKKIALCHEKITNTRKDYLHKISHEIISENQVIVSENLQIKNMVKNHHLAKAISDVSWYELTRQLEYKAKWNGRKYIKIDTFYASSQICSVCGYQNTETKDLSVRKWECPVCGVKHDRDINAAKNILAEGLRQIA

SEQ ID NO: 3651 - protein, 367 aa, unidentified
MLKAYKYRIYPNNEQKIQIAKTFGCCRFVYNQTLAYRKEIYEKEKKSVSKTDCNNYCNRQLKKEYEWLKEVDKFALTNAIYNMDAAYQKFFKEHAGYPKFKSKHDNHKSYTTNFTNGNIAVDFEENRVKLPKLKNVKAKLHRNFSGQIKSATISQIPSGKYYVSILVETEHVELPHVNQNTGIDLGIKELCITSAGKKYENPKIIRKYEKKLVKLQRQLAHKEKRSQNYYKTKKKIALCHEKITNTRKDYLHKMSHEIISENQVIVSEDLQIKNMIKNHRLAKSISDVSWYELTRQLEYKAKWNGRKYVRIDTFYASSQLCSVCGYQNTEIKNLLVREWTCPVCGTNHDRDINAAKNILEEGLRQIA

SEQ ID NO: 3652 - protein, 369 aa, unidentified
MEKAYKFRMYPNKKQQELINKTFGCCRFVYNKYLAKRIEVYKNDKETFTYKQCSSDLTNLKKELKWLKEPDKFSLQNALKDLDNAYKKFFKEKAGFPKFKSKKINRFSYKTNFTNGNIMYCGQHIKLPKLGMVKIRDKQVPKGRILNATISKEPSGRYYVSLCCTDVDIEAFKNTNNQIGLDLGIKEFCISSCGDFIENPKYLKKSLSKLAKLQRELSRKTIGSLNRNKARLKVARLQEHIANQRNDFLQKLSTKLIKENDIICIEDLQVKNMIKNHKLSRSISDVSWSEFIRQLEYKANWYGRQIVKVGKFFASSQICNKCGYKNEEVKDLNIREWICSSCNETHDRDINASINILKEGLRLITIQNK

SEQ ID NO: 3653 - protein, 369 aa, unidentified
MEKAYKFRMYPNKKQQELINKTFGCCRFVYNKYLAKRIDVYKNDKETFTYKQCSSDLTNLKKELKWLKEPDKFSLQNALKDLDNAYEKFFKEKAGFPKFKSKKINRFSYKTNFTNGNIMYFSQHIKLPKLGMVKIRDKQVPKGRILNATISKEPSGRYYVSLCCTDVDIEAFENTNNQIGLDLGIKEFCISSCGDFIENPKYLKKSLNKLAKLQRELSRKTIGSLNRNKARLKVARLQEHIANQRNDFLQKLSTKLIKENDIICIEDLQVKNMIRNRKLSRLISNVSWSEFIRQLEYKANWHGRQIVKVGKFFASSQICNKCGYKNEEVKDLNIREWICPSCNETHDRDINASINILKEGLRLITIQNK

SEQ ID NO: 3654 - protein, 369 aa, unidentified
MKKAYKFRMYPNKKQQELINKTFGCCRFVYNKYLAKRIDVYKNDKETFTYKQCSSDLTNLKKELKWLKEPDKFSLQNALKDLDNAYKKFFKEKAGFPKFKSKKINRFSYKTNFTNGNIMYFSQHIKLPKLGMVKVRDKQVPKGRILNATISKEPSGRYYVSLCCTDVDIEAFENTNNHIGLDLGIKEFCISSCGEFIENPKYLKKSLNKLAKLQRELSRKTIGSLNRNKARLKVARLQEHIANQRNDFLQKLSTKLIKENDIICIEDLQVKNMIRNRKLSRLISDVSWSEFIRQLEYKANWHGRQIVKVGKFFASSQICNKCGYKNEEVKDLNIREWICPSCNETHDRDINASRNILKEGLRLITIQNK

SEQ ID NO: 3655 - protein, 372 aa, unidentified
MIAVKKAYKFRIYPNKKQQELINKTFGCCRFVYNKYLAKRIDVYKNDKETFTYKQCSSDLTNLKKELNWLKEPDKFSLQNALKDLDNAYKKFFKEKAGFPKFKSKKINRFSYKTNFTNGNIMYCGQHIKLPKLGMVKVRDKQVPKGRILNATISKEPSGRYYVSLCCTDVDIEALENTNNHIGLDLGIKEFCISSCGEFIENPKYLKKSLNKLAKLQRELSRKTIGSLNRNKARLKVARLQEHIANQRNDFLQKLSTKLIKENDIICIEDLQVKNMIRNHKLSRLISDVSWSEFIRQLEYKANWYGRQIVKVGKFFASSQICNKCGYKNEEVKDLNIREWICPSCNETHDRDINASINILKEGLRLITIQNK

SEQ ID NO: 3656 - protein, 380 aa, unidentified
MERLKAYKFRIYPTTKEEVFFAKSFGCVRKVYNLMLDERIKAYQQYKSDASKQTKLPTPAKYKKDYPFLKEIDSLALANAQQHLDKAYQNFFRDKSVGFPKFKSKKNPIQSYTTNNQKGTISLIGNQYIKLPKLKSVVKIKLHRKIKGDIRSATISKHASGKYYVALLCKEDIQPMSKTNQSIGIDLGISDFAICSDGQKIDNHQFTRKMAKKLAREQRKLSRRLLLAKQRKVDVSEAKNYQKQKQKVARLHEKFKNQRNDFLNKLSTNIIKNHDVICIEDLNTKGMMRNRKLAKSISDVSWSNFVRQLEYKAEWYGRTVIKIDRWFPSSQICSECGYHDGKKPLNIREWTCSNCHAHHDRDINASQNILTEGLRLQKQA

SEQ ID NO: 3657 - protein, 361 aa, unidentified
MHRAYKFRLYPNREQATLINKTIGCTRFVFNHFLAKRKDAYEQEQKTLNYNDCSALLTQLKKEIEWLKEVDSTALQSTLKDLDSSYKKFYKEKKGYPKFKSKKNPKQSYTCKMNIKVEGDRIKLPKLGWVTFAKSREVEGRILSATVRKNPSGTYFVSVLCETEIQPLLQAEKTVGVDLGIKDFAILSTGEKIANPKVLRYYEKKLATWQQKLSRRKKGGQNREKLRKQVARLHERISNTRNDFLHKLSTQLIRENQTICLEDLRVENMIKNHKLAKSIADASWSAFRTMLEYKAAWYGRTISIVGKQFPSSQLCSGCGYQNKEVKNLNLRNWTCPNCGVQHDRDKNAAINIEQEGLRLLA

SEQ ID NO: 3658 - protein, 461 aa, unidentified
MLTVQAFRFALDLSPVQERAVLAHAGAARVAHNWALARVKAVMEQRAAERSYGVPEQLLTPSMSWTLPALRRAWNASKEQVAPWWRECSKEAFNTGLDQLARALKNWADSRSGTRAGRPVGFPRFKSRRRTTPSVRFTTGAIRVEPDRKHIVLPRLGRLKLHESARKLARRLEAGTARIMSATVRRDGGRWHVAFCVEVDRAERTPVRPGSVIGVDLGIRHLAVLSTGELVDNPRHLAAAHTRLRHLGRVLSRKVGPDRSTGQRASNRWQRTANQLARVHARVANLRRDGLHKLTTRLAREYGTVVVEDLNVTGMLRNRTLARHIADAGFAQIRRQLAYKTDWNGGQLITADRWYPSSKTCSGCGAVKAKLALSDRDYTCQACGLTIDRDHNASLNLAALAAEFKPAGSGPVAARGADRKTRARGQAAVKREPGTAPAGQTGTVPPQGGTTNRAQPRRAER

SEQ ID NO: 3659 - protein, 459 aa, unidentified
MKTIQAYRFALDLSRGQERAVLAHVGAARVAHNWALAQVKAVMDQRTAERSYGVPDEQLTPSLSWSLAGLRKTWNAAKPEVAPWWAEVSKEAFNTGLDALARGLKNWSDSRKGRRAGRPVGFPRFKSRRRTTPSVRFTTGAIRVEPDRMHVVLPRLGRLKLHESARKLARRVDNGTARIMCATVRGEGGRWHVSFTVEVERAECIPARPDTVVGVDVGIKHLAVLSTGELVPNPRHLVAARQRMLSLGRSLSRKSGPDRRTGRRPSKRWERAAARLGRAHARVANVRRDGLHKLTTRLATTHGTIVVEDLNVAGMMRNRRLARHIADAGFAEIRRQLAYKTSWNGGRLLTADRWYPSSKTCSGCGAVKTKLALSEREYECEACGLVMDRDRNAALNLAALAAEFDTAGSGSVAARGADQKTHARGQVAVKREPGTASAGKTGTVPPQGGTTDRALTKAR

SEQ ID NO: 3660 - protein, 558 aa, unidentified
MSWSGTWPGGSVRCTRRDRSGTGNRSSSPRRPRAGPNSAAKPTRRRPGWTGRRCGGARTIRFPKPSATAGGLLLLWSPSANLSLRQVLLTVEVSGVGLSVGASTVRLVITTHAYRFALDPTPRQVGALLRHTGAARVAYNWLLAVVKANLSQREAERSYGMAEAELTPSLSWSMYSLRKAWNQAKADVAPWWPECSKEAYATGLDRLATALKNWSDSKKGRRRGPRMGFPRFKSKRKATPSVRFTTGVIRLDGRMHVVLPVLGRIKTHESTHKLGRLIEAGTARIKSATVRQEAQRWCVSFTVEVQRAERTPTRPDAVIGVDLELKTLAVFSDGRPAAENPKHLAGARRKLRRLSRTVSRRQGPDRRTGQQPSNRWKRANAQRNRVHHRVTALRRDGIHKLTTSLTREYGTVVVEDLNVASMVKNWKLARSIADAGFGEIRRQLAYKTVWTGGRLEVADRWFPSSKTCSACGNVRPKLPLRVRTYVCENCGLILDRDENAALNLTALVKRHVAGSGPETVNGRGADRKTPPGGAGGRPAPGGSRPGKTGIFVQEWASH

SEQ ID NO: 3661 - protein, 462 aa, unidentified
MKTIRAYRFALDLTPGQERDVLAHAGAARVAHNWALAKVKAVMDQRSCERSYGVPEEHLTPSPSWSLAGLRRAWNAVKSEVAPWWAEVSKEAFNTGLDAVARSLKNWADSRKSMRAGRPVGFPRFKSRRRTTPSVRFTTGAIRVEPDRMHAVLPRLGRLKLHESARKLARRLDNGTARIMSATVRRDGGRWHVSFTVEVERAERAPARPDSVVGVDVGIKHLAVLSTGELVDNPRHLVAARRRMRTLGRALSRKTGPDRRTGRRGSKRWERACARLGRAHARVANLRRDGLHKLTTRLAREYGTVVIEDLNVSGMLQNRRLARHIADAGFAEIRRRLAYKTTWNGGLLLVADRWYPSSKTCSGCGAVKTKLALSEREFTCPACGLVIDRDRNAALNLAALAAEFDTAGSGPVAARGADRKTRQRGQVAVKREPGTTPVDQTGTVLPQGRTTDRVRSPERTER

SEQ ID NO: 3662 - protein, 459 aa, unidentified
MSVVQAYRFALDLTARQERAVLAHAGAARVAHNWALARVKAVMDQRAAERSYGIDEADLTPTQGWSLPALRRAWNQAKPVVAPWWRECSKEAFNTGLDPLARALKNWSDSRSGKRAGRPVGFPRFKSRRRCTPSVRFTTGAIRVEPDRKHVVLPRLGRLKLHESARKLARRLEAATARIVSATVRREGGRWFVAFCVEVDRAARTPEQPHVVVGVDLGVKHLAVLSTGEVEPNPRHLDAAARRLRRLARRVSRRVGPDRRTGRRASRRWERARGQLGRAHARVANLRRDGLHKLTTRLAREYGTILVEDLNVVGMLRNRRLARRIADAGFAELRRQLGYKTSWNGGRLVVADRWYPSSKTCSGCGAVKAKLALSERTYTCTTCGLTLDRDVNAARNLAALAAQASAAGSGPVAGRGADRKTRRAGPVAVKRQPGTATAGKTGTVPPQGGTSDQMLTKAS

SEQ ID NO: 3663 - protein, 463 aa, unidentified
MKTLQAYRFALDLSPRQERAVLANAGAARVAHNWALARVKAVMSQRAAERTYGVPDELLSPPISWSLPSLRKAWNAAKDEVAPWWAECSKEAFNTGLDALARALKNWSDARKGARKGRAVGFPRFKSRRRSTPTVRFTTGVMRIEADRRHVVLPRLGTLRLHESGRKLARRLEAGTARIMSATVRREGGRWFVSFTCEVERVVRAPARPGSMVGVDLGVKHLAVLSTGERVANPRHLVVAARRMRRLARAVSRCVTPDQRVRRAGSNRWARAQQQLSRAHARVVGLRRDGLHQFTTRLTREHGTVVVEDLNVAGMLRNRRLARHVADASFAEVRRQLIYKCEWNGGRLVTAGRWYPSSKTCSGCGAVKTKLTLAERTYTCTACGLSVDRDLNAALNLAALAREVTDDRSGRESLNGRGADQKTRTRGQVAVKRLPGTARAGQTGTVPPQGGTTAQRSLLSTRR

SEQ ID NO: 3664 - protein, 252 aa, unidentified
MAVVEKAYKFRMYPNKKQQELINKTFGCCRFVYNKYLAKRIEVYKNNKETFTYKQCSSDLTNLKKELKWLKEPDKFSLQNALKDLDNAYKKFFKEKAGFPKFKSKKINRFSYKTNFTNGNIMYCGQYIKLPKLGMVKVRDKQVPQGRILNATISKEPSGRYYVSLCCTDVDIEAFENTNNHIGLDLGIKEFCISSCGEFIENPKYLKKSLNKLAKLQRELSRKTIGSLNRNKARLKVARLQEHIANQRNDFL

SEQ ID NO: 3665 - protein, 382 aa, unidentified
MALIVRGYKTELKLNNAQRTACLKHAGAARYAYNWGLRRYQEEREAGRKAPNAMSLHKELNALKQTELHWMYEVSKAAPQESLRDLEKAFRNFWKRCQKKKQGTFRGKLGFPRFKSKKRGIGSFRLTGTIHIGKDWVQLPRLGKLRLKEQGYLPTKGVHILSATVSERAGRWYVSVQVEEEHAEPGIALGETIGIDVGIKAMATLSDGRVFRNPKALGSHLKHLKRLCRQHARKQPGSKHRQKAARKLARLHAHIANLRKDTLHQVTSLIVAKTKPDQERPTCIVLEDLQVSGMVKNRKLSRAIVDVGFAEFRQQLDYKAKQAGSLIYTVSRWEPSSKTCSWCGWIDEDLTLSDRLFQCKECGYVIDRDLNAAINLALKAAG

SEQ ID NO: 3666 - protein, 378 aa, unidentified
MQVIRGYKTELDLNNAQKTACLQHAGASRFTYNWGLKRYEEEYKAGRKAPSAMSLHKELNALKQTHFPWMYTVSKCAPQEALRNLEKAFKQFFGKVKLKAQGTYRGKLGYPRWKSKKRGIGSFRLTGAIHVFEDRIQLPRLGTLRLHEHGYIPTNAKVLSATVSEQAGRWFVSVQVEEYGSDPVLATGPALGIDLGVKAMATASDGTIIANPKALRSNLKKLRRASRQHSRKQKGSKNRARATRKLARLHAHIGNIRKDALHKATSQLVMKTKSSSERPAVIVLEDLNVSGMLKNRRLSRAIADVGFYEFRRQMLYKAEQTGCKVVLVSRWEPSSKTCSGCKAVREELDLRERTFLCHACGLVLDRDLNAAYNLAALA

SEQ ID NO: 3667 - protein, 459 aa, unidentified
MKSIQAYRFALDLTPRQERAVLVHAGAARVAHNWALARVKAVMDQRAAERTYGVTEAELTPTVGWSLPALRRAWNSAKGEVAPWWRECSKEAFNTGLDALARALKNWSDSRSGKRAGRPVGFPRFKSRRRATPSVRFTTGAIRVEPDRKHVVLPRLGRLKLHESSRKLARRLDNGTARIVSATVRRDGSRWHVAFTVEVERAERVPVRPTSVVGVDVGIKHLAVLTNDELVPNPRHLADAQQRMRSLGRSLSRKIGPDRRTGRRASKRSERAAARLGRAHARVANLRRDGMHKLTTRLAREHGTVVVEDLNVAGMLRNRRLARHIADAGFAEIRRQLAYKTEWNGGRLVVADRWYPSSKTCSGCGTVKAKLALSERTYTCTTCGLTLDRDLNAARNLAALAREVDTAGSGPVAGRGADRKTRVRGLVAVKRQPGTASAGQTGTVLPQGRTTNRVLTKAH

SEQ ID NO: 3668 - protein, 461 aa, unidentified
MKTIQAYRFALDLTFRQHRNVLAHAGAARVAHNWALAQVKAVIGQRAAERSYGVAEESLTPAVSWSLAGLRKAWNAAKRDVAPWWGEVSKEAFNTGLDALARGLKNWADSRKGKRAGRAAGFPRFKSRRRTTPSVRFTTGAIRVEPDRRHVVLPRLGRLKLHESARKLARRLEAGTARILSATVRRDGGRWHVSFTVEVDRAERTPARPDAVIGVDVGIKHLAVLSTGDLVPNPRHLATAQTRLRALGRALSRKAGPDRRTRPRPSKRWQRAAARLGRAHARVSHLRRDTLHKLTSWLATTYGTVVVEDLNVAGMLTNRRLARHIADAGFGELRRQLAYKTSWNGGRLVVADRWYPSSKTCSGCGAVKTKLTLSERNYRCAACGLVVDRDHNAALNLAALAAEFDTAGSGSVAVRGADQKTRVGGRVAVKRKPGTTPVGQTGTVLPQGRTTNRVLTKHTDR

SEQ ID NO: 3669 - protein, 459 aa, unidentified
MTTIQAYLFALDLTPRQHRNVLAHAGAARVAHNWALAQVKAVMGQRAAERSYGVPDGLLTPALSWSLAGLRKTWNAAKSEVAPWWSEVSKEAFNTGLDALARGLKNWADSRNGKRAGRAAGFPRFKSRRRTTPSVRFTTGAIRVEPDRRHVVLPRLGRLKLHESARKLARRLEAGTARILSATVRRDGGRWHVSFTVEVDRAERTPARPDAVIGVDVGIKHLAVLSTGDLVPNPRHLATAQTRLRALGRALSRKTGPDRRTGQRPSRRWQRAAARLGRAHARVTHLRRDTIHKLTSKLATTYGTVVVEDLNVAGMLTNRRLARHIADAGFAELRRQLAYKTSWNGGRLVVADRWYPSSKTCSACGTVKTKLALSERNYRCAACGLVIDRDRNAALNLAALAAQFDTAGSGPVAARGADQKTRACGQVPVKREPGTTSVGQTGTVPPQGRTTHYVLTKAR

SEQ ID NO: 3670 - protein, 459 aa, unidentified
MKTIQAYRFALDLTPRQHRNMLAHAGAARVAHNWALARVKAVMGQRAAERSYGVPDELLTPAVSWSLAGLRKMWNAVKPEVAPWWGEVSKEAFNTGLDALARGLRNWADSRTGKRAGRAIGFPGFKARRRTTPSVRFTTGAIRVEPDRKHVVLPRMGRLKLHESARKLARRLEAGTARILSATVRRDGGRWHVSFTVEVDRAERTPARPGATVGVDVGIKHLAVLSTGDPVPNPRHLAAAQTRLRALGRALSRKAGPDRRTGQRPSQRWQRAAARLGRAHARVTHLRRDTIHKLTSKLAATYGTMVIEDLNVAGMLTNRRLARHIADAGFAELRRQLAYKISWNGGRLVVADRWYPSSKTCSACGTVKTKLGLSEREYRCEACGLVLDRDRNAALNLAALAALFDTAGSGSVAARGADQKTRVCGQVAVKREPGTTSVGQTGTVPPQGRTTDHVLTKAH

SEQ ID NO: 3671 - protein, 459 aa, unidentified
MKTIQAYRFALDLTPVQHRNVLAHAGAARVAHNWALARVKAVMGQRAAERSYCVSDGMLTPALSWSLAGLRKLWNAAKPQVAPWWAEVSKEAFNTGLDALARGLKNWADSRTGKRAGRAIGFPRFKSRRRTTPSVRFTTGAIRVEPDRKHVVLPRMGRLKLHESARKLARRLEAGTARILSATVRRDGGRWHVSFTVEVDRAERTPTRPDSVIGVDVGIKHLAVLSTGDLVPNPRHLASAQARLRALGRAVSRKTGPDRRTGQRPSDRWRRAAARLGRAHARVAHLRRDTTHKLTNKLAATYGTVVVEDLNVAGMLTNRRLARHIADAGFAELRRQLAYKTAWNGGRLLVADRWYPSSKTCSACGAVKTKLALSEREYRCEACGLVLDRDRNAALNLAALAALFDTAGSGPVAARGADQKTRVCGQVAVKREPGTTSVGQTGTVPPQGRTTDHVLTKAR

SEQ ID NO: 3672 - protein, 459 aa, unidentified
MKTFQAYRFALDLTPRQHRNVLAHAGAARVAHNWALARVTAVIGQRAAERSYGVPDGLLTPAVSWSLAGLRKMWNAVKPQVAPWWAEVSKEAFNTGLDALARGLKNWADSRTGKRAGRATGFPRFKARRRTTPSVRFTTGAIRVEPDRKHVVLPRLGRLKLHESARKLARRLEAGTARILSATVRRDGGRWHVSFTVEVDRAERTPARPDSVIGVDVGIKHLAVLSTGDPVPNPRHLAAAQTRLRALGRALSRKTGPDRRTGQRPSQRWQRAAARLGRAHARVANLRRDTIHKLTSKLAATYGTMVIEDLNVAGMLTNRRLARHIADAGFAELRRQLAYKTSWNGGRLVVADRWYPSSKTCSACGTVKTKLALSERNYRCETCGLSIDRDRNAALNLAALAAEFDTAGSGSVAARGADQKTRARGQVAVKREPGTTLVGQAGTVPPQGRTTDHVLTKAH

SEQ ID NO: 3673 - protein, 459 aa, unidentified
MKTIQAYRFALDLTPGQERDVLAHAGAARVAFNWALVKVKAVMDQRTAERSYGVPDEALTPSLSWSLAGLRKAWNAAKPGVAPWWGEVSKEAFNTGLEALARGVKNWADSRRGARAGRPVRFPRFKSRRRTAPSVRFTTGAIRVEPDRMHVVLPRLGRLKLHESARKLARRLDNGTARIMSATVRRGGGRWHVSFTVEVERAEGAPARPRSVVGVDVGITHLAVLSTGELVDNPRHLAAAQRRMRSLGRALSRKTGPDRRTARRPSKRWERAAARLGRAHARVAHLRRDGLHKLTTRLAREHATIVVEDLNVAGMLANRKLARCVADAGFAEIRRQLAYKTGWNGGRLLLADRWYPSSKTCSGCGTVKTKLALSEREYTCQACGLVIDRDRNASLNLAALAAEFDTAGSGPVAARGADQKTRVRGQVATKREPGTASAGQTGTVPPQGRTTNRVLAKAH

SEQ ID NO: 3674 - protein, 451 aa, unidentified
MKTMQAYRFALDLTPSQERAVLAHAGAARVAHNWALARVKAVMDQRAAERSYGVADADLTPAVGWSLPALRKAWNAAKGDVAPWWAECSKEAFNTGLDALARALKNWADSRAGKRAGRPVGFPRFKSRRRTRPSVRFTTGAIRVEADRKHVMLPRLGRLKTHESTRKLTRRVDAGAARILSATVRRDGGRWYVSFTCEVQRADRVPTHPFSTVGVDVGVTHLAVLSTGELVPNPRHLDTAGRRMRRLARRMSRRVGPDRRTGQRPSNRWERARRQMTRAHARVANLRRDGLHKLTTRLARQYGTVVVEDLNVAGMLRNRRLARRIADAGFAELRRQLAYKTEWNGGRLVVADRWYPSSKTCSGCGAVKTKLALSERTYTCTTCGLVLDRDLNAARNLAALAAEVDTAGSGPVAGRGANRKTRHGGPVAAKRQPGTAPAGKAGTAPPQGRAA

SEQ ID NO: 3675 - protein, 427 aa, unidentified
MLGVAVRERLGVVQAYRFALDLTPRQERAVLAHAGAARVAHNWALARVKTVMDQRAAERSYGIPDEQLTPTVGWSLPALRRAWNQAKADVAPWWAECSKEAFNTGLDALARALTNWSDSSTGKRAGRRVGFPRFKSRRRSTPSVRFTTGAIRVEPDRRHVVLPRLGRLKLHESARKLARRLEAGTARVLSATVRRDGGRWFVAFCVDVDRAARTPHQPQVVVGMDLGVKHLAVLSTGEMEPNPRHLDAAARRMRRLARRASRRVGPDRRTGRRASKRWERARVRLGRAHARVGNLRRDGLHKLTSRLAREYGTLVVEDLNVAGMLANRRLARSIADAGFAELRRQLAYKTGEEWRAAGGRPVVSVLENLLGLRRGENQTRPVRAHLHLHHVRPRPGPGPQRRTEPGRAGGHRRREWLGDAKRTWSRP

SEQ ID NO: 3676 - protein, 459 aa, unidentified
MRTRQAYRFALDLTPRQERVVLAHAGAARVAHNWALARVKAVMDQRVVERTYGIPDEHLTPTIGWSLPALRRAWNAVKADVAPWWAECSKEAFNTGLDALARALTNWSDSSTGKRAGRRVGFPRFKSRRRSTPSVRFTTGAIRVEPDRKHVVLPRLGRLKLHESARKLARRLEAGTARIVSAAVRRDGGRWFVAFCVEVDRAERAPAQPQATVGVDVGVTNLAVLSTGEMVPNPRHLDGAARRMRRLARRASRRVGPDRRTGQRPSKRWERANARLGRAHARVAHRRRHGLHKLTTRLAREYATIVVEDLNVAGMLRNRRLARRIADAGFAELRRQLAYKTGWNGGRLVVADRWYPSSKTCSGCGAVKTKLTLSERTYNCTVCGLTLDRDLNAARNLAAFAAEVTTAGSGPVAGRGADHKTRQGRPVAVKRQPGIALASKTGTVPPQGGTSNHMLTKAS

SEQ ID NO: 3677 - protein, 451 aa, unidentified
MKTMQAYRFALDLTPSQERAVLAHAGAARVAHNWALARVKAVMDQRAAERSYGVADADLTPAVGWSLPALRKAWNRAKVDVAPWWAECSKEAFNTGLDALARALKNWADSRAGKRAGRPVGFPRFKSRRRSTPSVRFTTGAIRVEADRKHVVLPRLGRLKTHESTRKLARRVEAGAARILSATVRRDGGRWYVSFTCEVQRADRVPTRPFSTVGVDVGVTHLAVLSTGELVPNPRHLDTAGRRMRRLARRMSRRVGPDRRTGQRPSNRWERARRQMTRAHARVANLRRDGLHKLTTRLARQYGTVVVEDLNVAGMLRNRRLARRIADAGFAELRRQLAYKTGWNGGRFVVADRWYPSSKTCSGCGAVKTKLALSERTYTCTSCGLVLDRDLNAARNLAALAAEVDTAGSGPAAGRGADRKTRHGGPVAVKRQPGPAKTGKAGTAPPQGRAA

SEQ ID NO: 3678 - protein, 475 aa, unidentified
MSYRVVTVLGVAHRERLGVVQAYRFALDLTPRQERAVLAHAGAARVAHNWALARVKAVMDQRAAERTYGIDEVDLTPTQGWSLPALRRAWNQAKSDVAPWWAECSKEAFNTGLDALARGLKNWSDSRTGKRAGRRVGFPRFKSRRRSTPSVRFTTGAIRVEPDRRHVVLPRLGRLKLHESARKLARRLEAGTARIVSATVRRDGGRWYVAFCVDVDRAARTPHQPQLVVGVDLGVKHLAVLSTGELEPNPRYLDAAARRMRRLARRVCRRVGPDRRTGRRASKRWERARARLGRAHARVAHLRRDGLHKLTTRLAREYGTIVVEDLNVAGMLANRRLARRIADAGFAELRRHLAYKAGWNGGRLVVADRWYPSSKTCSGCGAVKTKLALSERTYTCTTCGLVLDRDVNAARNLAALAAAVAGSGSETRNGRGADRKTPLAGLVAVKRQPGTAKAGNTGTVPPQGRTSDHELTYAS

SEQ ID NO: 3679 - protein, 369 aa, unidentified
MKKAYKFRIYPNKKQQELINKTFGCCRFVYNKYLAKRIDVYKNDKETFTYKQCSSDLTNLKKELNWLKEPDKFSLQNALKDLDNAYKKFFKEKAGFPKFKSKKINRFSYKTNFTNGNIMYCGQHIKLPKLGMVKVRDKQVPKGRILNATISKEPSGRYYVSLCCTDVDIEVFENTNNHIGLDLGIKEFCISSCGEFIENPKYLKKSLNKLAKLQRELSRKTIGSLNRNKARLKVARLQEHIANQRNDFLQKLSTKLIKENDIICIEDLQVKNMIRNRKLSRLISDVSWSEFIRQLEYKANWHGRQIVKVGKFFASSQICNKCGYKNEEVKDLNIREWICPSCNETHDRDINASRNILKEGLRLITIQNK

SEQ ID NO: 3680 - protein, 304 aa, unidentified
MEKAYKFRMYPNKKQQELINKTFGCCRFVYNKYLAKRIDVYKNDKETFTYKQCSSDLTNLKKELKWLKEPDKFSLQNALKDLENAYEKFFKEKAGFPKFKSKKTNRFSYKTNFTNGNIMYCGQHIKLPKLGMVKIRDKQVPQGRILNATISKEPSGRYYVSLCCTDVDIEAFENTNNQIGLDLGIKEFCISSCGEFIENPKYLKKSLSKLAKLQRELSRKTIGSLNRNKARLKVARLQEHIANQRNDFLQKLSTKLIKENDIICIEDLQVKNMIRNHKLSRLISDVSWSEFIRQLEYKANWXNR

SEQ ID NO: 3681 - protein, 372 aa, unidentified
MVVVEKAYKFRMYPNKKQQELINKTFGCCRFVYNKYLAKRIDVYKNNKETFTYKQCSSDLTNLKKELKWLKEPDKFSLQNALKDLDNAYKKFFKEKVGFPKFKSKKINRFSYKTNFTNGSIMYCGQHIKLPKLGMVKIRDKQVPKGRILNATISKEPSGRYYVSLCCTDVDIEAFENTNNHIGLDLGIKEFCISSCGEFIENPKYLKKSLNKLAKLQRELSRKTIGSLNRNKARLKVARLQEHIANQRNDFLQKLSTKLIKENDIICIEDLQVKNMIRNRKLSRLISDVSWSEFIRQLEYKANWYGRKIVKVGKFFASSQICNKCGYKNEEVKDLNIREWICPSCNETHDRDINASINILKEGLRLITIQNK

SEQ ID NO: 3682 - protein, 372 aa, unidentified
MVVVEKAYKFRMYPNKKQQELIDKTFGCCRFVYNKYLAKRIDVYKNDKETFTYKQCSSDLTNLKKELKWLKEPDKFSLQNALKDLENAYEKFFKEKTGFPKFKSKKTNRFSYKTNFTNGNIMYCGQHIKLPKLGMVKIRDKQVPKGRILNATISKEPSGRYYVSLCCTDVDIEAFENTNNQIGLDLGIKEFCISSCGEFIENPKYLKKSLSKLAKLQRELSRKTIGSLNRNKARLKVARLQEHIANQRNDFLQKLSTKLIKENDIICIEDLQVKNMIRNRKLSRLISDVSWSEFIRQLEYKANWHGRQIVKVGKFFASSQICNKCGYKNEEVKNLNIREWICPSCNETHDRDINASMNILKEGLRLITIQNK

SEQ ID NO: 3683 - protein, 363 aa, unidentified
MHRAYKFRLYPNKEQAALINKTIGCSRFVFNHFLAKRKEAYEQEKKTLNYHECSAMLTQLKKEIEWLKEVDSTALQSAVKDLDSSYKKFFKEKKGYPKFKSKKNPKQSYTCKMNIKVEGNCIKLPKLGWVAFAKSREVEGRILSATIRRNPSGKYVVSVLCETEIPPHPQIEQTVGVDLGIKDFAILSTGEKVANPKYYRKYEKQLAKWQRIHSRRQKGGKNRYKARIQVARLHEKIANTRNDFLHKLSTKLINENQVICLEDLQVKNMVRNHKLAKSIADASWSMFRTMLEYKAEWYGRTISIVGKQFPSSQLCSTPNCGYRNKDVKNLNLREWNCPKCGAKHDRDENAAINIEQEGLRLLA

SEQ ID NO: 3684 - protein, 405 aa, unidentified
MARFEVPEGWCVQAFRFTLDPTEDQARALARHFGARRKAYNWAVATLKADIEAWRVTGIGTVKPSLRVLRKRWNTVKDEVCVNAETGAVWWPECSKEAYADGIGGAVDAYWNWQNSRSGKREGKTMGFPRFKKKGRDQDRVTFTTGAMRVEPDRRHLTLPVVGTVRTHENTRRIERLIATGRARVLAISVRRNGTRLDASVRVLVQRPQQPNVAQPGSRVGVDVGVRRLATVANEAGAVLEEVPNPRPLDAALKELRYASRARSRCTKGSRRYRERTTEISRLHRRVNDVRTHHLHVLTTRLAQTHGHIVVEGLDAAGMLRQKGASRRPRPPARTVGLGPGHSAPALVLQDGLVRVGAGGRRPLVPVVKRGADRKTGPCPAGGCEARKGGSRMAAEQPRDGVQVA

SEQ ID NO: 3685 - protein, 403 aa, unidentified
MKVTRGYKTELDLNNKQRTACLKHAGCARFAYNWGLARSQEAYRATGKRPTAIDLHKELNALKKTDYPWMYEVSKCAMQEALRDLEKAYKNFFRRVELKKQGKWKGKLGFPTFKKKSKGIGSFRLTGSIKVLRDAVQLPRLGRMRLHEHDFIPTTARILSATVSEEAGRWFVSIQVEEEQEQLTPPATTAIGVDLGIKTLATLSDGVTFENPRALKHAQKRLRHLERQKSRRKLGSKNRKKTCRKLAKQHARIARIRKDAAHKLTTSLCKNHALVAIEDLHVAGMLNNHKLAQAVSDSNFGEIRRQLEYKAVWHGVHLVKIDRFYPSSKRCSACGWQDDEQTLADRLFTCHECGLVLDRDLNAAINILQEALRTTGSSSGSHAYGVGSSGLLECQQAKLPTLK

SEQ ID NO: 3686 - protein, 413 aa, unidentified
MATRVRGYKTELDLNNEQRTACLKHAGCARFAYNWGLARSQEAYRATGKRPTAIDLHKELNALKKTDYPWMYEVSKCAMQEALRDLEKAYKNFFRRVELKKQGKWKGKLGFPTFKKKSKGIGSFRLTGSIKVLRDAVQLPRLGRLRLHEHGYLPTNAKVLSATVSEEAGRWFVSVQVEEEQNAPERTATTALGVDLGIKTLATLSDGTTFENPRALKQAQKRLRRLERQKSRRKKASQNRKKTCRKLAKQHARVAHIRRDATHKLTTYLTKHHALVAIEDLHVSGMLKNHKLAQAIADSNFGEIRRQLTYKADLYGTCLVVIDRFYPSSKTCSSCGSVKPVLDLQERTFVCKACGMVLDRDQNAALNLLHEAMRTTGSSSGSYACGVGSSGSSDGKSETLHVEAGTNPHLGMS

SEQ ID NO: 3687 - protein, 413 aa, unidentified
MATRVRGYKTELDLNNEQRTACLKHAGCARFASNWGLARSQEAYRATGKRPTAIDLHKELNALKKTDYPWMYEVSKCAMQEALRDLEKAYKNFFRRVELKKQGKWKGKLGFPTFKKKSKGIGSFRLTGSIKVLREAVQLPRLGRLRLHEHGYLPTNAKVLSATVSEEAGRWFVSMQVEEEQNAPERTATTALGVDLGMKTLATLSDGTTFENQRALKQAQKRLRRLERQKSRRKKASQNRKKTCRKLAKQHARVAHIRCNATHKLTTYLTKHHALVAIEDLHVSGMLKNHKLAQAIADSNFGEIRRQLTYKADLYGTCLVVIDRFYPSSKTCSSCGSVKPVLDLQERTFVCEACGMVLDRDQNAALNLLHEAMRTTGSSSGSDACGVGSSGFSDGKSETLHVEAGTNPHLGMS

SEQ ID NO: 3688 - protein, 403 aa, unidentified
MKVTRGYKTELDLNNKQRTACLKHAGCARFAYNWGLACSQEAYRATGKRPTAIDLHKELNALKKTDYPWMYEVSKCAMQEALRDLEKAYKNFFRRVELKKQGKWKGKLGFPTFKKKSKGIGSFRLTGSIKVLRDAVQLPRLGRMRLHEHDFIPTTARILSATVSEEAGRWFVSIQVEEEQEQLTPPATTAIGVDLGIKTLATLSDGVTFENPRALKHAQKRLRHLERQKSRRKLGSKNRKKTCRKLAKQHARIARIRKDAAHKLTTSLCKNHALVAIEDLHVAGMLNNHKLAQAVSDSNFGEIRRQLEYKAVWHGVHLVKIDRFYPSSKRCSACGWQDDEQTLADRLFTCHECGLVLDRDLNAAINILQEALRTTGSSSGSHAYGVGSSGLLECQQAKLPTLK

SEQ ID NO: 3689 - protein, 398 aa, unidentified
MILAHKIALAPNNKQATYFSRAAGVARFAYNWALAEWKRQYEASKTDSQAPKPSQTALRRQLNAIKREQFPWMLEVTKNAPQMAIIQLGEAFKNFFAGRAKYPKFRKKGVHDRFTLTNDQFKIVGCRIRIPSLGWVRMRESLRFDGKIMSATISLVDERWFVSIAVETTDTSHLPQAENQGAVGVDLGVSALATLSTGEVITGPKSYKKLLSRVRRLSRSLSRKQKGSSNRKKAKIKLAKLHARIAFIRSNALHQFTTDLTRRFHTIGIENLNVRGMVKNYYLARSIADMGFFELRRQLEYKTAMRGSQLVIADRFYPSSKMCSDCGYKLDELPLSVREWTCPSCGTHHDRDVNAAINLKNMAVSSTVSVCGEEGSGCIRKNAVKPASMKQEANSRFS

SEQ ID NO: 3690 - protein, 363 aa, unidentified
MHRAYKFRLYPNKEQATLINKTIGCTRFVFNHFLAKRKEAYEQENKTLNYNDCSALLTQLKKEIEWLKEVDSTALQSTLKDLDSSYKKFFKEKKGYPKFKSKKNPKQSYTCKMNIKIEGNRIKLPKLGWVSFAKSREVEGRILSATIRWNPSGKYFVSVLCETETRLLPKVEQTVGIDLGIKDFAILSTGEKVANPKYYRKYEKQLAKWQRIQSRRQKGSNNRNKARTKVARLHEKMANTRNDFLHKLSTKLINESQVICLEDLQVENMIKNHKLAKSIADASWSMFRTMLEYKAEWYGRKVSIVGKQFPSSQLCSTPNCGYRNKEVKSLNLRSWICPHCGVQHDRDQNAAINIEQEGLRLLA

SEQ ID NO: 3691 - protein, 378 aa, unidentified
MMVKRGYQAELDLNNAQITLARKHCGAARWAYNYGLRRKQEAYTAGEKTLYATDLHREINALKKTELSWMYEVSKCAAQEALRDLDSAFKHFFRKVERKKQGKWKGKCGYPKCKSKKKAIGSARFTGSIHVYPDAIQLPRFGLLRLKEHHYLPMNVKIGSATISEKAGRWYVSICVHEQQAEPTPATGEVIGVDLGIKTLATCSDGCTFANPKALRKKLNKLKRTSRRHSRKQKGSQNRKKAKTRLARMHARIANVRKDALHKATSAIVARTKPDSERPAVIVLEDLQVSGMLKNRRLSRAIADVGMYEFRRQMEYKAREAGVQVKFVSRWYPSSKTCSDCGWRHEDLTLAERVFICQQCGVVLDRDENAALNLAASA

SEQ ID NO: 3692 - protein, 451 aa, unidentified
MKSIQAYRFALDLTPGQERVVLAHAGAARVAHNWALARAKAIMDQRAAERTYGVPDDQLTPALSWSLAGLRKAWNAAKAQVAPWWGEVSKEAFNTGLDALARALQNWAGSRTGKRKGRPVGFPRFKSRRRATPSVRFTTGAIRVEPDRMHVVLPRLGRLKLHESARKLARRLEAGTARIMSATVRREGGRWHVAFCVEVERAERSPARPGSVVGVDVGITHLAVLSTGELVDNPRHLSTAQQRMRQLSRALSRKIGPDRRTGQHPSSRWRRAANRLGRAHAQVAGLRRDGLHKLTTRLAREHGTVVVEDLNVTGMLANRKLARHIADAGFAEIRRQLAYKTGWNGARLLVADRWYPSSKTCSGCGAVKTKLTLSEREYHCEECGLVLDRDLNAALNLAALAAQFDTAGSGPVTARGADQKTRTRGRVAVKREPGTASADQTGTAAGQPAAA

SEQ ID NO: 3693 - protein, 309 aa, unidentified
MEKAYKFRMYPNKKQQELINKTFGCCRFVYNKYLAKRIEVYKNDKETFTYKQCSSDLTNLKKELKWLKEPDKFSLQNALKDLDNAYKKFFKEKAGFPKFKSKKINRFSYKTNFTNGNIMYFSQHIKLPKLGMVKIRDKQVPKGRILNATISKEPSGRYYVSLCCTDVDIEAFENTNNHIGLDLGIKEFCISNCGDFIENPKYLKKSLNKLAKLQRELSRKTIGSLNRNKARLKVARFQEHIANQRNDFLQKLSTKLIKENDIICIEDLQVKNMIRNRKLSRLISDVSWSEFIRQLEYKANWXXXXCYYI

SEQ ID NO: 3694 - protein, 407 aa, unidentified
MARFEVPEGWCVQAFRFTLDPTEDQARALARHFGARRKAYNWAVATLKADIEAWRVTGIGTVKPSLRVLRKRWNTVKDEVCVNAETGAVWWPECSKEAYADGIGGAVDAYWNWQNSRSGKREGKTMGFPRFKKKGRDQDRVTFTTGAMRVEPDRRHLTLPVVGTVRTHENTRRIERLIATGRARVLAISVRRNGTRLDASVRVLVQRPQQPNVAQPGSRVGVDVGVRRLATVANEAGAVLEEVPNPRPVDAALKELRYASRARSRCTKGSRRYRERTTEISRLHRRVNDVRTHHLHVLTTRLAQTHGHIVVEGLDAAGMLRQKGLPGARARRRGLSDSALGTPRRHLSYKTGWYGSALVVADRWFPSLSVEPTVRPGLARLVAVKRGREAAAWLPNNPETGCKSRDH

SEQ ID NO: 3695 - protein, 368 aa, unidentified
MNIAYHFRIYPNREQEVLLAKTFGCCRFLYNQMLNDKIREYEATKKMLRNTPAMYKKAYPFLKEVDSLALANVQMHLEKAYKNFFRDPKIGFPKFKSKHRSRKSYTTNVVNGNIQVEDHQIKLPKLKWIRMKKHRDIPEKYCLKSVTISMEPSGKYYASLLYEKNDCENQAEELDYEDAKILGIDYAMHGMAVFSEDIQKENEGYFRKSEERLAREQRKLSHCVKGSNNYYRQKKRVALCHEKIRNQRKDFLHKLSHEMAETYDVVAVEDIDMKAMSQCMHFGKSVMDNGYGKFRELLEYKLTWRGKKLVRVDRFFPSSKKCCKCGSVKKELKLSDRVYFCTCGNRIDRDLNAAINIREEARRMLLAG

SEQ ID NO: 3696 - protein, 437 aa, unidentified
MIVTHAYRFALDPTPGQARALLRHAGAARVAFNWGITQVKANLGQREAERSYGIAEAGLTPSFGWSMYSMRKAWNAAKREVAPWWAECSKEAYATGLDQLARAMKNWSDSRRGKRKGPRMGFPRYKSKRKTTPSVRFTTGTIRLEDDRRHVTLPVLGTIRAHESTRKLHRRIEAGTAVVKSATVRREAGRWFVSFTCEVERADRTPSRADTVVGVDLGIKHLAVFSDGRPTAENPRHYDSARRKLGRLSRTAARRLGPDRRTGQQPSKRWQRADAARNRVHYRTANLRRDALHKLTTSLAREYGTIVVEDLNVSGMLRNRRLARVVADAGFGEIRRQLAYKTRWNGGTLEVADRWFPSSKTCSGCRAVTPKLPLRIRMYVCEHCGLVLDRDENAALNLAALVKRHVAGSGPETENGRGADRKTPSCGAGGIEASTPH

SEQ ID NO: 3697 - protein, 437 aa, unidentified
MIVTHAYRFALDPTPGQARALLRHAGAARVAFNWGIAQVKANLGQREAERSYGIAEAGLTPSFGWSMYSLRKAWNAAKREVAPWWAECSKEAYATGLDQLARALKNWSDSRRGKRKGPRMGFPRYKSKRKTTPSVRFTTGTIRLEDDRRHVTLPVLGTIRAHESTRKLHRRIAAGTAVVKSATVRREAGRWFVSFTCEVERTDRTPSRADTVIGVDLGIKHLAVFSDGRPTAENPRHYDSARRKLGRLSRTVARRLGPDRRTGQQPSKRWQRADAARNRVHYRTANLRRDALHKLTTSLAREYGTIVVEDLNVSGMLRNRRLARVVADAGFGEIRRQLAYKTRWNGGTLEVADRWFPSSKTCSECQAVTPKLPLRIRMYACEHCGLVLDRDENAALNLAALVKRHVAGSGPETENGRGADRKTPSCGAGGIEASTPH

SEQ ID NO: 3698 - protein, 437 aa, unidentified
MIVTHAYRFALDPTPGQARALLRHAGAARVAFNWGITQVKANLGQREAERSYGIAEAGLTPSFGWSMYSLRKAWNAAKREVAPWWAECSKEAYATGLDQLARALKNWSDSRRGKRKGPRMGFPRYKSKRKTTPSVRFTTGTIRLEDDRRHVTLPVLGTIRAHESTRKLHRRIAAGTAVVKSATVRREAGRWFVSFTCEVERTDRTPSRADTVIGVDLGIKHLAVFSDGRPTAENPRHYDSARRKLGRLSRTVARRLGPDRRTGQQPSKRWQRADAARNRVHYRTANLRRDALHKLTTSLAREYGTIVVEDLNVSGMLRNRRLARVVADAGFGEIRRQLAYKTRWNGGTLEVADRWFPSSKTCSECQAVTPKLPLRIRMYACEHCGLVLDRDENAALNLAALVKRHVAGSGPETENGRGADRKTPSCGAGGIEASTPH

SEQ ID NO: 3699 - protein, 437 aa, unidentified
MIVTHAYRFALDPTPGQARALLRHAGAARVAFNWGITQVKANLGQREAERSYGIAEAGLTPSFGWSMYSLRKAWNAAKREAAPWWAECSKEAYATGLDQLARALKNWSDSRRGKRKGPRMGFPRYKSKRKTTPSVRFTTGTIRLEDDRRHVTLPVLGTIRTHESTRKLHRRIAAGTAVVKSATARREAGRWFVSFTCDVERTDRTPSRADTVIGVDLGIKHLAVFSDGRPTAENPRHYDTARRKLGRLSRTVARRLGPDRRTGQQPSKRWQRADAARNRVHYRTANLRRDALHKLTTSLAREYGTIVVEDLNVSGMLRNRRLARVVADAGFGEIRRQLAYKTRWNGGTLEVADRWFPSSKTCSGCRAVTPKLPLRIRRYVCEHCGLVLDRDENAALNLAALVKRHVAGSGPETENGRGADRKTPTCGAGGIEASTPH

SEQ ID NO: 3700 - protein, 437 aa, unidentified
MIVTHAYRFALDPTPGQARALLRHAGAARVAFNWGITQVKANLGQREAERSYGIAEAGLTPSFGWSMYSLRRAWNAAKREVAPWWAECSKEAYATGLDQLARALKNWSDSRRGKRKGPRMGFPRYKSKRKTTPSVRFTTGTIRLEDDRRHVTLPVLGTIRAHESTRKLHRRIAAGTAVVKSATVRREAGRWFVSFTCEVERADRTPSRADTVVGVDLGIKHLAVFSDGRPTAENPRHYDSARRKLGRLSRTVARRLGPDRRTGQQPSKRWQRADAARNRVHYRTANLRRDALHKLTTSLAREYGTIVVEDLNVSGMLRNRRLARVVADAGFGEIRRQLAYKTRWNGGTLEVADRWFPSSKTCSGCRAVTPKLPLRIRRYVCEHCGLVLDRDENAALNLAALVKRHVAGSGPETENGRGADRKTPSCGAGGSEASTPH

SEQ ID NO: 3701 - protein, 437 aa, unidentified
MIVTHAYRFALDPTPGQARALLRHAGAARVAFNWGITQVKANLGQREAERSYGIAEAGLTPSFGWSMYSLRRAWNAAKREVAPWWAECSKEAYATGLDQLARALKNWSDSRRGKRKGPRMGFPRYKSKRKTTPSVRFTTGTIRLEDDRRHVTLPVLGTIRAHESTRKLHRRIAAGTAVVKSATVRREAGRWFVSFSCEVERTDRTPSRADTVIGVDLGIKHLAVFSDGRPTAESPRHYDTARRKLGRLSRTAARRLGPDRRTGQQPSKRWQRADAARNRMHYRTANLRRDALHKLTTSLAREYGTIVVEDLNVSGMLRNRRLARVVADAGFGEIRRQLAYKTRWNGGTLEVADRWFPSSKTCSGCQAVTPKLPLRIRMYVCGHCGLVLDRDENAALNLAALVKRHVAGSGPETENGRGADRKTPSCGAGGIEASTPH

SEQ ID NO: 3702 - protein, 437 aa, unidentified
MIVTHAYRFALDPTPGQARALLRHAGAARVAFNWGITQVKANLGQREAERSYGIAEAGLTPSFGWSMYSMRKAWNAAKREVAPWWAECSKEAYATGLDQLARALKNWSDSRRGKRKGPRMGFPRYKSKRKTTPSVRFTTGTIRLEDDRRHVTLPVLGTIRAHESTRKLHRRIAAGTAVVKSATVRREAGRWFVSFTCEVERTDRTPSRADTVVGVDLGIKHLAVFSDGRPTAENPRHYDSARRKLGRLSRTAARRLGPDRRTGQQPSKRWQRADAARNRVHYRTANLRRDALHKLTTSLAREYGTIVVEDLNVSGMLRNRRLARVVADAGFGEIRRQLAYKTRWNGGTLEVADRWFPSSKTCSGCRAVTPKLPLRIRMYVCGHCGLVLDRDENAALNLAALVKRHVAGSGPETENGRGADRKTPSCGAGGSEASTPH

SEQ ID NO: 3703 - protein, 437 aa, unidentified
MIVTHAYRFALDPTPGQARALLRHAGAARVAFNWGITQVKANLGQREAERSYGIAEAGLTPSFGWSMYSLRRAWNAAKREVAPWWAECSKEAYATGLDQLARAMKNWSDSRRGKRKGPRMGFPRYKSKRKTTPSVRFTTGTIRLEDDRRHVTLPVLGTIRAHESTRKLHRRIAAGTAVVKSATVRREAGRWFVSFSCEVERADRTPSRADTVIGVDLGIKHLAVFSDGRPTAENPRHYDSARRKLGRLSRTAARRLGPDRRTGQQPSKRWQRADAARNRVHYRTANLRRDALHKLTTSLAREYGTIVVEDLNVSGMLRNRRLARVVADAGFGEIRRQLAYKTRWNGGTLEVADRWFPSSKTCSGCQAVTPKLPLRIRMYVCEHCGLVLDRDENAALNLAALVKRHVAGSGPETENGRGADRKTPSCGAGGIEASTPH

SEQ ID NO: 3704 - protein, 437 aa, unidentified
MIVTHAYRFALDPTPGQARALLRHAGAARVAFNWGITQVKANLGQREAERSYGIAEAGLTPSFGWSMYSMRKAWNAAKREVAPWWAECSKEAYATGLDQLARALKNWSDSRRGKRKGPRMGFPRYKSKRKTTPSVRFTTGTIRLEDDRRHVTLPVLGTIRAHESTRKLHRRIAAGTAVVKSATVRREAGRWFVSFTCEVERADRTPSRADTVVGVDLGIKHLAVFSDGRPTAENPRHYDSARRKLGRLSRTAARRLGPDRRTGQQPSKRWQRADAARNRVHYRTANLRRDALHKLTTSLAREYGTIVVEDLNVSGMLRNRRLARVVADAGFGEIRRQLAYKTRWNGGTLEVADRWFPSSKTCSGCQAVTPKLPLRIRMYVCEHCGLVLDRDENAALNLAALVKRHVAGSGPETENGRGADRKTPSCGAGGIEASTPH

SEQ ID NO: 3705 - protein, 437 aa, unidentified
MIVTHAYRFALDPTPGQARALLRHAGAARVAFNWGITQVKANLGQREAERSYGIAEAGLTPSFGWSMYSLRKAWNAAKREVAPWWAECSKEAYATGLDQLARALKNWSDSKRGKRKGPRMGFPRYKSKRKTTPSVRFTTGTIRLEDDRRHVTLPVLGTIRAHESTRKLHRRIAAGTAVVKSATVRREAGRWFVSFTCEVERTDRTPSRADTVIGVDLGIKHLAVFSDGRPTAENPRHYDTARRKLGRLSRTAARRLGPDRRTGQQPSKRWQRADAARNRVHYRTANLRRDALHKLTTSLAREYGTIVVEDLNVSGMLKNRRLARVVADAGFGEIRRQLAYKTRWNGGTLEVADRWFPSSKTCSGCQAVTPKLPLRIRMYVCEHCGLVLDRDENAALNLAALVKRHVAGSGPETENGRGADRKTPSCGAGGIEASTPH

SEQ ID NO: 3706 - protein, 437 aa, unidentified
MIVTHAYRFALDPTPGQARALLRHAGAARVAFNWGITQVKANLGQREAERSYGIAEAGLTPSFGWSMYSMRKAWNAAKREVAPWWAECSKEAYATGLDQLARALKNWSDSRRGKRKGPRMGFPRYKSKRKTTPSVRFTTGTIRLEDDRRHVTLPVLGTIRAHESTRKLHRRIAAGTAVVKSATVRREAGRWFVSFTCEVERADRTPSRADTVVGVDLGIKHLAVFSDGRPTAENPRHYDSARRKLGRLSRTAARRLGPDRRTGQQPSKRWQRADAARNRVHYRTANLRRDALHKLTTSLAREYGTIVVEDLNVSGMLRNRRLARVVADAGFGEIRRQLAYKTRWNGGTLEVADRWFPSSKTCSGCRAVTPKLPLRIRMYVCGHCGLVLDRDENAALNLAALVKRHVAGSGPETENGRGADRKTPSCGAGGSEASTPH

SEQ ID NO: 3707 - protein, 437 aa, unidentified
MIVTHAYRFALDPTPGQARALLRHAGAARVAFNWGITQVKANLGQREAERSYGIAEAGLTPSFGWSMYSLRRAWNAAKREVAPWWAECSKEAYATGLDQLARAMKNWSDSRRGKRKGPRMGFPRYKSKRKTTPSVRFTTGTIRLEDDRRHVTLPVLGTIRAHESTRKLHRRIAAGTAVVKSATVRREAGRWFVSFSCEVERTDRTPSRADTVIGVDLGIKHLAVFSDGRPTAENPRHYDSARRKLGRLSRTAARRLGPDRRTGQQPSKRWQRADAARNRVHYRTANLRRDALHKLTTSLAREYGTIVVEDLNVSGMLRNRRLARVVADAGFGEIRRQLAYKTRWNGGTLEVADRWFPSSKTCSGCQAVTPKLPLRIRMYVCEHCGLVLDRDENAALNLAALVKRHVAGSGPETENGRGADRKTPSCGAGGIEASTPH

SEQ ID NO: 3708 - protein, 372 aa, unidentified
MIAVKKAYKFRLYPNKKQQELINKTFGCCRFVYNKYLAKRIEVYKNDKETFTYKQCSSDLTNLKKELKWLKEPDKFSLQNALKDLDNAYKKFFKEKAGFPKFKSKKINRFSYKTNFTNGNIMYCGQHIKLPKLGMVKIRDKQVPQGRILNATISKEPSGRYYVSLCCTDVDIEAFENTNNHIGLDLGIKEFCISSCGEFIENPKYLKKSLNKLAKLQRELSRKTIGSLNRNKARLKVARLQEHIANQRNDFLQKLSTKLIKENDIICIEDLQVKNMIRNRKLSRLISDVSWSEFIRQLEYKANWYGRQIVKVGKFFASSQICNKCGYKNEEVKDLNIREWICPSCNETHDRDINASINILKEGLRLITIQNK

SEQ ID NO: 3709 - protein, 372 aa, unidentified
MIAVKKAYKFRMYPNKKQQELINKTFGCCRFVYNKYLAKRIDVYKSDKETFTYKQCSSDLTNLKKELKWLKEPDKFSLQNALKDLDNAYKKFFKEKAGFPKFKSKKINRFSYKTNFTNGNIMYCGQYIKLPKLGMVKIRDKQVPQGRILNATISKEPSGRYYVSLCCTDVDIEVFENTNNHIGLDLGIKEFCISSCGEFIENPKYLKKSLNKLAKLQRELSRKTIGSLNRNKARLKVAGLQEHIANQRNDFLQKLSTKLIKENDIICIEDLQVKNMIRNRKLSRLISDVSWSEFIRQLEYKANWYGRKIVKVGKFFASSQICNKCGYKNEEVKDLNIREWICPSCNETHDRDINASINILKEGLRLITIQNK

SEQ ID NO: 3710 - protein, 459 aa, unidentified
MRTIQAYRFALDLTSGQERNVLAHAGAARVAHNWALAKVKAVMDQRAAERSYGVQDDLLTPSLSWSLAGLRKAWNHAKGDVAPWWGEVSKEAFNTGLDALARGLKNWADSRNGKRAGKPVGFPRFKSRRRATPSVRFTTGAIRVEPDRKHVVLPRLGRLKLHESARKLARRLDNGTARIMSATVRRDGGRWHVSFTVEVERTERQPAHPSSVVGVDVGIKHLAVLSTGEMVDNPRHLLAAQQRMRVLGRALSRKTGPDRRTGRRASKRWEQAATRLGRAHARVANLRRDGLHKLTTRLAREHGTVVVEDLNVTGMLANRRLARHIADAGFAEIRRQLTYKTEWNGGRLLLADRWYPSSKTCSGCGAVKTKLALHEREYECEACGLVIDRDRNAARNLAALAAEFDTAGSGPVAGRGDDRKTRIRGQVSVKRQPGTASAGQTGTVLPQGRTTIRAFARAH

SEQ ID NO: 3711 - protein, 458 aa, unidentified
MKTIQSYRFALDLSPGQERAVLAHAGAARVAHNWALARVKAVLDQRAAERTYGVPDEQLTPSVSWSLPALRRAWNAAKAEVAPWWAECSKEAFNTGLDALARALKNWSDSRTGKRAGRPVGFPRFKSRRRTTPSVRFTTGTIRVAPDRMHVVLPRLGRLKLHESARKLARRLEAGTARIMSATVRRDGERWHVCFTVDVERADRVPAEPMSVVGVDVGIAHLAVLSTGELVPNPGHLAAAQRRLRALGRVLSRRTGPDRRTGLRPSNRWQRAVARLGRAHARVANLRRDGLHKLTTRLAAEYGTVVVEDLNVSGMLRNRRLARHIADAGFAELRRQLAYKTGWNGGRLIVADRWYPSSKTCSGCGTVKTKLALSERTYTCTTCGLSLDRDLNAAHNLAAFATETTAGSGPVAGRGADRKTRSGRQVATKRQPGTASAGQTGTVPPQGRTTDHVFTRAH

SEQ ID NO: 3712 - protein, 378 aa, unidentified
MLMIRGYKTELDLNNAQRTLCLKHAGAARYSYNWGLKRYQEEYQAGRKAPSAISLHKELNVLKQTELPWMYQVSKCAPQEALRNLEKAFKNFFGKAKLKTQGKYRGKLGYPRFKSKKKGIGSFRLTGAIHVFEDQIQLPRLGTVRLSEHGYIPMTAKVLAATVSEQAGRWFVSVQVEETAPDPINATGPVIGIDLGIKTLATASNGTVIANPKALRSNLKKLRRASRQHSRKQKGSKNRAKATRKLARLHVHIANIRKDALHKATSQLVMKTKSPDVRPAVIVLEDLNVSGMLKNGRLSRAIADVGFAEFRRQVEYKAQQVGIMVKCVSRWEPSSKTCSSCKVVREKLDLSERTFVCHACGLVIDRDLNASYNLADLA

SEQ ID NO: 3713 - protein, 458 aa, unidentified
MKALQAYRFALDLTPLQERAVLAHAGAARVAYNWGLARVKAVMDQRAAERSYGTPEELLTAAVGWNLAALRKAWNQAKADVAPWWAECSKEAFNTGLDNLARGLKNWSDSRAGKRAGPRVGFPRFKSRRRSTPSVRFTTGAIRVEPDRRHVVLPRLGRLKLHESARKLARRLEAGTARILSATVRRDGGRWHVAFCVEVERAERTPTRPRAVVGVDVGITHLAVLSTGEMVPNPRHLDEAAQRMRRLARQMSRRVGPDRRTGQQPSRRWERARRQVARAHARVANLRRDGLHKLTTRLAREYGTIVVEDLNVAGMLRNRRLARQVADAGFGEIRRQVAYKAEWNGGRRIVANRWYPSSKTCSDCGAVKAKLPLRVRTYICDSCGLTLDRDVNAARNLAALAREATTAGSGPVAGRGADHKTRPGGPVAVKRQPGTAQADKTGTVPPQGGTCRSVARAH

SEQ ID NO: 3714 - protein, 460 aa, unidentified
MQAVHAYRYALDPTPRQERLLRSHCGAARLAFNWGLARVKANLAQREAERSYGIPDAQLTPSLSWSMFSLRKAWNGAKQQVAPWWAENSKEAYACGLDRLATALTNWNESRKGTRKGPKVGFPRFRSKRGKAMSVRFTTGAVRLHGRTHVMLPVLGRIKTHESTRKLARRIEAGTARIRSATVRLEAGRWLVSFSVQVERATTTPSRPEAVVGVDLGVKTLAVYSDGRPPVDNPRHLAAASRKLRRLSRAVSRKQGPDRRSGQQPSGRWRKANASRNRVHYRVAALRRDAIHKLTTTLAGEYGTVVVEDLNIAGMVRNRRLARAISDAGFGEIRRQLAYKTEWGGGRLVVAGRWFASSKTCSGCGAVKAKLALSERTYTCTCCGLVLDRDVNAALNLASLVKHTVAGSGPETTNGRGADHKTPPAGAGGCETSTPHRAPPRSDGDLRPVMDGSLRNTETQ

SEQ ID NO: 3715 - protein, 460 aa, unidentified
MRVVHAYRYALDPTPRQERLLRSHCGAARLAFNWGLARVKANLAQREAERSYGIPDAQLTPPLSWSMYSLRKSWNGAKQEVAPWWAENSKESYACGLDRLAAALTNWSESRKGTRKGPKVGFPRFRSKRKKAMSVRFTTGAIRLDGRTHVVLPVLGRIKTHESTRKLARRIEAGTAQIRSATVRLEAGRWIVSFSVQVERATTTPSRPEAVVGVDLGVKTLAVYSDGRPPVDNPRHLAAASRKLRRLSRAVSRKQGPDRRSGQQPSGRWRQANASRNRVHYRVAALRRDAIHKLTTTLAGEYGTLVVEDLHIAGMVKNRRLARAISDAGFGEIRRQLAYKTEWGGGRLVVAGRWFASSKTCSGCGAVKAKLALSERTYTCAACGLVLDRDVNAALNLASLVKHTVAGSGPETSNGRGVDRKTPPAGAGGCEASTPHRALPGSDGDFRPVMDGSLRNTETQ

SEQ ID NO: 3716 - protein, 460 aa, unidentified
MQVVHAYRYALDPTPCQERMLRSHCGAARLAFNWGLARIKANLAQREAERSYGIPDAQLTPSLSWSMYSLRKAWNGTKQQVAPWWAENSKESYACGIDRLATALTNWNESRKGIRKGPKVGFPRFRSKRKKAISVRFTTGAIRLHGRTHVVLPVLGRIKTHESTRKLARRIEAGTAQIRSATVGLEAGRWLVSFSVQIERAEATPTRPEAVVGVDLGIRTLAVYSDGRPPTANPRHLAAASRKLRRLSRAVSRKQGPDRRSGQQSSGRWRRANAARNRVHHRVAALRRDAIHKLTTGLAAEYGTLVVEDLNIAGMVRNRRLARAIYDAGFGEIRRQLAYKTEWGSGRLVVAGRWFASSKTCSGCGAVKAKLALSERTFACADCGSVLDRDVNAALNLASLVKQTVAGSGPETLNGRGADRKTPPAGAGGCETSTPRRAPPGSDGDLRPVMDGSLRNTETQ

SEQ ID NO: 3717 - protein, 460 aa, unidentified
MQVVQAYRYALDPTPRQERLLRSHCGAARLAFNWGLARVKANLAQREAERSYGIPDAQLTPPLSWSMYSLRKAWNGAKQEVAPWWAENSKESYACGLDRLATALTNWSESRKGTRKGPKMGFPRFRSKRNQAMSVRFTTGAIRLDGRTHVLLPVLGRIKTHESTRKLARRIEAGTAQIRSATVRLEAGRWLVSFSVQIERAAATPSRPEAVVGVDLGVKTLAVYSDGRPPTANPRHLAAASRKLRRLSRAVSRKQGPDRRSGQKPSGRWRKADAARNRIHHRVAALRRDAIHKLTTTLAGEYGTLVVEDLHVAGMVKNRRLARAISDAGFAEIRRQLAYKTAWGGGRLVVAGRWFASSKTCSGCGAVKAKLALSERTYTCTACDLVLDRDVNAALNLASLVKHTVAGSGPETLNGRGADHKTPPAGAGGCETSTPHRAPPRPDGDLRPAMDGSLRNTETQ

SEQ ID NO: 3718 - protein, 459 aa, unidentified
MQVVHAYRYALDPTPRQERMLRSHCGAARLAFNWGLARVKANLGQREAERSYGIPDAQLTPSLSWSMYSLRKAWNGAKQEVAPWWAENSKEAYACGLERLATALTNWSESRKGTRKGPKVGFPRFRTKRKKAMSVRFTTGTIRLDGRTHVVLPVLGRMKTHESTRKLARRIEAGTARIRSATVRLEAGRWLVSFSVQIERAARAPSRPETVVGVDLGVKTLAVYSDGRPAAANPRHLAAAARKLRRLSRAVSRKQGPDRRSGQQPSGRWRQADAARNRVHYRVAALRRDAIHKLTTTLAGEYGTLVVEDLHIAGMVKNRRLARAISDSGFAEIRRQLAYKTEWGGGRLMVAGRWFASSKTCSGCGAVKVKLALSERTFTCADCGLVLDRDVNAALNLASLVKQTVAGSGPETINGCGADHKTPPAGAGGCETSTPHRAPSGSDGDLRPVMDGSLGNATQ

SEQ ID NO: 3719 - protein, 379 aa, unidentified
MANKAIKYRVYPTAEQGTMFSKTFGCCRKVYNLMLSDKIEGYKATGKFPAVTPARYKDEYPYLREVDSLALANVQLNLQAAFRNAFSKSRKKKNGFPKFKSAKHSRRSYTTNNQKGTVAITDSKYIRLPKIGKVKAVIHRIPDSSWIIKSATVSQESDGKYYVSVLFEFDKAGNTYIADKANAIGLDYASDGLYVDSNGNVGTNHKYYRESYDKLAKAQRRLSRMQGSKKHEDKSNNYIKQLRKVNKIHRHIANQRLDNLHKISAEIANRYDVVCVESLDMKSMANRGFGNGKATLDNGYGMFLDMLEYKLSDRNKYLVKVDKWYPSSQICHCCGALHPEMKDLSIRKMTCDCGLTISRDQNAAINILNEGLRLLAGAA

SEQ ID NO: 3720 - protein, 380 aa, unidentified
MERLKAYKFRIYPMTTQEVFFAKSFGCVRKVYNLMLDERIKAYQQYKSDTSKQTKLPTPAKYKKDYPFLKEIDSLALANAQQHLDKAYQNFFRDKSVGFPKFKSKKYPIQSYTTNNQKGTISLISNQYIKLPKLKSVVKIKLHRKIKGDIRSATISKHASGKYYVALLCKEDIQPMSKTNQSIGIDLGISDFAICSDGQKIDNHQFTRKMAKKLAREQRKLSRRLLLAKQRKVDVSEAKNYQKQKQKVARLHEKVKNQRNDFLNKLSTNIIKNHDVICIEDLNTKGMMRNRKLAKSISDVSWSLFVRQLEYKAEWYGRTVIKIDRWFPSSQICSECGYHDGKKPLNIREWTCSNCHAHHDRDINASQNILTEGLKLQKQA

SEQ ID NO: 3721 - protein, 459 aa, unidentified
MKKIQAYRFALDLTPAQERDVLAHAGAARLAHNWALARVKAVMDQRAAERTYGVPHEQLTASVSWSLPALRKAWNAAKPDVAPWWNECSKEAFNTGLDALARALKNWSDSRTGKRAGHPVGFPRFKSRRRSTPSVRFTTGTIRVEPDRKHVVLPRLGRLKLHESARKLARRLEAGTARIMSATVRRDGGRWHVAFTVEIERTVRTPARPDSIIGVDVGITHLAVLSTGKFVPNPRHLNQAQHRLRALGRALSRKSGPDRRTGAHPSNRWQRARVRIARAHARVANLRRDGLHKLTTRLAREHGTLVVEDLNVSGMLRNRKLARHIADAGFGELRRELTYKTTWNGGRLHVADRWYPSSKTCSGCGAVKTKLALSKRVYDCKACGLVIDRDLNAARNLAALVAEIDPAGSSPVAGRGAIQKTRTSGQEAVKRQPGTASAGNTGTVPPQGGTANSALTRAH

SEQ ID NO: 3722 - protein, 367 aa, unidentified
MVEINKAYKFRIYPNEKQIEIIEKTFGCSRFVYNHFLNQRNEVYSNEKRCMRYTEQQNQLPSMKKEFVWLKEIDSTSLQMALRNLDTAFKNFFQGRVDKPKFKSKRDNYKSYTSNFVNSNIEVKKNKIKLPKLNWVKAKVHRYVEGRIINATVSITPSGKYFVSICVETEVNPLEKVDSIIGLDLGLTHFAIFSTGKKVDNPKYLKKSLERLAKEQKKLSRKQYDSNNYHKQRIKIAKLHEYITNQRNNFIHQLSKRIINENQVIILEDLSVKDMLKDKDLARSISDVSWSKFITMLEYKSKWYDRVLHKIDRYFPSSKICNNCGYVIEELPLYIRKWDCPSCNTVGIDRDINSAKNILQQGLLKLA

SEQ ID NO: 3723 - protein, 252 aa, unidentified
MIVVEKAYKFRMYPNKKQQELINKTFGCCRFVYNKYLAKRIDVYKNDKETFTYKQCSSDLTNLKKELKWLKEPDKFSLQNALKDLDNAYEKFFKEKAGFPKFKSKKINRFSYKTNFTNGNIMYCGQHIKLPKLGMVKIRDKQVPQGRILNATISKEPSGRYYVSLCCTDVDIEAFENTNNHIGLDLGIKEFCISSCGDFIENPKYLKKSLSKLAKLQRELSRKTIGSLNRNKARLKVARLQEHIANQRNDFL

SEQ ID NO: 3724 - protein, 368 aa, unidentified
MNIAYHFRIYPNREQEVLLAKTFGCCRFLYNQMLNDKIREYEATKKMLRNTPAMYKKAYPFLKEVDSLALANVQMHLEKAYKNFFRDPKIGFPKFKSKHRSRKSYTTNVVNGNIQVEDHQIKLPKLKWIRMKKHRDIPEKYCLKSVTISMEPSGKYYASLLYEKNDCENQAEELDYEDAKILGIDYAMHGMAVFSEDIQKENEGYFRKSEERLAREQRKLFHCVKGSNNYYRQKKRVALCHEKIRNQRKDFLHKLSHEMAETYDVVAVEDIDMKAMSQCMHFGKSVMDNGYGKFRELLEYKLTWRGKKLVRVDRFFPSSKKCCKCGSVKKELKLSDRVYFCTCGNRIDRDLNAAINIREEARRMLLAG

SEQ ID NO: 3725 - protein, 367 aa, unidentified
MLKAYKYRIYPNNEQKIQIAKTFGCCRFVYNQTLAYRKEVYEKEKKSVSKTDCNNYCNRQLKKEYEWLKEVDKFALTNAIYNMDAAYQKFFKEHAGYPKFKSKHDNHKSYTTNFTNGNIAVDFEENRVKLPKLKNVKAKLHRNFSGQIKSATISQIPSGKYYVSILVETEHVELPHVNQNTGIDLGIKELCITLSGKKYENPKIIRKYEKKLIKLQRQLAHKVKRSQNYYKTKKKIALCHEKITNTRKDYLHKMSLEIISENQVIVSEDLQIKNMVKNHHLAKSISDVSWYELTRQLEYKAKWNGRKYIKINTFYASSQLCSACGYQNTETKNLSVREWICPVCGTNHDRDINAAKNILEEGLRQIA

SEQ ID NO: 3726 - protein, 369 aa, unidentified
MQNRAIKYRIYPSAEQKILFAKTFGCCRKIWNLMLADKITYYQQTKKMLQTTPAQYKKAYPYLKEVDSLALANVQLHLQTAYKNFFRDKKTGFPKFKSAKHCRKSYTTNCQNGSIRIENDRIRIPKAGSVKAVLHRLPEKDWKIKSATISQYGDGTYYISVLFEYEETPVSPVPVTEEQVIGLDYKSAGLYMNSNGKCQNMPGYFRMAQKELAKRQRKLRHKVPGSKNYRKQQKRIARVYRHISNQRKDYLHKLSTATAKQYAYVCVEDLNMRSMSNKGFGNGKSTLDNGYGMFLSMLDYKLAERGGKLVKVDKFFPSSQICHCCGCRNPEVRDLRIREWICPDCGAVHDRDTNAAINIKTEGMRLLAA

SEQ ID NO: 3727 - protein, 367 aa, unidentified
MLKAYKYRIYPNNEQKIQIAKTFGCCRFVYNQTLAYRKEVYEKEKKSVSKTDCNNYCNRQLKKEYEWLKEVDKFALTNAIYNMDAAYQKYFKEHAGYPKFKSKHDNHKSYTTNFTNGNIAVDFEENRVKLPKLKNVKAKLHRNFSGQIKSATISQIPSGKYYVSILVETEHVELPHVNQNTGIDLGIKELCITSSGKKYENPKIIRKYEKKLIKLQRQLAHKVKRSQNYYKTKKKIALCHEKITNTRKDYLHKMSLEIISENQVIVSEDLQIKNMVKNHHLAKSISDVSWYELTRQLEYKAKWNGRKYIKINTFYASSQLCSACGYQNTETKNLSVREWICPVCGTNHDRDINAAKNILEEGLRQIA

SEQ ID NO: 3728 - protein, 364 aa, unidentified
MNKAIKFRIYPNKEQGEQFARTFGCCRFLYNVMLEDKMKEYQKSKKRLKNTPAFYKKQYPWLKEVDSLALANVQLHLERAYQNFFRNPQSGFPKFKSKHRSRASYTTNVVNGNIKLEEGKLKLPKMSHVKLVQHRQIPKEYQLKSVTVTQEPSGKYYASLLYTYESQISEEKEAVEKMLGMDFAMSGMAVFSDGSRAEYPMYYRKSEKKLCKEQRKLSHCVKGSRNHEKQRRKVAVCHEKVKNQRKDFQHKLSRKLADSYDAVCVEDLNMKTMSRSLHFGKSVMDNGYGMFLGMLEYKLMDQGKRLVRIDRFYPSSKTCCKCGAVKKELKLSERIYECRCGNRMDRDVNAAINIREEGRKILCA

SEQ ID NO: 3729 - protein, 368 aa, unidentified
MNIAYRFRIYPNREQEVLLAKTFGCCRFLYNQMLNDKIREYEATKKMLRNTPAMYKKAYPFLKEVDSLALANEQMHLEKAYKNFFRDPKIGFPKFKSKHRSRKSYTTNVVNGNIQVEDHRIKLPKLKWIRMKKHRDIPEKYFLKSVTISMEPSGKYYASLLYEKSDCENQAEEFDYEDAKILGIDYAMHGMAVFSEDIQKENEGYFRKSEERLAREQRKLSHCVKGSNNYYRQKKRVALCHEKIRNQRKDFLHKLSHEMAEAYDVVAVEDIDMKAMSQCMHFGKSVMDNGYGKFRELLEYKLTWRGKKLVRVDRFFPSSKKCCKCGSVKKELKLSDRVYLCTCGNRIDRDLNAAINIREEARRMLLAG

SEQ ID NO: 3730 - protein, 365 aa, unidentified
MQKAYRFRLYPNQKQQTLVHKTFGCCRYVFNHFLAKRKEVYEAERKTLGYNACSSMLTQLKKELEWLKEPDATALQTELRHLDDAFKKFFLKKHGFPRFKSRKNPVQSYTSKNNNGSITIQGNRIRLPKLGWVKFAKSREVEGRILSATIRKNPSGKYFVSVLVETEIQPLPACDSKVGLDLGVKDFATLSTGEIIPNPKYLKKYEAKLIRWQRKLSRRKKGGSNWHKARLKVARLHEKVVNCRKDFLHKLSTRLIRENQVICLEDLSVQNMQKNHRLAKSIADVSWSTFRSMLEYKAKWYGRSIVLVDKTFPSSQLCSSCGYRNRDVKNLGLREWTCPTCGTHHDRDLNAAKNILKEGLRLLVS

SEQ ID NO: 3731 - protein, 534 aa, unidentified
MKTVQAYRFALDLTAGQERDVLAHAGAARVAHNWALAKVKAVMDQRTAERSYGVPDERLTPSLSWSLAGLRKAWNAAKPDVAPWWAEVSKEAFNTGLDALARGLKNWADSRTGKRAGRPVGFPRFKSRRRTTASVRFTTGAIRVEPDRMHVVLPRLGRLKLHESARKLGRRLEAGAARIMSATVRRDGGRWHVSFTVEVERAERGPARPGAVVGVDVGIKHLAVLSTGEMVGNPRHLVAGQRRMRALGRALSRKAGPDRSTGQRASKRWERAAARLGRAHARVANLRRDGLHKLTTRLATTYGTIVVEDLNVTGMLANRKLARHIADAGFAEIRRQLAYKATWNGAGLLVADRWYPSSKTCSGCGAVKTKLALHEREFACEVCGLVIDRDRNAALNLAALAAQFDTAGSGPVAARGADQKTRVRGQVAAKREPGTASAGQTGTVPPQGRTIDRVLTKAHWKVTVCQACGSVASGVAAADGSVVRPAPREDVPGGCPAGVDVRPADDRCACLGCGTGADAAGRASGRWSCRARTA

SEQ ID NO: 3732 - protein, 457 aa, unidentified
MRTVQAYRFALDLTPVQERAVLAHAGAARVAYNWALARVKAVMDQRAAERTYGIPDELLTPSLFWSLPALRRAWNQAKAEVAPWWGEVSKEAFNTGLDALARGLRNWADSRTGRRAGRSVGFPRFKSRRRSVPSVRFTTGTVCVEADRMHVVLPRLGRLKLHESARKLARRLEAGTARILSATVRRDGGWWHVSFTVEVERTERAPAQPGSVVGVDVGIRHLAVLSTGELVENPRHLTCAQQRLRRLGRALSRKTGPDRRTGQRASNRWQRAAARLGRAHARVANLRRDGLHRLTTRLAATYGTVVVEDLNVAGMLRNRRLARHIADAGFAEIRRQLAYKTSWNGGRLVVADRWYPSSKTCSGCGAVKTKLALSEREYECQACGLVIDRDRNASLNLAALAAATAGSGPAAGRGANQKTRPRGQMAVKRQPGTASATQTGTVPPQGGTADRVLTKAH

SEQ ID NO: 3733 - protein, 459 aa, unidentified
MKAIQAYRYALDLTPAQERAVLAHAGAARVAHNWALARVVAVMNQRAAERTYGVAEADLTPAIGWSLPALRKAWNAHKEQVAPWWRECSKEAFNTGLDALARALKNWSDSRTGKRAGRPVGFPRFKSRRRSVPSVRFTTGTIRVEPDRKHVVLPRLGRLKLHESARKLARRLDNGTARIMSATVRRDGGRWHVAFCVEVDRAERRPARPTSVVGVDVGITHLAVLSTGELVDNPRHLDAAKTRLRRLGRALSRKTGPDRRTRQRPSNRWRRASLRLTRAHARVSNLRRDGLHKLTTRLTREHATIVVEDLNVAGMLRNRRLARHITDASFGELRRQLAYKTQWNGGRLLIADRWYPSSKTCSGCGAVKTKLALSERTYTCTTCGMNLDRDINAARNLVALATEMDTAGSGPVTGRGADHKTRPGRQVATKRQPGTATADQTGTVPPQGRTTDHVLTGAY

SEQ ID NO: 3734 - protein, 459 aa, unidentified
MKAVQAYRFALDLTPGQERAVLAHAGAARVAHNWALARVKAVMDQRVAERSYGVADELLTPSVGWSLPALRKAWNAAKGEVAPWWRECSKEAFNTGLDALARGLKNWSDSRTGKREGRPVGFPRFKSRRRTIPSVRFTTGAIHVEPDRKHVVLPRLGRLKLHESARKLARRLDNGTARIMSATVRLDGGRWHVSFCVEVDRAQQRPARSGSVVGVDIGITHLAVLSTGELVDNPRHLGAAQTRLRRLGRAVSRKIGPDRRTGQRPSQRWVRASARLGRAHARVSNLRRDGLHKLTTRLAREHGTIVVEDLHVAGMLRNRRLARHIADAGFAEVRRQLAYKTEWNGGRLVTADRWFPSSKTCSGCGAVKAKLALSERTYTCTTCGLILDRDLNAARNLAALAAQVDSAGSGPVAGRGADRKTRPGGLVAEKRQPGTAPADQTGTVPPQGRTTNHALVRAH

SEQ ID NO: 3735 - protein, 486 aa, unidentified
MKTIQAYRFALDLNPGQERGVLAHAGAARVAHNWALARVKAVMDQRTAERSYGVPDELLTPSLSWSLAGLRQAWNQAKPEVAPWWSEVSKEAFNTGLDALARALKNWAGSRKGTRAGRPVGFPRFKSRRRSTPSVRFTTGAIRVEPDRMHVVLPRLGRLKLHESARKLARRLDTGTARIMSATVRRDGGRWQVSFTVEVERAERAPARPRSVVGVDVGIKHLAVLSTGELVDNPRHLVAAQQRMRSLDRALSRKTGPDRRSGRRPSKRWERAAARLGRAHTRVTNLRRDGLHKLTNRLATTHGTVVVEDLNVTGMLRNRRLARHIADAGFAEIRRQLAYKTGCNGGRLLVAGRWYPSSKTCSGCGTVKTKLALHEREYQCEACGLVIDRDRNAALNLAALAAESDTAGSGPVAAREADQKTRVRGQVATKREPGTASAGQTGTVLPQGRTTDRVLAKAHREVTGRERSTHSPLPARRGPCDVLLAR

SEQ ID NO: 3736 - protein, 263 aa, unidentified
MSMKSIRTKLKLNNKQKTLMAQHAGYSRWVYNWGLSLWNAAYRDGYQPNARKLREVFTNHTKPLYPWMKSLSSKVYQYALINLGEAFKRFFQGLGKYPRFKKKGKHDSFTIDNFGKPIELNGWSHKLPFIGMVKTYEPIEATTQKITISRQADDWYLSLAFEFTPTSTEKITDVVGVDLGVKTLATLSTGEVFNSVKPYRKAQNKLAKLQRQVSRKVKHSRNWYKAVIKLAKQHRRVANIRKDALHKLTTYLAKVRLVPVRSL

SEQ ID NO: 3737 - protein, 437 aa, unidentified
MIVTHAYRFALDPTPGQVGALLRHAGAARVAFNWGIAQVKANLGQREAERSYGIAEADLTTSFGWSMYSLRKAWNAAKREVAPWWAECSKEAYATGLDQLARALKNWSDSKRGKRKGPRMGFPRYKSKRKTTPSVRFTTGTIRLEDDRRHVTLPVLGTIRAHESTRKLHRRIAADTAVVKSATVRREAGRWFVSFTCEVERTDRTPSRADTVIGVDLGIKHLAVFSDGRPTAENPKHYDTARRKLGRLSRTVARHLGPDRRTGQQPSKRWQRADAARNRVHYRTANLRRDALHKLTTSLAREYGTIVVEDLNVSGMLKNRKLARVVADAGFGEIRRQLAYKTRWNGGTLEVADRWFPSSKTCSGCQAVTPKLPLRIRMYVCEHCGLVLDRDENAALNLAALVKRHVAGSGPETENGRGADRKTPSCGAGGIEASTPH

SEQ ID NO: 3738 - protein, 364 aa, unidentified
MNKAIKFRIYPNKEQGEQFARTFGCCRFLYNVMLEDKMKEYQKSKKRLKNTPAFYKKQYPWLKEVDSLALANVQLHLERAYQNFFRNPQSGFPKFKSKHRSRASYTTNVVNGNIKLEEGKLKLPKMSHVKLVQHRQIPKEYQLKSVTVTQEPSGKYYASLLYTYESQISEEKEAVEKMLGMDFAMSGMAVFSDGSRAEYPMYYRKSEKKLCKEQRKLSHCVKGSRNHEKQRRKVAVCHEKVKNQRKDFQHKLSRKLADSYDAVCVEDLNMKTMSRSLHFGKSVMDNGYGMFLGMLEYKLMDQGKRLVRIDRFCPSSKTCCKCGAVKKELKLSERIYECRCGNRMDRDVNAAINIREEGRKILCA

SEQ ID NO: 3739 - protein, 364 aa, unidentified
MNKAIKFRIYPNKEQGEQFARTFGCCRFLYNVMLEDKMKEYQKSKKRLKNTPAFYKKQYPWLKEVDSLALANVQLHLERAYQNFFRNPQSGFPKFKSKHRSRASYTTNVVNGNIKLEEGKLKLPKMSHVKLVQHRQIPKEYQLKSVTVTQEPSGKYYASLLYTYESQISEEKEAVEKMLGMDFAMSGMAVFSDGSRAEYPMYYRKSEKKLCKEQRKLSHCVKGSRNHEKQRRKVAVCHEKVKNQRKDFQHKLSRKLADSYDAVCVEDLNMKTMSRSLHFGKSVMDNGYGMFLGMLEYKLMDQGKRLVRIDRFYPSSKTCCKCGAVKKELKLSERIYECRCGNRMDRDVNAAINIREEGRKIVCA

SEQ ID NO: 3740 - protein, 364 aa, unidentified
MNKAIKFRIYPNKEQGEQFARTFGCCRFLYNVMLEDKMKEYQKSKKRLKNTPAFYKKQYPWLKEVDSLALANVQLHLERAYQNFFRNPQSGFPKFKSKHRSRASYTTNVVNGNIKLEEGKLKLPKMSHVKLVQHRQIPKEYQLKSVTVTQEPSGKYYASLLYTYESQISEEKEAVEKMLGMDFAMSGMAVFSDGSRAEYPMYYRKSEKKLCKEQRKLSHCVKGSRNHEKQRRKVAVCHEKVKNQRKDFQHKLSRKLADSYDAVCVEDLNMKTMSRSLHFGKSVMDNGYGMFLGMLEYKLTDQGKRLVRIDRFYPSSKTCCQCGAVKKELKLSERIYECRCGNRMDRDVNAAINIREEGRKILCA

SEQ ID NO: 3741 - protein, 378 aa, unidentified
MNKAIKYRVHPTTEQSVMFAKTFGCCRKVYNLMLSDKIDGYKATGKFPTVTPAKYKNDYPYLREVDSLALANKQMDLQEAFRNTFSKSRKKKNGFPKFKSAKHSRKSYTTNNQKGTVAIIDNKCIKLPKIGRVKAVIHRVPDDSWTIKSATVSQESDGKYYISVLFEFENIVNPYVADKNNAVGLDYASDGLYVDSNGNTGTNHKYYRESHNKLAKAQRKLSRMQGSKKHEVKSNNYIKQLRKVNKIHRHIANQRLDNLHKISTKIANSYDVVCVESLNMRSMANHGFGNGKATLDNGYGMFLSMLEYKLSDRNKYLIKVDKWFPSSQICHCCGKIHPEMKDLTIRTMKCDCGLTMNRDQNAAINILREGLRLLTKVA

SEQ ID NO: 3742 - protein, 367 aa, unidentified
MLKAYKYRIYPNNEQKIQIAKTFGCCRFVYNQTLVYRKEVYEKEKKSVSKTDCNNYCNRQLKKEYEWLKEVDKFALTNAIYNMDAAYQKYFKEHAGYPKFKSKHDNHKSYTTNFTNGNITVDFGCNRVKLPKLKGIKAKLHRNFSGQIKSATISQVPSGKYYVSILVETEHTELPHTNQNTGIDLGIKELCITSDGKKYENPKIIRKYEKKLVKLQRQLAHKEKRSQNYYKTKKKIALCHEKITNTRKDYLHKMSHEIISENQVIVSEDLQIKNMVKNHHLAKSISDVSWHELTRQLEYKAKWNGRKYVKTDTFYASSQLCSVCGYQNTETKNLSVREWICPVCGTNHDRDINAAKNILEEGLRQIA

SEQ ID NO: 3743 - protein, 367 aa, unidentified
MLKAYKYRIYPNNEQKIQIAKTFGCCRFVYNQTLAYRKEVYEKEKKSVSKTDCNNYCNRQLKKEYEWLKEVDKFALTNAIYNMDAAYQKFFKEHAGYPKFKGKHDNHKSYTTNFTNGNITVDFGCNRVKLPKLKGIKAKLHRNFSGQIKSATISQVPSGKYYVSILVETEHTELPHTNQNTGIDLGIKELCITSDGKKYENPKIIRKYEKKLVKLQRQLAHKEKRSQNYYKTKKKIALCHEKITNTRKDYLHKMSHEIISENQVIVSEDLQIKNMVKNHHLAKSISDVSWHELTRQLEYKAKWNGRKYVKIDTFYASSQLCSVCGYQNTETKNLSVREWICPVCGTNHDRDINAAKNILEEGLRQIA

SEQ ID NO: 3744 - protein, 369 aa, unidentified
MQNRAIKYRIYPSAEQKILFAKTFGCCRKIWNLMLADKITYYQQTKKMLQTTPAQYKKAYPYLKEVDSLALANVQLHLQTAYKNFFRDKKTGFPKFKSAKHCRKSYTTNCQNGSIRIENDRIRIPKAGSVKAVLHRLPEKDWKIKSATISQYGDGTYYISVLFEYEETPVSPVPVTEEQVIGLDYKSAGLYTDSNGKCQNMPGYFRMAQKELAKRQRKLRHKVPGSKNYRKQQKQIARVYRHISNQRKDYLHKLSTATAKQYAYVCVEDLNMRSMSNKGFGNGKSTLDNGYGMFLSMLDYKLAERGGKLVKVDKFFPSSQICHCCGCRNPEVRDLRIREWICPDCGAVHDRDTNAAINIKTEGMRLLAA

SEQ ID NO: 3745 - protein, 367 aa, unidentified
MLKAYKYRIYPNDEQKTQIAKTFGGCRFVYNQTLAYRKETYEQDKKSVSKTDCNNYCNRELKKTYEWLREVDKFALTNAIYNMDAAYQKFFKEHAGYPKFKSKHDRHKSYTTNFTNGNIAVDFESRKIKVPKLKTVKAKLHRKFCGQIKSATVSQVPSGKYYISILAETEHEELPHTKQKTGLDLGIKDLCITSSGKKYENPKTIKKYERKLAKLQRQLAHKEKGSSNYCKKKKQVALCHEKITNTRKDYLHKISHEIISENQVIVSENLQIKNMVKNHHLAKAINDVSWYELTRQLEYKAKWNGREYVKVDTFYASSQICSECKYQNTDAKDLSVREWECPVCGAKHDRDINAAKNILAEGLRKIA

SEQ ID NO: 3746 - protein, 372 aa, unidentified
MIAVEKAYKFRMYPNKKQQKLINKTFGCCRFVYNKYLAKRIDVYKNDKETFTYKQCSSDLTNLKKELKWLKEPDKFSLQNALKDLENAYEKFFKEKTGFPKFKSKKTNRFSYKTNFTNGNIMYCGQHIKLPKLGMVKIRDKQVPKGRILNATISKEPSGRYYVSLCCTDVDIEAFENANNQIGLDLGIKEFCISSCGEFIENPKYLKKSLSKLAKLQRELSRKTIGSLNRNKARLKVARLQEHIANQRNDFLQKLSTKLIKENDIICIEDLQVKNMIRNRKLSRLISDVSWSEFVRQLEYKANWHGRQIVKVGKFFASSQICNKCGYKNEEVKDLNIRDWICPSCNETHDRDINASINILKEGLRLITIQNK

SEQ ID NO: 3747 - protein, 378 aa, unidentified
MKVIRGYKTELDLNNAQKTACLKHAGAARYTYNWGLQRYQEEYQAGRKTPNAMSLHKELNALKQTELSWMYEVSKCAPQEALRNLEKAFKNFFGKAKLKAQGTYRGKLGYPRFKSKKKGIGSFRLTGAIHVFADGIQLPRLGTLRLHEHGYLPTTAKVLSATVSEQAGRWFVSVQVEVTVPDPVQATGQVIGIDLGIKALATASDGTVIANPKALRSHLKKLRRASRQHSRKQKGSKHRVKATRKLARLHAHIANIRKDTLHKATSQIVMKTKSRDVRPAVIVLEDLNVAGMLKNRSLSRAIADVGFAEFRRQVEYKALETGIQVKFVSQWEPSSKTCSSCKAVREELDLSERVFVCHACGLVIDRDVNASYNLADLA

SEQ ID NO: 3748 - protein, 374 aa, unidentified
MKMTRGYRTELDLNNAQKTTCLQHAGAARWAYNWGLKRYQEEYQAGRKTPNAKELNALKQTKLSWMYEVSKCAPQEALRNLEKAFKNFFGKTKLKKQGKYRGKLGYPRFKSKKKGIGSFRLTGTIHVFEDRIQLPRIGIVQLHERGYLPTAAKILSATVSEQAGRWFVSVQVEESIPEPQEATGTVIGVDLGVKALATVSNGITIANPKALRSNLKKLRRASRQHSRKQKGSKNRTKATRKLARLHAHIANIRKDTLHKATSQLVMKTKSPNKKPSVIVLEDLNVSGMLKNRHLSRAIADVGFYEFRRQIEYKAQQSGVQVKFVSRWEPSSKTCSSCKVVREELDVSERVFVCHVCGLVIDRDLNASYNLADLA

SEQ ID NO: 3749 - protein, 378 aa, unidentified
MLVVRGYKTELDLNNEQKTACLKHAGAARWAYNWGLKRYQEEYQAGRKTPNAISLHKELNALKQTELPWMYEVSKCAPQEALRNLEKAFKTFFGKAKLKVQGTYRGKLGYPRFKSKKKGIGSFRLTGAIHVFEDCIQLPRLGKLRLHEHGYIPTTAKVLSATVSEQAGRWFVSVQVEEYVPAPIQATGPVIGVDLGIKALATASNGMVIANPKALRSNLKKLRRASRQHSRKHKGGKNRAKATRKLARLHAHIASIRKDALHKATSQLVMKTKSPAARPAIIVLEDLNVSGMLKNGRLSRAIADVGFAEFRRQVEYKAQQMGIMVKFVSRWEPSSKTCSSCKDVREELDLSERVFVCHSCGLVIDRDLNAAYNLADLA

SEQ ID NO: 3750 - protein, 382 aa, unidentified
MTLVVRGYQTELKLNNAQRTACLKHAGAARYAYNWGLRRYQEERAAGRKAPNAMSLHKELNALKQTELPWMYEVSKAAPQESLRDLEKAFRHFWKRCQRKKQGTFRGKLGFPRFKSKKRGIGSFRLTGAIHIGENWIQLPRLGTLRLKERGYLPTTAVNILSATVSERAGRWYVSVQLEEEHAEPGIALGETIGIDVGIKALATLSDGRVFPNPKALGSHLKQLKRRCRQHARKQQGSKNRQKAARKLARLHAHIANLRKDTLHQVTSLIVAKTKPDQERPTCIVLEDLQVSGMVKNGKLSRAITDVGWSEFRRQLAYKAKQVGSLVYTVSRWEPSSKTCSWCGWIDEDLMLSDRLFHCAECGYVIDRDLNAAINLALKAAG

SEQ ID NO: 3751 - protein, 377 aa, unidentified
MVRGYRGELDLNNAQKTLCRKHAGAARWAYNYGLRRKQACYKAGQPTPSAIDLHREINALKHSEIPWAYEVSKCAFQEALRDLDQAFKHFFRKCRLKKEGTWKGTCGYPRYKSQKKAIGGARFTGSIRVSPDAIQLPRLGLLRLKEHGYFPLNSKISSATISEHAGRWYVSICVHEEAKDSQPATGDVIGVDLGIKRLATLSDGRTFENPKALRKKITALKRASRRHSRKAKGSRNRQKAKLRLSRMHARIANVRNNALHQATAQIVARTKPDQERPRVIVLEDLNIAGMLKNRRLARAIADVGMYEFKRQILYKAEQAGVQVLLASRWEPSSKTCSYCGWVNEALTLSDRVFVCLECGNVQDRDANAANNLAALAQ

SEQ ID NO: 3752 - protein, 376 aa, unidentified
MVRGYRGELDLNNVQKTLCRKHAGAARWAFNYGLRRKQEAYKAGQKTPTAIDLHREINALKPSEPWMREVSKCAFQEGLRDLDAAFKHFFRKCRLKKAGTWKGKCGYPRFKSRKKAIGGARFTGSIRVSAGAIQVPRLGRLRLKEHGYFPLGGKISSATISEQAGRWFVSICVHEEEKASQAATGGVIGVDLGIKRLATLSDGRTFENPKALRKKITALKRLSRRHSRKAKGSRNRQKAKQRLSRKHARIANVRNDALHQATAQIVARTKPNQERPRVIVLEDLHIAGMLKNRRLARAIADVGMYEFKRQILYKAEQAGAKVLLASRWEPSSKTCSCCGWINEALTLSDRVFVCLKCGNVQDRDANAANNLAALAQ

SEQ ID NO: 3753 - protein, 375 aa, unidentified
MVCGYRVELDLNNVQQTLCRKHAGASRWAYNYGLRRKQEAYRAGQKTPTAIDLHREINALKPSLPWMYEVSKCAFQEGLRDLDQAFKHFFRKCRLKKEGKWKGKCGYPRFKSKKRGLGGARFTGTIRVSPDAIQLPRLGLLRLKEHNYVPMNAKIGSATIYEHSGRWYVSICVHEEQLEPTPATGEVIGVDLGIKTLAVVSDGRTFDNPKALRKKITRLKRTCRRHSRKKKGSTNRKKAALRLAKMHARIAYVRQDALHKATSALVARTKPDDERPAAIVLEDLNISGMLKNRKLSRAIADVGMYEFKQQIEYKAAYAGVRVVIVSRWEPSSKICSCCGTVRETLGLNERVFVCEDCGYVTDRDYNAAKNLARLT

SEQ ID NO: 3754 - protein, 386 aa, unidentified
MIRGYRVELDLNNEQQTLCRKHAGASRWAYNYGLRRKREAYKAGEKTPTAIDLHREINALKASMPWMYEISKCAFQEGLRDLDNAFKHFFRKCRLKKEGKWKGKCGYPRFKSRKKAIGSARFTGFIHVYPDTIQLPRLGLLRLKEHNYVPMNVKISSATLSEHGGRWYVSMCVHEEQAEPTPATGEVIGVDLGIKTLAVVSDGRTFDNPKALRKKITKLKRVCRRHSRKKKGSNNRKKAQRRLARMHARIAHVRQDTLHKATSALVARTKPNHERPAALVLEDLNISGMLKNRKLSRAIADVGMYEFRRQIEYKAASAGVRVVIVSRWEPSSKTCSCCGTVREKLGLNERVFVCEDCGYVTDRDYNAAKNLARLAEHENYRELHGK

SEQ ID NO: 3755 - protein, 375 aa, unidentified
MARGYRVELNLNNVQQTLCRKHAGASRWAYNYGLRRKQEAYKAGQKTPTAIDLHREINALKPSLPWMYEVSKCAFQEGLRDLDQAFKHFFRKVKLKKEGKWKGKCGYPRFKSKKRAIGGARFTGTIRVYPDAIQLPRLGLLRLKEHDYVPMSVKISSATISEHGGRWYVSICVHEEQAEPMPANGEVIGVDLGIKTLAVVSDGRTFDNPKALRKKLTALKRTCRRHSRKKKGSNNRKKAQRTLARMHRRIANVRRDALHKATSHIVARTKPDAERPRVIVLEDLNVQGMLKNRKLSRAIADVGMYEFKRQILYKAQYAGCKVLLVSRWEPSSKTCHACGWVKEDLQLSDRLFVCEGCGKVTDRDYNAAKNLAALA

SEQ ID NO: 3756 - protein, 390 aa, unidentified
MVRGYRGELDLNNAQKTLCRKHAGASRWAYNYGLRRKQEAYKAGQKTPTAIDLHREINALKPSEPWMYEVSKCAFQEGLRDLDAAFKHFFRKCRLKKEGKWKGKCGYPRFKSRKKAIGGARFTGSIRVYPDAIQLPRLGVLRLKEHGYFPLNGKITSATIREQAGRWYVSICAHEEAGEAKEPQAATGDVIGVDLGIKRLATLSDGRTFENPKALRKKITALKRTSRRHSRKAKGSRNRQKAKQRLSRMHARIANVRKNALHQATAEIVARTKPDAQRPRVIVLEDLNIAGMLKNRRLARAIADVGMYEFKRQILYKAEQAGVQVLLASRWEPSSKTCSCCGWVNEALTLSDRVFACVDCGSVQDRDDNAARNLAALASRGVEYRKFCGN

SEQ ID NO: 3757 - protein, 515 aa, unidentified
GSLNRNKARLKVARLQEHIANQRNDFLQKLTTKLIKENDIICIEDLQVKNIIRNRKLSRLISDVSWSEFIRQLEYKANWHGRQIVKVDKFFASSQICKNRRNYGDSLWRISKTYFSMQNSMKQEPCDFSHGRFRTGIIFIGITSVMSAFLQIKENFIVVGFGSIPYNIVIIISIMLSTIFGPYILPIGAVVAMVVQLLFYMFFVKKTNYKYLYYLNFKDDSLIKLLALLSPVFIGVAVNQVNSLVDTTLASTLVKGSIPALTYADRLNGFVTGTFTASIVSVMYPMLSKLSAENNQKKFTSSVKSSINMIIISMIPISVASIFFATPVVRIIFERGAFDARATQMTATALIFYAVGMTAFGLRDILGKVFYSLQDTKTPMVNGIISVGVNIVLDLVLIKPMAHGGLALATSSSSIACILLLFLNLKRKVGYFGQDKIIKATLKSVVASLIMGVLSYFTYKFIFGILGVGTFNEFVSLAISVIVGGGIYTLLMIIFKVEEVDMILNIAKRKLHLKK

SEQ ID NO: 3758 - protein, 380 aa, unidentified
MKSIRTKLKLNNKQKTLMAQHAGYSRWCYNWGLSLWNAAYKDGYKPNARKLRKVFTNHTKPLYPWMKNLSSKVYQYAFINLGEAFKRFFQGLGKRPRFKKKGKSDSFTIDNCGKPIELNGWSHKLPFIGIVKTYEPIEATTQKITISRQAGDWYLSCRGERPFAPTNEFTPTSTPKTTEVVGVDLGIKTLATLSTGEVFESVKPYKKAQNRLAKLQRQLSRKVKHSSNWYKAVVKLAKQHRRVANIRRDALNKLTTYLAKNHGIVVIEDLNVSGMLANHKLAKSIADQGFYEFRRQLEYKCQCYGGELVVVDRFFPSSKTCSSCGHVQDMPLNIRTYDCPECGLSIDRDLNASINLRNAVGLTVNACGRSAADSSGGSRK

SEQ ID NO: 3759 - protein, 417 aa, unidentified
MKSIRTKLKLNNKQKTFFAQHAGYSRWCYNWGLSLWNDAYTDGYKPNPSFPSECYANGMLRKRKLREVFTNHTKPLYPWMKNLSSKVYQYAFINLGEAFKRFFSCGMLRKQGLGKRPRFKKKGRSDSFPTECYANTIDNCGKPIELNGWSHKLPFIGIVKTYEPIEATTQKITISRQAGDWYLSCSYELTPTATNKTTEVVGVDLGIKTLATLSNGEVFKSVLPYKKAQNKLAKLQRQLSKKVKHSSNWYKAVVKLAKQHRRVANIRKDALDKLTTYLAKNHSIVVIEDLNVSGMLANHKLAKSISRQCFYEFRRQLEYKCQWYGCELVVVDRFFPSSKTCSSCGHVQDMPLNIRTYDCPECGLSIDRDLNASINLRKRVCNSEETSECKTHSRDAVGLTVDACGRSAADSSGRSRK

SEQ ID NO: 3760 - protein, 459 aa, unidentified
MKTIQAYRFALDLTPGQERDVLAHAGAARVAHNWALAKVKAVMDQRSAERSYGVPDEELTPSLSWSLAGLRKAWNAAKPDVAPWWGEVSKEAFNTGLDALARGLKNWAGSRRGTRAGRPVGFPRFKSRRRTTPSVRFTTGAIRVEPDRMHVVLPRLGRLKLHESARKLARRLDNGTARIMSATVRRDGGRWHVSFTVEVDRAERIPARPASVVGVDVGIKHLAVLSTGELVDNPRHLVAAQQRMRALGRALSRKTGPDRRTGRRVSKRWERAAARLGRAHARVANLRRDGLHKLTTRLAREHGTVVVEDLNVTGMLRNRKLARHIADAGFAEIRRQLAYKTGWNGGRLLAADRWYPSSKTCSGCGAVKAKLALSEREYQCEACGLVLDRDRNASLNLAALAAEFDTAGSGPVAARGADQKTRVRGQVAVKRESGTASAGQTGTVLPQGRTTDRVLTKAH

SEQ ID NO: 3761 - protein, 326 aa, unidentified
MKTIQAYRFALDLTPGQERDVLAHAGAARVAHNWALARVKAVMDQRAAERSYAVPEELLTPSPSWSLAGLRKAWNAAKDEVAPWWRECSKEAFNTGLDALARALVNWRPSSVVGVDVGITHLAVLSTGELVDNPRHLAAAHARLRQLGRALSRKTGPDRRTGRRPSKRWQRTSARLGRAHARVSNLRRDGLHKLTTRLAREHATIVVEDLNVAGMLRNRRLARHIADAGFGEIRRQLTYKAQWNGGQLIVADRWYPSSKTCSGCGAVKTKLALSEREYECKTCGLVIDQRLAQPRRPRGSNRREWPGGSTWSQPEDPHTRAGGREA

SEQ ID NO: 3762 - protein, 459 aa, unidentified
MKTIQAYRFALDLTAGQERDVLAHAGAARVAHNWALAKVKAVMDQRTAERSYGVPDERLTPSLSWSLAGLRKAWNAAKPDVAPWWAEVSKEAFNTGLDALARGLKNWADSRTGKRAGRPVGFPRFKSRRRTTASVRFTTGAIRVEPDRMHVVLPRLGRLKLHESARKLGRRLEAGAARIMSATVRRDGGRWHVSFTVEVERAERGPARPGVVVGVDVGITHLAVLSTGEMVGNPRHLVAAQRRMRALGRALSRKAGPDRRTGQRASKRWERAAARLGRAHARVANLRRDGLHKLTTRLATTYGTIVVEDLNVTGMLANRKLARHIADAGFAEIRRQLAYKTTWNGAGLLVADRWYPSSKTCSGCGAVKTKLALHEREFACEMCGLVIDRDRNAALNLAALAAQFDTAGSGPVAARGADQKTRVRGQVATKREPGTASAGQTGTVPPQGRTIDRALTKAH

SEQ ID NO: 3763 - protein, 404 aa, unidentified
MKTIQAYRFAVDLTASQERDVLAHAGAARVAHNWALGRVKAVMDQRAVERTYGMPDDLLTPSLSWSLAGLRKAWNVAKREVAPWWAEVSKEAFNTGLDALARGLKNWADSRSGKRAGRPVGFPRFKSRRRTTPSVRFTTGAIRVEPGRMHVVLPRLGRLKLHESARKLARRLNNGTARIMSATVRRDGGRWHVAFTVEVERTERQPAQPDSVVGVDIGIKHLAVLSTGELVDNPRHLVAAQTRLRALGRALSRKTGPDRRTGQRPSKRWERAVARLGRSHARVANLRRDGVHKLTTRLTREHGTVVVEDLNVTGMLANRRLAKHIADAGFAEIRRQLAYKTSWNGGRLLVADRWHPSSKTCSACGAVKTKVMATRALLPGGVMVSAGQRSMIADANIDKFQARL

SEQ ID NO: 3764 - protein, 460 aa, unidentified
MKTMQAYRFALDLTAGQERDVLAHAGAARLAHNWALARVKAVMDQRAAERTYGVPDGQLTELVSWSLPALRKAWNAVKADVAPWWAQCSKEAFNTGLDTLARALKNWADSRSGKRRGRPAGFPRFKSRRRGVASVRFTTGAIRVEPDRMHVVLPRLGRLKLHESARKLARRLEAGTARIMSATVRRDGGRWYVAFCVEVDRAERGPARPDSVVGVDVGIKHLAVLSTGELVDNPRHLAAAQQRMRRLGRALARKQGPDRRTRQRPSNRWQRAADRLGRAHARVANLRRDGLHKLTTRLVREHGTIVVEDLNVTGMLANRRLARHIADAGFAEIRRQLTYKTGWNGGRLLVADRWYPSSKTCSGCGAVKTKLALSERIYTCRACGLVLDRDLNAARNLAAIAAQYNTAGSGPVSGRGADQKTRPSGQVAVKRQPGTALAGKTGTVPPQGGTTDHALTMRIR

SEQ ID NO: 3765 - protein, 459 aa, unidentified
MKTIQAYRFALDLTPGQERDVFAHAGAARVAHNWALARVKAVMDQRTAERSYGVAEQLLTPSLSWSLAGLRKAWNQAKPDMAPWWGEVSKEAFNTGLDALARGLKNWAGSRSGKRAGRPVGFPRFKSRRRTTPSVRFTTGAIRVEPDRMHVVLPRLGRLKLHESARKLARRLEAGTARIMSATVRRDGGRWHVSFTVGVERAERAPARPSSVVGVDVGILHLAVLSTGELIDNPRHLVAAQQRMRALGRALSRKTGPDRRTGQRASKRWERAAARLGRAHARVANLRRDGLHKLTTRLAAEHGTVVVEDLNVTGMLANRRLARHIADAGFAEIRRQLAYKTAWNGGRLLVADRWYPSSKTCSGCGTVKAKLALSEREYACEACGLIIDRDRNAALNLAALAAEFDTAGSGPVAGRGADQKTRIRGQVAVKRQPGTAPAGQTGTVPPQGRTTNRVLAKAH

SEQ ID NO: 3766 - protein, 462 aa, unidentified
MVIDVMVVQAYRFALDLTPCQERAVLAHAGAGRVAYNWALARVKAVMEQRAAERSYGVAESGLTPTIEWSLPALRRAWNAAKPDVAPWWAECSKEAFNTGLDALARGLKSWSDSRTGRRAGRRVGFPRFKSRRRSTPSVRFTTGAIRVEPDRKHVVLPRLGRLKLHESARKLARRLEAGTARIMSATVRRDAGRWHVAFTVEVDRVERTPARPQAVVGVDVGVRHLVVLSTGKMEPNPRHLEDAARRMRRLARRLSRGVGPDRRSGQQPSNRWERARRQVARAHGRVANLRRDGLHKLTTRLAREYGTIVVEDLNVAGMLRNRRLGRRIADAGFGELRRQLAYKTTWNGGHFVVADRWYPSSKTCSACGTVKAKLALSARTYTCTTCGLVLDRDVNAARNLAALACEATTAGSGPVAGRGADRKTRPGGPVAVKRQPGTAQVGKAGTVPQGGTANHMLTRAH

SEQ ID NO: 3767 - protein, 459 aa, unidentified
MSVVQAYRFALDLTPRQERAVLAHAGAARVAHNWALARVKAVMDQRAAERTYGIPDEHLTPTIGWSLPALRRAWNQAKSDVAPWWAECSKEAFNTGLDALARGLKNWSDSRTGKRAGRRVGFPRFKSRRRSTPSVRFTTGAIRVEPDRRHVVLPRLGRLKLHESARKLARRLEAGTARIVSATVRRDGGRWYVSFTCTVQRVQGVPACPDATVGVDLGVSHLAVLSTGEVEPNPRHLDAAARRMRRLSRRVSRRVGPDRRTGRRGSMRWERARVRLGRAHARVAHLRHDGLHKLTTRLAAEYGTLVVEDLNVAGMLANRRLARRIADAGFAELRRQLAYKTGWNGGRLVVADRWYPSSKTCSSCGVVKTKLALSERTYTCTTCGLVLDRDVNAARNLAALAATVAGSGPETRNGRGADRKTRPGGPVAVKRQPGTATAGNTGTVPPQGRTSNHELTHAS

SEQ ID NO: 3768 - protein, 456 aa, unidentified
MQAYRFALDLTPTQQRAVLAHAGAARVAHNWALARVKAVMDQRAAERTYGITDVELTPAAGWSLPALRKAWNAAKADVAPWWTECSKEAFNTGLDALARALKNWSDSRTGKRVGRRVGFPRFKSRRRSTPSVRFTTGAIRVEPDRRHVVLPRLGRLKLHESARKLARRLEAGTARIVSATVRRDGGRWFVAFCVDVDRRERAPAQPQATVGVDVGVINLAVLSTGELVPNPRHLDGAARRMRRLARRMSRRVGPDRRTGQRPSKRWERARAQLGRAHARVAHLRRDGLHKLTTRLAREYATIVVEDLNVAGMLRNRRLARRIADAGFAELRRQLAYKTGWSGGRLVVADRWYPSSKTCSGCGAVKTKLTLSERTYNCTVCGLTLDRDVNAARNLAALAAEVNTAGSGPVAGRGADRKTRRGGPVAVKRQPGIASASKTGTVPPQGGTSNHMLTKAS

SEQ ID NO: 3769 - protein, 367 aa, unidentified
MLKAYKYRIYPNNDQKVQIAKTFGCCRFVHNQTLAYRKESYEKEKKSMSRTDCNNFCNRELKKEHEWLKEVDKFALTNAIYNMDSAYQKFFKEYAGYPKFKSKHDNHKSYTTNFTNGNIAVDFEKGKVKLPKLKEVKARLHREFRGKIKSATVSKTPSGKYYVSILVEGDHEVLPHTKQNIGLDLGIKDLCITSDGKKYKNSKTIKKYEWKLAKLQRQLVHKKKGSNNYCKKKKQIALCHEKIRNTRKDYLHKVSHEIISENQVIVSENLQIKNMVKNHHLAKAISDASWYELTRQLEYKAKWNGRKYIKIDTFYASSQLCSVCGYQNLDIKDLSVRTWICPKCGTEHDRDINAAKNILAEGLRQIA

SEQ ID NO: 3770 - protein, 380 aa, unidentified
MERLKAYKFRIYPTEEQEIFFAKSFGCVRKVYNLMLSDRMKAYEETKKDSAKKMTFPTPAKYKEAFPFLKEVDSLALANAQLNLDKAYKNFFRDQSVGFPKFKSKKNPVQSYTTNNQNGTVALIDNKFIKVPKLKSFIKIKLHRQPKGIIKSATVSRHSSGKYYISLLCKEEMVAFPKTDSAIGVDLGITDFAILSDGQKISNNKFTSKMAKKLKREQRKLSRRALLAKKKGVNLFDAKNYQKQKRKVARLHEKVSNQRNDFLNKLSTDIIKNHDTICIENLNVKGMLRNHKLAKSIADVSWSSFVIKLQYKADWYGREMIKIDKWFPSSQICSECRHKDGKKTLEIREWTCPVCHAHHDRDINASLNILTEGLRLKQLT

SEQ ID NO: 3771 - protein, 461 aa, unidentified
MKVIQAYRFALDLNPGQERDVLAHAGAARVVHNWALARVKAVMDQRVAERSYGISESLLTPSLSWSLAGLRKTWNHAKYEVAPWWPEVSKEAFNTGLDALARGLKNWADSRKGTRVGRSAGFPQFKSRRRTTPSVRFTTGAIRVEPDRMHVVLPRLGRLKLHESARKLARRLEAGTARIMSATVRRDGGRWHVAFTVEVERTGRVPARPGSVVGVDVGIKHLAVLSTGKLEPNPRHLAAAQQRMRVLGRALSRKTGPDRRTGQRASKRWKRAAAWLGRAHARVANLRRDGLHKLTTRLAATYGTVVVEDLKVSGMLANRRLARHIADAGFAEIRRQLTYKTGWNGGRLLVADRWYPSSKTCSACGTVKTKLALSERVYECEACGLVIDRDRNAALNLAALAADFDTAGSGPVAARGADQRTCIRGQVAGSVNPARHQSVRPGPSRRKAGLSIVCLPRRTER

SEQ ID NO: 3772 - protein, 465 aa, unidentified
MGQPNRLSVVQAYRFALDLSPAQERAVLGHAGAARVAYNWGLARVKAVLDQRAAERSYGIGDDQLTPAPGWTLPALRQAWNTAKEDAAPWWRDYSKEAYNTGLDALARGLKNWADSRSGKRSGRPVGFPRFKSRRRSTPAVRFTTGAIRVEPDRKHVVLPRLGRLKLHESARKLARRLQAGTARILSATVRRDGRRWYVSFTCEVQRARRTPARPCATVGVDLGVMHVAVLSTGVLVPNPRHLDAALRKLRRISRALSRKVGPDRRAHRDASKRWCRTRTALGRAHARVANLRRDGLHKLTTRLATGYGTIVVEDLNVAGMLRGRRLARRITDAGFAEIRRQLVYKTDWYGGRLVVADRWCPSSNTCSACGAVRTKLTLSERTFTCTTCGLVLDRDVNAARNLAALAATVAGSGPETLNGRRADRKTPPAGLVAVKRLPGTATADKTGTVPPQGRTSDHAPTAAS

SEQ ID NO: 3773 - protein, 430 aa, unidentified
MVTVLGVAVRERLGVVQAYRFALDLTPRQERAVLAHAGAARVAHNWALARVKTVMDQRAAERSYGIPDEQLTPTVGWSLPALRRAWNQAKADVAPWWAECSKEAFNTGLDALARALTNWSDSSTGKRAGRRVGFPRFKSRRRSTPSVRFTTGAIRVEPDRRHVVLPRLGRLKLHESARKLARRLEAGTARVLSATVRRDGGRWFVAFCVDVDRAARTPHQPQVVVGMDLGVKHLAVLSTGEMEPNPRHLDAAARRMRRLARRASRRVGPDRRTGRRASKRWERARVRLGRAHARVGNLRRDGLHKLTSRLAREYGTLVVEDLNVAGMLANRRLARSIADAGFAELRRQLAYKTGEEWRAAGGRPVVSVLENLLGLRRGENQTRPVRAHLHLHHVRPRPGPGPQRRTEPGRAGGHRRREWLGDAKRTWSRP

SEQ ID NO: 3774 - protein, 380 aa, unidentified
MEQLKAYKYRIYPTEEQVVFFAKTFGCVRKVYNLMLDERIKAYAAMKNDPSKKLKKPTPAKYKNDYPYLKEVDSLALANAQLNLDKAYNNFFRDKRVGFPKFKSKNSPVQSYTTNNQHGTISLVENNYIKLPKLKSLVRIKRHRHPKGEIRSATISYHSSGKYYLSLLCKEEIPKLPKTNTAIGIDLGITDFAIFSDGQKIDNHRFTAEMERKVTREQRKLSRRALQAKKAGKKLSEAKNYQKQKRKMARLHEKVKNQRNDFLNKLSTDLIKNHDVICLEDLHTKGLLRNHKLAKSISDVSWSSFVTKLQYKADWYGREMIQVDRWYPSSQLCSECGHKDGKKPLQIRAWTCPVCHTQHDRDINASINILNEGLRMRAFA

SEQ ID NO: 3775 - protein, 361 aa, unidentified
MYPNKKQQELINKTFGCCRFVYNKYLAKRIDVYKNDKETFTYKQCSSDLTNLKKELKWLKEPDKFSLQNALKDLDNAYKKFFKEKAGFPKFKSKKINRFSYKTNFTNGNIMYCGQHIKLPKLGMVKIRDKQVPKGRILNATISKEPSGRYYVSLCCIDVDIEVFENTNNHIGLDLGIKEFCISSCGEFIENPKYLKKSLNKLAKLQRELSRKTIGSLNRNKARLKVARLQEHIANQRNDFLQKLSTKLIKENDIICIEDLQVKNMIRNRKLSRLISDVSWSEFIRQLEYKANWYGRQIVKVGKFFASSQICNKCGYKNEEVKNLNIREWICPSCNETHDRDINASINILKEGLRLITIQNK

SEQ ID NO: 3776 - protein, 361 aa, unidentified
MYPNKKQQELINKTFGCCRFVYNKYLAKRIDVYKNDKETFTYKQCSSDLTNLKKELKWLKEPDKFSLQNALKDLDNAYKKFFKEKAGFPKFKSKKINRFSYKTNFTNGNIMYCGQHIKLPKLGMVKIRDKQVPKGRILNATISKEPSGRYYVSLCCIDVDIEVFENTNNHIGLDLGIKEFCISSCGEFIENPKYLKKSLNKLAKLQRELSRKTIGSLNRNKARLKVARLQEHIANQRNDFLQKLSTKLIKENDIICIEDLQVKNMIRNRKLSRLISDVSWSEFIRQLEYKANWYGRQIVKVGKFFASSQICNKCGYKNEEVKNLNIREWIYPSCNETHDRDINASINILKEGLRLITIQNK

SEQ ID NO: 3777 - protein, 462 aa, unidentified
MSTVLQAYRFALDPNTTQDAALRSHCGAQRFAFNWGLARVKSNLGQRDAEASCGLAADELIPHVGWSAYSLRKDWNQAKNQIAPWWAENSKEACSSGLANLASALKIWSDSKSGKRQDRKVGFPKFRGKRGGLSCRFTTGSFGLDESDRRHVKLPRIGTVRTHESTRKLARHVGRGTARIRSATVPYQSGRWFVSFSVEIARTDPAPAQPHTAVGVDLGVKSLAVLSTGEIVPNPKHLEVSQRELRRLQRQASRRVGPDRRANQKPSNRWRKTQARIEKLHTRIANARRDELNKLTTHLVRTHGAIVLEDLNVSGMMRNRRIARHVAGVGMAEIRRQIEYKAAWAKVHCHIADRWYPSSKTCSDCGGVKAKLRLSERTFTCDRRGMSMDRDLNAARNLAALVETSSHSWWATENEPDGNPYQTPCSGAVGTATGRPRPDGRGQRRAARRRLRNTSTHCPERR

SEQ ID NO: 3778 - protein, 372 aa, unidentified
MIAVKKAYKFRIYPNKKQQELINKTFGCCRFVYNKYLAKRIDVYKNDKETFTYKQCSSDLTNLKKELNWLKEPDKFSLQNALKDLDNAYKKFFKEKAGFPKFKSKKINRFSYKTNFTNGNIMYCGQHIKLPKLGMVKVRDKQVPKGRILNATISKEPSGRYYVSLCCTDVDIEVFENTNNHIGLDLGIKEFCISSCGEFIENPKYLKKSLNKLAKLQRELSRKTIGSLNRNKTRLKVARLQEHIANQRNDFLQKLSTKLIKENDIICIEDLQVKNMIKNHKLSRLISDVSWSEFIRQLEYKANWHGRQIVKVGKFFASSQICNKCGYKNEEVKNLNIREWICPSCNETHDRDINASRNILKEGLRLITIQNK

SEQ ID NO: 3779 - protein, 367 aa, unidentified
MLKAYKYRIYPNNEQKIQIAKTFGCCRFVYNQTLAYRKEVYEKEKKSVSKTDCNNYCNRQLKKEYEWLKEVDKFALTNAIYNMDAAYQKFFKEHAGYPKFKSKHDNHKSYTTNFTNGNIAVDFEGNRVKLPKIKNVKAKLHRNFSGQIKSATISQIPSGKYYVSILVETEHVELPHVNQNTGIDLGIKELCITSAGKKYENPKIIRKYEKKLIKLQRQLAHKEKRSQNYYKTKKKIALCHEKITNTRKDYLHKMSHEIISENQVIVSEDLQIKNMVKNHRLAKFISDVSWYELTRQLEYKAKWNGRKYVKIDTFYASSQLCSVCGYQNTETKNLSVREWICPVCGTNHDRDINAAKNILEEGLRQRA

SEQ ID NO: 3780 - protein, 371 aa, unidentified
MAVEKACKFRIYPNKKQQELINKTFGCCRFVYNKYLAKRIDVYKNDKETFTYKQCSSDLTNLKKELNWLKEPDKFSLQNALKDLDNAYKKFFKEKAGFPKFKSKKINRFSYKTNFTNGNIMYCGQHIKLPKLGMVKIRDKQVPQGRILNATISKEPSGRYYVSLCCTDVDIEAFENTNNHIGLDLGIKEFCISSCGEFIENPKYLKKSLNKLAKLQRELSRKTIGSLNRNKARLKVARLQEHIANQRNDFLQKLSTKLIKENDIICIEDLQVKNMIKNHKLSRLISDVSWSEFIRQLEYKANWYGRQIVKVGKFFASSQICNKCGYKNEEVKNLNIREWICPSCNETHDRDINASINILKEGLRLITIQNK

SEQ ID NO: 3781 - protein, 403 aa, unidentified
MDRPSLATAATLWYICSTFTTEEEEQKMVRGYRGELDLNNVQKTLCRKHAGAARWAFNYGLRRKQEAYKAGQKTPTAIDLHREINALKPSEPWMREVSKCAFQEGLRDLDAAFKHFFRKCRLKKAGTWKGKCGYPRFKSRKKAIGGARFTGSIRVSAGAIQVPRLGRLRLKEHGYFPLGGKISSATISEQAGRWFVSICVHEEEKASQAATGGVIGVDLGIKRLATLSDGRTFENPKALRKKITALKRLSRRHSRKAKGSRNRQKAKQRLSRKHARIANVRNDALHQATAQIVARTKPNQERPRVIVLEDLHIAGMLKNRRLARAIADVGMYEFKRQILYKAEQAGAKVLLASRWEPSSKTCSCCGWINEALTLSDRVFVCLKCGNVQDRDANAANNLAALAQ

SEQ ID NO: 3782 - protein, 404 aa, unidentified
MDRPSLETAATLWYICSTFIAEEEEQKMVRGYRGELDLNNAQKTLCRKHAGAARWAYNYGLRRKQACYKAGQPTPSAIDLHREINALKHSEIPWAYEVSKCAFQEALRDLDQAFKHFFRKCRLKKEGTWKGTCGYPRYKSQKKAIGGARFTGSIRVSPDAIQLPRLGLLRLKEHGYFPLNSKISSATISEHAGRWYVSICVHEEAKDSQPATGDVIGVDLGIKRLATLSDGRTFENPKALRKKITALKRASRRHSRKAKGSRNRQKAKLRLSRMHARIANVRNNALHQATAQIVARTKPDQERPRVIVLEDLNIAGMLKNRRLARAIADVGMYEFKRQILYKAEQAGVQVLLASRWEPSSKTCSYCGWVNEALTLSDRVFVCLECGNVQDRDANAANNLAALAQ

SEQ ID NO: 3783 - protein, 486 aa, unidentified
MLLWSPSANLSLRQVLLTVEVSGVGLSVGASTVRLVITTHAYRFALDPTPRQVGALLRHTGAARVAYNWLLAVVKANLSQREAERSYGMAEAELTPSLSWSMYSLRKAWNQAKADVAPWWPECSKEAYATGLDRLATALKNWSDSKKGRRRGPRMGFPRFKSKRKATPSVRFTTGVIRLDGRMHVVLPVLGRIKTHESTHKLGRLIEAGTARIKSATVRQEAQRWCVSFTVEVQRAERTPTRPDAVIGVDLELKTLAVFSDGRPAAENPKHLAGARRKLRRLSRTVSRRQGPDRRTGQQPSNRWKRANAQRNRVHHRVTALRRDGIHKLTTSLTREYGTVVVEDLNVASMVKNWKLARSIADAGFGEIRRQLAYKTVWTGGRLEVADRWFPSSKTCSACGNVRPKLPLRVRTYVCENCGLILDRDENAALNLTALVKRHVAGSGPETVNGRGADRKTPPGGAGGRPAPGGSRPGKTGIFVQEWASH

SEQ ID NO: 3784 - protein, 370 aa, unidentified
MHKAYSFRLYPTKEQEQQIRRTIGCCRFVFNHFLARRKKAYEQDGTTLNKYACMRELPALKQQYPWLQEVDSTALQRTVEELDDAFQRFFREKKGYPRFKSKKHPKQSYTSKRNGKDDDKATIRIEGNRIRLPKLGWIKFAKSRDVQGRIISVTVRRNPTGKYFVSVLVETEIQPLPACDSKVGVDLGVKDFATLSTGEVIPNPKYLRRYEQKLIRWQRKLSRRKKGGSNWHKARLKVARLHEKVVNCRKDFLHKLSTRLIRENQVICLEDLSVQNMQKNHRLAKSIADVSWSTFCTMLEYKARWYGRTIVVVDKTFPSSQTCSVCNYRHKEVKNLGLREWTCPSCGTHHDRDINAAKNILQEGLRLLAV

SEQ ID NO: 3785 - protein, 365 aa, unidentified
MQKAYRFRLYPNQKQQTLIHKTFGCCRFVFNHFLARRKEVYETERKTLGYHACSALLTQLKKEREWLKEPDATALQTELRHLDDAFKRFFREKKGYPRFKSRKNPVQSYTSKNNNGSIAIAGNRIRLPKLGWVKLAKSREVEGRILSATIRKNPSGKYFVSVLVETEIQPLPACDSKVGVDLGVKDFATLSTGEVIPNPKYLRRYEQKLIRWQRKLSRRKKGGSNWHKARLKVARLYEKVVNCRKDFLHKLSTRLIHENQVICLEDLSVQNMQKNHRLAKSIADVSWSTFCTMLQYKAKWYGRTVVRVDKTFPSSQICSACNYRHKEVKNLGLREWTCPSCGTHHDRDINAAKNILQEGLRLLAS

SEQ ID NO: 3786 - protein, 365 aa, unidentified
MQKAYRFRLYPNQKQQTLIHKTFGCCRFVFNHFLARRKEVYETERKTLGYNACSALLTQLKKEREWLKEPDATALQTELRHLDDAFKRFFREKKGYPRFKSRKNPVQSYTSKNNNGSIAIAGNRIRLPKLGWVKLAKSREVEGRILSATIRKNPSGKYFVSVLVETEIQPLPVCDSKVGVDLGVKDFATLSTGEVIPNPKYLRRYEQKLIRWQRKLSRRKKGGSNWHKARLKVARLHEKVVNCRKDFLHKLSTRLIHENQVICLEDLSVQNMQKNHRLAKSIADVSWSTFCTMLAYKAKWYGRTVIWVDKTFPSSQICSACSYRHKEVKNLGLREWTCPSCGTHHDRDINAAKNILQEGLRLLAS

SEQ ID NO: 3787 - protein, 365 aa, unidentified
MQKAYRFRLYPNQKQQTLIHKTFGCCRFVFNHFLARRKEVYETERKTLGYNACSALLTQLKKEREWLKEPDATALQTELRHLDDAFKRFFREKKGYPRFKSRKNPVQSYTSKNNNGSIAIAGNRIRLPKLGWVKLAKSREVEGRILSATIRKNPSGKYFVSVLVETEIQPLPACDSKVGVDLGVKDFATLSTGEVIANPKYLRRYEQKLIRWQRKLSRRKKGGSNWHKARLKVARLHEKVVNCRKDFLHKLSTRLIHENQVICLEDLSVQNMQKNHRLAKSIADVSWSTFCTMLAYKAKWYGRTVIRVDKTFPSSQLCSKCGYCNKEVKNLGLREWTCPSCGTHHDRDINAAKNILQEGLRLLAS

SEQ ID NO: 3788 - protein, 416 aa, unidentified
MALVVRGYKTELDLNNEQRTACLKHAGCARFAYNWGLARSQEVYRATGKRPNALQLHRALNALKKTDFPWMYEVSKCAPQEALRDLDRAFAHFFRRLELRKQGKLTGKLGFPRFRKKSRGIGSFRLTGHIHVFEDRIQLPRLGRLRLKECGYLPAGAKVLSATVSEEAGRWYVSVLVEEDQEAVPCTARTAVGVDLGVNRLATLSDGTTFQNPRPLKQAQKRLRRLEREKARRLIGSKNRKKTVRKLAKQHVRVARIRRDATHKLTTHLCKNHALVAIEDLHVTGMLKNHRLAQALADSNFGEIRRQLEDKAKRYGTWLVVIDRFFPSSKRCAACGYIKPALGLHERTFVCEACGVVLDRDQNAALNVLQEALRTTGSSSGSHACGQGSSGRLTGGGEPALAEAGTSHCLGSVLDG

SEQ ID NO: 3789 - protein, 423 aa, unidentified
INNLCKNRRNYGDSLWRISKTYFSMQNSMKQEPCDFSHGRFRTGIIFIGITSVMSAFLQIKENFIVVGFGSIPYNIVIIISIMLSTIFGPYILPIGAVVAMVVQLLFYMFFVKKTNYKYLYYLNFKDDSLIKLLALLSPVFIGVAVNQVNSLVDTTLASTLVKGSIPALTYADRLNGFVTGTFTASIVSVMYPMLSKLSAENNQKKFTSSVKSSINMIIISMIPISVASIFFATPVVRIIFERGAFDARATQMTATALIFYAVGMTAFGLRDILGKVFYSLQDTKTPMVNGIISVGVNIVLDLVLIKPMAHGGLALATSSSSIACILLLFLNLKRKVGYFGQDKIIKATLKSVVASLIMGVLSYFTYKFIFGILGVGTFNEFVSLAISVIVGGGIYTLLMIIFKVEEVDMILNIAKRKLHLKK

SEQ ID NO: 3790 - protein, 460 aa, unidentified
MKVIQAYRFALDLRPFQQRVVLAHAGAARVAYNWGLARVKAVMDQRAAERSYGTPEELLTPAVGWDLAALRKAWNAAKSEVAPWWAECSKEAYNTGLDNLARALKNWSDSRAGKRAGRRVGFPRFKSRRRATPSVRFTTGAIRVEPDRKHVVLPRLGRLKTHESTRKLARRIEAGTARILSATVRRDGGRWHVAFCVEVERAEHTPTRPQAVVGVDVGITHLAVLSTGEMVPNPRHLHEAAQRMRRLSRQMSRRVGPDRRTGQRPSNRWERARQRVARAHARVANLRRDGLHKLTTRLARTYGTIVVEDLNVAGMLRNRRLARQIADAGFGEIRRQVTYKAEWNGGRRIVADRWYPSSKTCSDCGAVKAKLPLRVRTYICDPCGLALDRDLNAARNLAALAREVTTAGSGPVAGRGADRKTRPGGPVAAKRQPGPLRRIRPGPSHRKAGHTDQSLEPTDR

SEQ ID NO: 3791 - protein, 471 aa, unidentified
MVIVPGVGHRDRLSVVQAYRFALDLSPAQERAVLGHVGAARMAYNWALARVKAVLDQRAAERSYGIPEDELTPAIGWSLPALRRGWNAAKGEVAPWWRDYSKEAYNTGLDALARGLNSWADSRSGKRAGRRVGFPRFKSRRRSTPSVRFTTGTIRVDPDRKHVVLPRLGRLRLHESARKLARRLAAGTARILSATVRRDGHRWYVSFTCQVERARRTPTCPDATVGVDLGVRRLAALSTGEPVPNPQHLDAALRKIRRISRGLSRKVGPDRRSRRDASKRWQRARGRLGRVHARVANLRRDGLHKLTTRLAATYGTIVVEDLNVAGMLRNRRLSRRIADAGFAEIRRQLVYKTQWYGGRLVVADRWYPSSKTCSGCGAVRTKLALSERTFTCTTCGLVADRDVNAARNLAALAAAVAGSGPETLNGRRADCKTPPAGPVAVKRQPGTTSVGKTGTVPPQGRTSDHELTPAS

SEQ ID NO: 3792 - protein, 426 aa, unidentified
QFKINNVCKNRRNYGDSLWRISKTYFSMQNSMKQEPCDFSHGRFRTGIIFIGITSVMSAFLQIKENFIVVGFGSIPYNIVIIISIMLSTIFGPYILPIGAVVAMVVQLLFYMFFVKKTNYKYLYYLNFKDDSLIKLLALLSPVFIGVAVNQVNSLVDTTLASTLVKGSIPALTYADRLNGFVTGTFTASIVSVMYPMLSKLSAENNQKKFTSSVKSSINMIIISMIPISVASIFFATPVVRIIFERGAFDARATQMTATALIFYAVGMTAFGLRDILGKVFYSLQDTKTPMVNGIISVGVNIVLDLVLIKPMAHGGLALATSSSSIACILLLFLNLKRKVGYFGQDKIIKATLKSVVASLIMGVLSYFTYKFIFGILGVGTFNEFVSLAISVIVGGGIYTLLMTIFKVEEVDMILNIAKRKLHLKK

SEQ ID NO: 3793 - protein, 325 aa, unidentified
MQTFGCVRFTYNMLLTLRQQESGKTVEERTSARLQKQKMTPAKLKKDYPFLKATDSLALANAQRNLEKAFQNYYRGRASYPKLKSKKSAWQSYTTNNQGHTIYLAEDGLKLPKLKSKVLVHQHRSVAGKIRSATISAKNRQEFYVSLLCEEDIPALPKTGSEIEIAYDPTGLVVTNKPIVGIPTFCQTQVLEKLKKAQRRLSCRAKSAQRRNAKLEQAKNYQKQKSQVQQLYIHKLKQKEDFTEQLSIALLRQFDCIIITKPPELRENKESKAAKTVKKSKHTTVFPSFEDNFTLSDWNRLLLKLKYKAEWYEKELVFICPTNGK

SEQ ID NO: 3794 - protein, 477 aa, unidentified
MGWGQDSAVAGRGGCLVNTVLQAYRFALDPTPTQEEALRSHCGAQRFTYNWGLAVVKANLDQRAAERSYGIADADLTAAVDWSAYSLRKHWNQIKNETAPWWAENSKEAYSSGMANLAAALSNWSTSRSRTRKGRRVGFPRFKGKRSALSCRFSTGAFGLADSDRRHVRLPRIGIVRTHESTRKLARRVDAGTARIRSATVSFRRGRWFVSFSVQVQRTSPAPVPRATAAPSVVGVDLGVKTLAVLSTGEMIENPKHLEHAQKKLRRLNRQAARRVGWDKRTGQQPSSRWLHTQDRVAKLLAYVADARRDGLHKLSTRLVRTHDVVVLEDLNVAGMLRTRSLARHIAGVGMGEVRRQSVYKAGWQGTTVHIADRWYPSSKTCSACGEVKAKLSLKKRVFKCDCGLRMDRDLNAARNLAALVQASSPSCGATVNEPDGTPRKARTVRAAGIATGRLTPRVSQGRGREVPAQGTDFHIP

SEQ ID NO: 3795 - protein, 423 aa, unidentified
INNLCKNRRNYGDSLWRISKTYFSMQNSMKQEPCDFSHGRFRTGIIFIGITSVMSAFLQIKENFIVVGFGSIPYNIVIIISIMLSTVFGPYILPIGAVVAMVVQLLFYMFFVKKTNYKYLYYLNFKDDSLIKLLALLSPVFIGVAVNQVNSLVDTTLASTLVKGSIPALTYADRLNGFVTGTFTASIVSVMYPMLSKLSAENNQKKFTSSVKSSINMIIISMIPISVASIFFATPVVRIIFERGAFDARATQMTATALIFYAVGMTAFGLRDILGKVFYSLQDTKTPMVNGIISVGVNIVLDLVLIKPMAHGGLALATSSSSIACILLLFLNLKRKVGYFGQDKIIKATLKSVVASLIMGVLSYFTYKFIFGILGVGTFNEFVSLAISVIVGGGIYTLLMIIFKVEEVDMILNIAKRKLHLKK

SEQ ID NO: 3796 - protein, 414 aa, unidentified
NYGDSLWRISKTYFSMQNSMKQEPCDFSHGRFRTGIIFIGITSVMSAFLQIKENFIVVGFGSIPYNIVIIISIMLSTIFGPYILPIGAVVAMVVQLLFYMFFVKKTNYKYLYYLNFKDDSLIKLLALLSPVFIGVAVNQVNSLVDTTLASTLVKGSIPALTYADRLNGFVTGTFTASIVSVMYPMLSKLSAENNQKKFTSSVKSSINMIIISMIPISVASIFFATPVVRIIFERGAFDARATQMTATALIFYAVGMTAFGLRDILGKVFYSLQDTKTPMVNGIISVGVNIVLDLVLIKPMAHGGLALATSSSSIACILLLFLNLKRKVGYFGQDKIIKATLKSVVASLIMGVLSYFTYKFIFGILGVGTFNEFVSLAISVIVGGGIYTLLMTIFKVEEVDMILNIAKRKLHLKK

SEQ ID NO: 3797 - protein, 414 aa, unidentified
NYGDSLWRISKTYFSMQNSMKQEPCDFSHGRFRTGIIFIGITSVMSAFLQIKENFIVVGFGSIPYNIVIIISIMLSTVFGPYILPIGAVVAMVVQLLFYMFFVKKTNYKYLYYLNFKDDSLIKLLALLSPVFIGVAVNQVNSLVDTTLASTLVKGSIPALTYADRLNGFVTGTFTASIVSVMYPMLSKLSAENNQKKFTSSVKSSINMIIISMIPISVASIFFATPVVRIIFERGAFDARATQMTATALIFYAVGMTAFGLRDILGKVFYSLQDTKTPMVNGIISVGVNIVLDLVLIKPMAHGGLALATSSSSIACILLLFLNLKRKVGYFGQDKIIKATLKSVVASLIMGVLSYFTYKFIFGILGVGTFNEFVSLAISVIVGGGIYTLLMIIFKVEEVDMILNIAKRKLHLKK

SEQ ID NO: 3798 - protein, 367 aa, unidentified
MNKAYKFRIYPDKKQEELLAKTFGCCRFLYNLMLDEKIKEYQATGKMKKTTPAAYKKEYPWLKEVDSLALANVQLHLEKAYKNFFENPATGFPKFKSRHRSRQSYTTNVVNGNIRLENGKLRLPKLKEVRIRVYREIPQEYRLKSVTVSREPSGKYYASLLCSYEFCENQAESIKRTDPVVLGIDYAMSGMAVFSDGTRCTYPGYFRKSAAHLAREQRKLSRCQKGSRNYEKQRKKVAICHEKIRNQRKDFHHKLSHKLAERYDAIAVEDLNMKAMSQCLHLGKGIMDNGYGMFRDMLSYKLEERGKKLIRVDQYYPSSKTCSRCGKTKKELSLSERIYDCECGNHMDRDVNAAINIREEGKRMMSA

SEQ ID NO: 3799 - protein, 413 aa, unidentified
YGDSLWRISKTYFSMQNSMKQEPCDFSHGRFRTGIIFIGITSVMSAFLQIKENFIVVGFGSIPYNIVIIISIMLSTIFGPYILPIGAVVAMVVQLLFYMFFVKKTNYKYLYYLNFKDDSLIKLLALLSPVFIGVAVNQVNSLVDTTLASTLVKGSIPALTYADRLNGFVTGTFTASIVSVMYPMLSKLSAENNQKKFTSSVKSSINMIIISMIPISVASIFFATPVVRIIFERGAFDARATQMTATALIFYAVGMTAFGLRDILGKVFYSLQDTKTPMVNGIISVGVNIVLDLVLIKPMAHGGLALATSSSSIACILLLFLNLKRKVGYFGQDKIIKATLKSVVASLIMGVLSYFTYKFIFGILGVGTFNEFVSLAISVIVGGGIYTLLMTIFKVEEVDMILNIAKRKLHLKK

SEQ ID NO: 3800 - protein, 419 aa, unidentified
CKNRRNYGDSLWRISKTYFSMQNSMKQEPCDFSHGRFRTGIIFIGITSVMSAFLQIKENFIVVGFGSIPYNIVIIISIMLSTIFGPYILPIGAVVAMVVQLLFYMFFVKKTNYKYLYYLNFKDDSLIKLLALLSPVFIGVAVNQVNSLVDTTLASTLVKGSIPALTYADRLNGFVTGTFTASIVSVMYPMLSKLSAENNQKKFTSSVKSSINMIIISMIPISVASIFFATPVVRIIFERGAFDARATQMTATALIFYAVGMTAFGLRDILGKVFYSLQDTKTPMVNGIISVGVNIVLDLVLIKPMAHGGLALATSSSSIACILLLFLNLKRKVGYFGQDKIIKATLKSVVASLIMGVLSYFTYKFIFGILGVGTFNEFVSLAISVIVGGGIYTLLMTIFKVEEVDMILNIAKRKLHLKK

SEQ ID NO: 3801 - protein, 419 aa, unidentified
CKNRRNYGDSLWRISKTYFSMQNSMKQEPCDFSHGRFRTGIIFIGITSVMSAFLQIKENFIVVGFGSIPYNIVIIISIMLSTIFGPYILPIGAVVAMVVQLLFYMFFVKKTNYKYLYYLNFKDDSLIKLLALLSPVFIGVAVNQVNSLVDTTLASTLVKGSIPALTYADRLNGFVTGTFTASIVSVMYPMLSKLSAENNQKKFTSSVKSSINMIIISMIPISVASIFFATPVVRIIFERGAFDARATQMTATALIFYAVGMTAFGLRDILGKVFYSLQDTKTPMVNGIISVGVNIVLDLVLIKPMAHGGLALATSSSSIACILLLFLNLKRKVGYFGQDKIIKATLKSVVASLIMGVLSYFTYKFIFGILGVGTFNEFVSLAISVIVGGGIYTLLMIIFKVEEVDMILNIAKRKLHLKK

SEQ ID NO: 3802 - protein, 425 aa, unidentified
FKINNLCKNRRNYGDSLWRISKTYFSMQNSMKQEPCDFSHGRFRTGIIFIGITSVMSAFLQIKENFIVVGFGSIPYNIVIIISIMLSTIFGPYILPIGAVVAMVVQLLFYMFFVKKTNYKYLYYLNFKDDSLIKLLALLSPVFIGVAVNQVNSLVDTTLASTLVKGSIPALTYADRLNGFVTGTFTASIVSVMYPMLSKLSAENNQKKFTSSVKSSINMIIISMIPISVASIFFATPVVRIIFERGAFDARATQMTATALIFYAVGMTAFGLRDILGKVFYSLQDTKTPMVNGIISVGVNIVLDLVLIKPMAHGGLALATSSSSIACILLLFLNLKRKVGYFGQDKIIKATLKSVVASLIMGVLSYFTYKFIFGILGVGTFNEFVSLAISVIVGGGIYTLLMIIFKVEEVDMILNIAKRKLHLKK

SEQ ID NO: 3803 - protein, 419 aa, unidentified
CKNRRNYGDSLWRISKTYVSMQNSMKQEPCDFSHGRFRTGIIFIGITSVMSAFLQIKENFIVVGFGSIPYNIVIIISIMLSTIFGPYILPIGAVVAMVVQLLFYMFFVKKTNYKYLYYLNFKDDSLIKLLALLSPVFIGVAVNQVNSLVDTTLASTLVKGSIPALTYADRLNGFVTGTFTASIVSVMYPMLSKLSAENNQKKFTSSVKSSINMIIISMIPISVASIFFATPVVRIIFERGAFDARATQMTATALIFYAVGMTAFGLRDILGKVFYSLQDTKTPMVNGIISVGVNIVLDLVLIKPMAHGGLALATSSSSIACILLLFLNLKRKVGYFGQDKIIKATLKSVVASLIMGVLSYFTYKFIFGILGVGTFNEFVSLAISVIVGGGIYTLLMIIFKVEEVDMILNIAKRKLHLKK

SEQ ID NO: 3804 - protein, 420 aa, unidentified
LCKNRRNYGDSLWRISKTYFSMQNSMKQEPCDFSHGRFRTGIIFIGITSVMSAFLQIKENFIVVGFGSIPYNIVIIISIMLSTIFGPYILPIGAVVAMVVQLLFYMFFVKKTNYKYLYYLNFKDDSLIKLLALLSPVFIGVAVNQVNSLVDTTLASTLVKGSIPALTYADRLNGFVTGTFTASIVSVMYPMLSKLSAENNQKKFTSSVKSSINMIIISMIPISVASIFFATPVVRIIFERGAFDARATQMTATALIFYAVGMTAFGLRDILGKVFYSLQDTKTPMVNGIISVGVNIVLDLVLIKPMAHGGLALATSSSSIACILLLFLNLKRKVGYFGQDKIIKATLKSVVASLIMGVLSYFTYKFIFGILGVGTFNEFVSLAISVIVGGGIYTLLMTIFKVEEVDMILNIAKRKLHLKK

SEQ ID NO: 3805 - protein, 465 aa, unidentified
MADRERLGVVQAYRFALDLTPRQERVVLAHAGAARVAHNWALARVKAVMAQRAAERTYGIDEVDLTPTQGWSLPALRRAWNQAKSDVAPWWAECSKEAFNTGLDALARGLKNWSDSRTGKRAGRRVGFPRFKSRRRSTPSVRFTTGAIRVEPDRKHVVLPRLGRLKLHESARKLARRLEAGTARILSATLRRDGGRWYVAFTCAVQRAQGVPAGPDATVGVDLGVSHLAVLSTGEVEPNPRHLDAAARRMRRLARRVSRRVGPDRRTGRRGSKRWERAHARLGRAHARVADLRRDGLHKLTTRLAREYGTLVVEDLNVAGMLANRRLARSVADAGFAELRRQLAYKTGWNGGRLVVADRWYPSSKTCSGCGVVKTKLALSERTYTCTTCGLVLDRDVNAARNLAALAVTVAGSGSETRNGRGADRKTPLAGPVAVKRQPGTATAGNTGTVPPQGRTSNHVHTHAS

SEQ ID NO: 3806 - protein, 465 aa, unidentified
MAGRERLGVVQAYRFALDLTPRQERAVLAHAGAARVAHNWALARVKAVMDQRAVERTYGTPDEQLTPTIGWSLPALRRAWNAAKADVAPWWTECSKEAFNTGLDALARGLKNWSDSRTGKRAGHPVGFPRFKSRRRSTPSVRFTTGAIRVEPDRRHVVLPRLGRLKLHESARKLARRLEAGTARIVSATVRRDGGRWYVAFCVDVDRAARTPNQPEVVVGVDLGVKHLAVLSTGEVEPNPRHLHTAARRMRRLARRASRRVGPDRRTGRRGSRRWERASVRLGRAHARVAHLRRDGLHKLTTRLAREYGTVVVEDLNVAGMLANRRLARHIADAGFAELRRQLAYKTSWGGGRLVVADRWYPSSKTCSGCGTVKTKLALSERTYTCTTCGLVLDRDVNAARNLAALAVTVAGSGPETRNGRGADRKTPLAGLVAVKRQPGTAKAGNTGTVPPQGRTSNHELTHAS

SEQ ID NO: 3807 - protein, 425 aa, unidentified
FKINNLCKNRRNYGDSLWRISKTYFSMQNSMKQEPCDFSHGRFRTGIIFIGITSVMSAFLQIKENFIVVGFGSIPYNIVIIISIMLSTIFGPYILPIGAVVAMVVQLLFYMFFVKKTNYKYLYYLNFKDDSLIKLLALLSPVFIGVAVNQVNSLVDTTLASTLVKGSIPALTYADRLNGFVTGTFTASIVSVMYPMLSKLSAENNQKKFTSSVKSSINMIIISMIPISVASIFFATPVVRIIFERGAFDARATQMTATALIFYAVGMTAFGLRDILGKVFYSLQDTKTPMVNGIISVGVNIVLDLVLIKPMAHGGLALATSSSSIACILLLFLNLKRKVGYFGQDKIIKATLKSVVASLIMGVLSYFTYKFIFGILGVGTFNEFVSLAISVIVGGGIYTLLMTIFKVEEVDMILNIAKRKLHLKK

SEQ ID NO: 3808 - protein, 423 aa, unidentified
INNVCKNRRNYGDSLWRISKTYFSMQNSMKQEPCDFSHGRFRTGIIFIGITSVMSAFLQIKENFIVVGFGSIPYNIVIIISIMLSTVFGPYILPIGAVVAMVVQLLFYMFFVKKTNYKYLYYLNFKDDSLIKLLALLSPVFIGVAVNQVNSLVDTTLASTLVKGSIPALTYADRLNGFVTGTFTASIVSVMYPMLSKLSAENNQKKFTSSVKSSINMIIISMIPISVASIFFATPVVRIIFERGAFDARATQMTATALIFYAVGMTAFGLRDILGKVFYSLQDTKTPMVNGIISVGVNIVLDLVLIKPMAHGGLALATSSSSIACILLLFLNLKRKVGYFGQDKIIKATLKSVVASLIMGVLSYFTYKFIFGILGVGTFNEFVSLAISVIVGGGIYTLLMTIFKVEEVDMILNIAKRKLHLKK

SEQ ID NO: 3809 - protein, 418 aa, unidentified
KNRRNYGDSLWRISKTYFSMQNSMKQEPCDFSHGRFRTGIIFIGITSVMSAFLQIKENFIVVGFGSIPYNIVIIISIMLSTVFGPYILPIGAVVAMVVQLLFYMFFVKKTNYKYLYYLNFKDDSLIKLLALLSPVFIGVAVNQVNSLVDTTLASTLVKGSIPALTYADRLNGFVTGTFTASIVSVMYPMLSKLSAENNQKKFTSSVKSSINMIIISMIPISVASIFFATPVVRIIFERGAFDARATQMTATALIFYAVGMTAFGLRDILGKVFYSLQDTKTPMVNGIISVGVNIVLDLVLIKPMAHGGLALATSSSSIACILLLFLNLKRKVGYFGQDKIIKATLKSVVASLIMGVLSYFTYKFIFGILGVGTFNEFVSLAISVIVGGGIYTLLMIIFKVEEVDMILNIAKRKLHLKK

SEQ ID NO: 3810 - protein, 418 aa, unidentified
KNRRNYGDSLWRISKTYFSMQNSMKQEPCDFSHGRFRTGIIFIGITSVMSAFLQIKENFIVVGFGSIPYNIVIIISIMLSTIFGPYILPIGAVVAMVVQLLFYMFFVKKTNYKYLYYLNFKDDSLIKLLALLSPVFIGVAVNQVNSLVDTTLASTLVKGSIPALTYADRLNGFVTGTFTASIVSVMYPMLSKLSAENNQKKFTSSVKSSINMIIISMIPISVASIFFATPVVRIIFERGAFDARATQMTATALIFYAVGMTAFGLRDILGKVFYSLQDTKTPMVNGIISVGVNIVLDLVLIKPMAHGGLALATSSSSIACILLLFLNLKRKVGYFGQDKIIKATLKSVVASLIMGVLSYFTYKFIFGILGVGTFNEFVSLAISVIVGGGIYTLLMIIFKVEEVDMILNIAKRKLHLKK

SEQ ID NO: 3811 - protein, 419 aa, unidentified
CKNRRNYGDSLWRISKTYFSMQNSMKQEPCDFSHGRFRTGIIFIGITSVMSAFLQIKENFIVVGFGSIPYNIVIIISIMLSTVFGPYILPIGAVVAMVVQLLFYMFFVKKTNYKYLYYLNFKDDSLIKLLALLSPVFIGVAVNQVNSLVDTTLASTLVKGSIPALTYADRLNGFVTGTFTASIVSVMYPMLSKLSAENNQKKFTSSVKSSINMIIISMIPISVASIFFATPVVRIIFERGAFDARATQMTATALIFYAVGMTAFGLRDILGKVFYSLQDTKTPMVNGIISVGVNIVLDLVLIKPMAHGGLALATSSSSIACILLLFLNLKRKVGYFGQDKIIKATLKSVVASLIMGVLSYFTYKFIFGILGLGTFNEFVSLAISVIVGGGIYTLLMTIFKVEEVDMILNIAKRKLHLKK

SEQ ID NO: 3812 - protein, 412 aa, unidentified
GDSLWRISKTYFSMQNSMKQEPCDFSHGRFRTGIIFIGITSVMSAFLQIKENFIVVGFGSIPYNIVIIISIMLSTVFGPYILPIGAVVAMVVQLLFYMFFVKKTNYKYLYYLNFKDDSLIKLLALLSPVFIGVAVNQVNSLVDTTLASTLVKGSIPALTYADRLNGFVTGTFTASIVSVMYPMLSKLSAENNQKKFTSSVKSSINMIIISMIPISVASIFFATPVVRIIFERGAFDARATQMTATALIFYAVGMTAFGLRDILGKVFYSLQDTKTPMVNGIISVGVNIVLDLVLIKPMAHGGLALATSSSSIACILLLFLNLKRKVGYFGQDKIIKATLKSVVASLIMGVLSYFTYKFIFGILGVGTFNEFVSLAISVIVGGGIYTLLMTIFKVEEVDMILNIAKRKLHLKK

SEQ ID NO: 3813 - protein, 287 aa, unidentified
MIAVKKAYKFRMYPNKKQQELINKTFGCCRFVYNKYLAKRIDVYKSDKETFTYKQCSSDLTNLKKELKWLKEPDKFSLQNALKDLDNAYKKFFKEKAGFPKFKSKKINRFSYKTNFTNGNIMYCGQYIKLPKLGMVKIRDKQVPQGRILNATISKEPSGRYYVSLCCTDVDIEVFENTNNHIGLDLGIKEFCISSCGDFIENPKYLKKSLNKLAKLQRELSRKTIGSLNRNKARLKVARLQEHIANQRKDFLQKLSTKLIKENDIICIEDLQVKNMIRNRKLSRLIS

SEQ ID NO: 3814 - protein, 424 aa, unidentified
KINNLCKNRRNYGDSLWRISKTYFSMQNSMKQEPCDFSHGRFRTGIIFIGITSVMSAFLQIKENFIVVGFGSIPYNIVIIISIMLSTIFGPYILPIGAVVAMVVQLLFYMFFVKKTNYKYLYYLNFKDDSLIKLLALLSPVFIGVAVNQVNSLVDTTLASTLVKGSIPALTYADRLNGFVTGTFTASIVSVMYPMLSKLSAENNQKKFTSSVKSSINMIIISMIPISVASIFFATPVVRIIFERGAFDARATQMTATALIFYAVGMTAFGLRDILGKVFYSLQDTKTPMVNGIISVVVNIVLDLVLIKPMAHGGLALATSSSSIACILLLFLNLKRKVGYFGQDKIIKATLKSVVASLIMGVLSYFTYKFIFGILGVGTFNEFVSLAISVIVGGGIYTLLMIIFKVEEVDMILNIAKRKLHLKK

SEQ ID NO: 3815 - protein, 423 aa, unidentified
INNLCKNRRNYGDSLWRISKTYFSMQNSMKQEPCDFSHGRFRTGIIFIGITSVMSAFLQIKENFIVVGFGSIPYNIVIIISIMLSTIFGPYILPIGAVVAMVVQLLFYMFFVKKTNYKYLYYLNFKDDSLIKLLALLSPVFIGVAVNQVNSLVDTTLASTLVKGSIPALTYADRLNGFVTGTFTASIVSVMYPMLSKLSAENNQKKFTSSVKSSINMIIISMIPISVASIFFATPVVRIIFERGAFDARATQMTATALIFYAVGMTAFGLRDILGKVFYSLQDTKTPMVNGIISVGVNIVLDLVLIKPMAHGGLALATSSSSIACILLLFLNLKRKVGYFGQDKIIKATLKSVVASLIMGVLSYFTYKFIFGILGVGTFNEFVSLAISVIVGGGIYTLLMTIFKVEEVDMILNIAKRKLHLKK

SEQ ID NO: 3816 - protein, 418 aa, unidentified
KNRRNYGDSLWRISKTYFSMQNSMKQEPCDFSHGRFRTGIIFIGITSVMSAFLQIKENFIVVGFGSIPYNIVIIISIMLSTIFGPYILPIGAVVAMVVQLLFYMFFVKKTNYKYLYYLNFKDDSLIKLLALLSPVFIGVAVNQVNSLVDTTLASTLVKGSIPALTYADRLNGFVTGTFTASIVSVMYPMLSKLSAENNQKKFTSSVKSSINMIIISMIPISVASIFFATPVVRIIFERGAFDARATQMTATALIFYAVGMTAFGLRDILGKVFYSLQDTKTPMVNGIISVVVNIVLDLVLIKPMAHGGLALATSSSSIACILLLFLNLKRKVGYFGQDKIIKATLKSVVASLIMGVLSYFTYKFIFGILGVGTFNEFVSLAISVIVGGGIYTLLMIIFKVEEVDMILNIAKRKLHLKK

SEQ ID NO: 3817 - protein, 426 aa, unidentified
RFKINNVCKNRRNYGDSLWRISKTYVSMQNSMKQEPCDFSHGRFRTGIIFIGITSVMSAFLQIKENFIVVGFGSIPYNIVIIISIMLSTIFGPYILPIGAVVAMVVQLLFYMFFVKKTNYKYLYYLNFKDDSLIKLLALLSPVFIGVAVNQVNSLVDTTLASTLVKGSIPALTYADRLNGFVTGTFTASIVSVMYPMLSKLSAENNQKKFTSSVKSSINMIIISMIPISVASIFFATPVVRIIFERGAFDARATQMTATALIFYAVGMTAFGLRDILGKVFYSLQDTKTPMVNGIISVGVNIVLDLVLIKPMAHGGLALATSSSSIACILLLFLNLKRKVGYFGQDKIIKATLKSVVASLIMGVLSYFTYKFIFGILGVGTFNEFVSLAISVIVGGGIYTLLMIIFKVEEVDMILNIAKRKLHLKK

SEQ ID NO: 3818 - protein, 367 aa, unidentified
MLKAYKYRIYPNNEQKIQIAKTFGCCRFVYNQTLVYRKEVYEKEKKSVSKTDCNNYCNRQLKKEYEWLKEVDKFALTNAIYNMDAAYQKFFKEHAGYPKFKSKHDNHKSYTTNFTNGNITVDFGCNRVKLPKLKGIKAKLHRNFSGQIKSATISQVPSGKYYVSILVETEHTELPHTNQNTGIDLGIKELCITSDGKKYENPKIIRKYEKKLVKLQRQLAHKEKRSQNYYKTKKKIALCHEKITNTRKDYLHKMSHEIISENQVIVSEDLQIKNMVKNHHLAKSISDVSWHELTRQLEYKAKWNGRKYVKIDTFYASSQLCSVCGYQNTETKNLSVRKWICPVCGTNHDRDINAAKNILEEGLRQIA

SEQ ID NO: 3819 - protein, 456 aa, unidentified
MQAYRFALDLSPGQERAVLAHAGAARVAFNWALARVKAVMDQRAAERTYGISDDQLTESISWTLPGLRKAWNAAKGHVAPWWAECSKEAFNTGLDALARALKNWSESRSGKRTGRSVGFPRFKSRRRSTPSVRFTTGTIRVEPGRKHVVLPRLGRLKLHESSRKLARRLEAGTARIMSATLRRDGRRWHVAFTVQVERADRAPARPGSVVGVDVGITHLAVLSTGEVIPNPRHLSMTQNRLRRLGRALSRKTGPDRRSGQRPSQRWQRAAARLGRAHACVSNLRRDGLHKLTTRLAAMHGTVVVEDLNVAGMLANRRLARHIADAGFAEFRRQLEYRTAWNGGQLVIADRWYPSSKTCSGCGAVKAKLALAERSYTCQACGFILDRDANAARNLAALAAEYDTAGSGSVAARGADQKTRPRGRVAVKREPGTAPAGQTGTVPPQGGTTNHVHAKAH

SEQ ID NO: 3820 - protein, 439 aa, unidentified
MLAHAGAARVAHNWALARVKAVMDQRAAERSYGVPDEQLTPSLSWSLAGLRKAWNAAKPQVAPWWGEVSKEAFNTGLDALARGLKNWAGSRKGTRAGRPVGFPRFKSRRRTTPSVRFTTGAIRVEPDQIHVVLPRLGRLKLHESARKLARRLDNDTARIMSATVRRDGGRWHVSFTVEVERAERTPARPGSVVGVDVGIKHLAVLSTGELVDNPRHLVAAQRRMRALGRALSRKTGPDRRTGRRASKRWERSAARLGRAHARVASLRRDGLHKLTTRLAAEHGTVVVEDLNVTGMLANRKLARHIADAGFAEIRRQLAYKTSWNGGRLLVADRWYPSSKTCSACGTVKTKLAQHEREYQCAACGLVIDRDRNAALNLAALAAEFDTAGSGPVAARGADQKTRASGQVAVKREPGTAPAGQTGTVLPQGRTTNRVLTKAH

SEQ ID NO: 3821 - protein, 455 aa, unidentified
MQAFRYALDVTPSQERRLLRHAGAARAAYNWGLAHVRANLAQREAERTYGLPEDALTPATSWSMYALRKEWNKAKHRVAPWWAECSKEAYASGLTQLAAALANWSRSRHGDRAGRRVEFPRFKAKRRAVPSVRFTTGAIRLEDGRHHVTLPVVGTLRTHESTRKLHRRIAAGTGRILSATVRRETGRWFVSFTCEVDRAVRVPARPAAIIGVDLGVKKLAVFSDDRPDVENTRRLKKSARRLRIASRRASRRQGPDRRAGRAPSARWRRADASRARLHRRTAFQRKDAIHKLTTSLAREYGVIVIEDLNVAGMLRNRRLSAALSDAAFGEIRRQLAYKTAWNGGRLIIADRWYPSSKTCSACGVVKPKLPLHIRTFTCDSCGLVLDRDRNAALNLAALAKHVIAGSGPEMENGRGAAVRPGRAGQVAEKRQSRTGRRRIRRESSPDNGRIADIEK

SEQ ID NO: 3822 - protein, 471 aa, unidentified
MVTVLGVAHRERLGVVQAYRFALDLTPRQERAVLAHAGAARVAHNWALARVKAVMDQRAAERTYGIDEVDLTPTQGWSLPALRRAWNQAKSDVAPWWAECSKEAFNTGLDALARGLKNWSDSRTGKRAGRRVGFPRFKSRRRSTPSVRFTTGAIRVEPDRRHVVLPRLGRLKLHESARKLARRLEAGTARIVSATVRRDGGRWYVAFCVDVDRAARTPHQPQLVVGVDLGVKHLAVLSTGELEPNPRYLDAAARRMRRLARRVCRRVGPDRRTGRRASKRWERARARLGRAHARVAHLRRDGLHKLTTRLAREYGTIVVEDLNVAGMLANRRLARRIADAGFAELRRHLAYKAGWNGGRLVVADRWYPSSKTCSGCGAVKTKLALSERTYTCTTCGLVLDRDVNAARNLAALAAAVAGSGSETRNGRGADRKTPLAGLVAVKRQPGTAKAGNTGTVPPQGRTSDHELTYAS

SEQ ID NO: 3823 - protein, 448 aa, unidentified
MQAYRFALDLTPSQERAVLAHAGAARVAHNWALARVKAVMDQRAAERSYGVADADLTPAVGWSLPALRKAWNRAKVDVAPWWAECSKEAFNTGLDALARALKNWADSRAGKRAGRPVGFPRFKSRRRSTPSVRFTTGAIRVEADRKHVVLPRLGRLKTHESTRKLARRVEAGAARILSATVRRDGGRWYVSFTCEVQRADRVPTRPFSTVGVDVGVTHLAVLSTGELVPNPRHLDTAGRRMRRLARRMSRRVGPDRRTGQRPSNRWERARRQMTRAHARVANLRRDGLHKLTTRLARQYGTVVVEDLNVAGMLRNRRLARRIADAGFAELRRQLAYKTGWNGGRFVVADRWYPSSKTCSGCGAVKTKLALSERTYTCTSCGLVLDRDLNAARNLAALAAEVDTAGSGPAAGRGADRKTRHGGPVAVKRQPGPAKTGKAGTAPPQGRAA

SEQ ID NO: 3824 - protein, 387 aa, unidentified
MFAIIIYMNRAVKYRAYPTTKQSVMFAKTFGCCRKVYNLMLSDKIESYKSIGKFVTVTPAKYKKDYPYLKEVDSLALANVQLNLQSAFKNRFSKSRKKNNGFPKFKSAKRSRKSYTTNNQHGTVAITDNSIRLPKIGNVKTVIHRKPDDNWMVKSATVSQESDGKFYISVLFEIADSINTYVADTNNCIGLDYASDGLYVDNNGNVGINHKYYRESHDKLAKAQRRLSRMQGSKKHEIKSNNYIKQLRKVNKIHRHIANQRLDNLHKISTEIANQYDVVCVESLNMKSMSNKGFGNGKATLDNGYGMFLSMLEYKLSERNKYLVKVDKWFPSSQICHCCGKIHPEMKNLTIRTMKCDCGLTISRDQNAAINILNEGLRILNDSFEVA

SEQ ID NO: 3825 - protein, 465 aa, unidentified
MEHRDRRSVTQAYRFALDLTSAQQRAVLAHAGAARVAHNWALARVKAVMDQRAAERTYGIGEADLTRTQGWSLPALRRAWNAAKGDVAPWWTGCSKEAFNTGLDALARALKNWSDSRLSKRAGRPVGFPRFKSRRRSTPSVRFTTGAIRVEPDRKHVVLPRLGRLKLHESARKLARRLEAGTARVVSATVRRDGGRWYVSFTCAVERVGRMPARPGATVGVDLGVKYLAVLSTGELQPNPRYLDAAARRLRRLGRHASRRIGPDRRTGRRASKRWERARAQLGRAHARVANLRRDGLHKLTTRLAREYGTIVVEDLNVSGMLRNRRLARHIADAGFAELRRQLAYKTSWNGGRLAVADRWYPSSKTCSGCGAVKTKLALSERTYTCTICGLVLDRDANAARNLAALAVTVAGSGPETRNGRGADRKTPLAVPVAVKRQPGTATAGKTGTVPPQGRTSNHVLTYAT

SEQ ID NO: 3826 - protein, 465 aa, unidentified
MAHRERVSVVQAYRFALDLTPRQERVVLAHAGAARLAHNWALARVKAVMDQRAAERTYGIDEADLTPTQGWPLPALRRAWNQAKPVVAPWWRDYSKEAFNTGLDALARALKNWSDSRSGKRAGRPVGFPRFKSRRRSTPSVRFTTGAIRVEPDRKHVLLPRLGRLKLHESARKLARRLDAGTARILSATVRRDGGRWHVAFCVEVDRAARTPHQPQAVVGVDLGVRHLAVLSTGEVEPNPRHLDVAGRRLRRLARRMSRRVGPDRRTGRRASKRWERAQAALGRAHARVANLRRDGLHKLTTRLARACGTIVVEDLNVAGMLRNRRLARCIADAGFAELRRQLGYKTAWNGGRLVVADRWYPSSKTCSGCGAVKTKLALSERTYTCTLCGLVLDRDVNAARNLAALAVTVAGSGPETRNGRGADRKTPLAGPVTVKRQPGTATAGKTGTVPPQGRTSDHMLTKAS

SEQ ID NO: 3827 - protein, 465 aa, unidentified
MADRVRLSVVQAYRFALDLTPRQERAVLAHAGAARVAHNWTLARVKAVMDQRAAERTYGIDEADLTPTQGWSLPALRKSWNAAKSDVAPWWAECSKEAYNTGLDALARALKNWSDSRSGKRAGRPVGFPRFKSRRRSTPSVRFTTGAIRVEPDRKHVVLPRLGRLKLHESARKLARRLDAGTARILSATVRRDGGRWFVAFCVEVDRAARTPNQPQVVVGVDLGVRHLAVLSTGEVEPNPRHLDAAGRRLRRLARRASRRVGPDRRTGRRASKRWERARAQLGRAHARVANLRRDGLHKLTTRLAREFGTIVVEDLNVAGMLRNRRLARCIADAGFAELRRQLAYKTGWNGGRLVVADRWYPSSKTCSGCGAVKTKLALFERTYTCAMCGLVLDRDVNAARNLAALAVTVAGSGSETRNGRGADRKTRPGGPVAVKRQPGTAKAGKTGTVPPQGRTSNHVPAYAS

SEQ ID NO: 3828 - protein, 468 aa, unidentified
MMQAYRYALDLTPRQERAVLAHAGAARVAHNWALARVKAVMDQRAAERSYGVPDELLTPAIGWTLPALRKAWNASKDEVAPWWRECSKEAFNTGLDALARALKNWGDSRKGARKGRLVGFPRFKSRRRSAPTVRFTTGVIRVEADRRHITLPRLGALRLHESARKLARRVEAGSARILSATLRREGRRWFVSLTCDMQRATCIPARAGSVVGVDLGVKHLAVLSTGEQIPNPHHLVAASRRMRRLARAVTRCVTPDRRVHRAGSKRWVRAQDALARTNARVANLRRNGLHQLTTRLTREHGTVVVEDLNVAGMLRNRLLARHIADAGFGELRRQLAYKTEWNGGRLVTADRWYPSSKTCSGCGAVKTKLALSERTYACTACGLILDRDLNAALNLTALAREVADARSGRESSNGRGADRKTLLAGLVAAKRLPGTAKAGQTGTVPPQGGTTNRVLSKAHGTVTVGGRP

SEQ ID NO: 3829 - protein, 461 aa, unidentified
MTLTVIHAYRFALDPTPRQVGALVRHCGAARVAFNWGLALVKANLAQRAAERSYAITEEALTPPVSWSMYSLRKRWNTVKAEVAPWWAECSKEAYATGFDQLAHALRTWSDSKRGKRRGPRVGFPRFKSKRKANSSCRFTTGAIRLEPDRKHVTLPMLGTIKTHESTRKLHRRITDGTARIISARVRREAGRWFCSFTVEVQRSVSAPRRPKTVIGVDLGVKTLAVFSDGRAPVENPRHYDTARRRLARLSRTVSRRHGPDRRTGTRPSKRWERANLRRNRVHHRIGNLRRDAIHKLTTSLAREYGIVVVEDLNVAGMVGNRRLARALADAGFGEIRRQLVYKTIWHGGCLTVADRWFPSSKTCSGCQAVKPKLPLRVRTYLCEHCGLVLDRDVNAARNLAALVKRHVAGSGPETRNGCGADRQTKPGLAGGCEASTPLRAVPAWARRGPSPSNGRIMESH

SEQ ID NO: 3830 - protein, 417 aa, unidentified
MLRHAGAARVAFNWGIAQVKANLGQREAERSYGIAEAGLTPSFGWSMYSLRKAWNAAKREVAPWWAECSKEAYATGLDQLARALKNWSDSRRGKRKGPRMGFPRYKSKRKTTPSVRFTTGTIRLEDDRRHVTLPVLGTIRAHESTRKLHRRIAAGTAVVKSATVRREAGRWFVSFTCEVERTDRTPSRADTVIGVDLGIKHLAVFSDGRPTAENPRHYDSARRKLGRLSRTVARRLGPDRRTGQQPSKRWQRADAARNRVHYRTANLRRDALHKLTTSLAREYGTIVVEDLNVSGMLRNRRLARVVADAGFGEIRRQLAYKTRWNGGTLEVADRWFPSSKTCSECQAVTPKLPLRIRMYACEHCGLVLDRDENAALNLAALVKRHVAGSGPETENGRGADRKTPSCGAGGIEASTPH

SEQ ID NO: 3831 - protein, 367 aa, unidentified
MLKAYKYRIYPNNEQKIQIAKTFGCCRFVYNQTLAYRKEVYEKEKKSVSKTDCNNYCNRQLKKEYEWLKEVDKFALTNAIYNMDAAYQKFFKEHAGYPKFKSKHDNHKSYTTNFTNGNIAVDFEGNRVKLPKIKNVKAKLHRNFSGQIKSATISQIPSGKYYVSILVETEHVELPHVNQNTGIDLGIKELCITSAGKKYENPKIIRKYEKKLIKLQRQLAHKEKRSQNYYKTKKKIALCHEKITNTRKDYLHKMSHEIISENQVIVSEDLQIKNMVKNHRLAKFISDVSWYELTRQLEYKAKWNGRKYVKIDTFYASSQLCSVCGYQNTETKNLSVREWTCPVCGTNHDRDINAAKNILEEGLRQIA

SEQ ID NO: 3832 - protein, 368 aa, unidentified
MNIAYRFRIYPNREQEVLLAKTFGCCRFLYNQMLNDKIREYEATKKMLRNTPAMYKKTYPFMKEVDSLALANVQMHLEKAYKNFFRNPKIGFPKFKSKHRSRKSYTTNVVNGNIQVEDHRIKLPKLKWIRMKKHREIAEKYCLKSVTISMEPSGKYYASLLYEKSDCENQAEEFDYEDAKILGIDYAMHGMAVFSEGIQKENEGYFRKSEERLAREQRKLSHCVKGSNNYYRQKKRVALCHEKIRNQRKDFLHKLSYEMAEAYDVVAVEDIDMKAMSQCMHFGKSVMDNSYGKFRELLEYKLTWRGKKLVRVDRFFPSSKKCCKCGSVKKELKLSDRVYLCRCGNRIDRDLNAAINIREEARRMLIAG

SEQ ID NO: 3833 - protein, 417 aa, unidentified
NRRNYGDSLWRISKTYFSMQNSMKQEPCDFSHGRFRTGIIFIGITSVMSAFLQIKENFIVVGFGSIPYNIVIIISIMLSTVFGPYILPIGAVVAMVVQLLFYMFFVKKTNYKYLYYLNFKDDSLIKLLALLSPVFIGVAVNQVNSLVDTTLASTLVKGSIPALTYADRLNGFVTGTFTASIVSVMYPMLSKLSAENNQKKFTSSVKSSINMIIISMIPISVASIFFATPVVRIIFERGAFDARATQMTATALIFYAVGMTAFGLRDILGKVFYSLQDTKTPMVNGIISVGVNIVLDLVLIKPMAHGGLALATSSSSIACILLLFLNLKRKVGYFGQDKIIKATLKSVVASLIMGVLSYFTYKFIFGILGLGTFNEFVSLAISVIVGGGIYTLLMTIFKVEEVDMILNIAKRKLHLKK

SEQ ID NO: 3834 - protein, 425 aa, unidentified
FKINNVCKNRRNYGDSLWRISKTYFSMQNSMKQEPCDFSHGRFRTGIIFIGITSVMSAFLQIKENFIVVGFGSIPYNIVIIISIMLSTIFGPYILPIGAVVAMVVQLLFYMFFVKKTNYKYLYYLNFKDDSLIKLLALLSPVFIGVAVNQVNSLVDTTLASTLVKGSIPALTYADRLNGFVTGTFTASIVSVMYPMLSKLSAENNQKKFTSSVKSSINMIIISMIPISVASIFFATPVVRIIFERGAFDARATQMTATALIFYAVGMTAFGLRDILGKVFYSLQDTKTPMVNGIISVGVNIVLDLVLIKPMAHGGLALATSSSSIACILLLFLNLKRKVGYFGQDKIIKATLKSVVASLIMGVLSYFTYKFIFGILGVGTFNEFVSLAISVIVGGGIYTLLMTIFKVEEVDMILNIAKRKLHLKK

SEQ ID NO: 3835 - protein, 419 aa, unidentified
CKNRRNYGDSLWRISKTYFSMQNSMKQEPCDFSHGRFRTGIIFIGITSVMSAFLQIKENFIVVGFGSIPYNIVIIISIMLSTVFGPYILPIGAVVAMVVQLLFYMFFVKKTNYKYLYYLNFKDDSLIKLLALLSPVFIGVAVNQVNSLVDTTLASTLVKGSIPALTYADRLNGFVTGTFTASIVSVMYPMLSKLSAENNQKKFTSSVKSSINMIIISMIPISVASIFFATPVVRIIFERGAFDARATQMTATALIFYAVGMTAFGLRDILGKVFYSLQDTKTPMVNGIISVGVNIVLDLVLIKPMAHGGLALATSSSSIACILLLFLNLKRKVGYFGQDKIIKATLKSVVASLIMGVLSYFTYKFIFGILGVGTFNEFVSLAISVIVGGGIYTLLMTIFKVEEVDMILNIAKRKLHLKK

SEQ ID NO: 3836 - protein, 246 aa, unidentified
MIAVKKAYKFRMYPNKKQQELINKTFGCCRFVYNKYLAKRIDVYKNNKETFTYKQCSSDLTNLKKELKWLKEPDKFSLQNALKDLDNAYKKFFKEKAGFPKFKSKKINRFSYKTNFTNGNIMYCGQHIKLPKLGMVKIRDKQVPKGRILNATISKEPSGRYYVSLCCTDVDIEAFENTNNHIGLDLGIKEFCISSCGEFIENPKYLKKSLNKLAKLQRELSRKTIGSLNRNKARLKVARLQEHIAN

SEQ ID NO: 3837 - protein, 375 aa, unidentified
MLKSYKYRIYLKDEQKKQLAKTFGCTRFVYNYYLDKKIKLYEEKKETLSKIDCNNHLNRELKKEFIWLKEVDKFALTNAVYHLNTAYQNFFRRIKQGRDKTGFPKFKSKHSNQFSYTTNFTNKNIEVNFAENKIKLPKLKWVEAKVHREFDGKIKSVTVSQSPSGRHFVSILVDTRIKELPKTHKNIGVDLGIRDFLIDSNGNKISNPRNLYKYERKLTKLQRQLSKKQKGSKNRSKMGVKVARLHEKISDTRKDFLHKLSSQIINENQIVVSEDLNVSGMIKNCKLAKAISDVSWSEFTRQLEYKANWYGRDYIKIDKFFPSSQLCSDCGCKNIETKDLLVREWVCKNCGSHHDRDINASRNILQEGLRILASA

SEQ ID NO: 3838 - protein, 489 aa, unidentified
MRTPIRSPCRGEPSSERGRSGYRGTVVKTLQAYRFALDLSPRQERAVLAHAGAARVAHNWALARVKAVMSQRAAERTYGVPDELLSPPISWSLPSLRKAWNAAKDEVAPWWAECSKEAFNTGLDALARALKNWSDSRKGARKGRAVGFPRFKSRRRSTPTVRFTTGVMRIEADRGHVVLPRLGALRLHESARKLARRLEAGTARIMSATVRREGGRWFVSFTCEVERAVRAPARPGSMVGVDLGVKHLAVLSTGERVANPRHLVVAARRMRRLARAVSRCVTPDRRVRRVGSNRWARAQQELSRAHARVVGLRRDGLHQFTTRLTREHGTVVVEDLNVAGMLRNRRLARHVADASFAEVRRQLTYKSEWNGGRLVTAGRWYPSSKTCSGCGAVKTKLTLAERTYTCTACGLSLDRDLNAALNLAALAREVTDDRSGRESLNGRGADQKTRSRGQVAVKRLPGTARAGQAGTVPPQGGTTAQRSLLSTRR

SEQ ID NO: 3839 - protein, 489 aa, unidentified
MRTPIRSPCRGEPSSARGRSGYRGTVVKTLQAYRFALDLSPRQERAVLAHAGAARVAHNWALARVKAVMSQRAAERTYGVPDELLSPPISWSLPSLRKAWNAAKDEVAPWWAECSKEAFNTGLDALARALKNWSDSRKGARKGRAVGFPRFKSRRRSTPTVRFTTGVMRIEADRGHVVLPRLGALRLHESARKLARRLEAGTARIMSATVRREGGRWFVSFTCEVERAVRAPARPGSMVGVDLGVKHLAVLSTGERVANPRHLVVAARRMRRLARAVSRCVTPDRRVRRVGSNRWARAQQELSRAHARVVGLRRDGLHQFTTRLTREHGTVVVEDLNVAGMLRNRRLARHVADASFAEVRRQLTYKSEWNGGRLVTAGRWYPSSKTCSGCGAVKTKLTLAERTYTCTACGLSLDRDLNAALNLAALAREVTDDRSGRESLNGRGADQKTRSRGQVAVKRLPGTARAGQAGTVPPQGGTTAQRSLLSTRR

SEQ ID NO: 3840 - protein, 372 aa, unidentified
MIAVEKAYKFRMYPNKKQQELINKTFGCCRFVYNKYLAKRIDVYKNDKETFTYKQCSSDLTNLKKELKWLKEPDKFSLQNTLKDLENAYEKFFKEKTGFPKFKSKKTNRFSYKTNFTNGNIMYCGQHIKLPKLGMVKIRDKQVPQGRILNATISKEPSGRYYVSLCCTDVDIEAFENTNNQIGLDLGIKEFCISSCGEFIENPKYLKKSLSKLAKLQRELSRKTIGSLNRNKARLKVARLQEHIANQRNDFLQKLSTKLIKENDIICIEDLQVKNMIRNHKLSRLISDVSWSEFIRQLKYKANWHGRQIVKVGKFFASSQICNKCGYKNEEVKDLNIRDWICPSCNETHDRDINASINILKEGLRLITIQNK

SEQ ID NO: 3841 - protein, 372 aa, unidentified
MIAVEKAYKFRMYPNKKQQELINKTFGCCRFVYNKYLAKRIEVYKNDKETFTYKQCSSDLTNLKKELNWLKEPDKFSLQNALKDLDNAYEKFFKEKAGFPKFKSKKTNRFSYKTNFTNGNIMYCGQHIKLPKLGMVKIRDKQVPQGRILNATISKEPSGRYYVSLCCTDVDIEAFENTNNQIGLDLGIKEFCISSCGEFIENPKYLKKSLNKLAKLQRELSRKTIGSLNRNKARLKVARLQEHIANQRNDFLQKLSTKLIKENDIICIEDLQVKNMVRNRKLSRLISDVSWSEFIRQLKYKANWHGRQIVRVGKFFASSQICNKCGYKNEEVKDLNIRDWTCPSCNETHDRDINASINILKEGLRLITIQNK

SEQ ID NO: 3842 - protein, 465 aa, unidentified
MEHRDRRSVIQAYRFALDLTSAQQRAVLAHAGAARVAHNWALARVKAVMDQRAAERTYGIGEADLTPTQGWSLPALRRAWNAAKGDVAPWWTGCSKEAFNTGLDALARALKNWSDSRLSKRAGRPVGFPRFKSRRRSTPSVRFTTGAIRVEPDRKHVVLPRLGRLKLHESARKLARRLEAGTARVVSATVRRDGGRWYVSFTCAVERVGRMPARPGATVGVDLGVKYLAVLSTGELQPNPRYLDAAARRLRRLGRHASRRIGPDRRTGRRASKRWERARAQLGRAHARVANLRRDGLHKLTTRLAREYGTIVVEDLNVSGMLRNRRLARHIADAGFAELRRQLAYKTSWNGGRLAVADRWYPSSKTCSGCGAVKTKLALSERTYTCTICGLVLDRDANAARNLAALAVTVAGSGPETLNGRGADRKTPLAVPVAVKRQPGTATAGKTGTVPPQGRTSNHVLTYAT

SEQ ID NO: 3843 - protein, 465 aa, unidentified
MAHRERLSVVQAYRFALDLTARQERAVLAHAGAARVAHNWALARVKAVMDQRAAERSYGIDEADLTPTQGWSLPALRRAWNQAKPVVAPWWRECSKEAFNTGLDPLARALKNWSDSRSGKRAGRPVGFPRFKSRRRCTPSVRFTTGAIRVEPDRKHVVLPRLGRLKLHESARKLARRLEAATARIVSATVRREGGRWFVAFCVEVDRAARTPEQPHVVVGVDLGVKHLAVLSTGEVEPNPRHLDAAARRLRRLARRVSRRVGPDRRTGRRASRRWERARGQLGRAHARVANLRRDGLHKLTTRLAREYGTILVEDLNVVGMLRNRRLARRIADAGFAELRRQLGYKTSWNGGRLVVADRWYPSSKTCSGCGAVKAKLALSERTYTCTTCGLTLDRDVNAARNLAALAAQASAAGSGPVAGRGADRKTRRAGPVAVKRQPGTATAGKTGTVPPQGGTSDQMLTKAS

SEQ ID NO: 3844 - protein, 459 aa, unidentified
MKTIQAYRFALDLTAGQEREVLAHAGAARVAHNWALARVKAVMDQRTAERSYGVPDKLLTPSLPWSLAGLRKAWNTAKPEVAPWWGEVSKEAFNSGLDALARGLKHWTDSRNGARAGRPVRFPRFKSRRRTTPSVRFTTGAIRVEPDRMHVVLPRLGRLKLHESARKLARRLDNGTARTMSATVRRDGGRWRVSFTAEVDRAERVPARPASVVGVDVGIKNLAVLSTGELVDNPRHLAAAQQRMRALGRALSRKTGPDRRTGRRASRRWERAAARLGRVHARVANLRRDGLHKLTTRLATTHGTVVVEDLNVTGMLANRKLARRIADAGFAEIRRQLAYKTGWNGGRLLVADRWYPSSKTCSGCGTVKTKLFLAERAFTCEACGLLIDRDRNAALNLAALAADAGTAGSGPVAGRGADQKTRVRGQVAVKRQPGTTSVDQTGTVPLQGRTIDRVLTQAY

SEQ ID NO: 3845 - protein, 459 aa, unidentified
MKTIRAYRFALDLTPRQERSVLAHAGAARVAHNWALAKVKAVLDQRAAERIYGVPEELLTPSLSWSLAGLRRAWNTAKPAVAPWWGEVSKEAFNTGLDALARGLKHWTGSRTGKRAGRQVGFPRFKSRRRSTPSVRFTTGAIRVEPDRMHVVLPRLGRLKLHESARKLARRLEAGTARIMSATVRRDGGRWHVSFTTEVDRAERTPARPASVVGVDVGIKHLAVVSTGELVDNPRHLVTAQQRLRALGRALSRKTGPDRRTRQRASKRWERASVRLGRAHARVANLRRDGLHKLTTRLTREHGTVVVEDLHVAGMLANRKLARHIADAGLAQIRRQLAYKTSWNGGRQLIADRWYPSSKTCSGCGAVKAKLALSEREYVCEACGLVLDRDLNAALNLAALAAQFDTAGSGPAAGRGADQKTRVRGQVAVKRQPGTAPAGQTGTVPPQGGTTDRALVTAR

SEQ ID NO: 3846 - protein, 462 aa, unidentified
MVIDVMVVQAYRFALDLTPRQERAVLAHAGAGRVAYNWALARVRAVMQQRAAERSYGIAESGLTPAIGWSLPALRRAWNAAKPDVAPWWAECSKEAFNTGLDALARGLKSWSDSRTGKRAGRRVGFPRFKSRRRSTPSVRFTTGAIRVEPDRKHVVLPRLGRLKLHESARKLARRLEAGTARIMSATVRRDAGRWHVAFTVEVDRVKRIPARPQGVLGVDVGLKHLAVLSTGALLPNPRHLEDAARRMRRLARRLSRRVGPDRRSGQQPSRRWERARRQVARAHARVANLRRDGLHKLTTRLAGEYGTIVVEDLNVAGMLRNRRLARRIADAGFGELRRQLAYKTTWNGGHLVVADRWYPSSKTCSACSTVKAKLALSERTFTCITCGLVLDRDVNAARNLAALAREATTAGSGPVAGRGADCKTRLGGPVAVKRQPGTAQVGKAGTVPHGGTANHMLTRAH

SEQ ID NO: 3847 - protein, 437 aa, unidentified
MVVTHAYRFALDPTPGQARALLRHAGAARVAFNWGIAQVKANLGQREAERSYGIAEAGLTPSFGWSMYSLRKAWNAAKREVAPWWAECSKEAYATGLDQLARALKNWSDSRRGKRKGPRMGFPRYKSKRKTTPSVRFTTGTIRLEDDRRHVTLPVLGTIRAHESTRKLHRRIAAGTAVVKSAAVRREAGRWFVSFSCEVERTDRTPSRADTVIGVDLGIKHLAVFSDGRPTAENPRHYDTARRKLGRLSRTAARRLGPDRRTGQQPSKRWQRADAARNRVHYRTANLRRDALHKLTTSLAREYGTIVVEDLNVSGMLRNRRLARVVADAGFGEIRRQLAYKTRWNGGTLEVADRWFPSSKTCSGCQAVTPKLPLRIRMYVCEHCGLVLDRDENAALNLAALVKRHVAGSGPETENGRGADRKTPSCGAGGSEASTPH

SEQ ID NO: 3848 - protein, 408 aa, unidentified
MAFNWGIAQVKANLGQREAERSYGIAEAGLTPSFGWSMYSLRRAWNAAKREVAPWWAECSKEAYATGLDQLARALKNWSDSRRGKRKGPRMGFPRYKSKRKTTPSVRFTTGTIRLEDDRRHVTLPVLGTIRAHESTRKLHRRIAAGTAVVKSATVRREAGRWFVSFSCEVERTDRTPSRADTVIGVDLGIKHLAVFSDGRPTAENPRHCDTARRKLGRLSRTAARRLGPDRRTGQQPSKRWQRADAARNRVHYRTANLRRDALHKLTTSVAREYGTIVVEDLNVSGMLRNRRLARVVADAGFGEIRRQLAYKTRWNGGTLEVADRWFPSSKTCSGCRAVTPKLPLRIRMYVCEHCGLVLDRDENAALNLAALVKRHVAGSGPETENGRGADRKTPSCGAGGMEASTPH

SEQ ID NO: 3849 - protein, 437 aa, unidentified
MIVRHAYRFALDPTPGQAGALLRHAGAARVAFNWGITQVKANLGQREAERSYGMAEADLTPSFGWSMYSLRKAWNTAKREVAPWWAECSKEAYATGLDQLARALENWSGSKRGKRKGPRMGFPRYKSKRKTTPSVRFTTGTIRLEDDRRHVTLPVLGTIRTHESTRKLHRRIAAGTAVVKSATVRREAGRWFVSFTCEVERTDRTPSRADTVIGVDLGIKHLAVFSDGRPTAENPRHYDTARRKLGRLSRTAARRLGPDRRTGQQPSKRWQRADAARNRVHCRTANLRRDALHKLTTPLAREYGTIVVEDLNVSGMLKNRRLARVVADAGFGEIRRQPAYKTRWNGGTLEVADRWFPSSKTCSGCQAVTPKLPLRIRMYVCDHCGLVLDRDENAALNLAALVKRHVAGSGPETENGRGADRKTPSCGAGGIEASTPH

SEQ ID NO: 3850 - protein, 453 aa, unidentified
MQAYRFALDPTPRQVGALLRHVGAARVAFSWGQAVVKANLGQREAERSYGVSEGELTLALSWSMYSLRKAWNQAKGEVAPWWAKCSKEAYAAGLDRLATSLKNFSDSTSGKRKGPRVGFPRFKSKRRSAPSVRFTTGTIRLEGRTYVVLPVLGRIKTHESTRKLARRLEAGTARIMSATVRCEAGRWFVSFTVEVEREARTPARPDAVIGVDRGVKTLAVFSDGRPAAQNPQHYKTARQKLRRLSRTVSRRQGPDRRTGRRPSNRWRRADAQRNKVHHQVTALRRDKIHKLTTGLAREYGTVVVEDLNVAGMVKNRRLARAVADAGFGEIRRQLAYRTVWNGGHLEVADRWFPSSKTCSSCGTVKTKLPLRVRTYVCETCGLVLDRDENAALNLAALVKRHVAGSGPETRNGRGADRKTPPRCRWHRNVYLARDLIPVRQGLSSSNGRITEIR

SEQ ID NO: 3851 - protein, 438 aa, unidentified
MQAYRFALDPTPRQVGVLLRHVGAARVAFNWGLAVVRANLGQREAERSYGVSEGELTPALSWSMYSLRKAWNQAKGEVAPWWAKCSKEAYATGLDRLATSLKNWSDSTSGKRKGPRVGFPRFKSKRKSTLSVRFTTGTIRLEGRTHVVLPVLGRIKTHESTRKLARRLEAGTARIMSATVRCEAGRWFVSFTVEVEREARTPARPDAVIGVDLGVKTLAVFSDGRPAAQNPKHFHTARQKLRRLSRTVSRRQGPDRRTGRRPSNRWRRADAQRNKVHHQVTALRRDQIHKLTTGLAREYGTIVVEDLNVAGMVKNRRLARAVADAGFGEIRRQLAYKTVWNGGHLEVADRWFPSSKTCSSCGTVKTKLPLRVRTYVCETCGLVLDRDENAALNLAALVKRHVAGSGPETRNGRGADRKTPPRGAGGRETSTLHGTSSR

SEQ ID NO: 3852 - protein, 521 aa, unidentified
MAFNWGITQVKANLGQREAERSYGIAEADLTPSFGWSMYSLRKAWNAAKREVAPWWAECSKEAYATGLDQLARALKNWSDSKRGKRKGPRMGFPRYKSKRKTTPSVRFTTGTIRLEDDRRHVTLPVLRTIRAHESTRKLHRRIAAGTAVVKSATVRREAGRWFVSFTCEVERTDRTPSRADTVIGVDLGIKHLAVFSDGRPTAENPRHYDTARRKLGRLSRTAARRLGPDRRTGQQPSKRWQRADAARNRVHYRTANLRRDALHKLTTPLAREYGTIVVEDLNVSGMLKNRRLARVVADAGFGEIRRQLAYKTRWNGGTLEVADRWFPSGVGGGGLQDGEADAVHVQAGPGAGGVGGGADQGLVGGEQGVDLLVEAGQAAGAQDTAVQHGRLDREIRRLRLPPLVIEVHQPGGWVGGRVEEAGEQAALFGADGAVGQGCGDRRLDDADAQQDGLDSVADPGQVGAVAQVPEGGGDAGGRRSAPGTGRWWPGRPGRTRLRRSRHQPAEASCGPARSTGGLRT

SEQ ID NO: 3853 - protein, 459 aa, unidentified
MKTIQAYRFALDLTCVQERVVLAHAGAARVAHNWALAKVKAVMDQRTAERSYGVPDEQLTPPLPWSLAGLRKAWNTAKPDVAPWWSDVSKEAFNTGLDALARGLKNWADSRKGTRAGRPLGFPRFKSRRRATPSVRFTTGAIRVEPDRMHVVLPRLGRLKLHESARKLGRRLDNGTARIMSVTVRRAGGRWHVSFTVEVERAERTPTRPQSVVGVDVGIKHLAVLSTGELVDNPRHQVAAQQRLRALGRALSRKTGPDRRTGRRPSKRWERAAARLGRAHARVANLRRDSLHKLTTRLAREQGTVVVEDLNVTGMLANRRLAWHIADAGFAEIRRQLAYKTSWNGGRLLIADRWYPSSKTCSGCGTVRAKLALHERKYQCQACGLVIDRDHNASLNLAALAAEYDTAGSGPVAARGADQKTRVRGQVAVKREPGTAPAGQTGTVPPQGRTTNRVLTKAH

SEQ ID NO: 3854 - protein, 495 aa, unidentified
MGGYRGRFVALRPPRCGEPRRPHGQSRHRRGCSGVKTVQAYRFALDLTPTQERAVLAHAGAARVAHNWTLARVKAVMDQRAAERSYGVADADLTPALGWSLPALRKAWNEAKSQVAPWWGECSKEAFNTGLDALARALKNWSDSRCGKRAGRPVGFPRFKSRRRSTPSVRFTTGTIRVEPDRKHVVLPRLGRLKLHESARKLARRLDAGTARILSATVRRDGGRWHVAFCVKVERAERSPGRPAAEVGVDLGIKHLAVLSTGEPVPNPRHLDTSARRMRRLAQRMSRRIGPDRRTGRRPSKRWEAARGQVARAHARVANLRRDGLHKLTTRLAGEYGTIVVEDLNVAGMLRNRRLARRIADAGFAELRRQLAYKTAWNGGRLVVADRWYPSSKTCSGCGAVKAKLALVERTYNCPTCGLTLDRDLNAARNLAALAHKATDARSGRESSNGRGADRKTRLSGPVAVKRQPGTASAGQAGTVPPQGGTSNHRLTKVH

SEQ ID NO: 3855 - protein, 459 aa, unidentified
MKTIQAYRFALDLTPMQERAVLAHTGAARVAHNWALARVKAVIEQRAAERTYGVSGEMLTPAMSWTLPALRRAWNAAKQDVAPWWAECSKEAYNTGLDALSRALKNWSDSRSGKRAGRPVGFPRFKSRRRTVPSVRFTTGTIRVEPDRMHVALPRLGRLKLHESARKLARRLDNGTARIMSAAVRRDGGRWHVSFCVEVERADRRPRRAGSVVGVDIGVKHLAVLSTGELVPNPRHLGNAQRRLRQLGRAAARKTGPDRRTGQRPSSRWQRAAARLGRAHVQVANLRRDGLHKLTTRLASTYGTVVVEDLNVTGMLRNRRLAQHIADAGFAEIRRQLAYKTSWNGGRLLVADRWYPSSKTCSGCGAVKTKLALSEREYQCEACGLVLDRDHNASLNLAALATEYDTAGSGPVAGRGADRKTPLAGRVAAKRQPGTAKAGKTGTVPPQGGTTKRALTKAH

SEQ ID NO: 3856 - protein, 459 aa, unidentified
MKAIQAYRFALDLTSRQERDVLAHAGAARLAHNWALAKVKAVMDQRIAERSYGVPDELLTPSLSWSLAGLRKAWNAAKPEVAPWWGEVSKEAFNTGLDALARGLKNWTDSRSGKRAGRPSGFPRFKSRRRTTPSVRFTTGAIRVEPDRMHVVLPRLGRLKLHESARKLARRIEAGTARIMSATVRRDGGRWHVSFTVEVERAERSPARPGSVVGVDVGIRHLAVLSTGELVDNPRHLVAARQRMHALGRTLSRKQGPDRRTGRRPSKRWERAASRLGRAHARVAHLRRDGLHKLTTRLATTYGTVVVEDLNVTGMLRNRRLARHVADAGFAEIRRQLAYRTGRNGGRLVVADRWYPSSKTCSGCGTVKTKLALSEREYRCEACGLVIDRDRNAAVNLAALAAATAGSGPVAARGADQKTRTRGQVAVKREPGTAQADQTGPSYRKAGLPTVRSLKPTER

SEQ ID NO: 3857 - protein, 457 aa, unidentified
MKTIQAYRFALDLTSRQERDVLAHAGAARLAHNWALAKVKAVMDQRIAERSYGVPDELLTPSLSWSLAGLRKAWNAAKPEVAPWWGEVSKEAFNTGLDALARGLKNWTDSRSGKRAGRPSGFPRFKSRRRTTPSVRFTTGAIRVEPDRMHVVLPRLGRLKLHESARKLARRIEAGTARIMSATVRRDGGRWHVSFTVEVERAERSPARPGSVVGVDVGIRHLAVLSTGELVDNPRHLVAARQRMHALGRTLSRKQGPDRRTGRRPSKRWERAASRLGRAHARVAHLRRDGLHKLTTRLATTYGTVVVEDLNVTGMLRNRRLARHVADAGFAEIRRQLAYRTGRNGGRLVVADRWYPSSKTCSGCGTVKTKLALSEREYRCEACGLVIDRDRNAAVNLAALAAATAGSGPVAARGADQKTRTRGQVAVKREPGTAQADQTGTVLPQGRTTNRALTKAH

SEQ ID NO: 3858 - protein, 367 aa, unidentified
MLKAYKYRIYPNNEQKIQIAKTFGCCRFVYNQTLAYRKEIYEKEKKSVSKTDCNNYCNRQLKKEYEWLKEVDKFALTNAIYNMDAAYQKFFKEHAGYPKFRSKHDNHKSYTTNVTNGNIAVDFEENRVKLPKLKNVKAKLHRNFSGQIKSATISQIPSGKYYVSILVETEHVELPHVNQNTGIDLGIKELCITSAGKKYENPKIIRKYEKKLVKLQRQLAHKEKRSQNYYKTKKKIALCHEKITNTRKDYLHKMSHEIISENQVIVSEDLQIKNMIKNHRLAKSISDVSWYELTRQLEYKAKWNGRKYVRIDTFYASSQLCSVCGYQNTETKNLLVREWTCPVCGTNHDRDINAAKNILEEGLRQIA

SEQ ID NO: 3859 - protein, 368 aa, unidentified
MNIAYRFRIYPNREQEVLLAKTFGCCRFLYNQMLNDKIREYEATKKMLRNTPAMYKKAYPFLKEVDSLALANVQMHLEKAYKNFFRNPKIGFPKFKSKHRSRKSYTTNVVNGNIQVEDHRIKLPKLKWIRMKKHREIAEKYCLKSVTISMEPSGKYYASLLYEKSDCENQAEEFDYEDAKILGIDYAMHGMAVFSEDIQKENEGYFRKSEERLAREQRKLSHCVKGSNNYYRQKKHVALCHEKIRNQRKDFLHKLSYEMAEAYDVVAVEDIDMKAMSQCMHFGKSVMDNSYGKFRELLEYKLTWRGKKLVRVDRFFPSSKKCCKCGSVKKELKLSDRVYLCTCGNRIDRDLNAAINIREEARRMLLAG

SEQ ID NO: 3860 - protein, 459 aa, unidentified
MKTIQAYRYALDLTPGQERNVLAHAGAARVAHNWALARVKAVMDQRTAERSYGVPEELLTPSLSWSLAGLRKAWNGAKPEVAPWWGEVSKEAFNTGLDAVARALKHWVDSRKGVRAGRPVGFPRFKSRRRTTPSVRFTTGAIRVEPDRMHAVLPRLGRLKLRESARKLARRLDNGTARIMSATVRRDGGRWHVSFTVEVERADRAPARPDSVIGVDVGIKHLAVLSTGELVDNPRHLAAARQRMRALGRALSRKTGPDRRIGRRPSARWERAAARLGRAHARVANLRRDGLHKLTTRLATTHGTVVVEDLNVTGMLAHRRLAQHITDAGFAEIRRQLAYKASWNGGRLLVADRWYPSSKTCSACGAVKTKLALHERVYECEACGVAYDRDRNAARNLAALAAEFDTAGSGPVAARGADQKTRVRGQVAVKREPGTASAGQTRTVPPQGRTTDRVLTKAH

SEQ ID NO: 3861 - protein, 365 aa, unidentified
MKLNKAYKFRIYPNENQIEIIEKSFGCSRYVYNHFLNQRNEIYKAEKRCMKYTEQQNQLPSMKKELVWLKEVDSTSLQMSLRNLDAAFKNFFEGRADRPKFKSKRNNYKTYTSNFVNNNIEIKKDKIKLPKLKYVNAKIHRYVEGRVINATVSKTSSGKYFVSICVETKIEPLKKVSGNVGIDLGLCHFAILSNGEKIQNPKYLKKSLDKLAKEQRKLSSKEKGSNNWNKQRIKVARLHERISNQRLDFIHKLSKRIISDNQVIILEDLSVKNMMKNDKLAQSISDVSWYKFVTILDYKAKWHGRKIHKINRWYPSSKTCNNCGHVLDEMPLHIREWKCPKCDSIHDRDINASRNILKQGLLEIA

SEQ ID NO: 3862 - protein, 363 aa, unidentified
MNKAYKFRIYPNENQKKIIEKSFGCSRYVYNHFLNQRNEIYKAEKRCMKYTEQQNQLPSMKKELVWLKEVDSTSLQMSLRNLDAAFKNFFEGRADRPKFKSKRDNYKTYTSNFVNNNIEIKKDKIKLPKLKYVNAKIHRYFEGRVINATVSKTSSGKYFVSICVETKIEPLKKVSGNVGIDLGLCHFAILSNGEKIQNPKYLKKSLDKLAKEQRKLSSKEKGSNNWNKQRIKVARLHERISNQRLDFIHKLSKRIISDNQVIILEDLSVKNMMKNDKLAQSISDVSWYKFVTILDYKAKWHGRKIHKINRWYPSSKTCNNCGHVLDEMPLYIREWKCPKCDSIHDRDINASRNILKQGLLEIA

SEQ ID NO: 3863 - protein, 363 aa, unidentified
MNKAYKFRIYPNENQIKIIEKSFGCSRYVYNHFLNQRNEIYKAEKRCMKYTEQQNQLPSMKKELVWLKEVDSTSLQMSLRNLDAAFKNFFEGRADRPKFKSKRDNYKTYTSNFVNNNIEIKKDKIKLPKLKYVNAKIHRYFEGRVINATVSKTSSGKYFVSICVETKIEPLKKVSGNVGIDLGLCHFAILSNGEKIQNPKYLKKSLDKLAKEQRKLSSKEKGSNNWNKQRIKVARLHERISNQRLDFIHKLSKRIISDNQVIILEDLSVKNMMKNDKLAQSISDVSWYKFVTILDYKAKWYGRKIHKINRWYPSSKTCNNCGHVLDEMPLHIREWKCTKCDSIHDRDINASRNILKQGLLEIA

SEQ ID NO: 3864 - protein, 363 aa, unidentified
MNKAYKFRIYPNENQKKIIEKSFGCSRYVYNHFLNQRNEIYKAEKRCIKYTEQQNQLPNMKKKFVWLKEIDSTSLQMSLRNLDAAFKNFFEGRADRPKFKSKRDNYKTYTSNFVNNNIEIKKDKIKLPKLKYVNAKIHRYFEGRVINTTVSKTSSGKYFVSICVETKIEPLKKVSGNVGIDLGLCHFAILSNGEKIENPKYLKKSLDKLAKEQRKLSSKERGSNNWNKQRIKVARLHERISNQRLDFIHKLSKRIISDNQVIILEDLSVKNMMKNDKLSQSISDVSWYKFVTILDYKAKWHGRKIHKINRWYPSSKTCNNCGHVLDEMPLHIREWKCTKCDSIHDRDINASRNILKQGLLEIA

SEQ ID NO: 3865 - protein, 363 aa, unidentified
MNKAYKFRIYPNENQIEIIEKSFGCSRYVYNHFLNQRNEIYKAEKRCMKYTEQQNQLPSMKKELVWLKEIDSTSLQMSLRNLDAAFKNFFEGRADRPKFKSKRDNYKTYTSNFVNNNIEIKKDKIKLPKLKYVNAKIHRYVEGRVINATVSKTSSGKYFVSICVETKIEPLKKISGNIGIDLGLCHFAILSNGEKIENPKYLKKSLDKLAKEQRKLSSKEKGSNNWNKQRIKVARLHERISNQRLDFIHKLSKRIISDNQVIILEDLSVKNMMKNDKLAQSISDVSWYKFVTILDYKAKWYGRKIHKINRWYPSSKTCNNCGHVLDEMPLNIREWKCPKCDSIHDRDINASRNILKQGLLEIA

SEQ ID NO: 3866 - protein, 363 aa, unidentified
MNKAYKFRMYPNENQIKIIEKSFGCSRYVYNYFLNQRNEIYKAEKRCMKYTEQQNQLPSIKKELVWLKEVDSTSLQMSLRNLDAAFKNFFEGRADRPKFKSKRDNYKTYTSNFVNNNIEIKKDKIKLPKLKYVNAKIHRYFEGRVINATVSKTSSGKYFVSICVETKIESLKKVSGNVGIDLGLCHFAILSNGEKIQNPKYLKKSLDKLAKEQRKLSSKEKGSNNWNKQRIKVARLHERISNQRLDFIHKLSKRIISDNQVIILEDLSVKNMMKNDKLAQSISDVSWYKFVTILDYKAKWYGRKIHKINRWYPSSKTCNNCGHVLDEMPMQIREWKCPKCDSIHDRDINVSRNILKQGLLEIA

SEQ ID NO: 3867 - protein, 363 aa, unidentified
MNKAYKFRIYPNENQIEIIEKSFGCSRYVYNHFLNQRNEIYKAEKRCMKYTEQQNQLPSMKKELVWLKEVDSTSLQMSLRNLDAAFKNFFEGRADRPKFKSKRENYKSYTSNFVNNNIEIKKDKIKLPKLKYVNAKIHRYVEDRVINATVSKTSSGKYFVSICVETKIESLKKVSGNVGIDLGLCHFAILSNGEKIQNPKYLKKSLDKLAKEQRKLSSKEKDSNNWNKQRIKVARLHERISNQRLDFIHKLSKRIISDNQVIILEDLSVKNMMKNDKLAQSISDVSWYKFVTILDYKAKWHGRKIHKINRWYPSSKTCNNCGHVLDEMPLHIREWKCPKCDSIHDRDINASRNILKKGLLEIA

SEQ ID NO: 3868 - protein, 363 aa, unidentified
MNKAYKFRMYPNENQIKIIEKSFGCSRYVYNHFLNQRNEIYKAEKRCMKYKEQQNQLPSMKKELVWLKEVDSTSLQMSLRNLDAAFKNFFEGRADRPKFKSKRDNYKTYTSNFVNNNIEIKKDKIKLPKLKYVNAKIHRYVEGRVINATVSKTSSGKYFVSICVETKIEPLKKVSGNVGIDLGLCHFAILSNGEKIENPKYLKKSLDKLAKEQRKLSSKEKDSNNWNKQRIKVARLHERISNQRLDFIHKLSKRIISDNQVIILEDLSVKNMMKNDKLAQSISDASWYKFVTILDYKAKWYGRKIHKINRWYPSSKTCNNCGHVLDEMPMQIREWKCTKCDSIHDRDINASRNILKQGLLEIA

SEQ ID NO: 3869 - protein, 363 aa, unidentified
MNKAYKFRIYPNENQIEIIEKSFGCSRYVYNHFLNQRNEIYKAEKRCMKYTEQQNQLPSMKKELVWLKEVDSTSLQMSIRNLDAAFKNFFEGRADRPKFKSKRDNYKTYTSNFVNNNIEIKKNKIKLPKLKYVNAKIHRYFEGRVINATVSKTSSGKYFVSICVETKIEPLKKVSGNVGIDLGLCHFAILSNGEKIENPKYLKKSLDKLAKEQRKLSSKEKDSNNWNKQRIKVARLHERISNQRLDFIHKLSKRIISDNQVIILEDLSVKNMMKNDKLAQSISDASWYKFVTILDYKAKWYGRKIHKINRWYPSSKTCNNCDHVLDEMPMHIREWKCPKCDSIHDRDINASRNILKQGLLEIA

SEQ ID NO: 3870 - protein, 363 aa, unidentified
MNKAYKFRMYPNENQIKIIEKSFGCSRYVYNYFLNQRNEIYKAEKRCMKYTEQQNQLPSMKKELVWLKEIDSTSLQMSLRNLDAAFKNFFEGRADRPKFKSKRDNYKTYTSNFVNNNIEIKKDKIKLPKLKYVNAKIHRYVEGRVINATVSKTSSGKYFVSICVETKIEPLKKVSGNVGIDLGLCHFAILSNGEKIENPKYLKKSLDKLAKEQRKLSSKEKGSNNWNKQRIKVARLHERISNQRLDFIHKLSKRIISDNQVIILEDLSVKNMMKNDKLAQSISDVSWYKFVTILDYKAKWYGRKIHKINRWYPSSKTCNNCGHVLDEMPLNIREWKCPKCDSIHDRDINASRNILKQGLLEIA

SEQ ID NO: 3871 - protein, 372 aa, unidentified
MIAVEKAYKFRMYPNKKQQELINKTFGCCRFVYNKYLAKRIDVYKNDKETFTYKQCSSDLTNLKKELKWLKEPDKFSLQNALKDLENAYEKFFKEKTGFPKFKSKKTNRFSYKTNFTNGNIMYCGQHIKLPKLGMVKIRDKQVPKGRILNATISKEPSGRYYVSLCCTDVDTEAFENTNNQIGLDLGIKEFCISSCGEFIENPKYLKKSLSKLAKLQRELSRKTIGSLNRNKARLKVARLQEHIANQRNDFLQKLSTKLIKENDIICIEDLQVKNMIRNHKLSRLISDVSWSEFIRQLEYKANWHGRQIVKVGKFFASSQICNKCGYKNEEVKNLNIREWICPSCNETHDRDINASINILKEGLRLITIQNK

SEQ ID NO: 3872 - protein, 372 aa, unidentified
MIAVEKAYKFRMYPNKKQQELINKTFGCCRFVYNKYLAKRIDVYKNDKETFTYKQCSSDLTNLKKELKWLKEPDKFSLQNALKDLENAYEKFFKEKTGFPKFKSKKTNRFSYKTNFTNGNIMYCGQHIKLPKLGMVKIRDKQVPKGRILNATISKEPSGRYYVSLCCTDVDIEAFENANNQIGLDLGIKEFCISSCGEFIENPKYLKKSLNKLAKLQRELSRKTIGSLNRNKARLKVARLQEHIANQRNDFLQKLSTKLIKENDIICIEDLQVKNMIRNRKLSRLISDVSWSEFVRQLEYKANWHGRQIVKVGKFFASSQICNKCGYKNEEVKNLNIREWICPSCNETHDRDINASINILKEGLRLITIQNK

SEQ ID NO: 3873 - protein, 372 aa, unidentified
MIAVEKAYKFRMYPNKKQQELINKTFGCCRFVYNKYLAKRIDVYKNDKETFTYKQCSSDLTNLKKELKWLKEPDKFSLQNALKDLENAYEKFFKEKAGFPKFKSKKTNRFSYKTNFTNGNIMYCGQHIKLPKLGMVKIRDKQVPQGRILNATISKEPSGRYYVSLCCTDVDIEAFENTNNQIGLDLGIKEFCISSCGEFIENPKYLKKSLSKLAKLQRELSRKTIGSLNRNKARLKVARLQEHIANQRNDFLQKLSTKLIKENDIICIEDLQVKNMIRNRKLSRLISDVSWSEFVRQLKYKANWHGRKIVKVGKFFASSQICNKCGYKNEEVKDLNIRDWICPSCNETHDRDINASINILKEGLRLITIQNK

SEQ ID NO: 3874 - protein, 372 aa, unidentified
MIAVEKAYKFRMYPNKKQQELINKTFGCCRFVYNKYLAKRIDVYKNDKETFTYKQCSSDLTNLKKELKWLKEPDKFSLQNALKDLENAYEKFFKEKTGFPKFKSKKTNRFSYKTNFTNGNIMYCGQHIKLPKLGMVKIRDKQVPKGRILNATISKEPSGRYYVSLCCTDVDTEAFENTNNQIGLDLGIKEFCISSCGEFIENPKYLKKSLSKLAKLQRELSRKTIGSLNRNKARLKVARLQEHIANQRNDFLQKLSTKLIKENDIICIEDLQVKNMIRNRKLSRLISDVSWSEFIRQLEYKANWHGRQIVKVGKFFASSQICNKCGYKNEEVKDLNIREWICPSCNETHDRDINASINILKEGLRLITIQNK

SEQ ID NO: 3875 - protein, 372 aa, unidentified
MIAVEKAYKFRMYPNKKQQELINKTFGCCRFVYNKYLAKRIDVYKNNKETFTYKQCSSDLTNLKKELKWLKEPDKFSLQNALKDLENAYEKFFKEKTGFPKFKSKKTNRFSYKTNFTNGNIMYCGQHIKLPKLGMVKIRDKQVPKGRILNATISKEPSGRYYVSLCCTDVDIEAFENANNQIGLDLGIKEFCISSCGEFIENPKYLKKSLNKLAKLQRELSRKTIGSLNRNKARLKVARLQEHIANQRNDFLQKLSTKLIKENDIICIEDLQVKNMIRNRKLSRLISDVSWSEFVRQLEYKANWHGRQIVKVGKFFASSQICNKCGHKNEEVKNLNIREWICPSCNETHDRDINASINILKEGLRLITIQNK

SEQ ID NO: 3876 - protein, 372 aa, unidentified
MIAVEKAYKFRMYPNKKQQELINKTFGCCRFVYNKYLAKRIDVYKNDKETFTYKQCSSDLTNLKKELKWLKEPDKFSLQNALKDLENAYEKFFKEKTGFPKFKSKKTNRFSYKTNFTNGNIMYCGQHIKLPKLGMVKIRDKQVPKGRILNATISKEPSGRYYVSLCCTDVDIEAFENANNQIGLDLGIKEFCISSCGEFIENPKYLKKSLNKLAKLQRELSRKTIGSLNRNKARLKVARLQEHIANQRNDFLQKLSTKLIKENDIICIEDLQVKNMIRNRKLSRLISDVSWSEFVRQLEYKANWHGRQIVKVGKFFASSQICNKCGHKNEEVKNLNIREWICPSCNETHDRDINASINILKEGLRLITIQNK

SEQ ID NO: 3877 - protein, 372 aa, unidentified
MIAVEKAYKFRMYPNKKQQKLINKTFGCCRFVYNKYLAKRIDVYKNDKETFTYKQCSSDLTNLKKELKWLKEPDKFSLQNALKDLENAYEKFFKEKTGFPKFKSKKTNRFSYKTNFTNGNIMYCGQHIKLPKLGMVKIRDKQVPKGRILNATISKEPSGRYYVSLCCTDVDIEAFENTNNQIGLDLGIKEFCISSCGEFIENPKYLKKSLSKLAKLQRELSRKTIGSLNRNKARLKVARLQEHIANQRNDFLQKLSTKLIKENDIICIEDLQVKNMIRNHKLSRLISDVSWSEFIRQLEYKANWHGRQIVKVGKFFASSQICNKCGYKNEEVKDLNIRDWICPSCNETHDRDINASINILKEGLRLITIQNK

SEQ ID NO: 3878 - protein, 372 aa, unidentified
MIAVEKAYKFRMYPNKKQQELINKTFGCCRFVYNKYLAKRIDVYKNDKETFTYKQCSSDLTNLKKELKWLKEPDKFSLQNALKDLENAYEKFFKEKAGFPKFKSKKTNRFSYKTNFTNGNIMYCGQHIKLPKLGMVKIRDKQVPKGRILNATISKEPSGRYYVSLCCTDVDIEAFENANNQIGLDLGIKEFCISSCGEFIENPKYLKKSLSKLAKLQRELSRKTIGSLNRNKARLKVARLQEHIANQRNDFLQKLSTKLIKENDIICIEDLQVKNMIRNRKLSRLISDVSWSEFVRQLEYKANWHGRQIVKVGKFFASSQICNKCGHKNEEVKNLNIREWICPSCNETHDRDINASINILKEGLRLITIQNK

SEQ ID NO: 3879 - protein, 372 aa, unidentified
MIAVKKAYKFRMYPNKKQQELINKTFGCCRFVYNKYLAKRIEVYKNDKETFTYKQCSSDLTNLKKELKWLKEPDKFSLQNALKDLENAYEKFFKEKTGFPKFKSKKTNRFSYKTNFTNGNIMYCGQHIKLPKLGMVKIRDKQVPKGRILNATISKEPSGRYYVSLCCTDVDIEAFENANNQIGLDLGIKEFCISSCGEFIENPKYLKKSLSKLAKLQRELSRKTIGSLNRNKARLKVARLQEHIANQRNDFLQKLSTKLIKENDIICIEDLQVKNMIRNRKLSRLISDVSWSEFVRQLEYKANWHGRQIVKVGKFFASSQICNKCGHKNEEVKNLNIREWICPSCNETHDRDINASINILKEGLRLITIQNK

SEQ ID NO: 3880 - protein, 423 aa, unidentified
INNLCKNRRNYGDSLWRISKTYVSMQNSMKQEPCDFSHGRFRTGIIFIGITSVMSAFLQIKENFIVVGFGSIPYNIVIIISIMLSTIFGPYILPIGAVVAMVVQLLFYMFFVKKTNYKYLYYLNFKDDSLIKLLALLSPVFIGVAVNQVNSLVDTTLASTLVKGSIPALTYADRLNGFVTGTFTASIVSVMYPMLSKLSAENNQKKFTSSVKSSINMIIISMIPISVASIFFATPVVRIIFERGAFDARATQMTATALIFYAVGMTAFGLRDILGKVFYSLQDTKTPMVNGIISVGVNIVLDLVLIKPMAHGGLALATSSSSIACILLLFLNLKRKVGYFGQDKIIKATLKSVVASLIMGVLSYFTYKFIFGILGVGTFNEFVSLAISVIVGGGIYTLLMTIFKVEEVDMILNIAKRKLHLKK

SEQ ID NO: 3881 - protein, 365 aa, unidentified
MKINKAYKFRLYPNKKQIEVIEKSFGCSRFIYNHFLNQKNEVYKDEKRCVKYTEQQNLLPSMKKEFVWLKEIDSTSLQMTLRNLDNAFKNFFHGRADRPKFKSKRDNYKAYTSNFVNNNIDIKKDKIKLPKLKWVKTKIHRYVEGRIINATVTKTPSGKYFIAICVETEIDTLEKVIGNIGIDLGICHFAILSNGEKIENPKYLKKSLNKLAKEQRKLSSKQKCSNNWNKQRVKVARLHEHISNQRLDFIHKLSKRIVSENQVIVLEDLAVKNMMKNDKLAQSISDVSWYKFVTMLDYKGKWYGRKIYKIDRWYPSSKTCNNCGYILDEMPLQIREWICPKCDSIHDRDINASKNILKQGLLEIA

SEQ ID NO: 3882 - protein, 365 aa, unidentified
MKINKAYKFRLYPNKKQIELIEKSFGCSRFIYNHFLNQKNEVYKDEKRCVKYTEQQNLLPSMKKEFVWLKEIDSTSLQMTLRNLDNAFKNFFHGRADRPKFKSKRDNYKAYTSNFVNNNIDIKKDKIKLPKLKWVKTKIHRYVEGRIINATVSKTPSGKYFVSICVETEIELLEKVTQNIGIDLGLCHFAILSNGEKIENLKYLKKSLNKLAKEQRKLSSKQKGSNNWNKQRVKVARLHERVANQRLDFIHKLSKRIAYENQVIVLEDLAVKNMMKNDKLAQSISDVSWYKFVTMLEYKAKWCGRKIHKIDRWYPSSKICNNCGYVLEEMPLHIREWECPKCNTIHDRDINASMNILKQGLLEIA

SEQ ID NO: 3883 - protein, 365 aa, unidentified
MKINKAYKFRLYPNEKQREVIEKSFGCSRFIYNHFLNQRNEVYKDEKRCVKYTEQQNELPSMKNEFVWLKEVDSTSLQMTLRNLDTAFKNFFEGRADRPKFKSKRYNYRTYTSNFVNNNIDIRKDKIKLPKLKWVKVKIHRYVEGRIINATVSKTPSGKYFVSICVETETEPLEKVTENIGIDLGLCHFAILSNGEKIDNPKYLKKSLNILAKEQRKLSSKEKGSNNFHKQRVKVARLHERVANQRLDFIHKLSKRIAYENQVIVLEDLAVKNMMKNDKLAQSILDVSWYKFVTMLDYKAKWCGRKIHKIDRWYPSSKSCNNCGHVLEEMPLHIRAWKCPKCDRIHDRDINASKNILKQGLLEIA

SEQ ID NO: 3884 - protein, 460 aa, unidentified
MIEEKRNKIKNSLRITKERRKTQDVIILKLKIDNDKLNNNTIKALNTIFLEAKWLYNYVINKEFNNDIFNIDPKIKNVQVYVIDHYETRKLKYLSSQMKEEIINRAMDNIRGLHKLKEKGLKIGKLKFKSFITSIPLNQYTITYKIINNNYIKIQNIKQLLKVNGLDNLECYYEPASALLINKNSNYYINITAYKNKYILEKPVNNQKIISFDLGIKNQLTCSNGSILNYNIPKSRKEIRLQRSLSRKAKYAEGTKKLSRGQSRNYYKNKNKLNKEQNKTMNKRKDTINKITHYLTSNYDIVVTQNDNIRGWKYLFGKRIESTGIGGIIDALKHKASTLILIDRFIPTTKECSKCHNKYDIKLDERIYQCHNCGFIIDRDYNSSLNMIYYGTIKLNELLKIKNKKLNNYFKKYNINLNVPMERRELTPVEIIASGFEGLNISPYVKLSMVNEAGSLYALA

SEQ ID NO: 3885 - protein, 468 aa, unidentified
MRKRAMMPEERRNKIKNSLRITGERRKTQDVIILKLKIDNDKLNNNTIKALNTMFLEAKWLYNYILNKEFNNDIFNIDSKIKNVNVYVKDHYETRELKYLSSQMKQEIINRAKDNINGLHKLKEKGFKVGKLKFKSFITSIPLNQYTITYKIINNNYIKIQDIKQLLKVNGLDNLECYYEPANALLINNNNNNYYINITAYKNKYILEKPVNNQKILSFDLGIKNQLTCSNGLILNYNIPKSKKEKRLQRSLSRKAEYVEGSKNKLSKKQSKNYYKNKNRLNREQDRTKNKRKDTINKITHYLTSNYDIVVTQNDNISGWQRLFGKKIESTGIGGIIDALKHKASTLILIDRFIPTTKECSNCHNKYNIKLDERIYKCPNCGFIIDRDYNSALNMIYYGIIKLNELLKIKNKKLNNYFKKYNINLNVPMERRELTPVEIIASGFEGLNISPYVKLSMVNEAGSLYALA

SEQ ID NO: 3886 - protein, 461 aa, unidentified
MIETKRNKIKNSLRITRERRKTQDVIILKLKIDNDKLNNNTIKALNTIFLEAKWLYNYVINKEFNNDIFNIDPKIKNVNVYVKDHYETRKLKYISSQMKEKIINRAMDNIRGLHKLKENGFKVGKLKFKSFITSIPLNQYTITYKIINNNYIKIQNIKQLLKVNGLDNLECYYEPASALLINKNSDYYINITAYRNKYILEKPVNNQKIISFDLGIKNQLTCSNGSILNYNIPKSRKEIRLQRSLSRKAKYAEGSKNKLSKKQSKNYYKNKNKLNKEQTKTANKRKDTINKIVHYLTSNYDIVITQNDNIRGWKHLFGKRIESTGIGGIIDALKHKASTLILLDKFIPTTKECSNCHNKYDIKLDERIYNCPKCGFIIDRDYNSALNDMYYGIKKLNELLKIKNKKLNNYFKKCNINLNVPMERRELTPVEIIASGFEGLNISPYVKLSMVNEAGSLYALA

SEQ ID NO: 3887 - protein, 385 aa, unidentified
MIKTQVVKLKVNKTMQKHLDALCDYRRYCWNKGLETWQLMYEAHTLNKKDNPSPNERRVRDELVANKADWQYDLSARCLQLAIKDLANAWKNFFDKSQPDWGIPSFKSKKAPRQGFKTDRAKIVNGRLRLDRPRSISKADWFDLKSYEALKMNEVKVISIFKEKGAYYAALTYEEEPISKTKTHQKTAVDVNVGHFNYTDGKINVLPAKLQKLYKRIKHYQRMLARKREVNGKLATKSNNYFAVRTKLQRDYRKVANIQNDLLQQFTTKLVDNYDQIVIEDLAVKQMMMTHVASKGMQRSLFSRFRQILTYKCNWYGKELILADKTYPSTQRCAACGYVKKGEEKITLQGNKKHGTKHNEYICYECGYKNDRDKNAVLNLLALAR

SEQ ID NO: 3888 - protein, 385 aa, unidentified
MIKTQVVKLKVNKTIQKHLDALCDYRRYCWNKGLETWQLMYEAHTLNKKDNPSPNERRVRDELVANKADWQYDLSARCLQLAIKDLANAWKNFFDKAQPDWGIPSFKSKKAPRQGFKTDRAKIVNGKLRLDRPRSISKADWFDLKSYEALKMNEVKVISIFKEKDSYYAALPYEEEISSKAKNHQKTAVDVNVGHFNYTDGKINVLPAKLQKLYKRIKHYQRMLARKREVNGKLATKSNNYFAVRTKLQRDYRKVANIQNDLLQQFTTKLVDNYDQIVIEDLAVKQMMMTHVASKGMQRSLFSRFRQILTYKCNWYGKELILADKTYPSTQRCAACGYVKKGEEKITLQGNKKHGTKHNEYICYECGYKNDRDKNAVLNLLALAR

SEQ ID NO: 3889 - protein, 385 aa, unidentified
MIKTQVVKLKVNKTMQKHLDALCDYRRYCWNKGLETWQLMYEAHTLNKKDNPSPNERRVRDELVTNKADWQYDLSARCLQLAIKDLANAWKNFFDKAQPDWGIPSFKSKKSPRQGFKTDRAKIVNGKLRLDRPRSISKDSWHDLSSYEVLKMSEVKVVSIFKEKGAYYAALTYEEEPISKTKTHQKTAVDVNVGHFNYTDGKINVLPAKLQKLYKRIKHYQRMLARKREVNGKLATKSNNYYAVRIKLQRDYRKVANIQNDLLQQFTTKLVDNYDQIVIEDLAVKQMMMTHVASKGMQRSLFSRFRQILTYKCNWYGKELILADKTYPSTQRCAACGYVKKGEEKITLQGNKKHGTKHNEYICYECGYKNDRDKNAVLNLLALAR

SEQ ID NO: 3890 - protein, 419 aa, unidentified
MNYNYRYRLKPTESQCETLDYHRDTCRQLYNHALYRFSQIPESEGTVKQRVRTIRDELPDLKDWWDALTDIYSKVLQPTVMRIAKNIKALGQLKEQGYKVGELRWKSPREFRSFTYNQSGFELDKKGGQTVLSLSKLADIPIELHRPLPDDATVKQVTLKKEKAGEWFAIFGMEMDAEPPAKPPLEDINIDEMVGIDVGILKYAHDTDGTAVESLDLSEERDRLEREQRKLSRKEHGSNNWENQRRRVAECHLQIKRKQRDFLHKLSNYYAREYELVAVEDLDVKDMLESPRNSRNTASAAWNTFTDMLEAKCEREGTHFVEVEPEGTTKECAQCGVETEKPLWVREHSCPACGFEADRDANAAWNILFRGLTDLGVGHSEGTPVETALPTDTHSVSAKRVVEAGSPTLSERVSASRVG

SEQ ID NO: 3891 - protein, 432 aa, unidentified
MAEQIEEVPAELIQTRVYELHPNKTMRRVLDEACDYRRYCWNQGLALWNKMYKARQALKSSLASDSKKLTEEQKVLLKEKPSPSERRVRNMLVTDKKDWQYTQSARILQLAISDLGKAWNNFFDKAQPGWGKPKFRSKREARQGFKSDRSKIKDGILYLERAKESSVPKDQWRGFKLSEEPLSDEFGVVSYFKEKGRYYVAIPYKIKAEDVKLPDKTGKATAVDVNVGHFDYTGGRVNVLPKKLDRIYKKIKHYQRQLAKKQVKNGEAACESENYLKTKAKLQACYRKASNIQNDFMHKFTTELVNDYDKIVIENLSVKGMLMSHVASKGVHRSMFGKFKQILTYKCDWYGKELILANKLYPSTQRCAACGNVKKGDDKITLYGNKKHGTKHNEYVCYNEKCPNYNKVVDRDKNAMLSLLALTEHPELNHAL

SEQ ID NO: 3892 - protein, 432 aa, unidentified
MAEQVKEAPAELIQTRVYELRPNKTMRKVLDEACDYRRYCWNQGLALWNEMYKARQTLKSSLSTDSKKLTEEQKVLLKDKPSPSERRVRNMLVADKKDWQYTQSARILQLAISDLGKAWNNFFDKAQPGWGKPKFRSKREARQGFKSDQSKIKDGILYLERAKESSVPKDQWRGFKLSEKPLSDEFGVVSYFKEKGRYYVAIPYKIKAEDIKLPDKTGKATAVDVNVGHFDYTGGRMNVLPKKLDKIYGKIKHYQRQLAKKQVKNGEAACESENYLKTKAKLQACYRKASNIQNDLMQKFTTELVNNYDKIVIENLSVKGMLMSHVASKGVHRSMFGKFKQFLTYKCDWYGKELILANKLYPSTQRCAACGNVKKGDDKITLYGNKKHGTKHNEYVCYNQKCPNYNKVVDRDKNAMLSLLALTEHPELNHAL

SEQ ID NO: 3893 - protein, 413 aa, unidentified
MYYAYKYRLKPSDAHREALDRHRDICRQLYNHTLNRLNEYQDEHGELPSMTTLRSELPDLKKWWDGLSDVYSKVLQTVVERLFDNLKGLSALKKNGHGVGQLKWKPPREFRSFTYSQSGFKLDKKGGQTVLSLSKLADIPIRLHRAIPDDATLKQVTVKKEPTGEWFATFGVQMDREPPEPPENPEKCVGIDVGILKYAHDTDGTAVGSLDLTDKRERLEREQRKLSRKQHGSNNYEKQRRRVAECHANLRQKRRDFLHKLSAYYAREYDLVAVEDLNVKGMMESPANSRNTASAAWRTFLSLLEYKCEREGAHFVAVDPRGTTKECASCGVSTEKPLWVREHSCPACGFEADRDANAAWNILSRGLGDVGVGHSESTPVETALPVDTAVSAKRVLEAGSPTLKERAASAVSE

SEQ ID NO: 3894 - protein, 434 aa, unidentified
MTIIALDKKRKIKESLKKTKEKRKNQIPKVYKLKISCSNLNKEQKHWLERVFLEAKWLYNYTVADIENRLNPQTEKIKQVEVKTPQGIETRELTCLSSQMKQGIMDRIKKNLTDLSRAKRKGIKVGRLKFKSDYRNIPLKQNGITFKVLKDKNRIKLQGLKKPLRVLGLHQLPENCDIAKAELIKRPDGYYIHLTCYIDKDRIKHEKINKPIGIDFGIKHQLTLSNGVKINYRIGETQRLKRLQKKLSRQQKGSKNYQKTKHKIQREHQKIYNRRKDIKNKILSLLKRYEYVLIQEEQIKNWHSGLFGKQVQNTGIGGIISMLKQNIETLIPVDRYKATTKMCSRCGSRKEDITLSDRTYKCESCGLVIDRDFNSAVNILKIGLSKVETTTVKNLPTDCGEVTPVEREATARIFKGNPYIRVSYTSVKQEARLL

SEQ ID NO: 3895 - protein, 369 aa, unidentified
MLRAYRTEINPSFEQRQTINQTIGTCRWMYNKFIETNQNFHKTGQSYMNGYAFSKWMNNVYLPNNPDKHWIKQSASKAVKQSIMNAHRAYQTFFKNKKGYPKFKKKSGIGSYYLIGTIHVQRHRIQLPKLGWIKLKEKSYIPTNNIKSATIVKEYDRYYVSVLVDQLPSPIFKPKQTDGIGIDLGLKEAVFTPSGVKIRSFKTNQTIVKLDKSLKRQQRKLSRKKKGSHNWYKQLLKLQRIYRRIKNIKRNIKHKGILSIVRTNPQFITIENLNIKGMMRNKRLANSFQQIGLGYIVEWLKIKCQDYGIELRQVDRFYLSSQICSDCGYIQPMPLNQRTYHCHHCGMIKDRDINASINLKQATDYTVIV

SEQ ID NO: 3896 - protein, 432 aa, unidentified
MHYTYRFRLDPTPEQRELLDHHRDTCRQLYNHALNEFKQIPKSAGTLNQRVRQVRDQLTSLKDWWDELNDVYSTVAQAAVMRIEDSIKALSQLKQNGYNVGSLNWKAPKDFRSFTYIQSGFEFDSKNGQPVLSLSKLADIPLIKHRAIPDAETVKEITIKKESTGEWFASFTVGDKETPEKPTDPDRCVGIDVGILKYAHDTDGTAVESLDLSDERERLERAQHDLSQKERGSANWERQRQVVAERHADLKRKRRDFLHKLSNYYATEYDLVAVEGLDAKELVELPGNSRNRAGAAWGTFLRMLEYKCEREGTHFAEVDPRNTTKACASCGVKTDKPLWVREHSCPSCGFEADRDANAAWNILSRGLKNIGVVHSESTPVETALPTDTVVSAKRVIETGSPITRSQRLRVSSQNSESSDDTLKERTASAVSE

SEQ ID NO: 3897 - protein, 419 aa, unidentified
MHYAYRFRLKPTAEQRETLDHHRDTCRQLYNHALRDFNKIPDSAGTLNQRVRQVRDQLTDLKDWWDELNDLYSTVAQAAVMRIEDSITALSELKEKGYNVGSLNWKAPREFRSFTYVQSGFEFDKKNGQTVLSLSKLADIPIECHRQIPEDETVKEVTLKKEPTGEWYASFTVDDKDEPAKPSLEDVDADEMVGIDVGILKYAHDTDGTAVGSLDLSEDRDRLEREQRNLSRKEHGSNNWEKQRQAVAECHLDIKRKRRDFLHTLSNYYAREYDLVAVEDLDVKGMLESPRNSRNTASAAWSTFTDMLEYKCEREGTHFVDVDPDGTTKECAQCGVKTDKPLWVREHSCPACGFEVDRDANAAWNVLSRGLSKLGVGHSELTPVETALPTGTAVVPAKRVVEAGSPCLKEPPTAASRQG

SEQ ID NO: 3898 - protein, 369 aa, unidentified
MLKAYKTEIQPNETQLKIIHQTIGTCRWIYNKFIEINQIRYENKLKYMNGYNFSKWLNNEFIPNNPDKLWIKESASKAVKQSIMNAHRAYQDAFKKQKGFPKFKKKQSTGSYYLIGNIHCERHRIKLPKLGWIRLKEKGYIPNCNIKSTTVSKEFDRYYVSVLVDERPKSIFKSLQTEGIGLDLGLKDTLFTPNGVCIKDLRKNKRLIILNKSLKRQQRKLSRKKKKSNNWFKQLLKVQRLYRKIKHIKQDIKRKSILSIVQKNPQYITIENLNIKGLTKNRNLSNAFQQVGLGYIVEWLKQKCYEYGIELRQVNRFYPSSQLCSQCNHRQKMPLHKRIYKCEQCGFEIDRDINASINLKQALDYTVIV

SEQ ID NO: 3899 - protein, 298 aa, unidentified
MTIKTQVVKLKVNKTMQKHLDALCDYRRYCWNKGLETWQLMYEAHTLNQKDNPSPNERRVRDELVANKADWQYDLSARCLQLAIKDLANAWKNFFDKSQPDWGIPSFKSKKAPRQGFKTDRAKIVNGKLRLDRPRSISKEPWFDLKSYEALKMDEVKVVSVFKEKDNYYAALPYEEEIELKAKTQQKTAVDVNVGHFNYTEGQINILPAKLQKLYKRIKHYQRMLARKREVNGKLATKSNNYFAVRTKLQRDYRKAANIQNDLLQKFTTKLVNNYDQIVIEDLAVKEMMMTHVASKGM

(The sequence listing continues in the following parts.)
